United States Patent Application Publication US 2018/0126003 A1 - sequence listing, part 183

SEQ ID NO: 325601 - DNA, 444 bp, Artificial Sequence
  derived and/or modified sequence
atgggcgccaccggcctgggcttcctgctgtcctggaggcaggacaacctgaatggaacagactgccagggctgcaacatcctgtacttcagcgagaccaccggctccatgtgcagcgagctgagcctgaacagaggcctggaggcccggaggaagaaggacctgaaggacagcttcctgtggaggtatggcaaggtgggctgcatcagcctgcccctgcgggagatgacagcctggatcaaccccccccagatcagcgagatcttccagggctaccaccagagggtgcatggagcagatgccctgagcctgcagaccaacagcctgcggagccggctgagcagccagtgcctgggccagagcttcctgctgcggaccctggagcggggccggggcttccgggccctgggggacatctgtggccacgtgcatgaggaggactag

SEQ ID NO: 325602 - DNA, 216 bp, Artificial Sequence
  derived and/or modified sequence
atgggcgccaccggcctgggcttcctgctgagctggcggcaggacaaccttaacggcaccgattgccagggctgtaacatcctttactttagtgagacaaccggttccatgtgctccgaattgagcttaaacagaggcctagaagccaggcggaaaaaggatcttaaggactcatttctgtggcgcgatggtgtctcgccctgtctgccatgctag

SEQ ID NO: 325603 - DNA, 444 bp, Artificial Sequence
  derived and/or modified sequence
atgggcgccaccggcctgggcttcctgctgagctggcggcaggacaacctgaacgggaccgattgccaaggctgcaacatcctctactttagtgaaacaaccggctcaatgtgttcggaattgtctctcaatagaggcctggaggcccggagaaagaaggacctgaaggactccttcttgtggcgctacggcaaggtggggtgcatcagtctgcccttgcgggagatgaccgcatggatcaacccgccacagattagcgaaatctttcaaggttaccatcagagggtgcacggagccgatgcattgtctctccagactaatagcctgcgaagtaggctctcatcccaatgtttaggccagagcttcctgctgcgtactctggagaggggccgcgggtttagagcgctgggtgatatatgcggtcacgtccacgaggaggactag

SEQ ID NO: 325604 - DNA, 444 bp, Artificial Sequence
  derived and/or modified sequence
atgggcgccaccggcctgggcttcctgctgagctggcggcaggacaatttgaacgggacagattgtcaagggtgtaatatcctgtattttagtgaaaccaccgggagcatgtgtagcgagctaagcctgaaccgcggtctggaggccagaagaaaaaaagatctgaaagattcattcctgtggagatacggtaaggtcggttgcatatctttgccattgagggagatgaccgcttggattaacccccctcagatatctgaaatttttcaaggctatcaccagagggtgcacggggccgatgccctcagtttacagaccaattctctgagaagtagactgtcttctcagtgtctcgggcagtctttcctgctccgtaccttggaacggggaagaggatttcgcgccctgggtgatatctgtggccacgtgcatgaggaagactag

SEQ ID NO: 325605 - DNA, 216 bp, Artificial Sequence
  derived and/or modified sequence
atgggcgccaccggcctgggcttcctgctgagctggcggcaggacaatctgaatggcaccgattgccaaggttgcaacattctgtacttcagtgagacaaccggaagtatgtgcagtgagctgtctttgaatcggggattggaagcacgacgcaaaaaggacctgaaggattccttcctctggcgtgatggagtgtctccttgcctgccatgttag

SEQ ID NO: 325606 - DNA, 216 bp, Artificial Sequence
  derived and/or modified sequence
atgggtgcaacagggttagggttcttactgtcgtggcggcaggacaacttgaacggaactgactgccagggctgcaatatcctgtattttagcgaaaccaccggctccatgtgttccgaactcagtctgaaccggggtctggaggctcggagaaaaaaggatctcaaggactccttcttgtggcgagatggtgtgtctccctgcctcccatgctag

SEQ ID NO: 325607 - DNA, 444 bp, Artificial Sequence
  derived and/or modified sequence
atgggagcaacaggattggggttcctgctctcatggaggcaggataatttgaacggcactgactgccagggctgcaatatcctgtatttctccgaaacgaccggctccatgtgcagtgaactcagtctaaacagagggctggaggcgagaagaaagaaagacctgaaagactcgtttctctggaggtatggaaaagtggggtgtatcagccttccactgagagaaatgacagcttggattaaccctccccagatttcagagatatttcagggttaccaccagcgggtccacggtgctgatgcgctgtccctgcagactaactccttaaggtcccgcctttcctcccagtgtctcggccagtccttcttgctgcggacgctggaaagaggtcgtggattccgggctctaggcgacatctgtggccacgtccatgaagaggactag

SEQ ID NO: 325608 - DNA, 444 bp, Artificial Sequence
  derived and/or modified sequence
atgggcgcaaccggcctaggcttcctgttatcctggcggcaggataatctgaacggcacagattgccagggatgcaatattttatacttctctgaaactacagggtctatgtgctccgaattgtctctaaaccgcggactcgaagccaggcggaaaaaggaccttaaggattcgttcctttggagatacgggaaagtgggctgcatcagcctgcccctgcgggagatgactgcatggattaatcccccacagataagcgagattttccaagggtaccatcagcgcgttcacggagcagacgctctttcactgcagaccaactcactgcggtcgcggctaagcagccagtgcctaggtcagagcttcttgctccgaaccctggagcgaggtagggggtttagagctttaggtgatatatgtggtcacgtgcatgaggaggattag

SEQ ID NO: 325609 - DNA, 216 bp, Artificial Sequence
  derived and/or modified sequence
atgggcgcaacagggctgggttttctcctttcctggagacaggataatttaaatggaacagactgccaaggatgtaatatcctgtattttagcgaaactacggggagcatgtgctcagagttatctttgaaccgcggactcgaggctagacgcaagaaagacttaaaggatagcttcctgtggcgcgacggagtgagtccttgcctcccatgctag

SEQ ID NO: 325610 - DNA, 252 bp, Artificial Sequence
  derived and/or modified sequence
tgggcctcaacaatcccaagagaccactcaaggacaatgggagccactgggcttggctttctactttcctggagacaagacaatttgaatggcactgactgccagggatgcaatattttatacttctctgagactacggggagcatgtgttctgaactttccttgaacagaggtcttgaggccagaaggaagaaggatcttaaagactcatttctctggagagacggggtttcaccatgtttaccatgctga

SEQ ID NO: 325611 - DNA, 1063 bp, Artificial Sequence
  derived and/or modified sequence
agagacatgaataaaatgggcctcaacaatcccaagagaccactcaaggacaatgggagccactgggcttggctttctactttcctggagacaagacaatttgaatggcactgactgccagggatgcaatattttatacttctctgagactacggggagcatgtgttctgaactttccttgaacagaggtcttgaggccagaaggaagaaggatcttaaagactcatttctctggagatatgggaaggttggctgtatctcacttccacttcgtgagatgaccgcctggattaacccaccccaaatttcagagattttccaaggctaccaccagagggtgcacggagctgatgcactgagcctgcaaaccaactctctgagaagcaggttatcttcacagtgcctcggacagagcttccttctcaggacactcgagagaggccgtggtttcagggcacttggggacatctgtggccacgttcatgaagaagactaagcctacttcatctcaggacccgcccaagagtggccgcggctttgggacacctggggtcgggtccaccatgaggataaaacctccttctcttctggacatgtccaggagtggccgttgctacaagtcacctggtgctacgaccagggtgagaataaagacgtctcctcaggaccctcccaggagagtacatggcattgagacatctggcggccaagtgaggaaaagacaccctgtctgcagcacccagaactgaggaggggcactgccctgggccttacttcccagccctggcctccaattctgaccttacaaaagtgtcccttgagtgaggcagtgaccacgcattgtcacagctaccaaagtgtggtttgcagatgatctgggcttgtttctggcggagattctggtacagagaaaggagaggcgctgagtggaaccacgatgggctgaggccaggggagacatcgcaacctccaacaacactttttttcatgctttaataactcatttttcttagagaactaaagtagttgaaacaatatagaaacattttttaagtaggcatat

SEQ ID NO: 325612 - DNA, 444 bp, Artificial Sequence
  derived and/or modified sequence
atgggcgcgacaggcttgggcttcttgctatcttggcgccaggataatttgaacggcacagattgtcagggttgcaatatcctgtacttttctgagactaccggcagcatgtgtagtgagctgtccctgaaccggggtctcgaagctaggcgaaaaaaggacctgaaagacagttttctgtggcgctacggaaaagtgggctgtatctctctccccttgagggagatgacagcatggatcaacccgccacaaataagcgagatatttcagggatatcatcagagagtgcacggggccgatgcactgtccctgcagaccaatagcctccggtcacgtctaagttctcaatgcctcggccaaagttttctcctgaggacgcttgagaggggccgggggttccgagcactgggagatatctgtgggcacgtgcacgaggaggactag

SEQ ID NO: 325613 - DNA, 216 bp, Artificial Sequence
  derived and/or modified sequence
atgggtgccacaggtttgggttttctgctgtcctggaggcaggacaatctcaacggcaccgactgtcaaggctgtaacattctctacttcagtgaaactactggatctatgtgcagcgaactttctctcaacagaggactcgaggcccggcgcaagaaggatttaaaagatagcttcctgtggagggatggagtcagcccatgtctaccgtgctag

SEQ ID NO: 325614 - DNA, 444 bp, Artificial Sequence
  derived and/or modified sequence
atgggagcgacaggactcgggttcctgttgtcttggcgccaggacaaccttaatggcacagattgtcagggctgtaatattctatattttagcgaaaccactggcagcatgtgctctgaactgtcccttaacaggggtctagaggcacgacgcaaaaaggacttgaaggattctttcctgtggagatacgggaaagtcgggtgtattagtctccctttaagggaaatgacggcctggattaacccccctcagatcagcgagatcttccagggataccaccagcgcgttcacggcgcggatgccctctccctccagacaaactccctgaggagccggctttctagccagtgtctcggtcagtctttcttgctgagaaccctagaacgcggccgcgggtttcgcgcattaggtgatatttgcggccacgtccatgaggaggactag

SEQ ID NO: 325615 - DNA, 216 bp, Artificial Sequence
  derived and/or modified sequence
atgggggccaccggcctcggattcttgttaagctggaggcaggataacctcaacggcacagactgccagggttgcaacattctgtacttctccgagacgaccggttctatgtgtagcgaacttagtcttaaccgtggcctggaggcaagacgaaagaaggatctgaaggactcgttcctctggagagatggtgtgtccccctgtctcccttgctag

SEQ ID NO: 325616 - DNA, 444 bp, Artificial Sequence
  derived and/or modified sequence
atgggcgccaccggcctgggcttcctgctgagctggcggcaggacaatttgaacggcaccgattgtcaggggtgcaatatcttgtacttctccgaaaccaccggcagtatgtgctctgagctctctctgaaccggggactggaagctcgcagaaagaaggatctgaaagatagctttttatggcgttacgggaaagtgggctgtatctcgctgccacttagggaaatgacagcatggatcaatcctcctcaaatttccgaaatcttccaggggtaccatcaacgagtacacggcgcggacgctctctctttgcagaccaactccctacgctcgagattgtccagccagtgcttaggccagtcgttcttacttagaactcttgaacggggcaggggcttccgtgcactcggcgatatttgtggtcacgtgcacgaggaagattag

SEQ ID NO: 325617 - DNA, 216 bp, Artificial Sequence
  derived and/or modified sequence
atgggcgccaccggcctgggcttcctgctgagctggcggcaggacaatttaaatgggactgattgccagggctgcaacatcctgtatttctctgaaacaaccgggtcaatgtgctcagagttgagtttaaatcgtggacttgaggcaagaagaaagaaggacttgaaggactcctttctctggagggacggagtgtccccttgtctgccgtgctag

SEQ ID NO: 325618 - DNA, 444 bp, Artificial Sequence
  derived and/or modified sequence
atgggcgccaccggcctgggcttcctgctgagctggcggcaggacaaccttaacggcacagactgtcagggttgcaatatcctgtacttttcagagacgactggcagcatgtgttccgagctgtctctcaatcgaggtttagaagctagaagaaagaaggacctcaaggattcatttttgtggagatatgggaaagtcggctgtatctcccttcctctgcgcgagatgaccgcatggattaatccgcctcaaatatctgagatttttcaggggtatcaccagcgggtccacggcgcagacgcactgtcccttcaaacaaatagtttgagatctaggcttagctcccagtgcttgggccagtcattcctgttaagaactcttgaaagaggacgcggattccgtgccctcggcgatatttgcggtcacgttcacgaggaggattag

SEQ ID NO: 325619 - DNA, 216 bp, Artificial Sequence
  derived and/or modified sequence
atgggcgccaccggcctgggcttcctgctgagctggcggcaggacaacctaaacggaacagattgtcagggttgcaatatcctttacttctccgaaactacgggctctatgtgcagcgagctatcgctgaaccgtggactagaagcgaggcgcaaaaaagatttaaaagatagcttcctgtggagagacggggtgtcgccatgcttgccgtgttag

SEQ ID NO: 325620 - DNA, 444 bp, Artificial Sequence
  derived and/or modified sequence
atgggagccaccgggctggggtttctgctgtcctggcggcaggataacctaaatgggaccgattgccagggctgtaacatcctgtatttttcagaaaccactgggagcatgtgctcggagctgtccctcaacagaggactcgaggcgaggaggaaaaaagatttgaaggatagtttcttatggcggtacggaaaggtcggctgtattagcctacctctgcgagagatgaccgcctggatcaacccaccacagatctccgagatatttcagggctatcaccagcgtgttcatggggcagacgctctttcattacagacaaatagcctgcgatctagactgtcatctcaatgcctgggacagagcttcctgctgagaacactggagcgcggtagagggtttagggccttgggggatatttgtggtcatgtccatgaggaggattag

SEQ ID NO: 325621 - DNA, 216 bp, Artificial Sequence
  derived and/or modified sequence
atgggggcaaccggcctaggcttcctgttgtcctggcgccaggataacctcaatggcacagattgtcagggatgtaacatcttatatttttccgaaactacaggcagcatgtgtagtgaactcagcctgaaccgtggattggaggctcgcagaaaaaaagacttgaaagactccttcctgtggcgcgacggggtttccccatgtctgccttgttag

SEQ ID NO: 325622 - DNA, 444 bp, Artificial Sequence
  derived and/or modified sequence
atgggggcaacaggcctgggcttcctcttgtcttggcgacaggataaccttaatgggacagattgtcagggctgcaacatcttgtatttctctgagaccaccgggagtatgtgttcagaactgagcctgaatcgtggcttggaagccaggagaaaaaaagacttaaaggattccttcctgtggaggtacggtaaggtgggatgtatctctctgcctctccgcgaaatgaccgcctggattaatcccccacagatctcagagatattccaggggtaccaccaacgcgttcatggggcagatgccttatcattacagacaaatagtcttaggagtaggctgagctctcagtgtctcggccagtcatttctgctacgtactcttgagcgagggcgaggttttcgggcactcggggatatttgcggccacgtccatgaggaggattag

SEQ ID NO: 325623 - DNA, 216 bp, Artificial Sequence
  derived and/or modified sequence
atgggggcaaccggactgggatttctcctcagctggagacaggataatctgaacggtaccgactgtcagggatgcaatatcctatacttcagcgaaaccacagggtccatgtgtagcgagctatccctaaatagaggcttagaagctcgcagaaaaaaggaccttaaggactcctttctatggcgcgatggggtttctccttgtcttccttgttag

SEQ ID NO: 325624 - DNA, 1238 bp, Artificial Sequence
  derived and/or modified sequence
aagaagaggagcacaccacaccagaaacagacatcttgcagtgtttcactgtctcaaccttatctgcacagtccgaggtcagtctgagagagcttctgagagacccaggatgaagggatgcagtgaggtcaagagcccaaccttctttcactgacacccacctctaaggactcagagagacatgaataaaatgggcctcaacaatcccaagagaccactcaaggacaatgggagccactgggcttggctttctactttcctggagacaagacaatttgaatggcactgactgccagggatgcaatattttatacttctctgagactacggggagcatgtgttctgaactttccttgaacagaggtcttgaggccagaaggaagaaggatcttaaagactcatttctctggagatatgggaaggttggctgtatctcacttccacttcgtgagatgaccgcctggattaacccaccccaaatttcagagattttccaaggctaccaccagagggtgcacggagctgatgcactgagcctgcaaaccaactctctgagaagcaggttatcttcacagtgcctcggacagagcttccttctcaggacactcgagagaggccgtggtttcagggcacttggggacatctgtggccacgttcatgaagaagactaagcctacttcatctcaggacccgcccaagagtggccgcggctttgggacacctggggtcgggtccaccatgaggataaaacctccttctcttctggacatgtccaggagtggccgttgctacaagtcacctggtgctacgaccagggtgagaataaagacgtctcctcaggaccctcccaggagagtacatggcattgagacatctggcggccaagtgaggaaaagacaccctgtctgcagcacccagaactgaggaggggcactgccctgggccttacttcccagccctggcctccaattctgaccttacaaaagtgtcccttgagtgaggcagtgaccacgcattgtcacagctaccaaagtgtggtttgcagatgatctgggcttgtttctggcagagattctggtacagagaaaggagaggcgctgagtggaaccacgatgggctgaggccaggggagacatcacaacctccaacaacactttttttcatgctttaataactcatttttcttagagaactaaagtagttgaaacaatatagaaacattttttaagtaggcatat

SEQ ID NO: 325625 - DNA, 443 bp, Artificial Sequence
  derived and/or modified sequence
aagaagaggagcacaccacaccagaaacagacatcttgcagtgtttcactgtctcaaccttatctgcacagtccgaggtcagtctgagagagcttctgagagacccaggatgaagggatgcagtgaggtcaagagcccaaccttctttcactgacacccacctctaaggactcagagagacatgaataaaatgggcctcaacaatcccaagagaccactcaaggacaatgggagccactgggcttggctttctactttcctggagacaagacaatttgaatggcactgactgccagggatgcaatattttatacttctctgagactacggggagcatgtgttctgaactttccttgaacagaggtcttgaggccagaaggaagaaggatcttaaagactcatttctctggagagacggggtttcaccgtgtttaccatgctga

SEQ ID NO: 325626 - DNA, 1238 bp, Artificial Sequence
  derived and/or modified sequence
aagaagaggagcacaccacaccagaaacagacatcttgcagtgtttcactgtctcaaccttatctgcacagtccgaggtcagtctgagagagcttctgagagacccaggatgaagggatgcagtgaggtcaagagcccaaccttctttcactgacacccacctctaaggactcagagagacatgaataaaatgggcctcaacaatcccaagagaccactcaaggacaatgggagccactgggcttggctttctactttcctggagacaagacaatttgaatggcactgactgccagggatgcaatattttatacttctctgagactacggggagcatgtgttctgaactttccttgaacagaggtcttgaggccagaaggaagaaggatcttaaagactcatttctctggagatatgggaaggttggctgtatctcacttccacttcgtgagatgaccgcctggattaacccaccccaaatttcagagattttccaaggctaccaccagagggtgcacggagctgatgcactgagcctgcaaaccaactctctgagaagcaggttatcttcacagtgcctcggacagagcttccttctcaggacactcgagagaggccgtggtttcagggcacttggggacatctgtggccacgttcatgaagaagactaagcctacttcatctcaggacccgcccaagagtggccgcggctttgggacacctggggtcgggtccaccatgaggataaaacctccttctcttctggacatgtccaggagtggccgttgctacaagtcacctggtgctacgaccagggtgagaataaagacgtctcctcaggaccctcccaggagagtacatggcattgagacatctggcggccaagtgaggaaaagacaccctgtctgcagcacccagaactgaggaggggcactgccctgggccttacttcccagccctggcctccaattctgaccttacaaaagtgtcccttgagtgaggcagtgaccacgcattgtcacagctaccaaagtgtggtttgcagatgatctgggcttgtttctggcagagattctggtacagagaaaggagaggcgctgagtggaaccacgatgggctgaggccaggggagacatcgcaacctccaacaacactttttttcatgctttaataactcatttttcttagagaactaaagtagttgaaacaatatagaaacattttttaagtaggcatat

SEQ ID NO: 325627 - DNA, 243 bp, Artificial Sequence
  derived and/or modified sequence
atggccctcccgaaaccttcagacggcaccctccccgcggaagtccagggacggggacagcgaaggagactcgtttggaccccgagccaaagcaaggccctacaagcctgctttgagcggaacccgtacccgggcatcaccaccagagaacggctggcccaggccatcggcattccggagcccagggtccagattctgtttcagaatgagaggtcatgccagctgaggcagcactggcattaa

SEQ ID NO: 325628 - protein, 202 aa, Artificial Sequence
  derived and/or modified sequence
MGAGALAICQSKAAVRLKEDMKKIVAVPLNEQKDFTYQKLFGVSLQELERQGLTENGIPAVVWNIVEYLTQHGLTQEGLFRVNGNVKVVEQLRLKFESGVPVELGKDGDVCSAASLLKLFLRELPDSLITSALQPRFIQLFQDGRNDVQESSLRDLIKELPDTHYCLLKYLCQFLTKVAKHHVQNRMNVHNLATVFGPNCFQ

SEQ ID NO: 325629 - DNA, 1025 bp, Artificial Sequence
  derived and/or modified sequence
cccttgttcaacgccgttggcgaagccagctgctggaggtgccgagaatctgagtttcggcaagcagccaggtctggaaactaatattttaaaaatgactacaccaaacaagacacctcctggtgctgaccccaagcagttggaaaggactggaacagtacgggaaattgggtcacaagctgtttggtcactctcatcttgcaaaccaggatttggagtggatcagttacgagatgacaatctagaaacttattggcaatcagatggttcccagcctcatttagtgaacatccaattcagaagaaaaacaacagtgaagacattatgtatttatgcagactacaaatctgatgaaagctatactccaagcaagatctcagtcagagtaggaaataattttcacaaccttcaagaaattcggcaacttgagttggtggaaccaagtggctggattcatgttcccttaactgacaatcataagaagccaactcgtacattcatgatacagattgctgttctagccaatcaccagaatggaagagacacccatatgagacaaattaaaatatacacaccagtagaagagagctccattggtaaatttcctagatgtacaactatagatttcatgatgtatcgttcaataaggtgactttaaaatgagacgaaaatcattaaacgtatctttgttttatcctgtatttaaataatatatcatgtacctttattgaacaaggcatccgttatatctaattttgtatatgtttaaaaatattttattgtaactttgacaaataaatttggggtcatattatctttattttctttaacatgtaataaagctcacatattttacattactaaaaatggatttgaagccaatcattttattttcccttgtatcaaaagaaaagagttccttgtatcaaaagaaaagagttgaactgaaaatttcagtatatacacaattataatagctaggtgattatttcattagtgttcatacattagagtaatggtttatt

SEQ ID NO: 325630 - DNA, 689 bp, Artificial Sequence
  derived and/or modified sequence
gaagccagctgctggaggtgccgagaatctgagtttcggcaagcagccaggtctggaaactgtaacaggacattcagttagtaatgatggttgcaggttgaatagtctcgccctagatctcacctaacttgcagtaagtatcaagtgcttgtgtgccgattaaagaacaacttcggatacaatgggaggtgtcaaggaaacgaatattttaaaaatgactacaccaaacaagacacctcctggtgctgaccccaagcagttggaaaggactggaacagtacgggaaattgggtcacaagctgtttggtcactctcatcttgcaaaccaggatttggagtggatcagttacgagatgacaatctagaaacttattggcaatcagatggttcccagcctcatttagtgaacatccaattcagaagaaaaacaacagtgaagacattatgtatttatgcagactacaaatctgatgaaagctatactccaagcaagatctcagtcagagtaggaaataattttcacaaccttcaagaaattcggcaacttgagttggtggaaccaagtggctggattcatgttcccttaactgacaatcataagaagccaactcgtacattcatgatacagattgctgttctagccaatcaccagaatggaagagacacccatatgagacaaattaaaatat

SEQ ID NO: 325631 - DNA, 330 bp, Artificial Sequence
  derived and/or modified sequence
atgactacccctaataagacaccacccggggccgatccaaagcagctggagagaacggggacggtaagggagataggaagtcaggctgtttggtctcttagttcatgcaaacccgggttcggtgtagatcaactgagggacgacaaccttgaaacatattggcagtcagatggctcgcagccacacctggtcaacatacagttcaggcggaaaacaacagtaaaaactctgtgtatctacgccgattataagtccgacgagagctataccccctccaagatctcagtgcgcgtaggtaacaattttcataacctgcaggaaattagatag

SEQ ID NO: 325632 - DNA, 330 bp, Artificial Sequence
  derived and/or modified sequence
atgaccacccccaacaagaccccacctggagctgaccccaagcagctggagaggactggaacagtgcgggagatcggcagccaggccgtgtggagcctgagcagctgcaagccaggcttcggcgtggaccagctgagagatgacaacctggagacctactggcagagtgatggcagccagccccacctggtgaacatccagttccggaggaagaccaccgtgaagaccctgtgcatctatgctgactacaagagtgatgagagctacacccccagcaagatctctgtgcgggtgggcaacaacttccacaacctgcaggagatcagatag

SEQ ID NO: 325633 - DNA, 330 bp, Artificial Sequence
  derived and/or modified sequence
atgaccacccccaacaagaccccccccggcgccgaccccaagcagctggagaggaccgggaccgtccgagagatagggtcccaggccgtgtggagcctaagctcctgtaaaccaggcttcggagtcgaccagctcagggacgataatctggagacttattggcagagcgatggcagccaaccccacctggtgaacatccagttccggaggaagacaaccgtgaaaaccctgtgtatctatgctgactacaagagtgacgagtcttatactccatctaagattagcgttagagttggaaataacttccacaacctccaggagatcagatag

SEQ ID NO: 325634 - DNA, 330 bp, Artificial Sequence
  derived and/or modified sequence
atgaccactcccaacaaaacaccacccggagcagacccaaaacagcttgagcggacgggcaccgtgagagagattggtagtcaagccgtgtggtccctcagttcttgcaaacctggatttggtgtggatcagcttagagatgacaacctcgaaacatattggcagtcggatggaagccagccccacctggtgaacatccaattcaggaggaagacaacagtaaagaccctttgcatctatgctgactacaagtcagacgaatcttataccccatctaagataagtgtacgcgttggaaacaattttcataatctgcaggagatccgttag

SEQ ID NO: 325635 - DNA, 330 bp, Artificial Sequence
  derived and/or modified sequence
atgaccacccccaacaagaccccccccggcgccgaccccaagcagctggagagaaccggcaccgtgagagagatcggcagccaggccgtgtggagcctgagcagctgcaagcccggcttcggcgtggaccagctgagagacgacaacctggagacctactggcagagcgacggcagccagccccacctggtgaacatccagttcagaagaaagaccaccgtgaagaccctgtgcatctacgccgactacaagagcgacgagagctacacccccagcaagatcagcgtgagagtgggcaacaacttccacaacctgcaggagatcagatag

SEQ ID NO: 325636 - protein, 133 aa, Artificial Sequence
  derived and/or modified sequence
MAAGDGDVKLGTLGSGSESSNDGGSESPGDAGAAAEGGGWAAAALALLTGGGEMLLNVALVALVLLGAYRLWVRWGRRGLGAGAGAGLQLGAAAPVRRLPQPAHPARGQWESLRRDQRQQVLRPGGSIWNICW

SEQ ID NO: 325637 - DNA, 402 bp, Artificial Sequence
  derived and/or modified sequence
atggctgctggagatggagatgtgaagctgggcaccctgggcagcggcagcgagagcagcaatgatggcggcagcgagagccctggagatgctggagctgctgctgagggcggcggctgggccgctgctgccctggccctgctgactggaggaggagagatgctgctgaatgtggccctggtggccctggtgctgctgggcgcctaccgcctgtgggtgcgctggggcagaagaggcctgggcgctggggccggggccggcctgcagctgggcgctgctgcccctgtgcggcggctgccccagcctgcccacccagcccggggccagtgggagagcctgcggcgggaccagaggcagcaggtgctgcggcctgggggcagcatctggaacatctgctggtag

SEQ ID NO: 325638 - DNA, 402 bp, Artificial Sequence
  derived and/or modified sequence
atggccgccggcgacggcgacgtgaagctgggcaccctgggcagcggctctgagagcagcaacgacgggggatcggaatctccaggagacgctggtgccgcggctgagggagggggttgggcagccgcggcactcgccttgctaacagggggaggggaaatgctactgaatgtggccttggtggccttagtactccttggagcataccggctctgggtgaggtggggacgtagaggattgggagctggagccggggcaggccttcagctgggcgcagccgcccctgtgcgacgcctgcctcagcctgctcatcctgctcggggtcagtgggaatccctccggcgggaccaacggcagcaggttcttcggcccggcggctctatttggaacatttgttggtag

SEQ ID NO: 325639 - DNA, 402 bp, Artificial Sequence
  derived and/or modified sequence
atggccgccggcgacggcgacgtgaagctgggcaccctgggcagcggcagcgagagcagcaacgacggcggcagcgagagccccggcgacgccggcgccgccgccgagggcggcggctgggccgccgccgccctggccctgctgaccggcggcggcgagatgctgctgaacgtggccctggtggccctggtgctgctgggcgcctacagactgtgggtgagatggggcagaagaggcctgggcgccggcgccggcgccggcctgcagctgggcgccgccgcccccgtgagaagactgccccagcccgcccaccccgccagaggccagtgggagagcctgagaagagaccagagacagcaggtgctgagacccggcggcagcatctggaacatctgctggtag

SEQ ID NO: 325640 - DNA, 243 bp, Artificial Sequence
  derived and/or modified sequence
atgaagttccccggccccctggagaaccagagactgagcttcctgctggagaaggccatcaccagagaggcccagatgtggaaggtgaacgtgagaaagatgcccagcaaccagaacgtgagccccagccagagagacgaggtgatccagtggctggccaagctgaagtaccagttcaacctgtaccccgagaccttcgccctggccagcagcctgctggacagattcctggccaccgtgtag

SEQ ID NO: 325641 - DNA, 517 bp, Artificial Sequence
  derived and/or modified sequence
gcatcccccagcccggggaacctcggggccgccctcttcgtcctctccggcccagacagacccgtcacctgcccacttgaaaacggcactactgtgttccttttcgggccagtttttctgtcagcgagtaacttttttttgtggcagcggcaaattagctactctatagtgcgtgttggaggctctacgagcccgtgttaatacacaaagaaggggacacacccccaccctcaggtagctacagcaagctgggtagcaggcagatccaaaggatatcatgaagtttccagggcctttggaaaaccagagattgtctttcctgttggaaaaggcaatcactagggaagcacagatgtggaaagtgaatgtgcggaaaatgccttcaaatcagaatgtttctccatcccagagagatgaagtaattcaatggctggccaaactcaagtaccaattcaacctttacccagaaacatttgctctggctagcagtcttttggataggtttttagctaccgta

SEQ ID NO: 325642 - DNA, 243 bp, Artificial Sequence
  derived and/or modified sequence
atgaaatttcctggccctctggaaaatcagagactctcctttcttcttgaaaaagccatcacacgcgaggcgcagatgtggaaagtaaacgtacgtaagatgcctagcaaccagaacgtgtccccatcccagagagatgaggtcattcaatggttggccaagctgaagtatcaattcaacctatatcccgaaactttcgcactggccagcagtttgctggaccgttttctcgctacagtctag

SEQ ID NO: 325643 - DNA, 243 bp, Artificial Sequence
  derived and/or modified sequence
atgaagtttcctggccccctggagaaccagaggctgtccttcctgctggagaaggccatcacccgggaggcccagatgtggaaggtgaatgtgaggaagatgcccagcaaccagaatgtgagccccagccagagagatgaggtgatccagtggctggccaagctgaagtaccagttcaacctgtacccagagacctttgccctggccagcagcctgctggaccgcttcctggccaccgtgtag

SEQ ID NO: 325644 - DNA, 243 bp, Artificial Sequence
  derived and/or modified sequence
atgaagttccccggccccctggagaaccagcggctgagcttcctgctggaaaaagctataacccgagaggcccagatgtggaaggtgaatgtacggaagatgccaagtaaccaaaatgtgagtcccagccagagagatgaggtgattcagtggctggccaagttgaagtatcaattcaatttgtaccccgaaacatttgcgttagcctccagcttgctcgaccggtttctcgcaacagtgtag

SEQ ID NO: 325645 - DNA, 243 bp, Artificial Sequence
  derived and/or modified sequence
atgaagttcccgggaccacttgagaatcaacgcctctccttcctgctcgagaaggcaatcacccgtgaggcacagatgtggaaagtgaacgtgcgaaaaatgcccagtaatcagaatgtgtccccatcccaacgcgacgaagttatccagtggttggcaaaattgaagtatcagtttaacctgtaccccgagaccttcgccctggcatcgtctctgcttgacagattcctcgcgacagtctag

SEQ ID NO: 325646 - protein, 111 aa, Artificial Sequence
  derived and/or modified sequence
MLGMYVPDRFSLKSSRVQDGMGLYTARRVRKGEKFGPFAGEKRMPEDLDENMDYRLMWEVRGSKGEVLYILDATNPRHSNWLRFVHEAPSQEQKNLAAIQDKNLGPAEWRG

SEQ ID NO: 325647 - DNA, 82 bp, Artificial Sequence
  derived and/or modified sequence
taaacaacgagaacacatgaacacaaagaggggaacaacagacaccaagaccttcttgagggtggaggatgggaggagggag

SEQ ID NO: 325648 - DNA, 345 bp, Artificial Sequence
  derived and/or modified sequence
atgtgtggctgggaagattcccagaagccctcagtgccttctcacggacccaaaacccccagctgtaagggggtgaaagcaccgcactcctcaagaccacgcgcttggaagcaggacctggagcagagcctggctgccgcttatgtgccggtggttgtggactccaaaggccagaatcccgacaagttgcgctttaatttttacaccagccagtactctaacagtctgaaccctttctacaccctgcagaagcccacttgtggatacttatataggagggacactgatcatacgcgcaaacgcttcgacgtgccgcctgccaatctggttttatggcggtcttag

SEQ ID NO: 325649 - DNA, 3852 bp, Artificial Sequence
  derived and/or modified sequence
atgagccaggtgagacaggtgggcctgctggccgccggctgccagccctggaacaaggacgtgtgcgccgccagcggcgacagattcgcctactgcgccaccctggccatctacatctaccagctggaccacagatacaacgagttcaagctgcacgccatcatgagcgagcacaagaagaccatcaccgccatcagctggtgcccccacaaccccgacctgttcgccagcggcagcaccgacaacctggtgatcatctggaacgtggccgagcagaaggtgatcgccaagctggacagcaccaagggcatccccgccagcctgagctggtgctggaacgccgaggacgtggtggccttcgtgagccacagaggccccctgttcatctggaccatcagcggccccgacagcggcgtgatcgtgcacaaggacgcccacagcttcctgagcgacatctgcatgttcagatggcacacccaccagaagggcaaggtggtgttcggccacatcgacggcagcctgagcatcttccaccccggcaacaagaaccagaagcacgtgctgagacccgagagcctggagggcaccgacgaggaggaccccgtgaccgccctggagtgggaccccctgagcaccgactacctgctggtggtgaacctgcactacggcatcagactggtggacagcgagagcctgagctgcatcaccaccttcaacctgcccagcgccgccgccagcgtgcagtgcctggcctgggtgcccagcgcccccggcatgttcatcaccggcgacagccaggtgggcgtgctgagaatctggaacgtgagcagaaccacccccatcgacaacctgaagctgaagaagaccggcttccactgcctgcacgtgctgaacagcccccccagaaagaagttcagcgtgcagagccccaccaagaaccactacaccagcagcaccagcgaggccgtgcccccccccaccctgacccagaaccaggccttcagcctgccccccggccacgccgtgtgctgcttcctggacggcggcgtgggcctgtacgacatgggcgccaagaagtgggacttcctgagagacctgggccacgtggagaccatcttcgactgcaagttcaagcccgacgaccccaacctgctggccaccgccagcttcgacggcaccatcaaggtgtgggacatcaacaccctgaccgccgtgtacaccagccccggcaacgagggcgtgatctacagcctgagctgggcccccggcggcctgaactgcatcgccggcggcaccagcagaaacggcgccttcatctggaacgtgcagaagggcaagatcatccagagattcaacgagcacggcaccaacggcatcttctgcatcgcctggagccacaaggacagcaagagaatcgccacctgcagcagcgacggcttctgcatcatcagaaccatcgacggcaaggtgctgcacaagtacaagcaccccgccgccgtgttcggctgcgactggagccagaacaacaaggacatgatcgccaccggctgcgaggacaccaacgtgagagtgtactacgtggccaccagcagcgaccagcccctgaaggtgttcagcggccacaccgccaaggtgttccacgtgaagtggagccccctgagagagggcatcctgtgcagcggcagcgacgacggcaccgtgagaatctgggactacacccaggacgcctgcatcaacatcctgaacggccacaccgcccccgtgagaggcctgatgtggaacaccgagatcccctacctgctgatcagcggcagctgggactacaccatcaaggtgtgggacaccagagagggcacctgcgtggacaccgtgtacgaccacggcgccgacgtgtacggcctgacctgccaccccagcagacccttcaccatggccagctgcagcagagacagcaccgtgagactgtggagcctgaccgccctggtgacccccgtgcagatcaacatcctggccgacagaagctgggaggagatcatcggcaacaccgactacgccatcgagcccggcaccccccccctgctgtgcggcaaggtgagcagagacatcagacaggagatcgagaagctgaccgccaacagccaggtgaagaagctgagatggttcagcgagtgcctgagcccccccggcggcagcgacaacctgtggaacctggtggccgtgatcaagggccaggacgacagcctgctgccccagaactactgcaagggcatcatgcacctgaagcacctgatcaagttcagaaccagcgaggcccaggagctgaccaccgtgaagatgagcaagttcggcggcggcatcggcgtgcccgccaaggaggagagactgaaggaggccgccgagatccacctgagactgggccagatccagagatactgcgagctgatggtggagctgggcgagtgggacaaggccctgagcatcgcccccggcgtgagcgtgaagtactggaagaagctgatgcagagaagagccgaccagctgatccaggaggacaaggacgacgtgatcccctactgcatcgccatcggcgacgtgaagaagctggtgcacttcttcatgagcagaggccagctgaaggaggccctgctggtggcccaggccgcctgcgagggcaacatgcagcccctgcacgtgagcgtgcccaagggcgccagctacagcgacgacatctacaaggaggacttcaacgagctgctgcacaaggtgagcaaggagctggccgagtggtacttccaggacggcagagccgtgctggccgcctgctgccacctggccatcgacaacatcgagctggccatggcctacctgatcagaggcaacgagctggagctggccgtgtgcgtgggcaccgtgctgggcgagagcgccgcccccgccacccactacgccctggagctgctggccagaaagtgcatgatgatcagcgtgtggaacctggccgccgacctgctgctgatgatccccgacaacgagctgcacctgatcaagctgtgcgccttctaccccggctgcaccgaggagatcaacgacctgcacgacaagtgcaagctgcccaccgtggaggagtgcatgcagctggccgagaccgccagagccgacgacaacatcttcgagaccgtgaagtactacctgctgagccaggagcccgagaaggccctgcccatcggcatcagcttcgtgaaggagtacatcagcagcagcgactggaccctggacaccatctaccccgtgctggacctgctgagctacatcagaaccgagaagctgctgctgcacacctgcaccgaggccagaaacgagctgctgatcctgtgcggctacatcggcgccctgctggccatcagaagacagtaccagagcatcgtgcccgccctgtacgagtacaccagccagctgctgaagagaagagaggtgagcgtgcccctgaagatcgagtacctgagcgaggagctggacgcctggagagcctgcacccagagcaccaacagaagcctggaggacagcccctacaccccccccagcgacagccagagaatgatctacgccaccctgctgaagagactgaaggaggagagcctgaagggcatcatcggccccgactacgtgaccggcagcaacctgcccagccacagcgacatccacatcagctgcctgaccggcctgaagatccagggccccgtgttcttcctggaggacggcaagagcgccatcagcctgaacgacgccctgatgtgggccaaggtgaaccccttcagccccctgggcaccggcatcagactgaaccccttctag

SEQ ID NO: 325650 - DNA, 3852 bp, Artificial Sequence
  derived and/or modified sequence
atgagccaagtcagacaggtagggctgctggcagccggctgtcaaccttggaataaagacgtctgcgctgcgtcaggtgatcgattcgcttactgcgccacattggcaatttatatttaccagcttgaccatagatacaatgaattcaaactccatgccatcatgtcagagcataagaaaaccatcaccgctatctcctggtgtcctcacaaccccgatctattcgcatcagggagtacagataacctggtgataatttggaatgtggctgaacagaaggttatcgctaaactagacagcaccaaagggatcccagccagtctgtcatggtgctggaatgcggaagacgtggtggcgttcgtctcccaccgaggaccgctgtttatctggacaatctccggacccgattccggggtgatcgtgcacaaggatgctcatagtttcctttctgatatctgtatgttcaggtggcacacccaccagaagggcaaagttgtgttcggtcatattgatggatcactatctatctttcatccgggcaacaagaatcagaagcatgtattgcggccagaaagcctggaaggtactgacgaggaagaccccgtaacggcactcgaatgggacccgctctccactgactaccttctcgtggttaacttgcattatgggatcagactcgtggatagtgagtctctgtcttgcattaccaccttcaatcttccttctgcggccgctagcgtccagtgtctcgcttgggtgccatctgccccagggatgtttatcacgggggacagtcaagtaggcgtgctgagaatttggaacgtctcccgcaccacaccaatcgacaatctcaaactgaagaaaacaggtttccattgtttgcatgtcctaaactctcctccccgtaaaaaattctctgtacagtcacccactaaaaatcactatacgtcgagtactagcgaggctgtcccaccaccaactttgactcaaaaccaggccttctcattgccacctggccacgctgtatgttgcttcctggatggaggggtggggttatacgatatgggtgccaagaaatgggacttcctacgcgacctggggcacgttgagacaatttttgattgcaagtttaaacctgatgaccccaacctgttagctaccgcctcattcgatggaactatcaaggtctgggatataaacacacttactgccgtttatacatcaccaggtaatgagggcgtgatctatagtttaagctgggcacctggaggcctgaactgtattgctgggggaacctcgcgtaatggggcattcatctggaacgtccaaaaggggaagatcattcaacggtttaacgagcacggcaccaatggcattttctgtattgcctggagccacaaggattctaagcggattgctacatgctcctcagacggcttttgtattattcgcacaatcgacggcaaagtcctacacaaatacaagcaccctgccgctgtttttgggtgcgactggagtcagaataacaaggacatgatagctacaggatgcgaagatactaacgttcgagtctactacgtcgccactagcagcgatcagccactgaaggtgttcagcggacacacagccaaggtgttccatgtgaagtggagtccactacgtgaaggcattctctgtagcggtagcgacgatggcactgttcgcatctgggattacacccaggacgcttgcatcaacatccttaatggccacactgcccccgtgagaggactgatgtggaatacggaaattccctatctcctaatctccgggtcttgggattataccataaaggtgtgggacactcgtgaggggacgtgcgtggatacagtgtacgaccacggcgccgatgtctacgggctcacctgccaccctagtcggccatttaccatggcctcctgttctagagatagcaccgtgcggctctggagtctgacagccctcgtaacccctgttcagatcaacatactggctgaccggtcttgggaagaaatcattggcaacacagactatgccatagagcctgggacccctccgctcctgtgcgggaaggtctcccgagatatccgtcaggaaatagagaagctgaccgctaactcccaggtgaagaaactcagatggttcagtgaatgcctatcaccacctggaggatctgacaatctctggaacctcgtcgctgtaatcaaagggcaggacgattctctgctacctcagaattactgcaaaggtattatgcatctgaagcacctcatcaaattcagaacatcagaggcccaggagctcacaactgtcaagatgagcaagttcggaggcggcatcggagttccggcgaaggaagaacgcctgaaggaggccgccgagattcatcttcgattgggtcagatccagcggtattgtgagctaatggtggagctgggggagtgggacaaggcactctccatcgctccaggggtgagcgtgaagtactggaagaagctgatgcagagacgggctgaccagctgattcaggaggacaaagatgatgtcatcccttattgtatcgctattggcgatgttaaaaagcttgtgcacttcttcatgagcagaggccagttgaaagaggcactgctagtcgctcaggcagcctgtgagggaaacatgcagcccttacacgtgtctgtcccgaagggggcgtcttacagcgacgacatatacaaggaagacttcaatgaacttctgcataaagtttccaaagaactcgcagaatggtattttcaggatggtcgggccgtcctcgccgcttgttgtcacttagctatcgataacatagagttagcaatggcataccttataagaggaaacgagctggagctggccgtctgcgtcgggactgttcttggcgaaagtgccgctcccgctacacactacgccctcgagcttctcgcacggaaatgtatgatgatctccgtgtggaatctagctgccgacctgttattgatgataccagacaatgagctacacctcatcaaactctgcgctttctatcctggatgtacggaggagataaacgatttgcacgacaagtgcaaactaccaaccgtcgaggagtgtatgcagctggctgagacagcacgcgccgacgataacatattcgagaccgtcaagtattatctgctgagccaggagcccgagaaggccctgccaatcgggatttcattcgtaaaagaatatatcagctcgtcagattggacgttagataccatctatcccgttctggatctgcttagctatatacgcacggaaaagctgttgctgcacacttgcacggaagcacgcaacgaactccttatcctgtgtggatacattggagcgttgctagctatccggagacagtatcagtcaatagtgcctgccctgtacgaatatacatcacagctcctaaagcgacgggaggtgagcgttcccctgaagattgagtatctgtctgaggaattggatgcctggcgcgcttgcactcaatcaaccaaccggtcactcgaggatagcccttatactccaccatccgattcccagagaatgatttatgccactcttctcaaacgacttaaggaggagtccttgaagggcattatcggccctgactatgtcactggctctaatttgcccagccactctgatattcatattagttgtctaactggactaaagattcaaggccctgtgtttttccttgaggatggcaagagcgcgatttcccttaacgacgcccttatgtgggccaaggtgaacccattttctcctctgggcaccggcatccgcctgaatcccttttag

SEQ ID NO: 325651 - DNA, 3852 bp, Artificial Sequence
  derived and/or modified sequence
atgagccaggtgcggcaggtgggcctgctggccgccggctgccagccctggaacaaggatgtgtgtgccgccagcggggacagatttgcctactgtgccaccctggccatctacatctaccagctggaccaccgctacaatgagttcaagctgcacgccatcatgtctgagcacaagaagaccatcacagccatctcctggtgcccccacaacccagacctgtttgccagcggcagcacagacaacctggtgatcatctggaatgtggccgagcagaaggtgattgccaagctggacagcaccaagggcatcccagccagcctgtcctggtgctggaatgcagaagatgtggtggcctttgtgagccaccggggccccctcttcatctggaccatcagcggcccagattctggagtcatcgtgcacaaggatgcccacagcttcctgagtgacatctgcatgttccgctggcacacccaccagaagggcaaggtggtgtttggccacattgatggcagcctgagcatcttccaccctggcaacaagaaccagaagcacgtgctgcggcctgagagcctggagggcacagatgaagaagatcctgtgacagccctggagtgggaccccctgagcacagactacctgctggtggtgaacctgcactacggcatccggctggtggacagcgagagcctgagctgcatcaccaccttcaacctgcccagcgctgctgcctctgtgcagtgcctggcctgggtgcccagcgcccctggcatgttcatcaccggggacagccaggtgggcgtgctgcgcatctggaatgtgtccaggaccacccccatcgacaacctgaagctgaagaagacaggcttccactgcctgcacgtgctgaacagcccccccaggaagaagttctctgtgcagagccccaccaagaaccactacaccagcagcaccagcgaggccgtgcccccacccaccctgacccagaaccaggccttcagcctgcccccaggccatgctgtgtgctgcttcctggatggaggagtgggcctgtatgacatgggcgccaagaagtgggacttcctgcgggacctgggccacgtggagaccatctttgactgcaagttcaagccagatgaccccaacctgctggccacagccagctttgatggcaccatcaaggtgtgggacatcaacaccctgacagctgtgtacaccagccctggaaatgaaggagtcatctacagcctgtcctgggcccctgggggcctgaactgcatcgccggcggcaccagcagaaatggagccttcatctggaatgtgcagaagggcaagatcatccagcgcttcaatgagcacggcaccaacggcatcttctgcatcgcctggagccacaaggacagcaagagaattgccacctgcagcagtgatggcttctgcatcatccgcaccattgatggcaaggtgctgcacaagtacaagcaccctgctgctgtgtttggctgtgactggagccagaacaacaaggacatgattgccaccggctgtgaggacaccaacgtgcgggtgtactacgtggccaccagcagtgaccagcccctgaaggtgttttctggccacacagccaaggtgttccacgtgaagtggagccccctgcgggagggcatcctgtgcagcggcagtgatgatggcaccgtgcgcatctgggactacacccaggatgcctgcatcaacatcctgaatggccacacagcccctgtgcggggcctgatgtggaacacagagatcccctacctgctgatcagcggctcctgggactacaccatcaaggtgtgggacacccgggagggcacctgtgtggacacagtgtatgaccatggagcagatgtgtatggcctgacctgccaccccagccggcccttcaccatggccagctgcagccgggacagcacagtgcggctgtggagcctgacagccctggtgacccctgtgcagatcaacatcctggccgaccgctcctgggaggagatcatcggcaacacagattatgccatcgagcccggcaccccacccctgctgtgtgggaaggtgtcccgggacatccggcaggagattgagaagctgacagccaacagccaggtgaagaagctgcgctggttctctgaatgtctgagccccccaggcggcagtgacaacctgtggaacctggtggccgtcatcaagggccaggatgacagcctgctgccccagaactactgcaagggcatcatgcacctgaagcacctgatcaagttccgcaccagcgaggcccaggagctgaccaccgtgaagatgagcaagtttggaggcggcatcggcgtgcctgccaaggaggagcggctgaaggaggccgctgagatccacctgcggctgggccagatccagcgctactgtgagctgatggtggagctgggggagtgggacaaggccctgagcatcgcccctggggtgtctgtgaagtactggaagaagctgatgcagaggagagctgaccagctgatccaggaggacaaggatgatgtgatcccctactgcatcgccatcggagatgtgaagaagctggtgcacttcttcatgagccggggccagctgaaggaggccctgctggtggcccaggccgcctgtgagggcaacatgcagcccctgcacgtgtctgtgcccaagggggccagctacagtgatgacatctacaaggaggacttcaatgagctgctgcacaaggtgtccaaggagctggccgagtggtacttccaggacggccgggctgtgctggccgcctgctgccacctggccatcgacaacatcgagctggccatggcctacctgatcagaggaaatgagctggagctggccgtgtgtgtgggcaccgtgctgggggagagcgctgccccagccacccactacgccctggagctgctggccaggaagtgcatgatgatctctgtgtggaacctggccgctgacctgctgctgatgatcccagacaatgagctgcacctgatcaagctgtgtgccttctacccaggctgcacagaggagatcaatgacctgcatgacaagtgcaagctgcccaccgtggaggagtgcatgcagctggccgagacagcccgggcagatgacaacatctttgaaacagtgaagtactacctgctgagccaggagcctgagaaggccctgcccatcggcatcagctttgtgaaggagtacatcagcagcagtgactggaccctggacaccatctaccctgtgctggacctgctgagctacatcagaacagagaagctgctgctgcacacctgcacagaggccagaaatgagctgctgatcctgtgtggctacatcggggccctgctggccatccggcggcagtaccagagcatcgtgcctgccctgtatgagtacaccagccagctgctgaagagaagagaggtgtctgtgcccctgaagattgagtacctgtctgaggagctggatgcctggagggcctgcacccagagcaccaacagaagcctggaggacagcccctacaccccacccagcgacagccagaggatgatctatgccaccctgctgaagaggctgaaggaggagagcctgaagggcatcattggaccagactatgtgacaggcagcaacctgcccagccacagcgacatccacatcagctgcctgaccggcctgaagatccagggccctgtgttcttcctggaggatggcaagagcgccatcagcctgaatgatgccctgatgtgggccaaggtgaaccccttcagccccctgggcaccggcatccggctgaaccccttctag

SEQ ID NO: 325652 - DNA, 3852 bp, Artificial Sequence
  derived and/or modified sequence
atgagccaggtgcggcaggtgggcctgctggccgccggctgccagccctggaataaggatgtctgcgccgcaagcggagaccgttttgcctattgcgcaaccttggccatctatatctatcagctggaccaccgatataacgaatttaagctccacgccatcatgtccgaacataaaaagacaatcaccgcgatatcgtggtgcccccacaacccggacctattcgccagtggatctacagacaaccttgttattatatggaatgtggcagagcagaaagtgatcgcgaagttggattcgactaagggtatcccagcctcactgagctggtgctggaacgcggaagacgttgtcgcttttgtttctcatagggggccgttgtttatttggacaatctccggccccgactccggcgtcattgtgcataaagatgctcacagttttctctccgacatttgtatgttcaggtggcacacccaccagaagggtaaagtggtgttcggtcatatcgacggcagcctgtcaatttttcatcccggcaataaaaaccagaaacacgttcttagaccagagtccctggagggcacagatgaagaggacccagtgacggcgctggaatgggaccctttgagtactgattacctgctggttgtgaatctgcactacggcatacgactggtagactctgagagcctgagctgcatcacaacatttaatctcccatcagccgctgcgtctgttcagtgcctagcatgggtgccttcggccccgggtatgtttattaccggcgattcccaagttggggtgttgaggatatggaatgtgagtaggaccactcccatagacaatttgaagctcaagaaaactgggttccattgtctccacgttttgaattctccacccagaaagaagtttagtgtacagtctccaacaaaaaaccactatacatctagcacttccgaagccgttcctccgccaacccttacacagaatcaggccttttccttacctcccggacacgccgtgtgctgctttttggatggcggggttggcctgtacgacatgggtgcgaagaagtgggacttcttgagggacctcgggcacgtcgaaactatctttgactgcaagttcaagccagatgacccaaatctactggctacagcctcttttgacggtaccattaaggtgtgggatattaacacattaacggctgtttacacatcccccggcaatgagggagtcatttattcgctgtcgtgggccccaggcggtttaaactgtattgccgggggcacttcgcgtaatggggctttcatctggaacgttcaaaaaggcaagatcattcagcgattcaatgaacacggcactaacggcattttctgcatcgcttggtcccataaggattcgaagagaatagccacctgcagctcagatggattctgtattatccgcacgattgacggcaaagttctgcacaaatataaacaccccgccgcagtgttcggctgcgattggtcccaaaataacaaggacatgatcgccacaggctgtgaggacaccaacgttcgggtctactatgttgccacaagtagtgatcagcctctcaaggtattttcaggtcatacagccaaggtctttcatgtgaaatggagtcccctccgcgagggcatattatgttcaggttccgacgacggaactgtaagaatttgggactacacccaggatgcttgcatcaatatcctgaacggccacacagctcctgtgcggggcctgatgtggaacactgaaatcccgtacctcctgataagcggttcttgggattacaccatcaaagtttgggacaccagagagggaacttgcgtcgacactgtgtacgatcatggggcagatgtgtatggtctgacgtgccacccctctagaccatttacaatggccagctgcagccgcgattcgaccgtgaggctttggagtctaacggccctcgtgacacctgtgcagatcaatattctcgccgatcgttcatgggaagagatcataggaaacaccgactacgcgatcgaacctggaacacccccacttttgtgtggaaaggtgagtcgcgatatccgacaagagattgagaaacttacagcgaacagccaagtgaaaaaacttcgctggttttccgaatgtcttagtcctcccggaggcagtgacaatctgtggaacctggtggccgtgatcaagggtcaggacgactccctcctcccgcagaattactgcaagggtattatgcatctgaaacacttaatcaaatttcggacttctgaagcacaggagcttaccacggtgaaaatgtctaaattcgggggcggcatcggggtgcctgctaaagaagaaagacttaaagaagcggccgaaatccacttgcgccttggtcaaatccaaagatattgtgagctgatggtggagctcggcgagtgggataaggccttatcaatcgctcctggcgtgtccgtcaaatattggaaaaagctgatgcagagaagggccgaccagctaattcaggaagataaagatgatgtcatcccttattgcattgcaatcggggacgttaagaagttagtgcattttttcatgagccgaggacagctgaaagaggccttgctcgtcgcccaggctgcttgtgagggcaacatgcagccgctccatgtgtcagtaccgaaaggcgccagctactcagacgacatatacaaggaggactttaacgaactcctgcacaaggtgagcaaggaacttgctgaatggtatttccaggacggtagagcggttctggccgcctgctgtcacctggccattgacaatatagaactcgctatggcatacctgatcaggggaaatgaacttgagctggctgtgtgcgtgggcactgtcctgggcgagtcggctgcacccgccacacactacgccctggaactcctcgcacggaaatgtatgatgatctccgtctggaatctggctgccgacctcctgctgatgatacctgacaacgagctccatctcatcaaactctgcgcattttatcccgggtgcacagaggaaatcaacgatctccatgacaagtgcaagttgccaactgtagaagaatgcatgcaactggcggagaccgccagggctgacgacaatattttcgagactgtgaaatactacctgctgagtcaggagccagagaaagcactcccaatcggcatctctttcgtcaaggaatacataagcagcagtgattggaccttggacaccatttacccagtacttgacttgctcagttacatacggacagaaaagctcttgctgcatacttgtactgaggcacggaacgagctgcttatcctatgcgggtatataggagccctgctggcgataagaaggcagtaccagtccattgtgccagccctgtatgagtatacatcccagctgttgaaacggcgtgaggtgtccgtccctttgaaaatagaataccttagcgaagagcttgacgcatggcgagcatgcacccaaagtactaatcgctccttggaagactccccttatactccaccaagcgactctcagaggatgatctacgcaacactgcttaaaaggctgaaagaggaatccctgaagggaatcatcggccctgactatgtgactgggagtaatctcccaagccattcagacatccacatttcctgtctgacagggctcaaaatccaggggccggtgttcttcctggaagacggcaaatctgctatcagcctcaacgacgccctgatgtgggctaaggtgaaccccttctcccccctaggtacaggaatccgtctcaatcccttctag

SEQ ID NO: 325653 - DNA, 3852 bp, Artificial Sequence
  derived and/or modified sequence
atgtctcaggtgaggcaggtgggcctgttggccgctgggtgtcaaccctggaacaaggacgtgtgtgctgcctccggggatcggtttgcttactgtgctacactggctatttacatctatcaactcgatcatcgctataatgagttcaagctgcacgccattatgtcggaacacaagaagacaatcactgcaattagctggtgcccccacaaccctgatctgtttgcctcgggttccactgataatctcgtaattatttggaacgtggcagaacagaaggtgattgctaaactggactctacgaaaggcatcccagccagtctatcatggtgctggaatgcagaggacgtggtggcattcgtgtcgcaccgcggaccactgtttatttggactatttctgggccagattccggggtgatcgtgcataaagacgcgcattcattcctcagtgatatttgcatgttcaggtggcatacccatcagaaaggcaaagtggtctttggccatattgatggcagcctgagtatcttccatccaggcaataaaaatcaaaagcacgtcctccgacctgaaagcctcgagggtacagatgaagaagacccagtgaccgcactggaatgggatcctctgtcaactgattatcttctcgtggttaacctccactacgggattcggttggtggattcagagtcactgagctgcatcactacattcaatcttccctcggccgcagcctcggtgcagtgtctggcctgggttcccagcgccccaggcatgttcatcacaggggactctcaagttggcgtcctgcggatctggaacgtgtcgcgtaccactcccatcgataatctcaaactcaaaaagacgggcttccactgcctccatgtgctcaactccccgcctcggaagaaattctctgttcagtccccaacgaagaatcattacacctcctcaacaagcgaagccgtgccccctccgacgcttacacagaaccaagctttttcccttcctccaggacatgcggtgtgttgcttccttgatgggggagtcggtctgtatgacatgggggctaagaagtgggactttctgcgtgacttggggcatgtcgagacaatcttcgactgcaaatttaaaccagacgaccctaacctcctggctacagcatcatttgatggcaccatcaaggtgtgggacattaacacgttgactgccgtatacacctcaccaggtaacgagggagtaatctattcgctgagctgggccccagggggactcaactgtatcgccggtggtaccagtcgcaatggcgctttcatttggaacgtgcagaaggggaagataattcagagatttaacgaacacggtacaaacggtatattctgcattgcttggtcacataaggattccaaacgtatcgccacctgtagctcagatgggttctgtattattaggacaatcgacggaaaggttttgcacaagtataagcaccccgctgcggtgttcggatgtgactggagtcagaacaacaaagacatgattgccactggctgcgaagacactaatgttcgcgtgtattatgtggccacctcgtccgaccaaccactaaaagtatttagtggtcatactgccaaggtgtttcatgtcaagtggagtccactgagagaaggtattctgtgttccgggtccgacgatggcacagtgcgtatctgggattatacccaggatgcctgcattaacattctgaacgggcataccgcccctgtgcgcggactgatgtggaacactgagattccctatctcttgatcagcgggtcatgggactatactatcaaggtgtgggacacccgggagggtacatgcgtggacactgtttatgatcatggcgctgacgtgtatggactcacatgccaccccagcaggccctttaccatggccagttgctctcgagattcaaccgttagactctggtcgctcacagccctagttactcctgtgcagatcaatatcctggccgatcggtcctgggaggagataatcggaaacacagattatgcaattgaacctgggaccccacctctgctgtgcggcaaagtctcccgtgatatccgccaagaaattgagaagctgaccgccaatagccaggtaaaaaaattgcgctggttcagtgagtgtctctcacctcctggaggctcagataacctgtggaatctggtggccgttatcaagggacaagatgatagtctgcttccgcagaactattgcaaaggcataatgcacctcaagcacctgatcaagtttcgtaccagcgaagcacaggaattaaccactgtcaagatgtccaagttcggcggtggcattggggtgcccgcaaaagaggaacgcctcaaagaagccgctgaaatccacctacgcttggggcagattcagcggtattgcgagctgatggttgagctgggcgagtgggacaaggcactgtccattgccccaggcgtcagcgtcaagtactggaaaaagctgatgcaaagaagagccgaccaactgatccaggaggacaaggatgatgttatcccctattgcatcgccatcggagatgtcaaaaaactggtgcacttctttatgtcccgtggacagctcaaagaggcactcttggtggctcaggcagcctgtgagggaaatatgcagccattacacgtctctgtgcccaagggggcttcatactccgacgatatctacaaggaagacttcaacgaactcttacacaaggtgagcaaggagctggccgagtggtacttccaagatggtagggccgtgcttgctgcatgttgtcacttggcaattgataacattgaattggctatggcctatctaatacggggaaatgaactagagcttgcggtctgtgttggaacagtcctgggtgagagcgcggctcctgccacccactatgcactcgagctcctcgccaggaaatgcatgatgatttctgtgtggaacttggccgcagatctcctgttgatgattcctgacaacgaattgcacctgatcaagctttgcgctttttacccagggtgcacagaggagatcaatgacctccacgataaatgcaaactcccaacggtcgaggaatgcatgcagcttgccgagaccgcacgtgctgatgataatatctttgagactgtgaaatattacctgttaagccaggaacctgaaaaggccttgcctattgggatttcattcgtgaaagagtatatctcaagctcagattggactctggacacaatctaccctgtgttggatctgctttcctatattaggacagaaaaactattgttgcacacctgcactgaggcaagaaatgaactgcttattctttgtggttacataggagcattgttagcaattagaaggcagtaccagtcaatcgtgcccgctctgtatgaatataccagccagctgcttaaacgacgcgaagtttccgtgcccctcaaaatagagtatctgagcgaggagctcgacgcctggcgagcttgcacgcagtccaccaaccgtagcttggaggatagtccctacacaccgcctagcgattctcagagaatgatttacgccaccttactcaagaggctcaaagaagagtctctgaagggtatcatcggccctgattacgtgaccggctcaaatctcccatcacatagtgacatccatatcagctgcctcactggattgaagatacagggccctgtgtttttcctggaggatggcaagagcgcaataagcttaaacgatgcgctgatgtgggctaaagtgaatccattctcaccactggggacaggaattcgtctgaatccattctag

SEQ ID NO: 325654 - DNA, 1764 bp, Artificial Sequence
  derived and/or modified sequence
gtgctcgcctcgcagctgcgcccgccggcttcagcaccttccgctgtccgccgctgcagccgcctcctcctccaggcaaacatgtcccaggtaaggcaagtgggattgctggctgctggatgtcagccatggaacaaggatgtatgtgctgccagtggagacaggtttgcatattgtgcgaccctggctatctatatttatcagttggatcaccgttataatgaattcaaacttcacgcaattatgtctgaacataaaaaaacaatcacagcaatttcttggtgtccacataatcctgatctgtttgcaagtggcagtactgataatttagtgatcatttggaatgttgcagaacaaaaagtcattgctaaactcgacagagcaagaccaccatctccaaaaattatatatataaaaataattaatattatagaagagaatatacacaactcagagatgcaatggataatataaaaagagtacctgagatgtatttttttaaactcttagagatatctgtaactcaaatttttcttaggtgaggaggattattaactggcacatatgtactaaaaacccctcacttaaaaatggcagtctcaatcctactgtcattctttttattttaaaataaataaataagcctatctttttgtgcttacatacttaaaaggatatcattaagtatataaacaatcattacttctgtatttttaatgaatgcaggaaaataatatttttatgtataaaagatgaagaaaaaattttgcaagtctttaagcacataaatacaacagaatagccacccaatttctgtctgaaatctaaattggatggatttgaccatcattctattatctttgatttctacaatgtctatatcttattacctataactattaatttttcatagaattataaatgtcatttgactatgtcaatctgtatatattgtaccttaatatgaaaaacaaattttttaattcataaaagtatttttattagatttcatatgcatgaaacccaagcaaattatatgaatttattttactatttgaaaatgttcatattaccaataatgtggacaaattactttgcaggtttaaatatgcctctgtaaaggaagagtctcattagacaatgatttttaaagcattggaaaaatattttgcctgtaaaagttagtaactaggtggttcacaaaattacaacatcaaaatagttacatcttgtgaaaatatatgatttttatgtcaatcaagacaaatgaaatatatatgtatgtgtatatatatacatgtatgtatgaaatatatatatgtgcgtgtgtgtgtgtatatatatatatatatatatatatttctatgaaattgtccagatgtgttcaggaacatgattgcattagagcaatgactgtattttgttgtccttataacatttatattatttcagttttaagtcaaaaggtattctgaatataataaaagcctcacaaattatttgtaaaatttagtagttcatatttagtatatcagtaatatagaagacatctttatagtcaactcttaattaatgcttattgtaccaaatctttgagatatttgtacataaatgaaatatgtactttcatgctaaaattatatatcatgactgtgctataatttggcatgtcattatctagatttatatgtatgtacgtatttcaggtccttgaaattttaataaatattacagttaaatcctgatatgacatagttaccggct

SEQ ID NO: 325655 - DNA, 4294 bp, Artificial Sequence
  derived and/or modified sequence
gcctctggggcagaccctggagatcgggctcgcggcgccttccatcgtggctccgcgctggggcttgcggagcacgcttcccgcccctcggagcccgcgggcccggccgccccgcccccgggcgccctgagcgagcaggcggggagggcggggagggtccgcgcgttggtggtgctcgcctcgcagctgcgcccgccggcttcagcaccttccgctgtccgccgctgcagccgcctcctcctccaggcaaacatgtcccaggtaaggcaagtgggattgctggctgctggatgtcagccatggaacaaggatgtatgtgctgccagtggagacaggtttgcatattgtgcgaccctggctatctatatttatcagttggatcaccgttataatgaattcaaacttcacgcaattatgtctgaacataaaaaaacaatcacagcaatttcttggtgtccacataatcctgatctgtttgcaagtggcagtactgataatttagtgatcatttggaatgttgcagaacaaaaagtcattgctaaactcgacagtacaaaagggatccctgcttctcttagttggtgctggaatgcagaggatgtggtggcatttgtttcccacagaggcccactgttcatttggaccatctcaggaccagatagtggagtgattgtacacaaagatgctcatagcttcttgtctgatatctgtatgttcagatggcatacacaccaaaaggggaaagttgtgtttggtcatattgatggaagtctatcaatttttcatccaggtaataaaaatcagaaacatgttttgagaccagaatctcttgaagggacagatgaagaggatccagttacggccttggaatgggacccactatctactgattatcttctagtggttaatttgcattatggaattcgcctggtagattctgaatcactttcttgcataacaacatttaatcttcccagtgcagcagcttctgtacagtgcttagcctgggttcccagtgctcctgggatgtttataactggagattctcaagtgggtgttttacgcatttggaatgtttcaagaacaacacctattgataatcttaaattaaagaaaacaggatttcactgcttacatgtacttaattctcctccaagaaaaaagttttcagtccaatctccaaccaaaaatcattatacatcctcaacaagcgaagcagttccacccccaactttaacacagaatcaagcattttctcttcctcctggtcatgcagtgtgttgtttcttggatggtggagttggactttatgatatgggagctaagaagtgggattttcttagagacttgggacatgtggaaactatctttgactgcaaattcaaacctgacgatcctaatcttttagcaacagcttcatttgatggcactataaaagtctgggatataaacacattaacagcagtgtacacatccccgggtaatgaaggtgttatttattccctttcttgggctccaggtggtttaaattgtattgctgggggaacttcccgaaatggtgcttttatttggaatgttcaaaagggcaaaattatacaacgatttaatgagcatggaacaaatggaatattctgcattgcctggagtcataaagattctaaaagaatagcaacctgcagcagtgatggtttctgtattattcgaacaattgatggtaaagtgctacacaaatataaacatccagctgcagtgtttggttgtgattggagccaaaacaataaagacatgatagccactggctgtgaagacacaaatgttcgtgtttattatgtagccaccagctcagatcaaccattgaaagtatttagtgggcatacagcaaaagtgtttcatgttaaatggtctcctctgagagagggaattctttgcagtggttctgatgatggtaccgttcgaatctgggattatactcaggatgcttgcatcaatattcttaatggacacactgcacctgtgagaggattaatgtggaatactgagattccatatctgctcatatctggcagctgggactatactataaaagtatgggacactcgagaaggaacttgtgtggatactgtgtatgatcacggtgcagatgtatatggtttaacctgccatcccagtcgccccttcactatggcctcttgctcccgtgactctacagtgagactctggtcattaacagccttagtcactcctgtacaaataaatattctggcagacagatcttgggaagaaattattgggaacactgattatgctatagaaccaggcactcctcctctactgtgtggtaaagtgtcaagagatattagacaggaaatagaaaaactaactgctaattctcaagtgaaaaaactaagatggttctcagaatgtttatctcctccaggtggcagtgacaatttatggaacttggttgctgtgataaaaggacaggatgatagcttacttcctcagaactactgcaaaggaataatgcacttgaaacatctgattaaatttagaacatctgaagctcaagaactaacaacagtcaagatgtctaaatttggtggtggtattggtgtacctgctaaagaggaaagactgaaggaagctgctgaaatccacttgagattaggacaaattcagagatactgtgaacttatggttgaacttggagagtgggacaaagccctgtcaattgcaccaggagtctctgtgaaatactggaagaagttaatgcagaggagagctgaccaattaatccaggaagataaggatgatgtcattccatactgcatagccattggtgatgtgaaaaagctagtccattttttcatgtcaagaggtcagcttaaagaagctctgcttgttgcacaggctgcttgtgaaggaaatatgcagcccttacatgtttccgtgcctaaaggagcttcatattctgatgatatctacaaggaagactttaatgaactcctgcacaaagtcagtaaagaactggcagaatggtattttcaagatggtcgagcagtactagccgcatgttgccatcttgccatagataatattgagcttgctatggcatacctgattcgcggaaatgaactggagttggcagtctgtgtgggcacagtactaggagagtctgcagcaccagcaacccactatgccttagaattactggcgagaaagtgcatgatgatttcagtatggaatttggcagctgatcttcttctgatgattcctgataatgaactacatttaataaaactctgtgctttctacccaggatgtactgaagagataaatgaccttcatgataagtgtaagctacccacagtggaagaatgtatgcagttagctgagacagcccgtgcagatgacaatatatttgaaactgtaaaatattacttgttaagtcaagaacctgaaaaagcccttcctattggtattagctttgttaaagaatacatcagtagctcagactggactttggataccatataccctgttcttgacctactgagctatattcgtactgaaaaattactcttgcatacgtgtactgaagctcgaaatgagttgctgatattatgtggttacattggtgcattactggctatcagaagacagtaccaaagcattgttccagcactttatgagtacacaagtcagctattaaaacgtcgggaggtgtcagtacctttaaaaattgaatatctttctgaggaattggatgcatggagagcttgcacacagtccaccaacagatcattagaagactctccgtatacacccccttctgattcacaaagaatgatttatgcaactttattaaagagactaaaagaagagtcactgaaaggaattattggaccagattatgtgactggatcaaatcttccaagtcattctgatattcacatttcttgtcttacgggattaaaaatccagggccctgtgtttttccttgaagacgggaaatctgctatctccttgaatgatgctttgatgtgggcaaaggtgaatccattctcacctttagggactggaatacgactcaatccattctgatagaagatttttgtccatgcttgatttttttttttaaagaaaaactttcatgggttagcattaccttaatctttgttgctcaagtgccagaggttgggagaaggattgcaggttgggagaggtgggaaatagcagtgaattttagtcattaacttcaaaatatatatatatatataatttaaaggaaaaa

SEQ ID NO: 325656 - protein, 130 aa, Artificial Sequence
  derived and/or modified sequence
MSQVRQVGLLAAGCQPWNKDVCAASGDRFAYCATLAIYIYQLDHRYNEFKLHAIMSEHKKTITAISWCPHNPDLFASGSTDNLVIIWNVAEQKVIAKLDRARPPSPKIIYIKIINIIEENIHNSEMQWII

SEQ ID NO: 325657 - protein, 79 aa, Artificial Sequence
  derived and/or modified sequence
MAAEIDFLREQNRRLNEDFRRYQMESFSKYSSVQKAVCQGEGDDTFENLVFDQSFLAPLVTEYDKHLGELNGQLKYYQA

SEQ ID NO: 325658 - DNA, 924 bp, Artificial Sequence
  derived and/or modified sequence
atggccgccgagatcgacttcctgagagagcagaacagaagactgaacgaggacttcagaagataccagatggagagcttcagcaagtacagcagcgtgcagaaggccgtgtgccagggcgagggcgacgacaccttcgagaacctggtgttcgaccagagcttcctggcccccctggtgaccgagtacgacaagcacctgggcgagctgaacggccagctgaagtactaccagaagcaggtgggcgagatgaagctgcagctggagaacgtgatcaaggagaacgagagactgcacagcgagctgaaggacgccgtggagaagaagctggaggccttccccctgggcaccgaggtgggcaccgacatctacgccgacgacgagaccgtgagaaacctgcaggagcagctgcagctggccaaccaggagaagacccaggccgtggagctgtggcagaccgtgagccaggagctggacagactgcacaagctgtaccaggagcacatgaccgaggcccagatccacgtgttcgagagccagaagcagaaggaccagctgttcgacttccagcagctgaccaagcagctgcacgtgaccaacgagaacatggaggtgaccaaccagcagttcctgaagaccgtgaccgagcagagcgtgatcatcgagcagctgagaaagaagctgagaagcgagctgagcagacagaagctgcacacccaggagctgctgagccagctggagatggccaacgagaaggtggccgagaacgagaagctgatcctggagcaccaggagaaggccaacagactgcagagaagactgagccaggccgaggagagagccgccagcgccagccagcagctgagcgtgatcaccgtgcagagaagaaaggccgccagcctgatgaacctggagaacatctag

SEQ ID NO: 325659 - DNA, 924 bp, Artificial Sequence
  derived and/or modified sequence
atggctgccgaaattgactttcttcgcgaacagaacagacggctcaacgaggattttaggcgctaccagatggaaagcttttcaaagtactcaagcgtgcaaaaggcagtttgtcagggagaaggcgacgacacatttgagaacctcgtatttgatcagagcttcttggcccctcttgtgacagaatatgacaaacacctaggggagcttaatgggcagctcaaatactatcaaaaacaagtaggtgagatgaaactgcagttggaaaacgttatcaaagagaacgagcggttacacagcgagctgaaggatgccgtggaaaagaagctcgaggcattcccccttgggacagaggtgggaactgatatatatgctgatgatgagacagtccggaatttgcaggaacagctgcagctggcgaaccaggagaaaactcaggctgtggaactctggcagaccgtgagccaggagctcgacagattgcataagttgtaccaggaacacatgacagaggcccagatccatgtgttcgaaagtcagaagcaaaaggatcagctttttgacttccagcagctcactaagcaattgcacgtgactaacgaaaatatggaggtcaccaatcaacagttcctgaagaccgtaacggagcagagtgttatcatcgaacaactgcggaaaaaactgcgttcagaactgtccagacaaaaactccatacccaggaactgctgtctcagctggagatggcgaatgagaaggttgccgagaacgagaagcttatcttggaacatcaggagaaggctaacagactgcagcggaggctgtctcaggccgaggaacgtgcggccagcgcttcacagcagctctcagtgatcaccgtgcagcgcaggaaggctgcttctcttatgaatctcgagaacatctag

SEQ ID NO: 325660 - DNA, 924 bp, Artificial Sequence
  derived and/or modified sequence
atggctgctgagattgacttcctgcgggagcagaacagaaggctgaatgaagacttccgccgctaccagatggagagcttcagcaagtacagctctgtgcagaaggctgtgtgccagggcgagggagatgacacctttgagaacctggtgtttgaccagagcttcctggcccccctggtgacagaatatgacaagcacctgggggagctgaatggccagctgaagtactaccagaagcaggtgggggagatgaagctgcagctggagaatgtcatcaaggaaaatgaaaggctgcacagcgagctgaaggatgctgtggagaagaagctggaggccttccccctgggcacagaggtgggcacagacatctatgcagatgatgaaacagtgaggaacctgcaggagcagctgcagctggccaaccaggagaagacccaggccgtggagctgtggcagacagtgtcccaggagctggaccggctgcacaagctgtaccaggagcacatgacagaggcccagatccacgtgtttgagagccagaagcagaaggaccagctgtttgacttccagcagctgaccaagcagctgcacgtgaccaatgaaaacatggaggtgaccaaccagcagttcctgaagacagtgacagagcagagcgtcatcatcgagcagctgaggaagaagctgcggtctgagctgagccggcagaagctgcacacccaggagctgctgagccagctggagatggccaatgagaaggtggctgaaaatgagaagctgatcctggagcaccaggagaaggccaaccggctgcagaggcggctgagccaggccgaggagagagctgccagcgccagccagcagctgagcgtcatcaccgtgcagaggaggaaggccgccagcctgatgaacctggagaacatctag

SEQ ID NO: 325661 - DNA, 924 bp, Artificial Sequence
  derived and/or modified sequence
atggccgccgagatcgacttcctgcgggagcagaaccggcggctgaatgaggactttcggagatatcagatggagtctttctctaaatattcttctgtgcaaaaagcagtgtgccagggcgaaggggacgatacttttgagaacctcgtcttcgaccagtcttttctggcaccactcgttacagagtatgataaacatctgggcgaattgaatggacagctgaagtattaccaaaaacaggtgggcgaaatgaagctgcagcttgaaaacgtgataaaggaaaatgagagactccattcagaactgaaggatgcggtggagaagaaattggaggcattcccactgggcaccgaagtggggactgacatctatgctgacgacgaaactgttcgtaaccttcaggaacaactgcagctggcgaatcaggagaagacgcaggccgtggagctgtggcagacagtgtcccaggagctcgatagactgcacaaactatatcaggagcacatgaccgaggctcagatccacgtgttcgagagccagaagcagaaagaccaactattcgactttcagcagcttaccaaacaactgcatgtgactaacgagaatatggaagttaccaatcagcagtttcttaagaccgtgacagaacagtctgtgattatcgaacaactgcggaagaagcttaggtccgagctcagccgacagaaactgcacacccaggaactgctgagtcaactcgagatggcgaatgagaaagtggctgaaaatgaaaagctgatcctggagcatcaggagaaggctaatcgcctgcagaggagactctcccaggccgaggagcgtgctgcttctgcctcacaacagctgagtgttatcacagtccagagaaggaaagctgcatccttaatgaaccttgaaaacatctag

SEQ ID NO: 325662 - DNA, 924 bp, Artificial Sequence
  derived and/or modified sequence
atggcagccgagattgatttcctgcgggagcagaacaggagactcaacgaggattttagaaggtatcagatggaatccttctcaaagtatagctccgtgcagaaggcagtttgccaaggagaaggcgatgacaccttcgagaacctcgtgttcgatcaaagtttcttggcccctctggtgacggagtatgataaacacttgggggagcttaacggccagttgaagtactaccagaaacaagtaggcgagatgaagctgcagcttgaaaatgtgattaaggaaaatgagaggctgcattcagaattgaaggatgcggtcgaaaagaaacttgaggccttcccactcggcaccgaagtcggcactgatatttatgctgatgacgaaactgtgagaaatcttcaagagcagctgcaactcgcaaatcaagagaaaacgcaggccgtcgagttgtggcagaccgtgtcgcaggagctcgatcgcctgcacaagttataccaggagcacatgacagaggcgcagatccatgttttcgagtcccagaaacaaaaggaccagctctttgattttcagcagctgacaaaacagttgcatgtcacaaatgaaaatatggaagttacaaaccagcagtttctgaaaaccgtgaccgaacagtcagtgattatagagcaactccgcaaaaaacttcggtctgaactcagccggcagaaattgcatactcaggagcttttatcacagctggagatggctaatgaaaaggtcgccgagaatgagaagcttatcctggagcaccaagaaaaggccaaccgcctacagagacgcctctcccaggccgaagagcgcgcagcctcagcatcccagcagctcagtgtgatcacagtacagcgcagaaaggcagctagcttgatgaatttagagaatatctag

SEQ ID NO: 325663 - DNA, 1910 bp, Artificial Sequence
  derived and/or modified sequence
gcaagaggcgccaccgtctccaaggagtggtccggggcaccggtttcaaagtcgcagggcgggccgagtggacttccgctgctggcctggggcttcccagccgtcttggcgttgtcctctccaacccccgccgctccgcgtagaacgccgctctcaggctgccgtcaagctcccgcggcactctcctaggtggcccgacgagacccagagtgacccgcgggacgcctgtatcgaccgcgtcctcttcccaccagcgtgggattcggttgaacgtggagtccccagcaatcttcagtctctcaccagggccagggactcgtctggggcgcgggggaaagaagcgtggcggggctgtagatgccgcgtgagtaggatgcagattgcaccgctggagcgcttgacaaccaaccgagcgttggcttagttttgttttcccgcacagcaagctctctgtctttcagaggaaggtaaaggtggtgaaagctctaaactaaaattgtatcgaaatggctgcagaaatcgactttctgagagagcaaaatcgaagactaaatgaagattttaggcggtatcaaatggaaagtttttccaaatattcatctgtacagaaagctgtctgccaaggagaaggagacgacacatttgaaaacctagtatttgaccaaagctttttagctcctcttgttactgagtatgataaacacctaggagaactaaatgggcagctgaaatattaccagaaacaggtgggtgagatgaaattacaacttgaaaatgtcatcaaggaaaatgaaaggttgcacagtgaattaaaagatgctgttgaaaaaaaattggaggcctttcccctgggcacagaggtaggaactgacatatatgcagatgatgaaacagtcagaaaccttcaagaacaattgcagctagccaatcaagaaaaaactcaggctgtggaactctggcagactgtttctcaggagttggacagactacacaagctttaccaggaacatatgactgaggcccagattcatgtatttgaaagtcaaaaacaaaaggatcagctatttgattttcaacaactgaccaaacaacttcatgttactaatgagaacatggaagtgactaaccaacagtttctgaaaacagtaactgaacaaagtgtgataatcgaacaactccgaaaaaaacttaggagtgagctgagtcgacagaaacttcatacccaagagctgctttctcagctggaaatggcaaatgaaaaggtagctgagaatgaaaagctaattctagagcatcaagaaaaagccaacagacttcaaaggcgtctaagtcaggcagaagagagagctgcttcagcttcccagcagctcagtgtgattacagtgcagagaagaaaagcagcctccctgatgaatctggaaaatatttaaaaatattcatagttcactcacagaactttagagttgggaaagcagttggactagaagtgtattgaaatggtaaagcctgcaaagtataatagttaaggcttgtgttatttcgcgtaagcattgttgttctgttttgagggttattggaaaacagagcagtgaccacttcctgtaagtaaagaaaatataatcctatattgagcttcagtggagaataaaccagctgagaagaactcattgccttcatcaatgtgtctgttttttaattcctcctttttcccttgaaaggacataataattttcaaactatgcaaatttctctttcataagaaagagtttttaagaaaattctagaatttaatatttcagtttccaagatttgagaattttacatctaattgttacttctaactcatttttaaagttcctaagtatccattttattatgaactcataaatgtaataaattgtgcactttct

SEQ ID NO: 325664 - protein, 64 aa, Artificial Sequence
  derived and/or modified sequence
MDFKIEHTWDGFPVKHEPVFIRLNPGDRGVMMDISAPFFRDPPAPLGEPGKPFNELWDYEVVEA

SEQ ID NO: 325665 - DNA, 465 bp, Artificial Sequence
  derived and/or modified sequence
ggctgaaaagaagaagccagtgtttgagaaaagcttcgtggtctgtgttctctagttgttccctcttctctctgacattcctttcgtcgtcgccagaatttttgtggatttggtggttgtatgaagaataagtgaatctaccagaacttcctagtagctaagatcttgattcccagaggatccagtaactgagacacctgcacactttacaataaataaaagacaaaggatgacataagaacccatggtgcttatagttacaagacttcagatggattttaaaattgaacacacttgggatggttttccagtgaagcatgagcccgtatttatcaggctgaatccaggtgacagaggagtgatgatggacattagtgctccatttttcagggatcctccagccccacttggagaaccaggaaaacctttcaatgaactgtgggattatgaagttgtggaagcatt

SEQ ID NO: 325666 - DNA, 195 bp, Artificial Sequence
  derived and/or modified sequence
atggacttcaagatcgagcacacctgggacggcttccccgtgaagcacgagcccgtgttcatcagactgaaccccggcgacagaggcgtgatgatggacatcagcgcccccttcttcagagacccccccgcccccctgggcgagcccggcaagcccttcaacgagctgtgggactacgaggtggtggaggcctag

SEQ ID NO: 325667 - DNA, 195 bp, Artificial Sequence
  derived and/or modified sequence
atggatttcaagattgaacacacttgggacggtttccctgtgaagcacgagcccgtgttcatcaggctgaacccgggcgatcgcggcgtgatgatggatatcagtgcgccgttttttcgtgacccacctgctccactgggggaaccaggaaagccatttaacgagctctgggactatgaggtggtggaggcttag

SEQ ID NO: 325668 - DNA, 195 bp, Artificial Sequence
  derived and/or modified sequence
atggacttcaagattgagcacacctgggatggcttccctgtgaagcatgagcccgtcttcatccggctgaaccctggggacagaggagtgatgatggacatcagcgcccccttcttccgggaccccccagcccccctgggggagcccgggaagcccttcaatgagctgtgggactatgaggtggtggaggcctag

SEQ ID NO: 325669 - DNA, 195 bp, Artificial Sequence
  derived and/or modified sequence
atggacttcaagatcgagcacacctgggacggcttccccgtgaagcacgagccagtcttcatccggctgaatccaggggatagaggtgttatgatggacatctctgccccattctttcgggatccgcctgctccccttggagaaccaggaaaacctttcaacgaattgtgggactatgaggtggtggaggcctag

SEQ ID NO: 325670 - DNA, 195 bp, Artificial Sequence
  derived and/or modified sequence
atggactttaaaatcgaacatacctgggacggttttccagttaagcatgaacctgtgttcattcggctgaatcccggagaccggggagtaatgatggacatctcagccccttttttcagagacccacccgctccattgggcgaacctggcaagccatttaacgaactatgggactatgaggtcgtggaagcgtag

SEQ ID NO: 325671 - protein, 105 aa, Artificial Sequence [sequence omitted]

SEQ ID NO: 325672 - DNA, 318 bp, Artificial Sequence
  derived and/or modified sequence
atgtacagacccgtgatggccagctgcaccagcgtgagcctgtggatgatcgccctgctggtgttcggcgtgctggccatcttcggcatcaccatcggcctgctggtgcacttcctggccgtggccaacagaatctacttctaccagggcagcttcaagatgctggacatcccctacaacagcaactacgagagagagaccagccccgagaacaactacctgagccagatcctggagaccagatggctgatgcacttcaaggtgctggccttcaccgacaacatcagcttcctgaagagcagccactggtgcaagtag

SEQ ID NO: 325673 - DNA, 318 bp, Artificial Sequence
  derived and/or modified sequence
atgtatcggcctgtcatggctagctgcacttcagtatcactgtggatgattgcacttcttgtattcggagtcctggcgatcttcgggataaccatcggcctgctcgtccactttcttgccgttgccaaccggatctacttctatcagggctccttcaagatgttggatattccctacaactctaattacgagcgggaaaccagtcctgaaaataactacctctcccagattctggaaaccaggtggctgatgcatttcaaagtcctggcttttacggataatattagctttctcaagagctcccactggtgtaagtag

SEQ ID NO: 325674 - DNA, 318 bp, Artificial Sequence
  derived and/or modified sequence
atgtacagacctgtgatggccagctgcacctctgtgtccctgtggatgattgccctgctggtgtttggagtgctggccatcttcggcatcaccatcggcctgctggtgcacttcctggccgtggccaaccgcatctacttctaccagggcagcttcaagatgctggacatcccctacaacagcaactatgagcgggagaccagccctgagaacaactacctgagccagatcctggagacccgctggctgatgcacttcaaggtgctggccttcacagacaacatctccttcctgaagagcagccactggtgcaagtag

SEQ ID NO: 325675 - DNA, 318 bp, Artificial Sequence
  derived and/or modified sequence
atgtaccggcccgtgatggccagctgcaccagcgtgagcctgtggatgatcgcactgttggttttcggggttctagccatctttgggatcactatcggcttactcgttcacttccttgctgtcgcaaataggatttacttttatcagggcagcttcaagatgctggacattccttacaacagcaattacgaacgcgaaacatctcccgaaaataactatctttcccaaatcctggaaacaagatggcttatgcactttaaagtcctggcatttacagataacatctcattcttgaagagctcacactggtgtaaatag

SEQ ID NO: 325676 - DNA, 318 bp, Artificial Sequence
  derived and/or modified sequence
atgtaccgcccagtcatggccagttgtacctcagtgagtctatggatgatcgctctgttagtgttcggcgtgctggcaattttcggtattacgatcggactcttggttcacttcttagctgtcgccaataggatatatttctaccaagggtcttttaagatgttagatatcccatacaactcaaattatgaaagggagacaagtcccgagaataattatctcagccagattctggagacacgctggctgatgcatttcaaggtgcttgctttcaccgacaatatttccttccttaagagttcccattggtgtaagtag

SEQ ID NO: 325677 - protein, 117 aa, Artificial Sequence
  derived and/or modified sequence
MAYGVPRKNTVKTILRGSCYNVQEPWDIALLAKTWSTNLANIKLPFLEEISFGGSVQLTKCTTIKDGLLPSAESIKLEREYEVKRLCKLKCQENTSKEIQLLLRERPAGLRRPLPSK

SEQ ID NO: 325678 - protein, 81 aa, Artificial Sequence
  derived and/or modified sequence
MAYGVPRKNTVKTILRGSCYNVQEPWDIALLAKTWSTNLANIKLPFLEEISFGGSVQLTKCTTIKDGLLPSAESIKLEREY

SEQ ID NO: 325679 - protein, 113 aa, Artificial Sequence
  derived and/or modified sequence
MAYGVPRKNTVKTILRGSCYNVQEPWDIALLAKTWSTNLANIKLPFLEEISFGGSVQLTKCTTIKDGLLPSAESIKLEREYEVKRLCKLKCQENTSKEIQLLLRERPAGLRRP

SEQ ID NO: 325680 - DNA, 881 bp, Artificial Sequence
  derived and/or modified sequence
ggaggcgtgtgcctgcggcgcggccccgaggcgtgtgcgcggccatgtgcgcttagcgcagcgcgctcttacctcagtaccccggccgcgaccctccgagcccctggagcccgggtaaccaggccgccggcgccggctcgcggggacccgccaccctggaagccccgcgcacacagcgcattcctggcgagtcggaggcagggtggggcccaggtaaagtgaacagagttatctgtgacattccatcaggcacctatgtaacgaaatcataccgtaataactcaccatggcgtatggagtgccaagaaagaacacagtgaaaaccattttgcggggcagttgttataatgtacaggaaccttgggatattgcattgcttgcaaagacctggtccacaaacctagccaatatcaagttgcctttcttggaagaaatttcatttggtggttctgtgcagctcacaaaatgtaccaccattaaagatggactgctcccttctgcagaatctatcaaactcgaaagggagtatgaagtgaagcgtctttgtaaactgaagtgtcaagaaaatacatctaaggaaattcagcttctcctgagggaaaggccagccggtttgagaagacctcttccatctaaatgacacctgaagcgcggattgtagatgaagaaactcagcagcgccggcgggaactgcttctcctgggccgcccaggacccgctcccggccccggccgtcgctgcgctgcagccatcctggcccggcccccacctcaggaagcctcccacggcccgcccagagaccgagaaaatctcttaatttcagtggaactcagtttgtttctctttttaaacattgccagttataaatgtattttatttta

SEQ ID NO: 325681 - DNA, 2306 bp, Artificial Sequence
  derived and/or modified sequence
actttacggcgagattaagctcagggtcaagttctgagcaaaaagtgtcaaggagcctttttgcaacctcctataatattgaaacagattctgtgccctttaaaggagataataactaacatctggggagcgctttacaatttagaaaaggcctttcacacacaggcctgtttcatcttcacaacaatcttataaaacagatatattgttcccatttcccaaataatgaaacggaagcgccgaaaatatctcctatagggctcttcaaactgtggtcaacttagtaaatgatgttgacagtggaagtgtgatcattttattttcctgcctttggaattgaagattgtaattttgcaaaaattttgttgaagatgatgtagctttggttcagagagctggagtacaatggcaccatctcagctcgccgcaacctccacctcctgggttcaagcgattctcctgcctcagcctcccgagtagctgggattacaggttccaagtctcttcttcggcctctcaaacatggtaccatccctaatgaagtcaacgggtccagcatgacaggatggaagtacaagtgtcagcacctatgtaaagtgaacagagttatctgtgacattccatcaggcacctatgtaacgaaatcataccgtaataactcaccatggcgtatggagtgccaagaaagaacacagtgaaaaccattttgcggggcagttgttataatgtacaggaaccttgggatattgcattgcttgcaaagacctggtccacaaacctagccaatatcaagttgcctttcttggaagaaatttcatttggtggttctgtgcagctcacaaaatgtaccaccattaaagatggactgctcccttctgcagaatctatcaaactcgaaagggagtatgaagtgaagcgtctttgtaaactgaagtgtcaagaaaatacatctaaggaaattcagcttctcctgagggaaaggccagccggtttgagaagacctcttccatctaaatgacagtcagttcatgattgaatctgtactctgtgtcttgcatccaaagggcatgaaggtctctggacctttcactatgtatagttcagggcagatatttgaatgcccactggtggatgggccactgcccacagctgtgggttagtacccagttctgacagatcttctgagtccctgacatactcttgttccttgtgtcacaaacgacagcactgtaagtagatgaaaatgcatttggagttgagtcgtttgtgctattcattttaatttttgtaaaattgcactaaaagaagaggaaatttcttcagctgcattgttttcaaaagacatcttaaatatgcatctttgagatcccaaggagggaccaaaagaaggcaagagagaaattctcttaaaaatgataaactgaaacatttcatttggttaagaaaaataatagacttcatttttagtacctccctagtttccaattttcttttttttaaatatatatattttttattgtactttaagttctagggtacatgtgcacaacgtgcaggtttgttacatatgtatacatgggccatgttggtgtgctgcatccagtaactcatcatttacattaggtatatctcctaatgctatccctcccccatacccccaccccacaacaggcccccgtgtgtgatgttccccttcctgtgtccaagtgttctcatttttcaattctcacctatgagtgagaacatgcggtgtttggttttttgtccttgtgatagtttgctgagaatgatggtttccagcttcacccatgtccctacaaaggacatgaactcattattttttatggctgcatagtattccatggtgcatttgtgccacattttcttaatccagtctatcattgttggacatttgggttggttccaagtctttgctattgtgagtagtgccacaataaacatacgtgtgcatgtgtctttatagcagcatgatttatattcctttgggtatatacctagtaatgggatggctgggtcaaatggtatttctagttctagatccctgaggaattgccacactgtcttccacaatggttgaactagtttacagtcccaccaacagtgtaaaagtgttcctatttctccacatcctccccagcacctgttgtttcctgactttttaatgatcctcattctaactggtgtgagatgatatctcattgtggttttgatttgcatttctctgatggccagtgatgatgcacattttttcatgtgcctgttggctgcataaatgtcttcttttg

SEQ ID NO: 325682 - DNA, 448 bp, Artificial Sequence
  derived and/or modified sequence
gcccgcggcgagcgggaaggaggcgtgtgcctgcggcgcggccccgaggcgtgtgcgcggccatgtgcgcttagcgcagcgcgctcttacctcagtaccccggccgcgaccctccgagcccctggagcccgggtaaagtgaacagagttatctgtgacattccatcaggcacctatgtaacgaaatcataccgtaataactcaccatggcgtatggagtgccaagaaagaacacagtgaaaaccattttgcggggcagttgttataatgtacaggaaccttgggatattgcattgcttgcaaagacctggtccacaaacctagccaatatcaagttgcctttcttggaagaaatttcatttggtggttctgtgcagctcacaaaatgtaccaccattaaagatggactgctcccttctgcagaatctatcaaactcgaaagggagtat

SEQ ID NO: 325683 - DNA, 766 bp, Artificial Sequence
  derived and/or modified sequence
ggcgcccgcggcgagcgggaaggaggcgtgtgcctgcggcgcggccccgaggcgtgtgcgcggccatgtgcgcttagcgcagcgcgctcttacctcagtaccccggccgcgaccctccgagcccctggagcccgggtaaccaggccgccggcgccggctcgcggggacccgccaccctggaagccccgcgcacacagcgcattcctggcgagtcggaggcagggtggggcccaggtgtgggaaggagccgaggctgaggccgttcccttctccgcgggctctgtgggcggccgaggcccccacccgtcccgggaaccagttcctcccgggccctgcgcgtccgtccggggaagggtaaagtgaacagagttatctgtgacattccatcaggcacctatgtaacgaaatcataccgtaataactcaccatggcgtatggagtgccaagaaagaacacagtgaaaaccattttgcggggcagttgttataatgtacaggaaccttgggatattgcattgcttgcaaagacctggtccacaaacctagccaatatcaagttgcctttcttggaagaaatttcatttggtggttctgtgcagctcacaaaatgtaccaccattaaagatggactgctcccttctgcagaatctatcaaactcgaaagggagtatgaagtgaagcgtctttgtaaactgaagtgtcaagaaaatacatctaaggaaattcagcttctcctgagggaaaggccagccggtttgagaagacct

SEQ ID NO: 325684 - DNA, 354 bp, Artificial Sequence
  derived and/or modified sequence
atggcctacggcgtgcccagaaagaacaccgtgaagaccatcctgagaggcagctgctacaacgtgcaggagccctgggacatcgccctgctggccaagacctggagcaccaacctggccaacatcaagctgcccttcctggaggagatcagcttcggcggcagcgtgcagctgaccaagtgcaccaccatcaaggacggcctgctgcccagcgccgagagcatcaagctggagagagagtacgaggtgaagagactgtgcaagctgaagtgccaggagaacaccagcaaggagatccagctgctgctgagagagagacccgccggcctgagaagacccctgcccagcaagtag

SEQ ID NO: 325685 - DNA, 246 bp, Artificial Sequence
  derived and/or modified sequence
atggcctacggcgtgcccagaaagaacaccgtgaagaccatcctgagaggcagctgctacaacgtgcaggagccctgggacatcgccctgctggccaagacctggagcaccaacctggccaacatcaagctgcccttcctggaggagatcagcttcggcggcagcgtgcagctgaccaagtgcaccaccatcaaggacggcctgctgcccagcgccgagagcatcaagctggagagagagtactag

SEQ ID NO: 325686 - DNA, 342 bp, Artificial Sequence
  derived and/or modified sequence
atggcctacggcgtgcccagaaagaacaccgtgaagaccatcctgagaggcagctgctacaacgtgcaggagccctgggacatcgccctgctggccaagacctggagcaccaacctggccaacatcaagctgcccttcctggaggagatcagcttcggcggcagcgtgcagctgaccaagtgcaccaccatcaaggacggcctgctgcccagcgccgagagcatcaagctggagagagagtacgaggtgaagagactgtgcaagctgaagtgccaggagaacaccagcaaggagatccagctgctgctgagagagagacccgccggcctgagaagaccctag

SEQ ID NO: 325687 - DNA, 354 bp, Artificial Sequence
  derived and/or modified sequence
atggcctatggggtgccgcgaaagaacactgttaaaaccatcctgcgtgggagttgctacaatgtgcaggaaccctgggatatcgcccttcttgctaagacttggtctaccaatcttgccaacataaagttgccgtttttagaggaaatcagctttggaggaagcgtgcagctgacaaagtgcacaaccattaaggacggactactaccttctgcagaatccattaagctggagagagagtacgaagtgaagcgcttgtgcaagctgaagtgccaggagaacacttctaaagaaattcagctgttgttgcgggagcgtcccgctgggctgcgccgccctttgcccagcaagtag

SEQ ID NO: 325688 - DNA, 354 bp, Artificial Sequence
  derived and/or modified sequence
atggcgtacggagtaccccgcaagaacacagtcaagacaatcttgcggggctcctgctacaacgtgcaggagccctgggatatcgcgctgttggccaagacctggagtaccaatctggcgaacattaaactcccctttctggaggagatatctttcggaggaagcgttcaactcactaaatgcacaacgatcaaagacggacttttgccttccgctgagtctattaagctggagagagaatatgaagtgaagcggttgtgcaagttgaagtgtcaagaaaacacctctaaagaaatccaacttctgttgcgagaacgtcctgccggcctccggcggcctctaccctcgaagtag

SEQ ID NO: 325689 - DNA, 246 bp, Artificial Sequence
  derived and/or modified sequence
atggcttacggggtgcctcgcaaaaatactgtgaagacaatcctgagaggaagctgctacaacgttcaagagccatgggatattgcgctgctagctaagacctggagtacaaacttggctaatatcaagctccctttcctcgaggaaattagcttcggaggtagcgtacagttgacaaagtgtactaccataaaggacgggctgctccccagtgctgaaagcataaagctggagagggagtactag

SEQ ID NO: 325690 - DNA, 342 bp, Artificial Sequence
  derived and/or modified sequence
atggcctatggcgtcccgaggaaaaacacggtgaagacaatattacgtggcagctgctacaatgtccaggaaccttgggatattgccttactggctaagacctggagcaccaacctggccaatatcaagctgccttttctggaagaaattagttttggcggctctgtgcagcttaccaaatgcactactatcaaggatggcctgttgccgtccgccgaatcaatcaagttagagcgtgagtatgaagtcaaaagactttgtaagctgaaatgccaagagaatacttccaaggagattcaactgctgctgcgagaaagacccgctggcctacgccgcccttag

SEQ ID NO: 325691 - DNA, 354 bp, Artificial Sequence
  derived and/or modified sequence
atggcctatggagtgcccaggaagaacacagtgaagaccatcctgcggggcagctgctacaacgtgcaggagccctgggacatcgccctgctggccaagacctggagcaccaacctggccaacatcaagctgcccttcctggaggagatcagctttggaggctctgtgcagctgaccaagtgcaccaccatcaaggatggcctgctgcccagcgctgagagcatcaagctggagcgggagtatgaggtgaagaggctgtgcaagctgaagtgccaggagaacaccagcaaggagatccagctgctgctgcgggagaggcctgctggcctgcggcggcccctgcccagcaagtag

SEQ ID NO: 325692 - DNA, 246 bp, Artificial Sequence
  derived and/or modified sequence
atggcctatggagtgcccaggaagaacacagtgaagaccatcctgcggggcagctgctacaacgtgcaggagccctgggacatcgccctgctggccaagacctggagcaccaacctggccaacatcaagctgcccttcctggaggagatcagctttggaggctctgtgcagctgaccaagtgcaccaccatcaaggatggcctgctgcccagcgctgagagcatcaagctggagcgggagtactag

SEQ ID NO: 325693 - DNA, 342 bp, Artificial Sequence
  derived and/or modified sequence
atggcctatggagtgcccaggaagaacacagtgaagaccatcctgcggggcagctgctacaacgtgcaggagccctgggacatcgccctgctggccaagacctggagcaccaacctggccaacatcaagctgcccttcctggaggagatcagctttggaggctctgtgcagctgaccaagtgcaccaccatcaaggatggcctgctgcccagcgctgagagcatcaagctggagcgggagtatgaggtgaagaggctgtgcaagctgaagtgccaggagaacaccagcaaggagatccagctgctgctgcgggagaggcctgctggcctgcggcggccctag

SEQ ID NO: 325694 - DNA, 354 bp, Artificial Sequence
  derived and/or modified sequence
atggcctacggcgtgccccggaagaacaccgtgaagaccatcctgcgaggaagttgttataacgtccaagagccatgggacatcgctctactggcaaaaacttggtccacaaatttagctaacattaaattgccctttcttgaggagatatccttcggaggtagtgtgcagctgaccaaatgcaccactattaaggacggccttcttcccagtgcggaaagcattaagctggagagggagtacgaggtgaaacggctgtgtaaactaaaatgccaggagaatacgtcaaaagaaattcagttgttgctccgggaaagacccgcgggcctccgtcggcccctgcctagcaagtag

SEQ ID NO: 325695 - DNA, 354 bp, Artificial Sequence
  derived and/or modified sequence
atggcctacggcgtgccccggaagaacaccgtgaagaccatcctgcgcggcagttgctataatgtccaagaaccttgggatattgcactactggccaaaacctggtcaactaatcttgcaaatattaaactgcccttcttagaagagatcagcttcggcggttccgttcaactgacgaagtgtaccacaatcaaggacggactgcttccatcggccgaaagtattaaattggaaagagagtatgaggttaaaaggttgtgtaagctgaagtgtcaggaaaatacaagtaaggagattcagctgctcctgagggaaagacccgccggcctgcgaaggcccctcccgagcaagtag

SEQ ID NO: 325696 - DNA, 246 bp, Artificial Sequence
  derived and/or modified sequence
atggcctacggcgtgccccggaagaacaccgtgaagaccatcctgcgaggctcctgctacaacgtccaggagccgtgggacatcgcactgctggcgaagacatggtccaccaatttagcgaacattaaactcccattcctggaggagatcagcttcggtggcagcgttcaactgactaagtgtaccaccatcaaggatggacttttgcccagcgccgaaagcatcaagctcgaaagagagtactag

SEQ ID NO: 325697 - DNA, 342 bp, Artificial Sequence
  derived and/or modified sequence
atggcctacggcgtgccccggaagaacaccgtgaagaccatcctgcgcggaagctgttataacgtccaagagccttgggatattgcccttctggccaagacctggtcaactaatctggctaacattaaactccccttcctggaggagatatccttcggcggaagcgttcagcttacaaagtgtacaaccatcaaagacggcttactgcccagtgcagaatcaatcaagctcgaacgcgaatatgaggtaaagagactgtgtaaattgaaatgtcaggaaaacacctctaaggaaatccagttgctgctccgcgaacgacccgccggtcttaggaggccgtag

SEQ ID NO: 325698 - DNA, 354 bp, Artificial Sequence
  derived and/or modified sequence
atggcttatggcgttccaaggaaaaataccgttaaaacaattctcaggggttcctgttataatgttcaggagccgtgggacatcgccttactcgctaagacctggtctacaaatctcgccaatattaaattgccttttctcgaggaaatttcatttgggggatctgtccaattaactaaatgcacaacaatcaaagacggtttgctgccaagcgcggagagcattaagctggagcgcgagtatgaggtcaaaaggttgtgtaaactgaagtgccaagagaatacaagtaaggagatacagttgctgttaagagaaaggcccgcaggtctgcggagaccattgcccagtaagtag

SEQ ID NO: 325699 - DNA, 354 bp, Artificial Sequence
  derived and/or modified sequence
atggcctacggcgtgccaaggaagaacaccgtcaaaacgatcctgagagggtcctgctacaacgtccaggaaccatgggatatagctctcctagccaaaacatggtccaccaacctagccaatattaagctcccttttctggaggagatttcgttcggtggcagtgtccagctgaccaaatgtaccactataaaggatggcttactgcccagcgccgagagcatcaaattggagagggagtatgaggtaaagagactatgtaagttaaagtgccaggaaaacacaagtaaggaaattcagctgctcctgcgggagaggcctgcaggcctaaggcggccactcccaagcaagtag

SEQ ID NO: 325700 - DNA, 246 bp, Artificial Sequence
  derived and/or modified sequence
atggcgtacggcgtgccgagaaaaaacacagttaagactattctaaggggttcgtgctacaacgttcaggagccttgggacattgcattgcttgccaaaacctggagcaccaatctcgcgaacattaaattgcccttccttgaggagatttctttcggaggctccgtgcagctgaccaagtgtacgactatcaaagacggattgctccctagcgccgagtcaattaaactagagagagagtattag

SEQ ID NO: 325701 - DNA, 342 bp, Artificial Sequence
  derived and/or modified sequence
atggcttacggtgtacctagaaaaaatactgtaaagaccatactgcgaggctcatgttacaatgtgcaggagccctgggacatagcactgctggcaaagacatggtctacaaatctggcaaacatcaaattgcccttcctcgaggagatcagctttggagggtccgtccagctaactaaatgtacgactatcaaggacggtctactcccctccgccgagagtatcaaactggaaagagagtatgaagtgaagaggctctgcaagttgaagtgtcaggagaatacttcaaaggaaattcagttgctcctgagagagaggcccgctggcctgagacgtccttag

SEQ ID NO: 325702 - protein, 226 aa, Artificial Sequence
  derived and/or modified sequence
MKVLILACLVALALARETIESLSSSEESITEYKQKVEKVKHEDQQQGEDEHQDKIYPSFQPQPLIYPFVEPIPYGFLPQNILPLAQPAVVLPVPQPEIMEVPKAKDTVYTKGRVMPVLKSPTIPFFDPQIPKLTDLENLHLPLPLLQPLMQQVPQPIPQTLALPPQPLWSVPQPKVLPIPQQVVPYPQRAVPVQALLLNQELLLNPTHQIYPVTQPLAPVHNPISV

SEQ ID NO: 325703 - DNA, 681 bp, Artificial Sequence
  derived and/or modified sequence
atgaaagttttaatcctggcgtgtctggtcgccctcgcacttgcacgcgaaactatcgaatctttgtccagcagcgaagaaagcatcacagagtacaagcagaaggtggaaaaagtcaagcacgaggaccagcaacagggtgaggacgaacatcaagataagatttatccttcatttcagccccagcctctcatttatccttttgtcgagccgattccttacggctttcttccacagaatattttgccgttggcccagcctgcggtagtcttgccagtccctcagccagaaattatggaagttcctaaggctaaggatacagtctacaccaagggcagggtcatgcctgtcctgaaatcccctaccatccctttctttgatccccagatacccaaactgaccgatttagaaaatctgcatctgcccctcccactcctgcagcccctgatgcagcaggtgccccagcctattccacagaccctagctctgcctcctcagccgctatggtcagtgccccaaccaaaagttttacctatacctcagcaggtcgttccatatccacagcgcgcggtacctgtccaggcattgttgctgaaccaggaactcctcctaaatccaactcatcagatttaccctgtgacccagcctcttgctccagtgcacaatcctatcagtgtgtag

SEQ ID NO: 325704 - DNA, 681 bp, Artificial Sequence
  derived and/or modified sequence
atgaaggtgctgatcctggcctgcctggtggccctggccctggcccgggagaccatcgagagcctgagcagcagcgaggagagcatcacagagtacaagcagaaggtggagaaggtgaagcatgaggaccagcagcagggagaagatgagcaccaggacaagatctaccccagcttccagccccagcccctcatctacccctttgtggagcccatcccctacggcttcctgccccagaacatcctgcccctggcccagcctgctgtggtgctgcctgtgccccagcctgagatcatggaggtgcccaaggccaaggacacagtgtacaccaagggccgggtgatgcctgtgctgaagagccccaccatccccttctttgacccccagatccccaagctgacagacctggagaacctgcacctgcccctgcccctgctgcagcccctgatgcagcaggtgccccagcccatcccccagaccctggccctgcccccccagcccctgtggagcgtgccccagcccaaggtgctgcccatcccccagcaggtggtgccctacccccagagagctgtgcctgtgcaggccctgctgctgaaccaggagctgctgctgaaccccacccaccagatctaccctgtgacccagcccctggcccctgtgcacaaccccatctctgtgtag

SEQ ID NO: 325705 - DNA, 681 bp, Artificial Sequence
  derived and/or modified sequence
atgaaggtgctgatcctggcctgcctggtggccctggccctggccagggaaaccatcgagagtctgtcctccagcgaagagtccatcaccgaatataaacagaaagtcgagaaagtgaaacatgaggaccaacaacaaggggaagatgagcatcaggataaaatttacccctcattccaacctcagccactgatttacccattcgtagagccaatcccttacgggtttctcccccagaatatcctgcccctggcacaacccgccgttgtccttccagtgccccagcccgaaataatggaagtcccaaaggccaaagataccgtgtacacaaagggaagggtcatgcccgttctaaaatccccgacaatccctttcttcgatccacagattcctaaattaacagatttggagaatctccacttgccactcccattgctgcagccattgatgcagcaggtccctcagcccattccccagacccttgccctgccaccccagcccctgtggtccgtgcctcagcctaaggtattgcctatccctcagcaggttgtcccctatccccagcgagccgtcccagtgcaagctctgttactgaaccaggagctgctgttgaatccaacgcaccagatctatcctgtgacccaacctctggcgcccgtgcacaatcctatttcagtgtag

SEQ ID NO: 325706 - DNA, 681 bp, Artificial Sequence
  derived and/or modified sequence
atgaaggtactgattctcgcctgcttggtggcactggcactcgctcgggaaacgatcgagtccctatcatccagtgaagagtcaataaccgaatacaagcagaaagtcgagaaagttaaacacgaggatcagcagcagggggaggatgagcaccaggacaaaatataccctagcttccagccacagcccttgatttatcctttcgtagaaccgatcccgtatggttttctgccccaaaacatactaccactagcccagcccgctgtggttctacccgtcccccagcctgagattatggaggtgcccaaagcgaaggataccgtgtatacaaaaggcagagtaatgcctgtgctcaaatcccccaccatacccttctttgatccgcagattccaaagctaacagatctggaaaacttgcatctcccgctaccactgctgcagccactcatgcaacaagtcccgcagcccattccacaaacgctagccctgcccccacaacctctttggtcagtcccgcagccaaaagtcctcccaatcccacaacaggtcgtcccttatcctcagcgtgccgtccctgttcaggccctgctcctcaatcaggagctactcttaaatcctacccaccaaatctatcctgtgacccagcccctggctcctgtccacaaccctatctccgtatag

SEQ ID NO: 325707 - DNA, 1066 bp, Artificial Sequence
  derived and/or modified sequence
gacttagtagccatgaaggtcctcatcctcgcctgcctggtggctcttgctcttgcaagggagaccatagaaagcctttcaagcagtgaggaatctattacagaatacaagcagaaagttgagaaggttaaacatgaggaccagcagcaaggagaggatgaacaccaggataaaatctacccctctttccagccacagcctctgatctatccattcgttgaacctatcccctatggttttcttccacaaaacattctgcctcttgctcagcctgctgtggtgctgcctgtccctcagcctgaaataatggaagtccctaaagctaaagacactgtctacactaagggcagagtgatgcctgtccttaaatctccaacgatacccttttttgaccctcaaatcccaaaactcactgatcttgaaaatctgcatcttcctctgcctctgctccagcccttgatgcagcaggtccctcagcctattcctcagactcttgcacttccccctcagcccctgtggtctgttcctcagcccaaagtcctgcctatcccccagcaagtggtgccctaccctcagagagctgtgcctgttcaagcccttctgctcaaccaagaacttctacttaaccccacccaccagatctaccctgtgactcagccacttgccccagttcataaccccattagtgtctaagaagatttcaaagttaattttccctccttatttttgaattgactgagactggaaatatgatgccttttccgtctttgtatcacgttaccccaaattaagtatgtttgaatgagtttatatggaaaaaatgaactttgtccctttatttattttatatattatgtcattcatttaatttgaaatttgactcatgaactatttacattttccaaatcttaattcaactagtaccacagaagttcaatactcatttggaaatgctacaaacatatcaaacatatgtatacaaattgtttctggaattgtgcttatttttatttctttaagaatctatttcctttccagtcatttcaataaattattcttaagcata

SEQ ID NO: 325708 - DNA, 681 bp, Artificial Sequence
  derived and/or modified sequence
atgaaggtgctgatcctggcctgcctggtggccctggccctggccagagagaccatcgagagcctgagcagcagcgaggagagcatcaccgagtacaagcagaaggtggagaaggtgaagcacgaggaccagcagcagggcgaggacgagcaccaggacaagatctaccccagcttccagccccagcccctgatctaccccttcgtggagcccatcccctacggcttcctgccccagaacatcctgcccctggcccagcccgccgtggtgctgcccgtgccccagcccgagatcatggaggtgcccaaggccaaggacaccgtgtacaccaagggcagagtgatgcccgtgctgaagagccccaccatccccttcttcgacccccagatccccaagctgaccgacctggagaacctgcacctgcccctgcccctgctgcagcccctgatgcagcaggtgccccagcccatcccccagaccctggccctgcccccccagcccctgtggagcgtgccccagcccaaggtgctgcccatcccccagcaggtggtgccctacccccagagagccgtgcccgtgcaggccctgctgctgaaccaggagctgctgctgaaccccacccaccagatctaccccgtgacccagcccctggcccccgtgcacaaccccatcagcgtgtag

SEQ ID NO: 325709 - protein, 182 aa, Artificial Sequence
  derived and/or modified sequence
MKSFLLVVNALALTLPFLAVEVQNQKQPACHENDERPFYQKTAPYVPMYYVPNSYPYYGTNLYQRRPAIAINNPYVPRTYYANPAVVRPHAQIPQRQYLPNSHPPTVVRRPNLHPSFIAIPPKKIQDKIIIPTINTIATVEPTPAPATEPTVDSVVTPEAFSESIITSTPETTTVAVTPPTA

SEQ ID NO: 325710 - DNA, 836 bp, Artificial Sequence
  derived and/or modified sequence
atttttcttgggtcttctctacagctgacaggccaactcaacctactgccaaccaagacctgactggcacgaggaaaggtgcaataatgaagagttttcttctagttgtcaatgccctggcattaaccctgccttttttggctgtggaggttcaaaaccagaaacaaccagcatgccatgagaatgatgaaagaccattctatcagaaaacagctccatatgtcccaatgtattatgtgccaaatagctatccttattatggaaccaatttgtaccaacgtagaccagctatagcaattaataatccatatgtgcctcgcacatattatgcaaacccagctgtagttaggccacatgcccaaattcctcagcggcaatacctgccaaatagccacccacccactgtggtacgtcgcccaaacctgcatccatcatttattgccatccccccaaagaaaattcaggataaaataatcatccctaccatcaataccattgctactgttgaacctacaccagctcctgccactgaaccaacggtggacagtgtagtcactccagaagctttttcagagtccatcatcacgagcacccctgagacaaccacagttgcagttactccacctacggcataaaaacaccaaggaaatatcaaagaacacaacgcaggacttgctgaaaccaaattactacttcacactctccttcagccatttgtctgccttcagtcaacagaaaatgtgattttcacagattcagctcttctctccttacattttacattcatgccacattcaatattttgattcttgcacaataaagccaactgattgcaa

SEQ ID NO: 325711 - protein, 515 aa, Artificial Sequence
  derived and/or modified sequence
MHTTESKNEHLEDENFQTSTTPQSLIDPNNTAQEETKTVLSDTEEIKPQTKKETYISCPLRGVLNVIITNGVILFVIWCMTWSILGSEALPGGNLFGLFIIFYSAIIGGKILQLIRIPLVPPLPPLLGMLLAGFTIRNVPFINEHVHVPNTWSSILRSIALTIILIRAGLGLDPQALRHLKVVCFRLAVGPCLMEASAAAVFSHFIMKFPWQWAFLLGFVLGAVSPAVVVPYMMVLQENGYGVEEGIPTLLMAASSMDDILAITGFNTCLSIVFSSGGILNNAIASIRNVCISLLAGIVLGFFVRYFPSEDQKKLTLKRGFLVLTMCVSAVLGSQRIGLHGSGGLCTLVLSFIAGTKWSQEKMKVQKIITTVWDIFQPLLFGLVGAEVSVSSLESNIVGISVATLSLALCVRILTTYLLMCFAGFSFKEKIFIALAWMPKATVQAVLGPLALETARVSAPHLEPYAKDVMTVAFLAILITAPNGALLMGILGPKMLTRHYDPSKIKLQLSTLEHH

SEQ ID NO: 325712 - protein, 220 aa, Artificial Sequence
  derived and/or modified sequence
MHTTESKNEHLEDENFQTSTTPQSLIDPNNTAQEETKTVLSDTEEIKPQTKKETYISCPLRGVLNVIITNGVILFVIWCMTWSILGSEALPGGNLFGLFIIFYSAIIGGKILQLIRIPLVPPLPPLLGMLLAGFTIRNVPFINEHVHVPNTWSSILRSIALTIILIRAGLGLDPQALRHLKVVCFRLAVGPCLMEASAAAVFSHFIMKFPWQWAFLLGLF

SEQ ID NO: 325713 - protein, 50 aa, Artificial Sequence
  derived and/or modified sequence
MHTTESKNEHLEDENFQTSTTPQSLIDPNNTAQEETKTVLSDTEEIKPQT

SEQ ID NO: 325714 - DNA, 1548 bp, Artificial Sequence
  derived and/or modified sequence
atgcacaccaccgagagcaagaacgagcacctggaggacgagaacttccagaccagcaccaccccccagagcctgatcgaccccaacaacaccgcccaggaggagaccaagaccgtgctgagcgacaccgaggagatcaagccccagaccaagaaggagacctacatcagctgccccctgagaggcgtgctgaacgtgatcatcaccaacggcgtgatcctgttcgtgatctggtgcatgacctggagcatcctgggcagcgaggccctgcccggcggcaacctgttcggcctgttcatcatcttctacagcgccatcatcggcggcaagatcctgcagctgatcagaatccccctggtgccccccctgccccccctgctgggcatgctgctggccggcttcaccatcagaaacgtgcccttcatcaacgagcacgtgcacgtgcccaacacctggagcagcatcctgagaagcatcgccctgaccatcatcctgatcagagccggcctgggcctggacccccaggccctgagacacctgaaggtggtgtgcttcagactggccgtgggcccctgcctgatggaggccagcgccgccgccgtgttcagccacttcatcatgaagttcccctggcagtgggccttcctgctgggcttcgtgctgggcgccgtgagccccgccgtggtggtgccctacatgatggtgctgcaggagaacggctacggcgtggaggagggcatccccaccctgctgatggccgccagcagcatggacgacatcctggccatcaccggcttcaacacctgcctgagcatcgtgttcagcagcggcggcatcctgaacaacgccatcgccagcatcagaaacgtgtgcatcagcctgctggccggcatcgtgctgggcttcttcgtgagatacttccccagcgaggaccagaagaagctgaccctgaagagaggcttcctggtgctgaccatgtgcgtgagcgccgtgctgggcagccagagaatcggcctgcacggcagcggcggcctgtgcaccctggtgctgagcttcatcgccggcaccaagtggagccaggagaagatgaaggtgcagaagatcatcaccaccgtgtgggacatcttccagcccctgctgttcggcctggtgggcgccgaggtgagcgtgagcagcctggagagcaacatcgtgggcatcagcgtggccaccctgagcctggccctgtgcgtgagaatcctgaccacctacctgctgatgtgcttcgccggcttcagcttcaaggagaagatcttcatcgccctggcctggatgcccaaggccaccgtgcaggccgtgctgggccccctggccctggagaccgccagagtgagcgccccccacctggagccctacgccaaggacgtgatgaccgtggccttcctggccatcctgatcaccgcccccaacggcgccctgctgatgggcatcctgggccccaagatgctgaccagacactacgaccccagcaagatcaagctgcagctgagcaccctggagcaccactag

SEQ ID NO: 325715 - DNA, 1548 bp, Artificial Sequence
  derived and/or modified sequence
atgcacacgacggagtccaagaatgagcaccttgaggatgaaaatttccaaacttctactacccctcagtctctcatagatcctaataacactgcacaagaggaaacaaagaccgtcctcagcgacactgaggaaatcaaaccacagactaagaaggagacgtacatctcatgccccctgaggggggtcctgaacgtcataattactaatggcgtgatactctttgtgatctggtgtatgacttggtccattctgggctccgaggccttgcctggcggtaacctcttcgggctgtttatcatattttatagtgccatcatcggcggtaaaatcctgcagttgatccggatcccactcgtgccacccctccccccacttctcggaatgctcctggcagggttcaccattcggaatgtaccttttatcaatgagcatgtgcacgtcccgaatacttggtcctccattctgcggtccatcgctttaacgattattttgatcagggcagggctgggcctcgaccctcaagctcttcgccacctaaaggtggtgtgttttcgactggccgtgggaccctgcttaatggaggccagcgcggcagcagttttttcacattttataatgaagtttccttggcagtgggcttttctcctggggttcgtgctgggggcagtatcacccgccgtggtggtgccatatatgatggtattacaggaaaatggttacggcgtcgaagaaggcattccaactcttctgatggcggctagtagcatggacgacatcctcgccattaccggatttaacacgtgcctgtcgatcgtctttagctccgggggcatcctaaacaatgctatcgcaagcatccgcaatgtgtgcatatcccttctcgccggaattgtattagggtttttcgtgcgttattttccctccgaagatcagaaaaagctgaccctgaagagggggtttctggtgttgaccatgtgcgtctcagccgtgcttgggtctcaacgtattggtctccatggatccgggggcctgtgcactctggtgctcagcttcatcgctgggaccaagtggagccaagaaaagatgaaggtacagaaaattattaccacggtctgggacattttccaacccttactttttggactggtgggtgcggaagtgagtgtgagctccctcgagtctaacatcgtgggcatctctgtagcaaccctgtccttggctctgtgtgtgcgtattctgaccacttacctcctgatgtgttttgccggattttctttcaaagagaaaatcttcatcgcgttggcctggatgccgaaagccaccgtccaggctgtcctcgggccactcgccctggagactgcacgagtctccgccccacacctggaaccatatgctaaagatgtcatgacagtggcgttccttgccattctgatcaccgctccgaatggtgctctcttgatgggcatacttggcccaaaaatgctgacccgccactatgacccctccaagataaaactgcagctatctacacttgaacaccactag

SEQ ID NO: 325716 - DNA, 1548 bp, Artificial Sequence
  derived and/or modified sequence
atgcacaccacagagagcaagaatgagcacctggaggatgagaacttccagaccagcaccaccccccagagcctgattgaccccaacaacacagcccaggaggagaccaagacagtgctgagtgacacagaggagatcaagccccagaccaagaaggagacctacatcagctgccccctgcggggcgtgctgaatgtcatcatcaccaacggggtcatcctgtttgtgatctggtgcatgacctggagcatcctgggcagcgaggccctgcccggcggcaacctgtttggcctcttcatcatcttctacagcgccatcattggaggcaagatcctgcagctgatccgcatccccctggtgccccccctgccccccctgctgggcatgctgctggccggcttcaccatcagaaatgtgcccttcatcaatgaacatgtgcacgtgcccaacacctggagcagcatcctgcggagcatcgccctgaccatcatcctgatccgggccggcctgggcctggacccccaggccctgcggcacctgaaggtggtgtgcttccggctggccgtgggcccctgcctgatggaggccagcgctgctgctgtgttcagccacttcatcatgaagttcccctggcagtgggccttcctgctgggctttgtgctgggcgctgtgtccccagctgtggtggtgccctacatgatggtgctgcaggagaatggctatggagtggaggagggcatccccaccctgctgatggccgccagctccatggatgacatcctggccatcaccggcttcaacacctgcctgagcatcgtgttcagcagcggcggcatcctgaacaatgccatcgccagcatcagaaatgtgtgcatcagcctgctggccggcatcgtgctgggcttctttgtgcgctacttccccagcgaggaccagaagaagctgaccctgaagaggggcttcctggtgctgaccatgtgtgtgtctgctgtgctgggcagccagagaattggcctgcacggcagcggcggcctgtgcaccctggtgctgtccttcatcgccggcaccaagtggagccaggagaagatgaaggtgcagaagatcatcaccaccgtgtgggacatcttccagcccctgctgtttggcctggtgggcgctgaggtgtctgtgagcagcctggagagcaacatcgtgggcatctctgtggccaccctgagcctggccctgtgtgtgcgcatcctgaccacctacctgctgatgtgctttgctggcttctccttcaaggagaagatcttcatcgccctggcctggatgcccaaggccaccgtgcaggccgtgctgggccccctggccctggagacagcccgggtgtctgccccccacctggagccctatgccaaggatgtgatgacagtggccttcctggccatcctgatcacagccccaaatggagccctgctgatgggcatcctgggccccaagatgctgaccaggcactatgaccccagcaagatcaagctgcagctgagcaccctggagcaccactag

SEQ ID NO: 325717 - DNA, 1548 bp, Artificial Sequence
  derived and/or modified sequence
atgcacaccaccgagagcaagaacgagcacctggaggacgagaactttcagactagcacaactcctcaaagcctgattgaccccaacaacaccgcgcaagaagagaccaagaccgtgctatccgacactgaggagatcaagccccaaactaaaaaggagacatacatcagttgccccctgagaggggtgctgaacgtcataataactaatggcgtgattttgtttgtgatctggtgcatgacatggagtatcttgggtagcgaggccctcccaggaggcaacctttttggcctgttcattattttttattcagccataattggagggaagatcctgcagcttatacggatccccttggttccacctctccctcccctcctaggaatgctactggcgggtttcactatcagaaatgtgccgttcatcaacgagcatgttcacgtgccaaatacttggtccagcattttgagaagcatcgccctgacaataattctgattcgggcaggactgggcctcgaccctcaggcactccgacatctgaaggttgtgtgttttaggcttgctgtcggtccgtgcctgatggaggcttccgcagctgcagttttctcacacttcattatgaaatttccctggcaatgggccttcctgctggggtttgtgctgggcgctgtttccccagcggtagtcgtgccttatatgatggtgctgcaggagaatggctatggagttgaagagggcattcccacactcctaatggccgcctcttctatggacgatattctcgctatcaccggctttaatacctgcctgtcaatcgtcttttcctcaggtggtatattgaacaatgcaattgcttcaatccggaacgtttgcatcagtttgttggctggcattgtgctcggattctttgtaagatatttccccagcgaggatcagaagaagctgactttaaaacgcgggttcctagttctcacaatgtgcgtgtctgctgtcctgggctcgcagcgtatcggtctgcacggttctggcgggctctgcaccctggtcttgagcttcatcgccgggaccaaatggagccaggaaaagatgaaggtgcaaaaaatcatcacaacagtatgggacatctttcaacccctcctttttgggttggtcggtgccgaagtctcagtgtcttccctcgagtcaaacattgtgggcatctccgtcgctacattaagtctcgccttgtgcgtccggatcctgacaacctatctcctaatgtgttttgccggatttagcttcaaagagaagatcttcatcgccttggcctggatgcccaaggcgacagttcaggcggtgctggggccgttggctctcgagaccgccagggtgtcagcaccacatctcgagccctatgcaaaggatgtcatgacagtcgcttttcttgccatcttgatcactgcccccaatggggctctcctgatgggtatcctggggccaaaaatgctcacaagacattacgatccatctaagattaagctacaattaagcacactagagcatcactag

SEQ ID NO: 325718 - DNA, 1548 bp, Artificial Sequence
  derived and/or modified sequence
atgcataccacggaatctaaaaatgagcatctggaggatgagaattttcagacatcaaccactcctcagagcctcatcgatcctaacaacaccgcgcaagaagaaaccaaaaccgtgttaagtgatactgaggaaattaaaccccagaccaagaaggagacatatatttcctgtccactgaggggagtactcaacgtgatcattactaacggagtcatccttttcgtcatttggtgcatgacctggtcaattctcggatccgaggcgctgccaggcggtaacctgtttggcctttttataatcttctacagcgctatcattggtggtaagatcctccagttgatcagaattcccctggtccccccactccctccgctgttgggtatgctcctggctgggtttacaatccggaacgtgccatttatcaacgagcatgttcatgttcctaatacgtggtcctccatactccggtctatcgctctgaccattattctgatcagagccggtcttggcctggacccccaggctttacgtcacctcaaagtggtctgcttcagactggctgtgggcccttgtctaatggaagcatcagccgcagcagtgtttagccacttcatcatgaaatttccttggcagtgggcatttctcctcgggtttgtgcttggggctgtgtcacctgcagtcgtggtcccatatatgatggtattacaggaaaatggctatggagttgaggagggaatccctacgctgctaatggccgcatccagcatggatgacatcctggcaataacgggattcaacacttgtctgtcgatagtgtttagttcaggtggcatactgaacaacgcaatcgcaagtatccgcaacgtgtgcatttcactgctggcaggcattgtactcggcttcttcgtgaggtatttcccctctgaggatcagaaaaagctgaccctgaaacggggatttctggtgttgacaatgtgtgtcagcgccgtgctcggtagccagcgtatcggactgcacggttcaggcggattatgtaccctggtgctgagtttcattgcgggaaccaagtggagccaggaaaaaatgaaagtgcagaaaatcattaccacagtgtgggatattttccagccacttctgttcggtctggtgggggcagaggtaagtgtgagctcccttgagagcaacattgttggtatctcagtcgctacgctatccctcgcactttgcgtgaggatcctaaccacgtacctgcttatgtgctttgctgggttctcttttaaagaaaagattttcatagcattggcttggatgccaaaggccactgtgcaggccgtgttggggccacttgctctggagaccgctcgggtcagtgccccacacctcgagccttatgcaaaagacgtgatgactgtcgcctttctggccatcctcattacagcgcctaacggggcacttctgatgggaatactggggcctaagatgctcacacgccactatgacccatcaaaaattaagctccagctctccacccttgagcaccattag

SEQ ID NO: 325719 - DNA, 1879 bp, Artificial Sequence
  derived and/or modified sequence
gccccgccccgcccctgcgcggaagtctatccgggctttcgcgtcaccaccctgcccacctgggtggcgcgtggcttacgcaacggtcactgggctcctgggccgctcccgggccagcgagggctgcgaaagaagttgtagcatgcataccacagaatcaaaaaatgaacatttggaggatgaaaacttccaaacatctacaactcctcagagtctcattgatcctaataatactgcacaggaagaaactaaaactgtcttatcagatacagaagaaataaaaccacagacaaaaaaggagacatacatttcttgtcctctaagaggagtattgaatgtaattattacaaatggagttatactgtttgtgatatggtgtatgacctggtcaatcttaggctctgaagctctccctggtggaaatttatttgggttgttcattattttttatagtgccattattgggggaaaaattttacaactcattagaatacctttagtgcctccacttccacctcttcttgggatgttactggctggttttacgattaggaatgttccattcatcaatgaacatgtccatgttcctaacacatggtcttcaattttaagaagcattgcccttaccattattctaataagagctgggcttggactcgatccacaggctttgaggcatttgaaggtcgtttgtttcagattggctgtaggtccatgccttatggaggcaagtgcagctgctgttttttcacacttcattatgaaatttccctggcaatgggcatttctattaggttttgttctaggtgctgtctctcctgctgttgttgtcccttacatgatggtgctgcaagaaaatggatatggtgttgaggaaggcattccaaccttattaatggctgctagcagtatggatgacattctggctatcactggattcaatacatgcttgagcatagtcttttcctcaggtggtatacttaataacgccatagcctctataaggaacgtatgtattagtctgctggcaggaattgttttgggattttttgttcgatattttccaagtgaagaccagaaaaaacttacattgaagagaggattccttgttttgactatgtgtgtttctgccgtcttaggcagccaacgtattggtttacatggatctggaggattatgcacactagtgttgagtttcattgcagggacaaaatggtcccaagaaaagatgaaagtccaaaagattattacgactgtatgggatatttttcaaccacttctttttggtttagttggagcagaagtatctgtttcatcgcttgaatcaaatattgttggcatatctgttgccactctaagtttggcattatgtgttcgaattttaaccacatatctattgatgtgctttgctggttttagttttaaggagaaaatatttattgctttagcatggatgcccaaagctacagtacaggctgtgttaggtcctctggctctagaaacagcaagagtctccgcaccccacttggaaccatatgcgaaggatgtgatgacagtagcatttttagccatcttgatcacagctccaaatggagctctacttatgggcattctggggcctaaaatgcttacacgccattatgatccaagcaaaataaaactgcagttgtcaacattagaacatcattaaaaagtttacctgtcatcatctgcctgcttcttttaatgaattatttcacatgacagaagaattttaaagtagaaatatgtggggactgtacagagaatccaggatttagtaaacatgtgatttcagtacagggcttttcttggactttttactccaaagttaatttaataaaaataatattaaatggaa

SEQ ID NO: 325720 - DNA, 663 bp, Artificial Sequence
  derived and/or modified sequence
atgcacaccaccgagagcaagaacgagcacctggaggacgagaacttccagaccagcaccaccccccagagcctgatcgaccccaacaacaccgcccaggaggagaccaagaccgtgctgagcgacaccgaggagatcaagccccagaccaagaaggagacctacatcagctgccccctgagaggcgtgctgaacgtgatcatcaccaacggcgtgatcctgttcgtgatctggtgcatgacctggagcatcctgggcagcgaggccctgcccggcggcaacctgttcggcctgttcatcatcttctacagcgccatcatcggcggcaagatcctgcagctgatcagaatccccctggtgccccccctgccccccctgctgggcatgctgctggccggcttcaccatcagaaacgtgcccttcatcaacgagcacgtgcacgtgcccaacacctggagcagcatcctgagaagcatcgccctgaccatcatcctgatcagagccggcctgggcctggacccccaggccctgagacacctgaaggtggtgtgcttcagactggccgtgggcccctgcctgatggaggccagcgccgccgccgtgttcagccacttcatcatgaagttcccctggcagtgggccttcctgctgggcctgttctag

SEQ ID NO: 325721 - DNA, 153 bp, Artificial Sequence
  derived and/or modified sequence
atgcacaccaccgagagcaagaacgagcacctggaggacgagaacttccagaccagcaccaccccccagagcctgatcgaccccaacaacaccgcccaggaggagaccaagaccgtgctgagcgacaccgaggagatcaagccccagacctag

SEQ ID NO: 325722 - DNA, 663 bp, Artificial Sequence
  derived and/or modified sequence
atgcacaccactgagagcaaaaatgaacacctggaagatgagaacttccagactagcacaacccctcagtcactgatagaccctaacaataccgcccaggaggagaccaagacagttctcagtgacaccgaagaaatcaagccacagactaagaaagagacgtatatttcctgccccttacggggcgtcctgaacgtcattatcacaaacggggtaattctgttcgtgatctggtgtatgacctggtccatcttggggagcgaagctctgcctgggggcaatctgtttggcctcttcatcatcttttacagtgcaattatcggcggtaagattttgcagctcatacgcattcccctcgtgcccccattgcctccattgctgggaatgctattagcaggatttacgatccggaatgttccctttattaatgagcacgtccacgtgccaaacacctggtcaagcatcttaaggtctatcgctctgacgatcatcctcattcgggcgggcctgggtctcgacccccaggctcttcggcacctgaaggtggtttgcttcaggcttgcagtggggccctgtctgatggaggcctccgccgccgccgtcttttcccatttcattatgaaatttccttggcagtgggcttttcttcttggattgttctag

SEQ ID NO: 325723 - DNA, 153 bp, Artificial Sequence
  derived and/or modified sequence
atgcacaccactgaaagcaagaacgagcacctcgaagatgaaaactttcagacaagtacaacgccgcagtctctgatcgaccccaataacaccgcgcaagaagagacaaagactgtcctgagcgataccgaggagatcaaacctcagacatag

SEQ ID NO: 325724 - DNA, 663 bp, Artificial Sequence
  derived and/or modified sequence
atgcacaccacagagagcaagaatgagcacctggaggatgagaacttccagaccagcaccaccccccagagcctgattgaccccaacaacacagcccaggaggagaccaagacagtgctgagtgacacagaggagatcaagccccagaccaagaaggagacctacatcagctgccccctgcggggcgtgctgaatgtcatcatcaccaacggggtcatcctgtttgtgatctggtgcatgacctggagcatcctgggcagcgaggccctgcccggcggcaacctgtttggcctcttcatcatcttctacagcgccatcattggaggcaagatcctgcagctgatccgcatccccctggtgccccccctgccccccctgctgggcatgctgctggccggcttcaccatcagaaatgtgcccttcatcaatgaacatgtgcacgtgcccaacacctggagcagcatcctgcggagcatcgccctgaccatcatcctgatccgggccggcctgggcctggacccccaggccctgcggcacctgaaggtggtgtgcttccggctggccgtgggcccctgcctgatggaggccagcgctgctgctgtgttcagccacttcatcatgaagttcccctggcagtgggccttcctgctgggcctcttctag

SEQ ID NO: 325725 - DNA, 153 bp, Artificial Sequence
  derived and/or modified sequence
atgcacaccacagagagcaagaatgagcacctggaggatgagaacttccagaccagcaccaccccccagagcctgattgaccccaacaacacagcccaggaggagaccaagacagtgctgagtgacacagaggagatcaagccccagacctag

SEQ ID NO: 325726 - DNA, 663 bp, Artificial Sequence
  derived and/or modified sequence
atgcacaccaccgagagcaagaacgagcacctggaggacgagaacttccagacatctacaactcctcagtccctgattgaccctaacaacacggctcaggaagagaccaagaccgtcttatctgataccgaggagattaagccacagaccaaaaaagaaacatatatctcctgtcctttaagaggggtcctgaacgttatcataacaaatggggtcatattatttgtaatatggtgtatgacatggtcaattttagggagcgaggcccttcccgggggaaacctgtttgggctcttcattattttctacagtgctatcatcggaggcaaaattctacagctgattcgcatccccttggtgcctcccctgcctccacttctgggtatgctgttggcaggtttcaccatcaggaacgttccctttatcaacgagcacgtacacgtccctaacacctggtcatccatcttgcgatcaatcgcccttacaattatcctcattcgggcaggactcggtctcgacccacaagctctgagacaccttaaagttgtgtgcttccgcctggctgtggggccctgccttatggaggcctccgctgcagccgttttctctcattttatcatgaagttcccctggcagtgggccttcctcctcggcctcttttag

SEQ ID NO: 325727 - DNA, 153 bp, Artificial Sequence
  derived and/or modified sequence
atgcacaccaccgagagcaagaacgagcacctggaggacgagaactttcagaccagcaccacccctcagtccctcatagaccccaataatacagctcaggaagagacaaaaacagtcctcagcgatactgaagagattaaaccacagacctag

SEQ ID NO: 325728 - DNA, 663 bp, Artificial Sequence
  derived and/or modified sequence
atgcacacgaccgaatctaagaatgaacacctcgaggatgagaattttcagacttctacaacaccgcagtctctaattgatcccaataataccgcacaggaagagacaaagactgtcctttctgacaccgaagaaatcaaaccccagactaagaaggagacttacatatcctgccctctcagaggcgttctgaacgtgatcataaccaacggtgtcattctctttgtcatctggtgtatgacctggtctatcctcgggtctgaggcactacctgggggaaatcttttcggtctgtttattatcttttactccgccattatcgggggtaagatcctgcaactgatccggatcccgctcgtccctccactaccacctctactgggcatgctgttggctggttttacaattcgcaacgttccatttatcaacgagcatgtgcacgtccctaatacatggagctcgatccttaggtctatcgccctcaccattatacttattcgggcaggacttggactcgacccgcaggcactgcgacatctgaaggtggtgtgttttcgattagccgtcgggccttgcctcatggaagcttcagctgccgcagtgttttcgcacttcattatgaaattcccgtggcaatgggcttttcttctgggattattttag

SEQ ID NO: 325729 - DNA, 153 bp, Artificial Sequence
  derived and/or modified sequence
atgcataccaccgagagcaagaacgaacatctggaggacgaaaatttccagacatcgacgactccacagagcctcattgatcccaataacactgcccaggaggagaccaagaccgtacttagtgacacagaggaaatcaaaccacagacctag

SEQ ID NO: 325730 - DNA, 782 bp, Artificial Sequence
  derived and/or modified sequence
ggaagtctatccgggctttcgcgtcaccaccctgcccacctgggtggcgcgtggcttacgcaacggtcactgggctcctgggccgctcccgggccagcgagggctgcgaaagaagttgtagcatgcataccacagaatcaaaaaatgaacatttggaggatgaaaacttccaaacatctacaactcctcagagtctcattgatcctaataatactgcacaggaagaaactaaaactgtcttatcagatacagaagaaataaaaccacagacaaaaaaggagacatacatttcttgtcctctaagaggagtattgaatgtaattattacaaatggagttatactgtttgtgatatggtgtatgacctggtcaatcttaggctctgaagctctccctggtggaaatttatttgggttgttcattattttttatagtgccattattgggggaaaaattttacaactcattagaatacctttagtgcctccacttccacctcttcttgggatgttactggctggttttacgattaggaatgttccattcatcaatgaacatgtccatgttcctaacacatggtcttcaattttaagaagcattgcccttaccattattctaataagagctgggcttggactcgatccacaggctttgaggcatttgaaggtcgtttgtttcagattggctgtaggtccatgccttatggaggcaagtgcagctgctgttttttcacacttcattatgaaatttccctggcaatgggcatttctattaggacttttt

SEQ ID NO: 325731 - DNA, 568 bp, Artificial Sequence
  derived and/or modified sequence
acctgggtggcgcgtggcttacgcaacggtcactgggctcctgggccgctcccgggccagcgagggctgcgaaagaagttgtagaaatcaaaggtaatttgaggcttcagctctgtgcagagtgcaaggaaccaaagatgcaaagttgggagtcaccagcatatggaaaactacctagggcaagtgtgctcaccgataacattgcagtgactagtgtaaagcagaggaaaagaagccaacaaaagagatggaagaatagccaatgaagtaggaagaaaatctgaagagtgcagtgacataaaagccgagactggccgggcatggtggctcatgcctgtaatcccagtactttgggaggctaagatgaggaaattgagactcagagaggttaagggtcttgacgaaggacatatacctacatgcataccacagaatcaaaaaatgaacatttggaggatgaaaacttccaaacatctacaactcctcagagtctcattgatcctaataatactgcacaggaagaaactaaaactgtcttatcagatacagaagaaataaaaccacagac

SEQ ID NO: 325732 - protein, 297 aa, Artificial Sequence
  derived and/or modified sequence
FVLGAVSPAVVVLYTMVLQENGYGVEEDIPTLLMAASSMDDLLAITGFNTCLSIVFYSGGMINNAIASLRNVCISLLAGIVLGFFVRYFPSEDQKKITLKRGFLVLITFVSAVLGSQPIGLHGSGGLCTLVLHFIEWTKWSQEKMKVQKIITNVWDIFQPLLFGLVGAEVSVSLLESNIVGISVSTLSLALCVRILNIYLLMCFAGFSFKEKIFIALAWMPKATVQAVLGPLALETARVSTPHLETYAKDVMTVAFLAIMITAPNGALLMGILGPKMLTRHYDPSKIKLQLSTLEHH

SEQ ID NO: 325733 - DNA, 894 bp, Artificial Sequence
  derived and/or modified sequence
ttcgtgctgggcgccgtgagccccgccgtggtggtgctgtacaccatggtgctgcaggagaacggctacggcgtggaggaggacatccccaccctgctgatggccgccagcagcatggacgacctgctggccatcaccggcttcaacacctgcctgagcatcgtgttctacagcggcggcatgatcaacaacgccatcgccagcctgagaaacgtgtgcatcagcctgctggccggcatcgtgctgggcttcttcgtgagatacttccccagcgaggaccagaagaagatcaccctgaagagaggcttcctggtgctgatcaccttcgtgagcgccgtgctgggcagccagcccatcggcctgcacggcagcggcggcctgtgcaccctggtgctgcacttcatcgagtggaccaagtggagccaggagaagatgaaggtgcagaagatcatcaccaacgtgtgggacatcttccagcccctgctgttcggcctggtgggcgccgaggtgagcgtgagcctgctggagagcaacatcgtgggcatcagcgtgagcaccctgagcctggccctgtgcgtgagaatcctgaacatctacctgctgatgtgcttcgccggcttcagcttcaaggagaagatcttcatcgccctggcctggatgcccaaggccaccgtgcaggccgtgctgggccccctggccctggagaccgccagagtgagcaccccccacctggagacctacgccaaggacgtgatgaccgtggccttcctggccatcatgatcaccgcccccaacggcgccctgctgatgggcatcctgggccccaagatgctgaccagacactacgaccccagcaagatcaagctgcagctgagcaccctggagcaccactag

SEQ ID NO: 325734 - DNA, 894 bp, Artificial Sequence
  derived and/or modified sequence
ttcgtcctgggtgcagttagccctgctgtcgtcgtgctgtatactatggtcctgcaggagaatggctatggcgtggaggaggacatccctaccctgctgatggctgctagtagcatggacgacctgttggcgatcacaggcttcaacacttgcctgtctattgtcttttactcgggcggcatgatcaataacgctattgcttctctgaggaatgtgtgcatttcactccttgccggaatagtgctaggcttcttcgtccgctattttcccagcgaagaccaaaaaaaaatcacactgaaacgtgggttcctggtcctgatcactttcgtgagtgcagtcttaggttcacagcctatcgggctccacggctctggaggcctgtgcacgctggtgctgcatttcatcgaatggaccaagtggagccaagaaaagatgaaagtgcagaagatcattaccaacgtgtgggacatcttccagcctttgcttttcggcctcgtgggggccgaggtgtctgtctcccttctcgaatctaacatagtgggcatcagcgtgtctacgcttagtttggccctttgtgtgaggattcttaacatctatctgctaatgtgtttcgccgggttctcattcaaagaaaaaatcttcatagctttagcttggatgcctaaggctaccgtccaggctgttctgggcccactggctctcgagactgcccgggtgagcacccctcacctggaaacctatgccaaggatgtgatgaccgtagctttcctggctataatgattacagcccccaatggggcgctgttaatgggcatactgggacccaagatgctcacacggcattacgacccaagtaagatcaaactacagttgagtactctggaacaccactag

SEQ ID NO: 325735 - DNA, 894 bp, Artificial Sequence
  derived and/or modified sequence
tttgtgctgggcgctgtgtccccagctgtggtggtgctgtacaccatggtgctgcaggagaatggctatggagtggaggaggacatccccaccctgctgatggccgccagctccatggatgacctgctggccatcaccggcttcaacacctgcctgagcatcgtgttctacagcggcggcatgatcaacaatgccatcgccagcctgagaaatgtgtgcatcagcctgctggccggcatcgtgctgggcttctttgtgcgctacttccccagcgaggaccagaagaagatcaccctgaagaggggcttcctggtgctgatcacctttgtgtctgctgtgctgggcagccagcccatcggcctgcacggcagcggcggcctgtgcaccctggtgctgcacttcatcgagtggaccaagtggagccaggagaagatgaaggtgcagaagatcatcaccaacgtgtgggacatcttccagcccctgctgtttggcctggtgggcgctgaggtgtctgtgtccctgctggagagcaacatcgtgggcatctctgtgtccaccctgagcctggccctgtgtgtgcgcatcctgaacatctacctgctgatgtgctttgctggcttctccttcaaggagaagatcttcatcgccctggcctggatgcccaaggccaccgtgcaggccgtgctgggccccctggccctggagacagcccgggtgtccaccccccacctggagacctacgccaaggatgtgatgacagtggccttcctggccatcatgatcacagccccaaatggagccctgctgatgggcatcctgggccccaagatgctgaccaggcactatgaccccagcaagatcaagctgcagctgagcaccctggagcaccactag

SEQ ID NO: 325736 - DNA, 894 bp, Artificial Sequence
  derived and/or modified sequence
ttcgtgctgggcgccgtgagccccgccgtggtggtgctgtacaccatggtgctgcaggaaaatggatatggagtcgaggaagacattccaacacttttaatggctgcgtcatctatggatgacctgcttgccataacaggttttaacacatgcctgtcaatagtcttctactcaggtggtatgatcaataatgcaatagcatcactccgtaatgtctgcatcagtctccttgccgggatcgtgctggggttcttcgtaagatactttccgtccgaggatcaaaagaagatcactctgaagcggggcttcctggtgctgattacattcgtatccgcagtgctgggatcacagcccatagggctgcacggtagtggggggctatgtacattggtgctgcacttcattgagtggactaaatggtcacaagagaagatgaaggtccagaagataattaccaacgtgtgggacatttttcagcctttgctattcgggctcgtcggagccgaggtgtccgtttctctactggaatcaaatattgttggaatctctgtgtcaacgctgtcactggccttatgtgtgcgtatcctgaatatatacctcctgatgtgcttcgccggtttctcctttaaggaaaaaatattcatcgctctggcttggatgccaaaagcaaccgtccaagcagtgcttggaccactcgctctggagacggcaagagtgtccaccccccacctggagacctacgccaaggatgtcatgacggtggcattccttgccatcatgattacggccccgaatggtgccctgctgatgggaatactgggcccaaagatgttgaccaggcattatgatcccagcaagattaaactgcagctaagtacacttgagcatcattag

SEQ ID NO: 325737 - DNA, 894 bp, Artificial Sequence
  derived and/or modified sequence
tttgtgttaggggctgtttcaccagctgtggtcgtactgtacacaatggtgttacaggaaaatgggtacggtgtggaggaggacatccccacgcttttgatggcggcttcgtcaatggatgacctgctggctatcacagggttcaatacctgtctatctatagtcttttactcaggtggcatgatcaacaacgctatcgcgtcactacgcaacgtttgtatctccctgctggcaggtattgttctgggcttctttgttaggtacttcccttcagaagaccagaagaagattaccctgaagaggggattcttagtcctgatcacgtttgtgtccgccgttctcggtagtcaaccaattgggctgcacggcagcgggggtttgtgtacactggttctgcatttcatcgagtggaccaagtggagccaggaaaaaatgaaagtccagaaaatcattactaatgtctgggatatttttcagcccttgttgttcggattggtgggcgctgaggtgtcagtgtccctcctggaaagcaacattgtgggtattagtgtcagcacactgagtcttgcactttgcgtccggatcctcaatatctacctgttgatgtgcttcgctgggttttcctttaaggaaaaaatattcatcgcactggcatggatgcccaaggctaccgtgcaagctgtgttggggccacttgccctggaaacagccagggtgtcaactccacacctggaaacatatgccaaggacgtgatgactgttgcattcctagcaatcatgatcactgcacctaacggcgctctgcttatgggcattctgggcccaaagatgctaactcggcattacgatccgagtaagataaagttgcaactctccaccctggagcaccactag

SEQ ID NO: 325738 - DNA, 908 bp, Artificial Sequence
  derived and/or modified sequence
tttgttctaggtgctgtctctcctgctgttgttgtcctttacacgatggtgttgcaagaaaatggatatggtgttgaggaagacattccaaccttactaatggctgctagcagtatggatgaccttctggctatcactggattcaatacatgcttgagcatagtcttctactcgggtggtatgattaataacgccatagcctctctaaggaacgtatgtattagtctgctggccggaattgttttgggattttttgttcgatattttccaagtgaagaccagaaaaaaattacattgaagagaggattccttgttttgattacgtttgtttctgctgtcttaggcagccaacctattggtttacatggatctggaggattatgcacactagtgttgcatttcattgaatggacaaaatggtcccaagaaaagatgaaagtccaaaagattattacaaatgtatgggatatttttcaaccacttctttttggtttagttggagcagaagtatctgtttcattgcttgaatcaaatattgttggcatatctgtttccactctgagtttggcattatgtgttcgaattttaaacatatatctattgatgtgctttgctggttttagttttaaggagaaaatatttattgctttagcatggatgcccaaagctacagtacaggctgtgttaggtcctctggctctagaaacagcaagagtctccacaccccacttggaaacatatgcgaaggatgtgatgacagtagcatttttagccatcatgatcacagctccaaatggagctctacttatgggcattctggggcctaaaatgcttacacgccattatgatccaagcaaaataaaactgcaattgtcaacattagaacatcattaaaaagtttacctgtc

SEQ ID NO: 325739 - DNA, 3165 bp, Artificial Sequence
  derived and/or modified sequence
gccagtgtctgcctctctgcccccacgggggtttatttgatctcacattaaccaaggaggagaatgtgagaaaagggggaaaatgcccaggaggaagcaggagcagcccaagcgccttccctcaccctcagaagaggaaagtggaaagcctttccagtgtccaatatgtggtttggttattaaaaggaagagttactggaagcggcacatggtgattcacacaggtttaaaaagtcatcagtgtccgctctgtccattccggtgtgctcgcaaggacaatctcaaatcccacatgaaggttcatcagcaccaggatcggggagagacctttcagtgccagctgtgcccttttacttcctcacgccacttcagcctgaaactccacatgcgttgccatcagcacttcctgaggacagaagccaaggtgaaggaggagatcccagacccagatgtcaagggatctccccacctcagtgacagtgcctgcctggggcagcaaagggaaggaggagggacagagctagtggggaccatgatgacgtctaacactccagagaggactagccagggaggggctggcgtctcgcctttgctggtgaaggaggaacccaaggaagataacggcctgcccacctcctttactttgaatgctgccgacaggcccgccaaccacacaaagctgaaagacccctccgagtatgtggccaacagtgcgtcagcattgttcagccaggacatctctgttaagatggcgtctgattttctcatgaagctgtcagctgcaaatcagaaggagcccatgaatcttaattttaaagtgaaagaggagcctaaggaaggggagtccctaagcacgactttgcctcggtccagctatgtgttcagcccggaatctgaagtgtcagccccaggcgtctctgaggacgcactaaagccccaggaagggaagggaagtgtgctaaggcgggatgtgtcagtcaaagcagcctctgaacttctcatgaaactctcagcggaaagctacaaggaaacacagatggtgaagattaaagaggaacccatggaggttgacatccaggactcccatgtctcgatatcacccagccggaatgttggctacagcactttaatcgggcgagagaaaaccgaacccttacagaagatgccagagggcagagtacccccagagagaaacctcttcagtcaggatatctctgtgaaaatggcttccgagctcctctttcaactgtcagaaaaagtgagcaaagagcacaatcatacaaaagaaaacaccatccggaccacgaccagccctttcttttcagaagacacatttagacaatcaccattcacctccaattcaaaagaactgctgcccagtgactccgtgctgcacggaagaatatcagctccagaaacagaaaagatagtcctagaggcaggaaatggattaccatcctggaaattcaatgaccagctttttccctgtgacgtgtgtgggaaagtgtttggccgacagcagacattgtcccgacacctctcgctgcacacagaggaaagaaaatacaaatgccacttgtgcccctatgctgctaagtgccgtgcaaatctgaaccagcacttgaccgtccattccgtgaagctggtgagtacagacaccgaggacattgtcagcgccgtcacctctgaaggcagtgatgggaagaaacatccttattattacagttgtcacgtgtgtggatttgagaccgagctcaatgtccagtttgtcagccacatgtcactccacgtggacaaggagcagtggatgttttcgatctgctgcactgcctgcgacttcgtcaccatggaggaagcagagataaagactcacattggcaccaagcacacaggggaagacaggaagacccccagcgaatcaaatagcccctcttcatcctccctctcagctctgagtgattcagccaacagcaaagatgattcagatggctcccagaaaaacaagggcgggaacaatctgctggtcatctctgtcatgcctgggagccagccctcactgaacagtgaggaaaagccagagaaagggttcgaatgtgttttttgcaactttgtctgcaagacgaagaacatgtttgagcgtcatctgcagatacacctcatcacccggatgtttgagtgtgatgtgtgccacaagttcatgaagacccccgaacagctgctggagcataagaaatgccacactgtccccaccggtgggctcaactcaggacagtggtgagtttcagactcctctaggtgcccattctgcatttattccaccaaccgccccgctgccatggagtgccacctcaagacccactacaagatggagtacaagtgccggatctgccagacggtgaaggccaaccagctggagctggagacgcacacccgggagcaccgcctgggcaaccactacaagtgcgaccagtgcggctacctgtccaagaccgccaacaagctcatcgagcacgtgcgcgtccacaccggggagcggcccttccactgtgaccagtgcagctacagctgcaagcgcaaggacaatctcaacctgcacaagaagctgaagcacgccccacgccagaccttcagctgcgaagagtgcctgttcaagaccacacaccctttcgtcttcagccgccacgtcaagaagcaccagagtggggactgccccgaggaggacaagaagggcctgtgtccagcccccaaggaaccggccggcccgggggccccgctcctggtggtcgggagctcccggaatctcctgtctcccctgtcagttatgtctgcctcccaggctctgcagaccgtggccctgtcggcagcccacggcagcagctcagagcccaacctggcactcaaggctttggccttcaacggctcccctttgcgctttgacaagtaccggaactcagattttgcccatctcattcccttgacaatgttataccccaagaaccacttggatctcacattccaccctccccgacctcagactgcgcctcccagcatcccctcacccaaacactccttcctggcctatctcggactgagagaaagagcagagactgtctgagggcagccatgttctgtaccaaaaacagagagacaaaagacaaaaaaaaa

SEQ ID NO: 325740 - DNA, 4119 bp, Artificial Sequence
  derived and/or modified sequence
cccagcaggcaaaaaaagaagaaaaaaaaattaacctcagatgttagtaggcaggaagaggcggagggagagctcagtgaaggagaacactggtatggaaactcttcagagactccgtcagaagcatcctatggggaagtccaggagaactataagttgtctctggaggaccggatccaggagcagtccacgtccccggacacctccttgggaagcacgactcccagcagccacacgttggagctggtggcactggacagtgaggtcctgcgagactcactgcagtgtcaagatcacctttccccgggagtgtcttctttgtgtgacgatgacccaggctccaacaagcccctgagcagcaatttgaggcggctgctggaggctggttccctcaaactcgatgctgcagccacggctaatggcagagtggagtcccccgtaaacgttggctcgaacctctccttttccccgccttcccaccacgcccagcagctcagtgttctggccaggaagttggccgagaagcaggaacagaatgaccaatacactccaagtaaccgttttatatggaatcaaggtaagtggttgccaaactcaaccaccacctgcagcttgtctccggattcagccatcctaaaactgaaagctgcagccaatgccgttctgcaggacaaatctctcaccaggactgaggagaccatgcgatttgagtccttttcctccccttttagctcccagtctgccagttctaccttggccgctttgtccaagaaggtcagtgaaagaagtttgactcctggtcaggagcaccctccaccggccagctccttcctttccctggcttctatgacctcctcagcggcccttctgaaggaggtggccgcaagggctgcgggcagtcttctggctgagaaatcatcgctgctgcctgaggaccctctaccgcccccgccttcagagaagaaaccagaaaaagtcactccgccacctccaccgccacctccaccacctccaccaccaccaccacaatccctggaattattattactcccagttcctaagggaagagtttctaaaccctccaattcagcctcagaagaggaaagtggaaagcctttccagtgtccaatatgtggtttggttattaaaaggaagagttactggaagcggcacatggtgattcacacaggtttaaaaagtcatcagtgtccgctctgtccattccggtgtgctcgcaaggacaatctcaaatcccacatgaaggttcatcagcaccaggatcggggagagacctttcagtgccagctgtgcccttttacttcctcacgccacttcagcctgaaactccacatgcgttgccatcagcacttcctgaggacagaagccaaggtgaaggaggagatcccagacccagatgtcaagggatctccccacctcagtgacagtgcctgcctggggcagcaaagggaaggaggagggacagagctagtggggaccatgatgacgtctaacactccagagaggactagccagggaggggctggcgtctcgcctttgctggtgaaggaggaacccaaggaagataacggcctgcccacctcctttactttgaatgctgccgacaggcccgccaaccacacaaagctgaaagacccctccgagtatgtggccaacagtgcgtcagcattgttcagccaggacatctctgttaagatggcgtctgattttctcatgaagctgtcagctgcaaatcagaaggagcccatgaatcttaattttaaagtgaaagaggagcctaaggaaggggagtccctaagcacgactttgcctcggtccagctatgtgttcagcccggaatctgaagtgtcagccccaggcgtctctgaggacgcactaaagccccaggaagggaagggaagtgtgctaaggcgggatgtgtcagtcaaagcagcctctgaacttctcatgaaactctcagcggaaagctacaaggaaacacagatggtgaagattaaagaggaacccatggaggttgacatccaggactcccatgtctcgatatcacccagccggaatgttggctacagcactttaatcgggcgagagaaaaccgaacccttacagaagatgccagagggcagagtacccccagagagaaacctcttcagtcaggatatctctgtgaaaatggcttccgagctcctctttcaactgtcagaaaaagtgagcaaagagcacaatcatacaaaagaaaacaccatccggaccacgaccagccctttcttttcagaagacacatttagacaatcaccattcacctccaattcaaaagaactgctgcccagtgactccgtgctgcacggaagaatatcagctccagaaacagaaaagatagtcctagaggcaggaaatggattaccatcctggaaattcaatgaccagctttttccctgtgacgtgtgtgggaaagtgtttggccgacagcagacattgtcccgacacctctcgctgcacacagaggaaagaaaatacaaatgccacttgtgcccctatgctgctaagtgccgtgcaaatctgaaccagcacttgaccgtccattccgtgaagctggtgagtacagacaccgaggacattgtcagcgccgtcacctctgaaggcagtgatgggaagaaacatccttattattacagttgtcacgtgtgtggatttgagaccgagctcaatgtccagtttgtcagccacatgtcactccacgtggacaaggagcagtggatgttttcgatctgctgcactgcctgcgacttcgtcaccatggaggaagcagagataaagactcacattggcaccaagcacacaggggaagacaggaagacccccagcgaatcaaatagcccctcttcatcctccctctcagctctgagtgattcagccaacagcaaagatgattcagatggctcccagaaaaacaagggcgggaacaatctgctggtcatctctgtcatgcctgggagccagccctcactgaacagtgaggaaaagccagagaaagggttcgaatgtgttttttgcaactttgtctgcaagacgaagaacatgtttgagcgtcatctgcagatacacctcatcacccggatgtttgagtgtgatgtgtgccacaagttcatgaagacccccgaacagctgctggagcataagaaatgccacactgtccccaccggtgggctcaactcaggacagtggtgagtttcagactcctctaggtgcccattctgcatttattccaccaaccgccccgctgccatggagtgccacctcaagacccactacaagatggagtacaagtgccggatctgccagacggtgaaggccaaccagctggagctggagacgcacacccgggagcaccgcctgggcaaccactacaagtgcgaccagtgcggctacctgtccaagaccgccaacaagctcatcgagcacgtgcgcgtccacaccggggagcggcccttccactgtgaccagtgcagctacagctgcaagcgcaaggacaatctcaacctgcacaagaagctgaagcacgccccacgccagaccttcagctgcgaagagtgcctgttcaagaccacacaccctttcgtcttcagccgccacgtcaagaagcaccagagtggggactgccccgaggaggacaagaagggcctgtgtccagcccccaaggaaccggccggcccgggggccccgctcctggtggtcgggagctcccggaatctcctgtctcccctgtcagttatgtctgcctcccaggctctgcagaccgtggccctgtcggcagcccacggcagcagctcagagcccaacctggcactcaaggctttggccttcaacggctcccctttgcgctttgacaagtaccggaactcagattttgcccatctcattcccttgacaatgttataccccaagaaccacttggatctcacattccaccctccccgacctcagactgcgcctcccagcatcccctcacccaaacactccttcctggcctatctcggactgagagaaagagcagagactgtctgagggcagccatgttctgtaccaaaaacagagagacaaaag

SEQ ID NO: 325741 - DNA, 7463 bp, Artificial Sequence
  derived and/or modified sequence
aaaaaaaaaaaaaggaaaaaagaaaggaaagaaaagaagaaaacccctcttctggctccaggaaacaagcttcaacccattgcacacaccggagaaggggtttccccctgcccgcccgcccgccccccaactacctccccgctcctgccagtgtctgcctctctgcccccacgggggtttatttgatctcacattaaccaaggaggagaatgtgagaaaagggggaaaatgcccaggaggaagcaggagcagcccaagcgccttccctcacatgttagtaggcaggaagaggcggagggagagctcagtgaaggagaacactggtatggaaactcttcagagactccgtcagaagcatcctatggggaagtccaggagaactataagttgtctctggaggaccggatccaggagcagtccacgtccccggacacctccttgggaagcacgactcccagcagccacacgttggagctggtggcactggacagtgaggtcctgcgagactcactgcagtgtcaagatcacctttccccgggagtgtcttctttgtgtgacgatgacccaggctccaacaagcccctgagcagcaatttgaggcggctgctggaggctggttccctcaaactcgatgctgcagccacggctaatggcagagtggagtcccccgtaaacgttggctcgaacctctccttttccccgccttcccaccacgcccagcagctcagtgttctggccaggaagttggccgagaagcaggaacagaatgaccaatacactccaagtaaccgttttatatggaatcaaggtaagtggttgccaaactcaaccaccacctgcagcttgtctccggattcagccatcctaaaactgaaagctgcagccaatgccgttctgcaggacaaatctctcaccaggactgaggagaccatgcgatttgagtccttttcctccccttttagctcccagtctgccagttctaccttggccgctttgtccaagaaggtcagtgaaagaagtttgactcctggtcaggagcaccctccaccggccagctccttcctttccctggcttctatgacctcctcagcggcccttctgaaggaggtggccgcaagggctgcgggcagtcttctggctgagaaatcatcgctgctgcctgaggaccctctaccgcccccgccttcagagaagaaaccagaaaaagtcactccgccacctccaccgccacctccaccacctccaccaccaccaccacaatccctggaattattattactcccagttcctaagggaagagtttctaaaccctccaattcagcctcagaagaggaaagtggaaagcctttccagtgtccaatatgtggtttggttattaaaaggaagagttactggaagcggcacatggtgattcacacaggtttaaaaagtcatcagtgtccgctctgtccattccggtgtgctcgcaaggacaatctcaaatcccacatgaaggttcatcagcaccaggatcggggagagacctttcagtgccagctgtgcccttttacttcctcacgccacttcagcctgaaactccacatgcgttgccatcagcacttcctgaggacagaagccaaggtgaaggaggagatcccagacccagatgtcaagggatctccccacctcagtgacagtgcctgcctggggcagcaaagggaaggaggagggacagagctagtggggaccatgatgacgtctaacactccagagaggactagccagggaggggctggcgtctcgcctttgctggtgaaggaggaacccaaggaagataacggcctgcccacctcctttactttgaatgctgccgacaggcccgccaaccacacaaagctgaaagacccctccgagtatgtggccaacagtgcgtcagcattgttcagccaggacatctctgttaagatggcgtctgattttctcatgaagctgtcagctgcaaatcagaaggagcccatgaatcttaattttaaagtgaaagaggagcctaaggaaggggagtccctaagcacgactttgcctcggtccagctatgtgttcagcccggaatctgaagtgtcagccccaggcgtctctgaggacgcactaaagccccaggaagggaagggaagtgtgctaaggcgggatgtgtcagtcaaagcagcctctgaacttctcatgaaactctcagcggaaagctacaaggaaacacagatggtgaagattaaagaggaacccatggaggttgacatccaggactcccatgtctcgatatcacccagccggaatgttggctacagcactttaatcgggcgagagaaaaccgaacccttacagaagatgccagagggcagagtacccccagagagaaacctcttcagtcaggatatctctgtgaaaatggcttccgagctcctctttcaactgtcagaaaaagtgagcaaagagcacaatcatacaaaagaaaacaccatccggaccacgaccagccctttcttttcagaagacacatttagacaatcaccattcacctccaattcaaaagaactgctgcccagtgactccgtgctgcacggaagaatatcagctccagaaacagaaaagatagtcctagaggcaggaaatggattaccatcctggaaattcaatgaccagctttttccctgtgacgtgtgtgggaaagtgtttggccgacagcagacattgtcccgacacctctcgctgcacacagaggaaagaaaatacaaatgccacttgtgcccctatgctgctaagtgccgtgcaaatctgaaccagcacttgaccgtccattccgtgaagctggtgagtacagacaccgaggacattgtcagcgccgtcacctctgaaggcagtgatgggaagaaacatccttattattacagttgtcacgtgtgtggatttgagaccgagctcaatgtccagtttgtcagccacatgtcactccacgtggacaaggagcagtggatgttttcgatctgctgcactgcctgcgacttcgtcaccatggaggaagcagagataaagactcacattggcaccaagcacacaggggaagacaggaagacccccagcgaatcaaatagcccctcttcatcctccctctcagctctgagtgattcagccaacagcaaagatgattcagatggctcccagaaaaacaagggcgggaacaatctgctggtcatctctgtcatgcctgggagccagccctcactgaacagtgaggaaaagccagagaaagggttcgaatgtgttttttgcaactttgtctgcaagacgaagaacatgtttgagcgtcatctgcagatacacctcatcacccggatgtttgagtgtgatgtgtgccacaagttcatgaagacccccgaacagctgctggagcataagaaatgccacactgtccccaccggtgggctcaactcaggacagtggtgagtttcagactcctctaggtgcccattctgcatttattccaccaaccgccccgctgccatggagtgccacctcaagacccactacaagatggagtacaagtgccggatctgccagacggtgaaggccaaccagctggagctggagacgcacacccgggagcaccgcctgggcaaccactacaagtgcgaccagtgcggctacctgtccaagaccgccaacaagctcatcgagcacgtgcgcgtccacaccggggagcggcccttccactgtgaccagtgcagctacagctgcaagcgcaaggacaatctcaacctgcacaagaagctgaagcacgccccacgccagaccttcagctgcgaagagtgcctgttcaagaccacacaccctttcgtcttcagccgccacgtcaagaagcaccagagtggggactgccccgaggaggacaagaagggcctgtgtccagcccccaaggaaccggccggcccgggggccccgctcctggtggtcgggagctcccggaatctcctgtctcccctgtcagttatgtctgcctcccaggctctgcagaccgtggccctgtcggcagcccacggcagcagctcagagcccaacctggcactcaaggctttggccttcaacggctcccctttgcgctttgacaagtaccggaactcagattttgcccatctcattcccttgacaatgttataccccaagaaccacttggatctcacattccaccctccccgacctcagactgcgcctcccagcatcccctcacccaaacactccttcctggcctatctcggactgagagaaagagcagagactgtctgagggcagccatgttctgtaccaaaaacagagagacaaaagacaaaaaaaaaaaaaaaaaccacaaaacttaaacacaaccccagcaggtgtatgttgctgcaaaacctacagaccccgatgggtctggaacatgtgtactgtatatctttagtaaggaatagaaaattggctctgtgtgtatacctattgcattgacctgaaagctgctttatccaatcttcagagaggtgacctactgcatacttctaccttcagaggcatgcctccccagccacccactcccactctcagcccttctccgtacttttctctgaaaggaatcttgtcttgttaaaccctaaagagagtgtccttaatagcaatcagcacttgtaagcttatatactggtgcatttggttttctgttgggtgaatgcggtgtgtgggcgtttgtggattctgaaagagaaagccgtgtgtcgtgtgccatgacatttctattgcacattctttgtactggcttctttaacagcgatgaacgttcttttccctcctgggttgttcatccacgacagtctctccctgtgctccttcatcacctttccctctctctttgatggctacagagtggtagggcctggtgcttagtcgatgaaggaatggtagccatctacagtgctgctggagatttccgccagagcgctggagaccttgcgctcagatcttctctggtgatgaagaggcgaggaatcaagtgactgatctggaagaaatatctcgcagcactgcagctaacatcacagaacttaagtgtgttttgtgtgtgtgcccacacgtagacaaatgtgtacggtgcacacacacagtgcatcattttttaagggcagattatatatatatatgagatgtattaattcagtggttaccatttgtttgcaggaaaaagaaatgtatgggtgaaaaaatttatggttgataaatccagccaaggagattaaaaggggtttggataaattctgggtataaatgctcagactaaaaaaaagaaatggcagttttgcacagtgctatggtcttgcactagtttttgtttctcatctgaaaaaaaaaaagtaaaataaaaggaagaaaatgtaccttttttatggaatgagtagactgtatgtttgaagatttagccacaacctctttgacatataatgacgcaacaaaaaggtgctgtttagtcctatggttcagtttatgcccctgacaagtttccattgtgttttgccgatcttctggctaatcgtggtatcctccatgttattagtaattctgtattccattttgttaacgcctggtagatgtaacctgctaggaggctaactttatacttatttaaaagctcttattttgtggtcattaaaatggcaatttatgtgcagcactttattgcagcaggaagcaggtgtgggttggttgtaaagctctttgctaatcttaaaaagtaatgggtgatttaaaaagaaaaaaggaaaaaaatctttggctgaatatgttcattgcttgtatttttaaaacaacagaatttccagtatgaaacaggctgaaagagcaggaagaaatgttctttgtataataatgggaagtttggaatataaaagtttatatattatttatctattggagaactggtgtacaggaggaacattttcttactgtgttgctgttttccatcatgtgttatcctaagagttggggttttttaaaatctgtttcaccaggggaaaataaaagcatccctaatgttcttcctctagtcagtttgctttgctgaaagctccctggaaattagtacagttctacaggaagccagaagactgtactgtctgtccacaccatggtctcctcagtcccctccacgccagcccctcttccccacacctagtaggtgtgctacacctccctttgccagtcatcccgccatggatggggagcctacttggtgccctggcaaacctgtttacactaaggagatgcccacagggagcgggaagctcccaaaccctcagtcattctccagcagagacctttgctcttggccaggtttgaaacgatgttcaacctcgccacgtcaatgtctcagtaaaagacactatagatagttatggacaatacactccaagaatactgggcttatgggtgggttggttttttgttttgttttgttttgttttcaagtcatgtctttatccccatataatggagaatgtgccacttggctaataatgtgttttcaaaactacaagttcagtgatgacaggaaagagggctaaagtagtcccacagaggctggtagaaaaggcgaatcacacttaagcaccagcaggttaaaaacctgaaagggtggccctgacaattcagactataggttttacagcatgccacttgtgcaataggaggtctagggttgaaactttcaagaacgagaggaggtgaaggaaggagacgtttactgctcaaatgccatgcatttcactgcttgccactgaacttgtatttgaatgacttagtaatgcttaatataattgggcaacttttttagcactttggaaagagtcatcaatctttctggtaaattataaaagttttctgagtgagaaaaggtgtgtttggagtttgtttgactttttatattattattgttattaataaagaaaaaaatctacagcatttttcagactccaccctagaaaatatgtacccctgaatttggtttgcagtttgatactcagggaaggatgtattccatagatatcctttccgtataaaacactaacatctttgagaaattcacctaccaactaacttcaattgttgtcactatgcattcttcaatgaaaactagcttatttttccatatagtaatgcagttagggttctcagcactttctttcttctatcctttttttaactcttcatattatgttcagatgatcatactgtcaaggtttgtgtacattactgaaaatttgtattgtataaagctttttgcattacgaggctgtacagggtcattttgacagtaactggtatattcctttgcatcttatgttgcattgccaatttctagtgtatccagtttgaaagtataatatactctaattaaaaaaaaaaaaaggttggctata

SEQ ID NO: 325742 - DNA, 4197 bp, Artificial Sequence
  derived and/or modified sequence
gcccccacgggggtttatttgatctcacattaaccaaggaggagaatgtgagaaaagggggaaaatgcccaggaggaagcaggagcagcccaagcgccttccctcacatgttagtaggcaggaagaggcggagggagagctcagtgaaggagaacactggtatggaaactcttcagagactccgtcagaagcatcctatggggaagtccaggagaactataagttgtctctggaggaccggatccaggagcagtccacgtccccggacacctccttgggaagcacgactcccagcagccacacgttggagctggtggcactggacagtgaggtcctgcgagactcactgcagtgtcaagatcacctttccccgggagtgtcttctttgtgtgacgatgacccaggctccaacaagcccctgagcagcaatttgaggcggctgctggaggctggttccctcaaactcgatgctgcagccacggctaatggcagagtggagtcccccgtaaacgttggctcgaacctctccttttccccgccttcccaccacgcccagcagctcagtgttctggccaggaagttggccgagaagcaggaacagaatgaccaatacactccaagtaaccgttttatatggaatcaaggtaagtggttgccaaactcaaccaccacctgcagcttgtctccggattcagccatcctaaaactgaaagctgcagccaatgccgttctgcaggacaaatctctcaccaggactgaggagaccatgcgatttgagtccttttcctccccttttagctcccagtctgccagttctaccttggccgctttgtccaagaaggtcagtgaaagaagtttgactcctggtcaggagcaccctccaccggccagctccttcctttccctggcttctatgacctcctcagcggcccttctgaaggaggtggccgcaagggctgcgggcagtcttctggctgagaaatcatcgctgctgcctgaggaccctctaccgcccccgccttcagagaagaaaccagaaaaagtcactccgccacctccaccgccacctccaccacctccaccaccaccaccacaatccctggaattattattactcccagttcctaagggaagagtttctaaaccctccaattcagcctcagaagaggaaagtggaaagcctttccagtgtccaatatgtggtttggttattaaaaggaagagttactggaagcggcacatggtgattcacacaggtttaaaaagtcatcagtgtccgctctgtccattccggtgtgctcgcaaggacaatctcaaatcccacatgaaggttcatcagcaccaggatcggggagagacctttcagtgccagctgtgcccttttacttcctcacgccacttcagcctgaaactccacatgcgttgccatcagcacttcctgaggacagaagccaaggtgaaggaggagatcccagacccagatgtcaagggatctccccacctcagtgacagtgcctgcctggggcagcaaagggaaggaggagggacagagctagtggggaccatgatgacgtctaacactccagagaggactagccagggaggggctggcgtctcgcctttgctggtgaaggaggaacccaaggaagataacggcctgcccacctcctttactttgaatgctgccgacaggcccgccaaccacacaaagctgaaagacccctccgagtatgtggccaacagtgcgtcagcattgttcagccaggacatctctgttaagatggcgtctgattttctcatgaagctgtcagctgcaaatcagaaggagcccatgaatcttaattttaaagtgaaagaggagcctaaggaaggggagtccctaagcacgactttgcctcggtccagctatgtgttcagcccggaatctgaagtgtcagccccaggcgtctctgaggacgcactaaagccccaggaagggaagggaagtgtgctaaggcgggatgtgtcagtcaaagcagcctctgaacttctcatgaaactctcagcggaaagctacaaggaaacacagatggtgaagattaaagaggaacccatggaggttgacatccaggactcccatgtctcgatatcacccagccggaatgttggctacagcactttaatcgggcgagagaaaaccgaacccttacagaagatgccagagggcagagtacccccagagagaaacctcttcagtcaggatatctctgtgaaaatggcttccgagctcctctttcaactgtcagaaaaagtgagcaaagagcacaatcatacaaaagaaaacaccatccggaccacgaccagccctttcttttcagaagacacatttagacaatcaccattcacctccaattcaaaagaactgctgcccagtgactccgtgctgcacggaagaatatcagctccagaaacagaaaagatagtcctagaggcaggaaatggattaccatcctggaaattcaatgaccagctttttccctgtgacgtgtgtgggaaagtgtttggccgacagcagacattgtcccgacacctctcgctgcacacagaggaaagaaaatacaaatgccacttgtgcccctatgctgctaagtgccgtgcaaatctgaaccagcacttgaccgtccattccgtgaagctggtgagtacagacaccgaggacattgtcagcgccgtcacctctgaaggcagtgatgggaagaaacatccttattattacagttgtcacgtgtgtggatttgagaccgagctcaatgtccagtttgtcagccacatgtcactccacgtggacaaggagcagtggatgttttcgatctgctgcactgcctgcgacttcgtcaccatggaggaagcagagataaagactcacattggcaccaagcacacaggggaagacaggaagacccccagcgaatcaaatagcccctcttcatcctccctctcagctctgagtgattcagccaacagcaaagatgattcagatggctcccagaaaaacaagggcgggaacaatctgctggtcatctctgtcatgcctgggagccagccctcactgaacagtgaggaaaagccagagaaagggttcgaatgtgttttttgcaactttgtctgcaagacgaagaacatgtttgagcgtcatctgcagatacacctcatcacccggatgtttgagtgtgatgtgtgccacaagttcatgaagacccccgaacagctgctggagcataagaaatgccacactgtccccaccggtgggctcaagtaaggaaactcaggacagtggtgagtttcagactcctctaggtgcccattctgcatttattccaccaaccgccccgctgccatggagtgccacctcaagacccactacaagatggagtacaagtgccggatctgccagacggtgaaggccaaccagctggagctggagacgcacacccgggagcaccgcctgggcaaccactacaagtgcgaccagtgcggctacctgtccaagaccgccaacaagctcatcgagcacgtgcgcgtccacaccggggagcggcccttccactgtgaccagtgcagctacagctgcaagcgcaaggacaatctcaacctgcacaagaagctgaagcacgccccacgccagaccttcagctgcgaagagtgcctgttcaagaccacacaccctttcgtcttcagccgccacgtcaagaagcaccagagtggggactgccccgaggaggacaagaagggcctgtgtccagcccccaaggaaccggccggcccgggggccccgctcctggtggtcgggagctcccggaatctcctgtctcccctgtcagttatgtctgcctcccaggctctgcagaccgtggccctgtcggcagcccacggcagcagctcagagcccaacctggcactcaaggctttggccttcaacggctcccctttgcgctttgacaagtaccggaactcagattttgcccatctcattcccttgacaatgttataccccaagaaccacttggatctcacattccaccctccccgacctcagactgcgcctcccagcatcccctcacccaaacactccttcctggcctatctcggactgagagaaagagcagagactgtctgagggcagccatgttctgtaccaaaaacagagagacaaaagac

SEQ ID NO: 325743 - protein, 790 aa, Artificial Sequence
  derived and/or modified sequence
MNIMNTEQSQNSIVSRIKVFEGQTNIETSGLPKKPEITPRSLPPKPTVSSGKPSVAPKPAANRASGEWDSGTENRLKVTSKEGLTPYPPLQEAGSIPVTKPELPKKPNPGLIRSVNPEIPGRGPLAESSDSGKKVPTPAPRPLLLKKSVSSENPTYPSAPLKPVTVPPRLAGASQAKAYKSLGEGPPANPPVPVLQSKPLVDIDLISFDDDVLPTPSGNLAEESVGSEMVLDPFQLPAKTEPIKERAVQPAPTRKPTVIRIPAKPGKCLHEDPQSPPPLPAEKPIGNTFSTVSGKLSNVERTRNLESNHPGQTGGFVRVPPRLPPRPVNGKTIPTQQPPTKVPPERPPPPKLSATRRSNKKLPFNRSSSDMDLQKKQSNLATGLSKAKSQVFKNQDPVLPPRPKPGHPLYSKYMLSVPHGIANEDIVSQNPGELSCKRGDVLVMLKQTENNYLECQKGEDTGRVHLSQMKIITPLDEHLRSRPNDPSHAQKPVDSGAPHAVVLHDFPAEQVDDLNLTSGEIVYLLEKIDTDWYRGNCRNQIGIFPANYVKVIIDIPEGGNGKRECVSSHCVKGSRCVARFEYIGEQKDELSFSEGEIIILKEYVNEEWARGEVRGRTGIFPLNFVEPVEDYPTSGANVLSTKVPLKTKKEDSGSNSQVNSLPAEWCEALHSFTAETSDDLSFKRGDRIQILERLDSDWCRGRLQDREGIFPAVFVRPCPAEAKSMLAIVPKGRKAKALYDFRGENEDELSFKAGDIITELESVDDDWMSGELMGKSGIFPKNYIQFLQIS

SEQ ID NO: 325744 - DNA, 5273 bp, Artificial Sequence
  derived and/or modified sequence
tcatttttccccctccccattctgttagaagcttctgccaaccatgattcatggaatgatttttttgagctgagtaatctgtggctttgcagtttccttgctttctttccttagctaaatctcttctagtgttagcaaagtatttagcacaggaaagatcttataaaatgaaataatgcatgtaatgatgcattttccaagtagatgattttaacaaaccgtaagcttttatgcctgtccttcattgtgtcttttctgcctctgtcaggcgaactgtgatgaagagccttatacttaggaagacacaactacctttgaacagtcctttgtgaaatctaatgatcgcaacgaacgaaataaaccagaacatcgttcttcaagccaaggacccttgtcatccattagagcggtaatcaagagatcttctcggacttctattcagagtgaacttcatcgagatagaaggcgcccagagatcaccattgtggcagctgagccactgaggccagcctcgtggtttccaggaaccccacccccaggactgggatttcctacatcatctgcagcaggctcttggaggcctaatgagctggttcctgctgagctcccaccatcttatgaacaagttataaaagaaatcaaccaagttcaagttaatactacaaataataataatgctgctgctactccaaggcacactattacttctgcaactcagactgacttttcagaagaaatagacaacgatctgcctcaaagttttgttttggtctcgtcagcactacaggcacctctcaagcctcttcagcctttctcagcagtctcgtctggcaatcttccaacaaatgtggcacctttaatcgtctttgatatttctgaagaaccgaattgtccagaaaaccccagtgctacaagatgtccagtgccaaaaccaagatcaaaaagcaacctcagaccaatacccagagattctcacattaaagagcaaagtcaacagaaaatcagcccagcagccgtaggagaggagtcatccccaggccggccccagtctctgctggacaacgctagcacctcagacagtcaggcagtgatgaacattatgaacacagaacaaagccaaaatagtattgtttccagaattaaagtgtttgagggtcagacaaacatagaaacctcaggactgcccaagaaaccagaaattactccacgttcacttcctccaaagcctactgtttcctcagggaaaccttctgtagctcccaaaccagctgctaacagagcttctggagagtgggactctgggactgagaacagactcaaggtgacctccaaggaaggactcaccccataccctcccctgcaagaagcgggaagcatcccagtaaccaaacctgaattgccaaagaaaccaaaccctggccttatacgaagtgttaatcctgagattccgggaagagggcccctggctgagagctctgatagtgggaagaaagtgccaactcctgccccgcggcctttgctgctgaagaaatctgtttcctcagaaaaccccacctacccttcagctccactgaaacctgtcactgttcctccccgactcgcaggggcatcacaagccaaagcatacaagtcactgggagaagggcccccagccaaccccccagttccagttctgcagagcaagcccttggtggacatcgatctcatcagctttgatgatgatgttttgcccaccccatcggggaacctggctgaagaatctgttggttcagagatggttctagatccctttcagctccctgcaaaaacagaaccaataaaagaacgagcagttcaaccagcacccaccaggaagcccactgtaattcgaattccagccaaaccaggaaaatgtttacatgaggatccacaaagtccacctcctctccctgctgaaaaacctattggaaacactttcagtacagtatctggaaagctcagtaatgttgagagaactagaaacttggaatccaaccacccaggtcaaacaggaggttttgtgcgagtacccccaaggttgccaccgagacctgtgaatggaaaaaccattccaactcaacagcctccaaccaaggtgccccctgagagaccacctcccccaaagctttctgcaaccagaagatctaataagaaactgccttttaatcgatcctcttctgacatggatcttcagaaaaaacaaagtaacttggcaactggactctcaaaagccaagagtcaagtttttaaaaatcaagatccggtgctaccccctcgtcccaaaccaggacaccctctctacagtaaatacatgctgtctgtgcctcatggaattgccaatgaagatattgtctctcaaaaccccggagaactctcttgtaagcgtggggatgtacttgtgatgctgaagcagacggaaaataattacttggagtgccaaaagggagaagacactggcagagttcacctgtctcaaatgaagattatcactccacttgatgaacatcttagaagcagaccaaacgatccaagccacgctcagaagcctgttgacagtggtgctcctcatgctgtcgttcttcatgatttcccagcagagcaagttgatgatttgaacctcacttctggagaaattgtttatcttctggagaagatagatacagattggtacagagggaactgtagaaaccagattggcatatttcctgccaactatgtcaaagtgattattgatatcccagaaggaggaaatgggaaaagagaatgtgtttcatctcattgtgttaaaggctcaagatgtgttgctcggtttgaatatattggagagcagaaggatgagttgagtttctcagagggagaaattattattcttaaagagtatgtgaatgaggaatgggccagaggagaagttcgaggcagaactgggattttccccctgaactttgtggagcctgttgaggattatcccacctctggtgcaaatgttttaagcacaaaggtaccactgaaaaccaaaaaagaagattctggctcaaactctcaggttaacagtcttccggcagaatggtgtgaagctcttcacagttttacagcagagaccagtgatgacttatcattcaagaggggagaccggatccagattctggaacgtctggattctgactggtgcaggggcagactgcaggacagggaggggatcttcccagcagtgtttgtgaggccctgcccagctgaggcaaaaagtatgttggccatagtaccgaaggggaggaaggccaaagccttatatgatttccgaggggagaatgaagatgaactttccttcaaggctggagatataataacagagctggaatctgtagatgatgactggatgagtggagaacttatgggaaaatctggaatatttcccaaaaactacatacagtttctacagatcagctagaggagaagcttgtctgtgttccttggcacaagaactcacttgaactatcaccttgactatcagatatgtttttgcactattttttttaactgaaaaagaaatatctaagctgtacatggtacactagaattttctgaaagcagaaaacgttcagattttgtagttaattttcattacaatagaaacatgcacatggaaacccatgagctaggattctaccgaggaaaacatctagtgggattagcaaggtgaagggaaagcatctggtggcatggcagcatggggaggctcacacacagaagttgcacgtggacatctgttttaatcagcacaagtgaattaaccatgcttcttcatttttttactttagttaaaaaagaggacatttaatattctacatgctgtaactatcaggacatggttagcaatctcaatttcatttttgatattcaaattaattcttacagcttgagcatatcagccttattaccagagcaaatccttccttcagatgggatagtttactgactagttggagcatttgtaagcacatggtgaaatcagcccctgcccaccaaaataatctttatgttaccaagtgattcccatttgtctaaggatttgaagggggtctaaattggatgtatcttacttagtctaaagaaccaaaaccatccctgaaatgccttgctaatacaactaatccttccatatatgtgccatacttatttttttcctcagtgtatactttatgttaacagggttattacaaagcacattttctgaatctgcaatcattcctttgacaattactggacccaaaggaaaattcattttctttgcattattccagtaatatataaaaactgtgtcttgttatagtagtacattatgaatcacatataaaatcttacaatacagaacaactgttaagatggaaaacagtgccaaacctccacagctcatttctttgtaatataatcagaatgaaaaataatttaagaggacagaagactggtacttttttgttttattttttctctagcttatccctgcacaattattagagtgaatgaaaaaccactttcctgctttccattgttataaattctaagcttaagataaaagtggttctttacatgactgaatcaattacaatttatgggctagagccaaataggttgaagacaatcatccaaacagatcaatggaatagaatttcattggaaatgtaaaacactttcccaacaatggtcatgactttcttctgtttttgagaagagtttcatatgctggaccacattttagcttttattgttttttttttcccattgtccaaaaagttaagcaacaagtggccacacttttacgtgactacaacctggagttctgcaaagaaggtaatatttacttggtctttgactaaagttatctccccattctatggttacattttattttggactatggggacttctaatacgttttggtaaagaagagagtataaagaaaattcttgtcaaatttcactcaaaagtaatttcatgagaaatcaatgatttaaagcattatccaaattaaattatcatttgcagcaaactgtacaacagcaggaaggatatggaatggaacatgaggtatatatctttgcctttataattttaacatcttatattgaagattctgaaaacctatctttattagaggaaaatctcaatcttcagttttggccttctgtcagcagaatgataagtgcaatagttgtaaatctacttgacactgtaataaactgaactgaactttcaaagtc

SEQ ID NO: 325745 - DNA, 4888 bp, Artificial Sequence
  derived and/or modified sequence
ccagaacatcgttcttcaagccaaggacccttgtcatccattagagcggtaatcaagagatcttctcggacttctattcagagtgaacttcatcgagatagaaggcgcccagagatcaccattgtggcagctgagccactgaggccagcctcgtggtttccaggaaccccacccccaggactgggatttcctacatcatctgcagcaggctcttggaggcctaatgagctggttcctgctgagctcccaccatcttatgaacaagttataaaagaaatcaaccaagttcaagttaatactacaaataataataatgctgctgctactccaaggcacactattacttctgcaactcagactgacttttcagaagaaatagacaacgatctgcctcaaacactacaggcacctctcaagcctcttcagcctttctcagcagtctcgtctggcaatcttccaacaaatgtggcacctttaatcgtctttgatatttctgaagaaccgaattgtccagaaaaccccagtgctacaagatgtccagtgccaaaaccaagatcaaaaagcaacctcagaccaatacccagagattctcacattaaagagcaaagtcaacagaaaatcagcccagcagccgtaggagaggagtcatccccaggccggccccagtctctgctggacaacgctagcacctcagacagtcaggcagtgatgaacattatgaacacagaacaaagccaaaatagtattgtttccagaattaaagtgtttgagggtcagacaaacatagaaacctcaggactgcccaagaaaccagaaattactccacgttcacttcctccaaagcctactgtttcctcagggaaaccttctgtagctcccaaaccagctgctaacagagcttctggagagtgggactctgggactgagaacagactcaaggtgacctccaaggaaggactcaccccataccctcccctgcaagaagcgggaagcatcccagtaaccaaacctgaattgccaaagaaaccaaaccctggccttatacgaagtgttaatcctgagattccgggaagagggcccctggctgagagctctgatagtgggaagaaagtgccaactcctgccccgcggcctttgctgctgaagaaatctgtttcctcagaaaaccccacctacccttcagctccactgaaacctgtcactgttcctccccgactcgcaggggcatcacaagccaaagcatacaagtcactgggagaagggcccccagccaaccccccagttccagttctgcagagcaagcccttggtggacatcgatctcatcagctttgatgatgatgttttgcccaccccatcggggaacctggctgaagaatctgttggttcagagatggttctagatccctttcagctccctgcaaaaacagaaccaataaaagaacgagcagttcaaccagcacccaccaggaagcccactgtaattcgaattccagccaaaccaggaaaatgtttacatgaggatccacaaagtccacctcctctccctgctgaaaaacctattggaaacactttcagtacagtatctggaaagctcagtaatgttgagagaactagaaacttggaatccaaccacccaggtcaaacaggaggttttgtgcgagtacccccaaggttgccaccgagacctgtgaatggaaaaaccattccaactcaacagcctccaaccaaggtgccccctgagagaccacctcccccaaagctttctgcaaccagaagatctaataagaaactgccttttaatcgatcctcttctgacatggatcttcagaaaaaacaaagtaacttggcaactggactctcaaaagccaagagtcaagtttttaaaaatcaagatccggtgctaccccctcgtcccaaaccaggacaccctctctacagtaaatacatgctgtctgtgcctcatggaattgccaatgaagatattgtctctcaaaaccccggagaactctcttgtaagcgtggggatgtacttgtgatgctgaagcagacggaaaataattacttggagtgccaaaagggagaagacactggcagagttcacctgtctcaaatgaagattatcactccacttgatgaacatcttagaagcagaccaaacgatccaagccacgctcagaagcctgttgacagtggtgctcctcatgctgtcgttcttcatgatttcccagcagagcaagttgatgatttgaacctcacttctggagaaattgtttatcttctggagaagatagatacagattggtacagagggaactgtagaaaccagattggcatatttcctgccaactatgtcaaagtgattattgatatcccagaaggaggaaatgggaaaagagaatgtgtttcatctcattgtgttaaaggctcaagatgtgttgctcggtttgaatatattggagagcagaaggatgagttgagtttctcagagggagaaattattattcttaaagagtatgtgaatgaggaatgggccagaggagaagttcgaggcagaactgggattttccccctgaactttgtggagcctgttgaggattatcccacctctggtgcaaatgttttaagcacaaaggtaccactgaaaaccaaaaaagaagattctggctcaaactctcaggttaacagtcttccggcagaatggtgtgaagctcttcacagttttacagcagagaccagtgatgacttatcattcaagaggggagaccggatccagattctggaacgtctggattctgactggtgcaggggcagactgcaggacagggaggggatcttcccagcagtgtttgtgaggccctgcccagctgaggcaaaaagtatgttggccatagtaccgaaggggaggaaggccaaagccttatatgatttccgaggggagaatgaagatgaactttccttcaaggctggagatataataacagagctggaatctgtagatgatgactggatgagtggagaacttatgggaaaatctggaatatttcccaaaaactacatacagtttctacagatcagctagaggagaagcttgtctgtgttccttggcacaagaactcacttgaactatcaccttgactatcagatatgtttttgcactattttttttaactgaaaaagaaatatctaagctgtacatggtacactagaattttctgaaagcagaaaacgttcagattttgtagttaattttcattacaatagaaacatgcacatggaaacccatgagctaggattctaccgaggaaaacatctagtgggattagcaaggtgaagggaaagcatctggtggcatggcagcatggggaggctcacacacagaagttgcacgtggacatctgttttaatcagcacaagtgaattaaccatgcttcttcatttttttactttagttaaaaaagaggacatttaatattctacatgctgtaactatcaggacatggttagcaatctcaatttcatttttgatattcaaattaattcttacagcttgagcatatcagccttattaccagagcaaatccttccttcagatgggatagtttactgactagttggagcatttgtaagcacatggtgaaatcagcccctgcccaccaaaataatctttatgttaccaagtgattcccatttgtctaaggatttgaagggggtctaaattggatgtatcttacttagtctaaagaaccaaaaccatccctgaaatgccttgctaatacaactaatccttccatatatgtgccatacttatttttttcctcagtgtatactttatgttaacagggttattacaaagcacattttctgaatctgcaatcattcctttgacaattactggacccaaaggaaaattcattttctttgcattattccagtaatatataaaaactgtgtcttgttatagtagtacattatgaatcacatataaaatcttacaatacagaacaactgttaagatggaaaacagtgccaaacctccacagctcatttctttgtaatataatcagaatgaaaaataatttaagaggacagaagactggtacttttttgttttattttttctctagcttatccctgcacaattattagagtgaatgaaaaaccactttcctgctttccattgttataaattctaagcttaagataaaagtggttctttacatgactgaatcaattacaatttatgggctagagccaaataggttgaagacaatcatccaaacagatcaatggaatagaatttcattggaaatgtaaaacactttcccaacaatggtcatgactttcttctgtttttgagaagagtttcatatgctggaccacattttagcttttattgttttttttttcccattgtccaaaaagttaagcaacaagtggccacacttttacgtgactacaacctggagttctgcaaagaaggtaatatttacttggtctttgactaaagttatctccccattctatggttacattttattttggactatggggacttctaatacgttttggtaaagaagagagtataaagaaaattcttgtcaaatttcactcaaaagtaatttcatgagaaatcaatgatttaaagcattatccaaattaaattatcatttgcagcaaactgtacaacagcaggaaggatatggaatggaacatgaggtatatatctttgcctttataattttaacatcttatattgaagattctgaaaacctatctttattagaggaaaatctcaatcttcagttttggccttctgtcagcagaatgataagtgcaatagttgtaaatctacttgacactgtaataaactgaactgaactttcaaa

SEQ ID NO: 325746 - DNA, 5284 bp, Artificial Sequence
  derived and/or modified sequence
gaaatccaacttctgaaatgttctgggtggtagatagttaagggtgaagctgtattggtcttagtatttgcagatgttgtagctgactgctcatttttccccctccccattctgttagaagcttctgccaaccatgattcatggaatgatttttttgagctgagtaatctgtggctttgcagtttccttgctttctttccttagctaaatctcttctagtgttagcaaagtatttagcacaggaaagatcttataaaatgaaataatgcatgtaatgatgcattttccaagtagatgattttaacaaaccgtaagcttttatgcctgtccttcattgtgtcttttctgcctctgtcaggcgaactgtgatgaagagccttatacttaggaagacacaactacctttgaacagtcctttgtgaaatctaatgatcgcaacgaacgaaataaaccagaacatcgttcttcaagccaaggacccttgtcatccattagagcggtaatcaagagatcttctcggacttctattcagagtgaacttcatcgagatagaaggcgcccagagatcaccattgtggcagctgagccactgaggccagcctcgtggtttccaggaaccccacccccaggactgggatttcctacatcatctgcagcaggctcttggaggcctaatgagctggttcctgctgagctcccaccatcttatgaacaagttataaaagaaatcaaccaagttcaagttaatactacaaataataataatgctgctgctactccaaggcacactattacttctgcaactcagactgacttttcagaagaaatagacaacgatctgcctcaaagtaatgcaacactacaggcacctctcaagcctcttcagcctttctcagcagtctcgtctggcaatcttccaacaaatgtggcacctttaatcgtctttgatatttctgaagaaccgaattgtccagaaaaccccagtgctacaagatgtccagtgccaaaaccaagatcaaaaagcaacctcagaccaatacccagagattctcacattaaagagcaaagtcaacagaaaatcagcccagcagccgtaggagaggagtcatccccaggccggccccagtctctgctggacaacgctagcacctcagacagtcaggcagtgatgaacattatgaacacagaacaaagccaaaatagtattgtttccagaattaaagtgtttgagggtcagacaaacatagaaacctcaggactgcccaagaaaccagaaattactccacgttcacttcctccaaagcctactgtttcctcagggaaaccttctgtagctcccaaaccagctgctaacagagcttctggagagtgggactctgggactgagaacagactcaaggtgacctccaaggaaggactcaccccataccctcccctgcaagaagcgggaagcatcccagtaaccaaacctgaattgccaaagaaaccaaaccctggccttatacgaagtgttaatcctgagattccgggaagagggcccctggctgagagctctgatagtgggaagaaagtgccaactcctgccccgcggcctttgctgctgaagaaatctgtttcctcagaaaaccccacctacccttcagctccactgaaacctgtcactgttcctccccgactcgcaggggcatcacaagccaaagcatacaagtcactgggagaagggcccccagccaaccccccagttccagttctgcagagcaagcccttggtggacatcgatctcatcagctttgatgatgatgttttgcccaccccatcggggaacctggctgaagaatctgttggttcagagatggttctagatccctttcagctccctgcaaaaacagaaccaataaaagaacgagcagttcaaccagcacccaccaggaagcccactgtaattcgaattccagccaaaccaggaaaatgtttacatgaggatccacaaagtccacctcctctccctgctgaaaaacctattggaaacactttcagtacagtatctggaaagctcagtaatgttgagagaactagaaacttggaatccaaccacccaggtcaaacaggaggttttgtgcgagtacccccaaggttgccaccgagacctgtgaatggaaaaaccattccaactcaacagcctccaaccaaggtgccccctgagagaccacctcccccaaagctttctgcaaccagaagatctaataagaaactgccttttaatcgatcctcttctgacatggatcttcagaaaaaacaaagtaacttggcaactggactctcaaaagccaagagtcaagtttttaaaaatcaagatccggtgctaccccctcgtcccaaaccaggacaccctctctacagtaaatacatgcgtggggatgtacttgtgatgctgaagcagacggaaaataattacttggagtgccaaaagggagaagacactggcagagttcacctgtctcaaatgaagattatcactccacttgatgaacatcttagaagcagaccaaacgatccaagccacgctcagaagcctgttgacagtggtgctcctcatgctgtcgttcttcatgatttcccagcagagcaagttgatgatttgaacctcacttctggagaaattgtttatcttctggagaagatagatacagattggtacagagggaactgtagaaaccagattggcatatttcctgccaactatgtcaaagtgattattgatatcccagaaggaggaaatgggaaaagagaatgtgtttcatctcattgtgttaaaggctcaagatgtgttgctcggtttgaatatattggagagcagaaggatgagttgagtttctcagagggagaaattattattcttaaagagtatgtgaatgaggaatgggccagaggagaagttcgaggcagaactgggattttccccctgaactttgtggagcctgttgaggattatcccacctctggtgcaaatgttttaagcacaaaggtaccactgaaaaccaaaaaagaagattctggctcaaactctcaggttaacagtcttccggcagaatggtgtgaagctcttcacagttttacagcagagaccagtgatgacttatcattcaagaggggagaccggatccagattctggaacgtctggattctgactggtgcaggggcagactgcaggacagggaggggatcttcccagcagtgtttgtgaggccctgcccagctgaggcaaaaagtatgttggccatagtaccgaaggggaggaaggccaaagccttatatgatttccgaggggagaatgaagatgaactttccttcaaggctggagatataataacagagctggaatctgtagatgatgactggatgagtggagaacttatgggaaaatctggaatatttcccaaaaactacatacagtttctacagatcagctagaggagaagcttgtctgtgttccttggcacaagaactcacttgaactatcaccttgactatcagatatgtttttgcactattttttttaactgaaaaagaaatatctaagctgtacatggtacactagaattttctgaaagcagaaaacgttcagattttgtagttaattttcattacaatagaaacatgcacatggaaacccatgagctaggattctaccgaggaaaacatctagtgggattagcaaggtgaagggaaagcatctggtggcatggcagcatggggaggctcacacacagaagttgcacgtggacatctgttttaatcagcacaagtgaattaaccatgcttcttcatttttttactttagttaaaaaagaggacatttaatattctacatgctgtaactatcaggacatggttagcaatctcaatttcatttttgatattcaaattaattcttacagcttgagcatatcagccttattaccagagcaaatccttccttcagatgggatagtttactgactagttggagcatttgtaagcacatggtgaaatcagcccctgcccaccaaaataatctttatgttaccaagtgattcccatttgtctaaggatttgaagggggtctaaattggatgtatcttacttagtctaaagaaccaaaaccatccctgaaatgccttgctaatacaactaatccttccatatatgtgccatacttatttttttcctcagtgtatactttatgttaacagggttattacaaagcacattttctgaatctgcaatcattcctttgacaattactggacccaaaggaaaattcattttctttgcattattccagtaatatataaaaactgtgtcttgttatagtagtacattatgaatcacatataaaatcttacaatacagaacaactgttaagatggaaaacagtgccaaacctccacagctcatttctttgtaatataatcagaatgaaaaataatttaagaggacagaagactggtacttttttgttttattttttctctagcttatccctgcacaattattagagtgaatgaaaaaccactttcctgctttccattgttataaattctaagcttaagataaaagtggttctttacatgactgaatcaattacaatttatgggctagagccaaataggttgaagacaatcatccaaacagatcaatggaatagaatttcattggaaatgtaaaacactttcccaacaatggtcatgactttcttctgtttttgagaagagtttcatatgctggaccacattttagcttttattgttttttttttcccattgtccaaaaagttaagcaacaagtggccacacttttacgtgactacaacctggagttctgcaaagaaggtaatatttacttggtctttgactaaagttatctccccattctatggttacattttattttggactatggggacttctaatacgttttggtaaagaagagagtataaagaaaattcttgtcaaatttcactcaaaagtaatttcatgagaaatcaatgatttaaagcattatccaaattaaattatcatttgcagcaaactgtacaacagcaggaaggatatggaatggaacatgaggtatatatctttgcctttataattttaacatcttatattgaagattctgaaaacctatctttattagaggaaaatctcaatcttcagttttggccttctgtcagcagaatgataagtgcaatagttgtaaatctacttgacactgtaataaactgaactgaactttcaaagtccc

SEQ ID NO: 325747 - DNA, 5096 bp, Artificial Sequence
  derived and/or modified sequence
tcatttttccccctccccattctgttagaagcttctgccaaccatgattcatggaatgatttttttgagctgagtaatctgtggctttgcagtttccttgctttctttccttagctaaatctcttctagtgttagcaaagtatttagcacaggaaagatcttataaaatgaaataatgcatgtaatgatgcattttccaagtagatgattttaacaaaccgtaagcttttatgcctgtccttcattgtgtcttttctgcctctgtcaggcgaactgtgatgaagagccttatacttaggaagacacaactacctttgaacagtcctttgtgaaatctaatgatcgcaacgaacgaaataaaccagaacatcgttcttcaagccaaggacccttgtcatccattagagcggtaatcaagagatcttctcggacttctattcagagtgaacttcatcgagatagaaggcgcccagagatcaccattgtggcagctgagccactgaggccagcctcgtggtttccaggaaccccacccccaggactgggatttcctacatcatctgcagcaggctcttggaggcctaatgagctggttcctgctgagctcccaccatcttatgaacaagttataaaagaaatcaaccaagttcaagttaatactacaaataataataatgctgctgctactccaaggcacactattacttctgcaactcagactgacttttcagaagaaatagacaacgatctgcctcaaagttttgttttggtctcgtcagcactacaggcacctctcaagcctcttcagcctttctcagcagtctcgtctggcaatcttccaacaaatgtggcacctttaatcgtctttgatatttctgaagaaccgaattgtccagaaaaccccagtgctacaagatgtccagtgccaaaaccaagatcaaaaagcaacctcagaccaatacccagagattctcacattaaagagcaaagtcaacagaaaatcagcccagcagccgtaggagaggagtcatccccaggccggccccagtctctgctggacaacgctagcacctcagacagtcaggcagtgatgaacattatgaacacagaacaaagccaaaatagtattgtttccagaattaaagtgtttgagggtcagacaaacatagaaacctcaggactgcccaagaaaccagaaattactccacgttcacttcctccaaagcctactgtttcctcagggaaaccttctgtagctcccaaaccagctgctaacagagcttctggagagtgggactctgggactgagaacagactcaaggtgacctccaaggaaggactcaccccataccctcccctgcaagaagcgggaagcatcccagtaaccaaacctgaattgccaaagaaaccaaaccctggccttatacgaagtgttaatcctgagattccgggaagagggcccctggctgagagctctgatagtgggaagaaagtgccaactcctgccccgcggcctttgctgctgaagaaatctgtttcctcagaaaaccccacctacccttcagctccactgaaacctgtcactgttcctccccgactcgcaggggcatcacaagccaaagcatacaagtcactgggagaagggcccccagccaaccccccagttccagttctgcagagcaagcccttggtggacatcgatctcatcagctttgatgatgatgttttgcccaccccatcggggaacctggctgaagaatctgttggttcagagatggttctaggtttacatgaggatccacaaagtccacctcctctccctgctgaaaaacctattggaaacactttcagtacagtatctggaaagctcagtaatgttgagagaactagaaacttggaatccaaccacccaggtcaaacaggaggttttgtgcgagtacccccaaggttgccaccgagacctgtgaatggaaaaaccattccaactcaacagcctccaaccaaggtgccccctgagagaccacctcccccaaagctttctgcaaccagaagatctaataagaaactgccttttaatcgatcctcttctgacatggatcttcagaaaaaacaaagtaacttggcaactggactctcaaaagccaagagtcaagtttttaaaaatcaagatccggtgctaccccctcgtcccaaaccaggacaccctctctacagtaaatacatgcgtggggatgtacttgtgatgctgaagcagacggaaaataattacttggagtgccaaaagggagaagacactggcagagttcacctgtctcaaatgaagattatcactccacttgatgaacatcttagaagcagaccaaacgatccaagccacgctcagaagcctgttgacagtggtgctcctcatgctgtcgttcttcatgatttcccagcagagcaagttgatgatttgaacctcacttctggagaaattgtttatcttctggagaagatagatacagattggtacagagggaactgtagaaaccagattggcatatttcctgccaactatgtcaaagtgattattgatatcccagaaggaggaaatgggaaaagagaatgtgtttcatctcattgtgttaaaggctcaagatgtgttgctcggtttgaatatattggagagcagaaggatgagttgagtttctcagagggagaaattattattcttaaagagtatgtgaatgaggaatgggccagaggagaagttcgaggcagaactgggattttccccctgaactttgtggagcctgttgaggattatcccacctctggtgcaaatgttttaagcacaaaggtaccactgaaaaccaaaaaagaagattctggctcaaactctcaggttaacagtcttccggcagaatggtgtgaagctcttcacagttttacagcagagaccagtgatgacttatcattcaagaggggagaccggatccagattctggaacgtctggattctgactggtgcaggggcagactgcaggacagggaggggatcttcccagcagtgtttgtgaggccctgcccagctgaggcaaaaagtatgttggccatagtaccgaaggggaggaaggccaaagccttatatgatttccgaggggagaatgaagatgaactttccttcaaggctggagatataataacagagctggaatctgtagatgatgactggatgagtggagaacttatgggaaaatctggaatatttcccaaaaactacatacagtttctacagatcagctagaggagaagcttgtctgtgttccttggcacaagaactcacttgaactatcaccttgactatcagatatgtttttgcactattttttttaactgaaaaagaaatatctaagctgtacatggtacactagaattttctgaaagcagaaaacgttcagattttgtagttaattttcattacaatagaaacatgcacatggaaacccatgagctaggattctaccgaggaaaacatctagtgggattagcaaggtgaagggaaagcatctggtggcatggcagcatggggaggctcacacacagaagttgcacgtggacatctgttttaatcagcacaagtgaattaaccatgcttcttcatttttttactttagttaaaaaagaggacatttaatattctacatgctgtaactatcaggacatggttagcaatctcaatttcatttttgatattcaaattaattcttacagcttgagcatatcagccttattaccagagcaaatccttccttcagatgggatagtttactgactagttggagcatttgtaagcacatggtgaaatcagcccctgcccaccaaaataatctttatgttaccaagtgattcccatttgtctaaggatttgaagggggtctaaattggatgtatcttacttagtctaaagaaccaaaaccatccctgaaatgccttgctaatacaactaatccttccatatatgtgccatacttatttttttcctcagtgtatactttatgttaacagggttattacaaagcacattttctgaatctgcaatcattcctttgacaattactggacccaaaggaaaattcattttctttgcattattccagtaatatataaaaactgtgtcttgttatagtagtacattatgaatcacatataaaatcttacaatacagaacaactgttaagatggaaaacagtgccaaacctccacagctcatttctttgtaatataatcagaatgaaaaataatttaagaggacagaagactggtacttttttgttttattttttctctagcttatccctgcacaattattagagtgaatgaaaaaccactttcctgctttccattgttataaattctaagcttaagataaaagtggttctttacatgactgaatcaattacaatttatgggctagagccaaataggttgaagacaatcatccaaacagatcaatggaatagaatttcattggaaatgtaaaacactttcccaacaatggtcatgactttcttctgtttttgagaagagtttcatatgctggaccacattttagcttttattgttttttttttcccattgtccaaaaagttaagcaacaagtggccacacttttacgtgactacaacctggagttctgcaaagaaggtaatatttacttggtctttgactaaagttatctccccattctatggttacattttattttggactatggggacttctaatacgttttggtaaagaagagagtataaagaaaattcttgtcaaatttcactcaaaagtaatttcatgagaaatcaatgatttaaagcattatccaaattaaattatcatttgcagcaaactgtacaacagcaggaaggatatggaatggaacatgaggtatatatctttgcctttataattttaacatcttatattgaagattctgaaaacctatctttattagaggaaaatctcaatcttcagttttggccttctgtcagcagaatgataagtgcaatagttgtaaatctacttgacactgtaataaactgaactgaactttcaaagtc

SEQ ID NO: 325748 - DNA, 4195 bp, Artificial Sequence
  derived and/or modified sequence
cccagtgctacaagatgtccagtgccaaaaccaagatcaaaaagcaacctcagaccaatacccagagattctcacattaaagagcaaagtcaacagaaaatcagcccagcagccgtaggagaggagtcatccccaggccggccccagtctctgctggacaacgctagcacctcagacagtcaggcagtgatgaacattatgaacacagaacaaagccaaaatagtattgtttccagaattaaagtgtttgagggtcagacaaacatagaaacctcaggactgcccaagaaaccagaaattactccacgttcacttcctccaaagcctactgtttcctcagggaaaccttctgtagctcccaaaccagctgctaacagagcttctggagagtgggactctgggactgagaacagactcaaggtgacctccaaggaaggactcaccccataccctcccctgcaagaagcgggaagcatcccagtaaccaaacctgaattgccaaagaaaccaaaccctggccttatacgaagtgttaatcctgagattccgggaagagggcccctggctgagagctctgatagtgggaagaaagtgccaactcctgccccgcggcctttgctgctgaagaaatctgtttcctcagaaaaccccacctacccttcagctccactgaaacctgtcactgttcctccccgactcgcaggggcatcacaagccaaagcatacaagtcactgggagaagggcccccagccaaccccccagttccagttctgcagagcaagcccttggtggacatcgatctcatcagctttgatgatgatgttttgcccaccccatcggggaacctggctgaagaatctgttggttcagagatggttctaggtttacatgaggatccacaaagtccacctcctctccctgctgaaaaacctattggaaacactttcagtacagtatctggaaagctcagtaatgttgagagaactagaaacttggaatccaaccacccaggtcaaacaggaggttttgtgcgagtacccccaaggttgccaccgagacctgtgaatggaaaaaccattccaactcaacagcctccaaccaaggtgccccctgagagaccacctcccccaaagctttctgcaaccagaagatctaataagaaactgccttttaatcgatcctcttctgacatggatcttcagaaaaaacaaagtaacttggcaactggactctcaaaagccaagagtcaagtttttaaaaatcaagatccggtgctaccccctcgtcccaaaccaggacaccctctctacagtaaatacatgcgtggggatgtacttgtgatgctgaagcagacggaaaataattacttggagtgccaaaagggagaagacactggcagagttcacctgtctcaaatgaagattatcactccacttgatgaacatcttagaagcagaccaaacgatccaagccacgctcagaagcctgttgacagtggtgctcctcatgctgtcgttcttcatgatttcccagcagagcaagttgatgatttgaacctcacttctggagaaattgtttatcttctggagaagatagatacagattggtacagagggaactgtagaaaccagattggcatatttcctgccaactatgtcaaagtgattattgatatcccagaaggaggaaatgggaaaagagaatgtgtttcatctcattgtgttaaaggctcaagatgtgttgctcggtttgaatatattggagagcagaaggatgagttgagtttctcagagggagaaattattattcttaaagagtatgtgaatgaggaatgggccagaggagaagttcgaggcagaactgggattttccccctgaactttgtggagcctgttgaggattatcccacctctggtgcaaatgttttaagcacaaaggtaccactgaaaaccaaaaaagaagattctggctcaaactctcaggttaacagtcttccggcagaatggtgtgaagctcttcacagttttacagcagagaccagtgatgacttatcattcaagaggggagaccggatccagattctggaacgtctggattctgactggtgcaggggcagactgcaggacagggaggggatcttcccagcagtgtttgtgaggccctgcccagctgaggcaaaaagtatgttggccatagtaccgaaggggaggaaggccaaagccttatatgatttccgaggggagaatgaagatgaactttccttcaaggctggagatataataacagagctggaatctgtagatgatgactggatgagtggagaacttatgggaaaatctggaatatttcccaaaaactacatacagtttctacagatcagctagaggagaagcttgtctgtgttccttggcacaagaactcacttgaactatcaccttgactatcagatatgtttttgcactattttttttaactgaaaaagaaatatctaagctgtacatggtacactagaattttctgaaagcagaaaacgttcagattttgtagttaattttcattacaatagaaacatgcacatggaaacccatgagctaggattctaccgaggaaaacatctagtgggattagcaaggtgaagggaaagcatctggtggcatggcagcatggggaggctcacacacagaagttgcacgtggacatctgttttaatcagcacaagtgaattaaccatgcttcttcatttttttactttagttaaaaaagaggacatttaatattctacatgctgtaactatcaggacatggttagcaatctcaatttcatttttgatattcaaattaattcttacagcttgagcatatcagccttattaccagagcaaatccttccttcagatgggatagtttactgactagttggagcatttgtaagcacatggtgaaatcagcccctgcccaccaaaataatctttatgttaccaagtgattcccatttgtctaaggatttgaagggggtctaaattggatgtatcttacttagtctaaagaaccaaaaccatccctgaaatgccttgctaatacaactaatccttccatatatgtgccatacttatttttttcctcagtgtatactttatgttaacagggttattacaaagcacattttctgaatctgcaatcattcctttgacaattactggacccaaaggaaaattcattttctttgcattattccagtaatatataaaaactgtgtcttgttatagtagtacattatgaatcacatataaaatcttacaatacagaacaactgttaagatggaaaacagtgccaaacctccacagctcatttctttgtaatataatcagaatgaaaaataatttaagaggacagaagactggtacttttttgttttattttttctctagcttatccctgcacaattattagagtgaatgaaaaaccactttcctgctttccattgttataaattctaagcttaagataaaagtggttctttacatgactgaatcaattacaatttatgggctagagccaaataggttgaagacaatcatccaaacagatcaatggaatagaatttcattggaaatgtaaaacactttcccaacaatggtcatgactttcttctgtttttgagaagagtttcatatgctggaccacattttagcttttattgttttttttttcccattgtccaaaaagttaagcaacaagtggccacacttttacgtgactacaacctggagttctgcaaagaaggtaatatttacttggtctttgactaaagttatctccccattctatggttacattttattttggactatggggacttctaatacgttttggtaaagaagagagtataaagaaaattcttgtcaaatttcactcaaaagtaatttcatgagaaatcaatgatttaaagcattatccaaattaaattatcatttgcagcaaactgtacaacagcaggaaggatatggaatggaacatgaggtatatatctttgcctttataattttaacatcttatattgaagattctgaaaacctatctttattagaggaaaatctcaatcttcagttttggccttctgtcagcagaatgataagtgcaatagttgtaaatctacttgacactgtaataaactgaactgaactttcaaagtc

SEQ ID NO: 325749 - DNA, 5204 bp, Artificial Sequence
  derived and/or modified sequence
tcatttttccccctccccattctgttagaagcttctgccaaccatgattcatggaatgatttttttgagctgagtaatctgtggctttgcagtttccttgctttctttccttagctaaatctcttctagtgttagcaaagtatttagcacaggaaagatcttataaaatgaaataatgcatgtaatgatgcattttccaagtagatgattttaacaaaccgtaagcttttatgcctgtccttcattgtgtcttttctgcctctgtcaggcgaactgtgatgaagagccttatacttaggaagacacaactacctttgaacagtcctttgtgaaatctaatgatcgcaacgaacgaaataaaccagaacatcgttcttcaagccaaggacccttgtcatccattagagcggtaatcaagagatcttctcggacttctattcagagtgaacttcatcgagatagaaggcgcccagagatcaccattgtggcagctgagccactgaggccagcctcgtggtttccaggaaccccacccccaggactgggatttcctacatcatctgcagcaggctcttggaggcctaatgagctggttcctgctgagctcccaccatcttatgaacaagttataaaagaaatcaaccaagttcaagttaatactacaaataataataatgctgctgctactccaaggcacactattacttctgcaactcagactgacttttcagaagaaatagacaacgatctgcctcaaagttttgttttggtctcgtcagcactacaggcacctctcaagcctcttcagcctttctcagcagtctcgtctggcaatcttccaacaaatgtggcacctttaatcgtctttgatatttctgaagaaccgaattgtccagaaaaccccagtgctacaagatgtccagtgccaaaaccaagatcaaaaagcaacctcagaccaatacccagagattctcacattaaagagcaaagtcaacagaaaatcagcccagcagccgtaggagaggagtcatccccaggccggccccagtctctgctggacaacgctagcacctcagacagtcaggcagtgatgaacattatgaacacagaacaaagccaaaatagtattgtttccagaattaaagtgtttgagggtcagacaaacatagaaacctcaggactgcccaagaaaccagaaattactccacgttcacttcctccaaagcctactgtttcctcagggaaaccttctgtagctcccaaaccagctgctaacagagcttctggagagtgggactctgggactgagaacagactcaaggtgacctccaaggaaggactcaccccataccctcccctgcaagaagcgggaagcatcccagtaaccaaacctgaattgccaaagaaaccaaaccctggccttatacgaagtgttaatcctgagattccgggaagagggcccctggctgagagctctgatagtgggaagaaagtgccaactcctgccccgcggcctttgctgctgaagaaatctgtttcctcagaaaaccccacctacccttcagctccactgaaacctgtcactgttcctccccgactcgcaggggcatcacaagccaaagcatacaagtcactgggagaagggcccccagccaaccccccagttccagttctgcagagcaagcccttggtggacatcgatctcatcagctttgatgatgatgttttgcccaccccatcggggaacctggctgaagaatctgttggttcagagatggttctagatccctttcagctccctgcaaaaacagaaccaataaaagaacgagcagttcaaccagcacccaccaggaagcccactgtaattcgaattccagccaaaccaggaaaatgtttacatgaggatccacaaagtccacctcctctccctgctgaaaaacctattggaaacactttcagtacagtatctggaaagctcagtaatgttgagagaactagaaacttggaatccaaccacccaggtcaaacaggaggttttgtgcgagtacccccaaggttgccaccgagacctgtgaatggaaaaaccattccaactcaacagcctccaaccaaggtgccccctgagagaccacctcccccaaagctttctgcaaccagaagatctaataagaaactgccttttaatcgatcctcttctgacatggatcttcagaaaaaacaaagtaacttggcaactggactctcaaaagccaagagtcaagtttttaaaaatcaagatccggtgctaccccctcgtcccaaaccaggacaccctctctacagtaaatacatgcgtggggatgtacttgtgatgctgaagcagacggaaaataattacttggagtgccaaaagggagaagacactggcagagttcacctgtctcaaatgaagattatcactccacttgatgaacatcttagaagcagaccaaacgatccaagccacgctcagaagcctgttgacagtggtgctcctcatgctgtcgttcttcatgatttcccagcagagcaagttgatgatttgaacctcacttctggagaaattgtttatcttctggagaagatagatacagattggtacagagggaactgtagaaaccagattggcatatttcctgccaactatgtcaaagtgattattgatatcccagaaggaggaaatgggaaaagagaatgtgtttcatctcattgtgttaaaggctcaagatgtgttgctcggtttgaatatattggagagcagaaggatgagttgagtttctcagagggagaaattattattcttaaagagtatgtgaatgaggaatgggccagaggagaagttcgaggcagaactgggattttccccctgaactttgtggagcctgttgaggattatcccacctctggtgcaaatgttttaagcacaaaggtaccactgaaaaccaaaaaagaagattctggctcaaactctcaggttaacagtcttccggcagaatggtgtgaagctcttcacagttttacagcagagaccagtgatgacttatcattcaagaggggagaccggatccagattctggaacgtctggattctgactggtgcaggggcagactgcaggacagggaggggatcttcccagcagtgtttgtgaggccctgcccagctgaggcaaaaagtatgttggccatagtaccgaaggggaggaaggccaaagccttatatgatttccgaggggagaatgaagatgaactttccttcaaggctggagatataataacagagctggaatctgtagatgatgactggatgagtggagaacttatgggaaaatctggaatatttcccaaaaactacatacagtttctacagatcagctagaggagaagcttgtctgtgttccttggcacaagaactcacttgaactatcaccttgactatcagatatgtttttgcactattttttttaactgaaaaagaaatatctaagctgtacatggtacactagaattttctgaaagcagaaaacgttcagattttgtagttaattttcattacaatagaaacatgcacatggaaacccatgagctaggattctaccgaggaaaacatctagtgggattagcaaggtgaagggaaagcatctggtggcatggcagcatggggaggctcacacacagaagttgcacgtggacatctgttttaatcagcacaagtgaattaaccatgcttcttcatttttttactttagttaaaaaagaggacatttaatattctacatgctgtaactatcaggacatggttagcaatctcaatttcatttttgatattcaaattaattcttacagcttgagcatatcagccttattaccagagcaaatccttccttcagatgggatagtttactgactagttggagcatttgtaagcacatggtgaaatcagcccctgcccaccaaaataatctttatgttaccaagtgattcccatttgtctaaggatttgaagggggtctaaattggatgtatcttacttagtctaaagaaccaaaaccatccctgaaatgccttgctaatacaactaatccttccatatatgtgccatacttatttttttcctcagtgtatactttatgttaacagggttattacaaagcacattttctgaatctgcaatcattcctttgacaattactggacccaaaggaaaattcattttctttgcattattccagtaatatataaaaactgtgtcttgttatagtagtacattatgaatcacatataaaatcttacaatacagaacaactgttaagatggaaaacagtgccaaacctccacagctcatttctttgtaatataatcagaatgaaaaataatttaagaggacagaagactggtacttttttgttttattttttctctagcttatccctgcacaattattagagtgaatgaaaaaccactttcctgctttccattgttataaattctaagcttaagataaaagtggttctttacatgactgaatcaattacaatttatgggctagagccaaataggttgaagacaatcatccaaacagatcaatggaatagaatttcattggaaatgtaaaacactttcccaacaatggtcatgactttcttctgtttttgagaagagtttcatatgctggaccacattttagcttttattgttttttttttcccattgtccaaaaagttaagcaacaagtggccacacttttacgtgactacaacctggagttctgcaaagaaggtaatatttacttggtctttgactaaagttatctccccattctatggttacattttattttggactatggggacttctaatacgttttggtaaagaagagagtataaagaaaattcttgtcaaatttcactcaaaagtaatttcatgagaaatcaatgatttaaagcattatccaaattaaattatcatttgcagcaaactgtacaacagcaggaaggatatggaatggaacatgaggtatatatctttgcctttataattttaacatcttatattgaagattctgaaaacctatctttattagaggaaaatctcaatcttcagttttggccttctgtcagcagaatgataagtgcaatagttgtaaatctacttgacactgtaataaactgaactgaactttcaaagtc

SEQ ID NO: 325750 - DNA, 5107 bp, Artificial Sequence
  derived and/or modified sequence
agccatttgcttcctgagtggccacattccagctgtgcagactggtcatagcacatctgccaatcagaacaggccctggagggaagcccttggatactgagtcttgtttacatgcatcgtgactctgtttctcccttcctcttgtgtgttgtaccactaggaagattagtggggaaatttgctattacatgcctaagtaaactatgtaactaggatcacagccacaggaaatgatgttctggacagagttttagctcggctttagccacagatcgcaacgaacgaaataaaccagaacatcgttcttcaagccaaggacccttgtcatccattagagcggtaatcaagagatcttctcggacttctattcagagtgaacttcatcgagatagaaggcgcccagagatcaccattgtggcagctgagccactgaggccagcctcgtggtttccaggaaccccacccccaggactgggatttcctacatcatctgcagcaggctcttggaggcctaatgagctggttcctgctgagctcccaccatcttatgaacaagttataaaagaaatcaaccaagttcaagttaatactacaaataataataatgctgctgctactccaaggcacactattacttctgcaactcagactgacttttcagaagaaatagacaacgatctgcctcaaacactacaggcacctctcaagcctcttcagcctttctcagcagtctcgtctggcaatcttccaacaaatgtggcacctttaatcgtctttgatatttctgaagaaccgaattgtccagaaaaccccagtgctacaagatgtccagtgccaaaaccaagatcaaaaagcaacctcagaccaatacccagagattctcacattaaagagcaaagtcaacagaaaatcagcccagcagccgtaggagaggagtcatccccaggccggccccagtctctgctggacaacgctagcacctcagacagtcaggcagtgatgaacattatgaacacagaacaaagccaaaatagtattgtttccagaattaaagtgtttgagggtcagacaaacatagaaacctcaggactgcccaagaaaccagaaattactccacgttcacttcctccaaagcctactgtttcctcagggaaaccttctgtagctcccaaaccagctgctaacagagcttctggagagtgggactctgggactgagaacagactcaaggtgacctccaaggaaggactcaccccataccctcccctgcaagaagcgggaagcatcccagtaaccaaacctgaattgccaaagaaaccaaaccctggccttatacgaagtgttaatcctgagattccgggaagagggcccctggctgagagctctgatagtgggaagaaagtgccaactcctgccccgcggcctttgctgctgaagaaatctgtttcctcagaaaaccccacctacccttcagctccactgaaacctgtcactgttcctccccgactcgcaggggcatcacaagccaaagcatacaagtcactgggagaagggcccccagccaaccccccagttccagttctgcagagcaagcccttggtggacatcgatctcatcagctttgatgatgatgttttgcccaccccatcggggaacctggctgaagaatctgttggttcagagatggttctagatccctttcagctccctgcaaaaacagaaccaataaaagaacgagcagttcaaccagcacccaccaggaagcccactgtaattcgaattccagccaaaccaggaaaatgtttacatgaggatccacaaagtccacctcctctccctgctgaaaaacctattggaaacactttcagtacagtatctggaaagctcagtaatgttgagagaactagaaacttggaatccaaccacccaggtcaaacaggaggttttgtgcgagtacccccaaggttgccaccgagacctgtgaatggaaaaaccattccaactcaacagcctccaaccaaggtgccccctgagagaccacctcccccaaagctttctgcaaccagaagatctaataagaaactgccttttaatcgatcctcttctgacatggatcttcagaaaaaacaaagtaacttggcaactggactctcaaaagccaagagtcaagtttttaaaaatcaagatccggtgctaccccctcgtcccaaaccaggacaccctctctacagtaaatacatgcgtggggatgtacttgtgatgctgaagcagacggaaaataattacttggagtgccaaaagggagaagacactggcagagttcacctgtctcaaatgaagattatcactccacttgatgaacatcttagaagcagaccaaacgatccaagccacgctcagaagcctgttgacagtggtgctcctcatgctgtcgttcttcatgatttcccagcagagcaagttgatgatttgaacctcacttctggagaaattgtttatcttctggagaagatagatacagattggtacagagggaactgtagaaaccagattggcatatttcctgccaactatgtcaaagtgattattgatatcccagaaggaggaaatgggaaaagagaatgtgtttcatctcattgtgttaaaggctcaagatgtgttgctcggtttgaatatattggagagcagaaggatgagttgagtttctcagagggagaaattattattcttaaagagtatgtgaatgaggaatgggccagaggagaagttcgaggcagaactgggattttccccctgaactttgtggagcctgttgaggattatcccacctctggtgcaaatgttttaagcacaaaggtaccactgaaaaccaaaaaagaagattctggctcaaactctcaggttaacagtcttccggcagaatggtgtgaagctcttcacagttttacagcagagaccagtgatgacttatcattcaagaggggagaccggatccagattctggaacgtctggattctgactggtgcaggggcagactgcaggacagggaggggatcttcccagcagtgtttgtgaggccctgcccagctgaggcaaaaagtatgttggccatagtaccgaaggggaggaaggccaaagccttatatgatttccgaggggagaatgaagatgaactttccttcaaggctggagatataataacagagctggaatctgtagatgatgactggatgagtggagaacttatgggaaaatctggaatatttcccaaaaactacatacagtttctacagatcagctagaggagaagcttgtctgtgttccttggcacaagaactcacttgaactatcaccttgactatcagatatgtttttgcactattttttttaactgaaaaagaaatatctaagctgtacatggtacactagaattttctgaaagcagaaaacgttcagattttgtagttaattttcattacaatagaaacatgcacatggaaacccatgagctaggattctaccgaggaaaacatctagtgggattagcaaggtgaagggaaagcatctggtggcatggcagcatggggaggctcacacacagaagttgcacgtggacatctgttttaatcagcacaagtgaattaaccatgcttcttcatttttttactttagttaaaaaagaggacatttaatattctacatgctgtaactatcaggacatggttagcaatctcaatttcatttttgatattcaaattaattcttacagcttgagcatatcagccttattaccagagcaaatccttccttcagatgggatagtttactgactagttggagcatttgtaagcacatggtgaaatcagcccctgcccaccaaaataatctttatgttaccaagtgattcccatttgtctaaggatttgaagggggtctaaattggatgtatcttacttagtctaaagaaccaaaaccatccctgaaatgccttgctaatacaactaatccttccatatatgtgccatacttatttttttcctcagtgtatactttatgttaacagggttattacaaagcacattttctgaatctgcaatcattcctttgacaattactggacccaaaggaaaattcattttctttgcattattccagtaatatataaaaactgtgtcttgttatagtagtacattatgaatcacatataaaatcttacaatacagaacaactgttaagatggaaaacagtgccaaacctccacagctcatttctttgtaatataatcagaatgaaaaataatttaagaggacagaagactggtacttttttgttttattttttctctagcttatccctgcacaattattagagtgaatgaaaaaccactttcctgctttccattgttataaattctaagcttaagataaaagtggttctttacatgactgaatcaattacaatttatgggctagagccaaataggttgaagacaatcatccaaacagatcaatggaatagaatttcattggaaatgtaaaacactttcccaacaatggtcatgactttcttctgtttttgagaagagtttcatatgctggaccacattttagcttttattgttttttttttcccattgtccaaaaagttaagcaacaagtggccacacttttacgtgactacaacctggagttctgcaaagaaggtaatatttacttggtctttgactaaagttatctccccattctatggttacattttattttggactatggggacttctaatacgttttggtaaagaagagagtataaagaaaattcttgtcaaatttcactcaaaagtaatttcatgagaaatcaatgatttaaagcattatccaaattaaattatcatttgcagcaaactgtacaacagcaggaaggatatggaatggaacatgaggtatatatctttgcctttataattttaacatcttatattgaagattctgaaaacctatctttattagaggaaaatctcaatcttcagttttggccttctgtcagcagaatgataagtgcaatagttgtaaatctacttgacactgtaataaactgaactgaactttc

SEQ ID NO: 325751 - protein, 178 aa, Artificial Sequence
  derived and/or modified sequence
MSEVSCKKRDDYLEWPEYFMAVAFLSAQRSKDPNSQVGACIVNSENKIVGIGYNGMPNGCSDDVLPWRRTAENKLDTKYPYVCHAELNAIMNKNSTDVKGCSMYVALFPCNECAKLIIQAGIKEVIFMSDKYHDSDEATAARLLFNMAGVTFRKFIPKCSKIVIDFDSINSRPSQKLQ

SEQ ID NO: 325752 - protein, 169 aa, Artificial Sequence
  derived and/or modified sequence
MSEVSCKKRDDYLEWPEYFMAVAFLSAQRSKDPNSQVGACIVNSENKIVGIGYNGMPNGCSDDVLPWRRTAENKLDTKYPYVCHAELNAIMNKNSTDVKGCSMYVALFPCNECAKLIIQAGIKEVIFMSDKYHDSDEATAARLLFNMAGVTFRKFIPKCSKIVIDFDSI

SEQ ID NO: 325753 - protein, 73 aa, Artificial Sequence
  derived and/or modified sequence
MSEVSCKKRDDYLEWPEYFMAVAFLSAQRSKDPNSQVGACIVNSENKIVGIGYNGMPNGCSDDVLPWRRTAEN

SEQ ID NO: 325754 - protein, 59 aa, Artificial Sequence
  derived and/or modified sequence
MSEVSCKKRDDYLEWPEYFMAVAFLSAQRSKDPNSQVGACIVNSENKIVGIGYNGMPNG

SEQ ID NO: 325755 - protein, 120 aa, Artificial Sequence
  derived and/or modified sequence
MSEVSCKKRDDYLEWPEYFMAVAFLSAQRSKDPNSQVGACIVNSENKIVGIGYNGMPNGCSDDVLPWRRTAENKLDTKYPYVCHAELNAIMNKNSTDVKGCSMYVALFPCNECAKLIIQA

SEQ ID NO: 325756 - protein, 119 aa, Artificial Sequence
  derived and/or modified sequence
MSEVSCKKRDDYLEWPEYFMAVAFLSAQRSKDPNSQVGACIVNSENKIVGIGYNGMPNGCSDDVLPWRRTAENKLDTKYPYVCHAELNAIMNKNSTDVKGCSMYVALFPCNECAKLIIQ

SEQ ID NO: 325757 - DNA, 537 bp, Artificial Sequence
  derived and/or modified sequence
atgagtgaagtgagctgtaagaagagagacgactacttggagtggccggagtacttcatggccgtagccttcttgtcagcacagaggtcgaaggatcctaactcacaggtgggtgcttgcatcgttaacagcgagaataaaatcgtgggaatcggctataatggcatgccgaacgggtgctcagatgacgttctgccgtggcggcgcactgccgagaacaagctggatactaagtacccctacgtgtgtcatgccgagttaaatgcaatcatgaacaaaaatagcacagacgtcaagggatgttctatgtacgtggcactgttcccttgcaacgagtgtgccaaattgatcatccaggccggaatcaaggaagtcatttttatgtccgacaagtatcacgattctgatgaggcaacagccgcccggctgctatttaacatggccggagtcactttccgcaaatttatacccaaatgtagtaaaatcgtaattgatttcgatagtatcaattcccggccaagccagaaacttcagtag

SEQ ID NO: 325758 - DNA, 510 bp, Artificial Sequence
  derived and/or modified sequence
atgtcggaggtctcctgcaagaaaagagacgactacctcgagtggccggagtattttatggccgttgctttcctcagcgcacagagatcaaaggaccctaactcccaagttggcgcctgtattgtcaactccgaaaacaaaattgtgggaatcgggtacaatggaatgcctaacggctgcagtgatgatgtgctcccctggcgaagaacagctgagaacaaactggacactaagtacccatacgtctgccacgccgagctcaacgccataatgaataagaatagcaccgacgttaaagggtgctccatgtacgttgctctttttccttgtaacgagtgcgccaagttaattattcaagcaggcatcaaagaagtgatattcatgtccgataagtaccacgactcggatgaggcgaccgccgcccgcctcttgtttaacatggccggcgtgacgtttaggaagtttataccaaagtgtagcaaaatcgtgatcgattttgattctatctag

SEQ ID NO: 325759 - DNA, 222 bp, Artificial Sequence
  derived and/or modified sequence
atgtcggaagtgtcatgtaaaaaacgagacgattacctggagtggccagagtactttatggctgtggccttcctgtctgcccaaaggtcaaaagatccaaatagccaggtgggagcctgtatcgtcaattcggaaaacaagatcgtgggcatcggctacaacggaatgcccaacggatgtagcgatgatgtgctgccatggaggagaacggctgaaaattag

SEQ ID NO: 325760 - DNA, 180 bp, Artificial Sequence
  derived and/or modified sequence
atgtccgaagtctcatgtaaaaaacgcgacgactatctggagtggccggagtacttcatggctgtcgcttttctgtccgcacagcggagcaaagatcctaattcccaagttggcgcctgtattgtgaactcagaaaacaagatagtaggaattggctataacggcatgcctaacggatag

SEQ ID NO: 325761 - DNA, 72 bp, Artificial Sequence
  derived and/or modified sequence
atgtcggaggtaagctgcaagaaaagggacgattatctcgagtggcccgaatacttcatggccgtcgcctag

SEQ ID NO: 325762 - DNA, 363 bp, Artificial Sequence
  derived and/or modified sequence
atgtcagaggtgtcgtgcaagaagagagacgactaccttgaatggccggagtacttcatggctgtggccttccttagtgcccaacgtagcaaggacccaaatagtcaggtcggggcctgcatcgtaaattccgagaacaagattgtagggataggctacaacggcatgcccaacggatgctccgatgatgtattgccatggagaagaacagccgaaaataagctggacactaaatacccgtacgtttgtcacgccgagctaaacgctataatgaataaaaattctacagatgtgaagggatgctccatgtatgtcgctctgtttccctgtaatgagtgtgcgaagctcatcatacaggcttag

SEQ ID NO: 325763 - DNA, 537 bp, Artificial Sequence
  derived and/or modified sequence
atgagcgaagtctcttgcaaaaagagggacgactatctggagtggcccgagtacttcatggcagttgcttttctgtccgcccaaagatcgaaggatccaaattcgcaggttggggcgtgtatcgtgaattctgagaacaaaatcgtgggtatcggatacaatggtatgcccaatggctgtagcgatgatgttttaccgtggagacggacagccgaaaataagctggacaccaaatatccttacgtttgccatgcagaactaaacgctattatgaacaagaactccacagatgtgaaggggtgtagcatgtacgtcgcgcttttcccttgcaacgagtgtgctaagctaatcatccaggctggcataaaggaagtcatcttcatgtctgataagtaccacgactccgatgaagccaccgccgctaggcttttgttcaatatggccggcgtcacgtttagaaagtttatccctaaatgctccaagattgtgatcgatttcgactctattaatagccggccatcgcagaagctgcaatag

SEQ ID NO: 325764 - DNA, 360 bp, Artificial Sequence
  derived and/or modified sequence
atgtccgaggtcagttgcaagaaacgtgacgattacttggagtggcctgaatattttatggccgttgcctttcttagcgcacagcggtctaaggaccccaactctcaggtcggagcatgtatcgtaaacagtgaaaataaaatcgttggaattggatacaatggcatgccgaacggttgttctgacgacgtgctgccctggcgtaggaccgccgagaacaagttagacaccaaatatccatacgtatgtcacgcagagctgaacgccattatgaacaaaaactccactgacgtgaaaggatgctccatgtatgttgctctctttccctgcaacgaatgcgctaagctgattatccaatag

SEQ ID NO: 325765 - DNA, 297 bp, Artificial Sequence
  derived and/or modified sequence
atgtcagaagtcagttgtaagaaaagggacgactacctagagtggcctgaatacttcatggccgtcgctttcctgagtgctcaaagaagcaaggatccaaatagccaagtcggagcgtgtatcgtaaacagcgagaataaaatcgttgggattggatacaacggcatgcctaacgggtgtagtgacgacgtgctgccctggcggcgtaccgccgaaaacaaactcgacactaaatatccttacgtgtgccatgccgagcttaatgctattatgaataaaaacagcacagacgtttag

SEQ ID NO: 325766 - DNA, 537 bp, Artificial Sequence
  derived and/or modified sequence
atgtctgaggtgtcctgcaagaagagagatgactacctggagtggccagagtacttcatggctgtggccttcctgagcgcccagaggagcaaggaccccaacagccaggtgggcgcctgcatcgtgaacagcgagaacaagatcgtgggcatcggctacaacggcatgcccaacggctgcagtgatgatgtgctgccctggaggagaacagctgagaacaagctggacaccaagtacccctacgtgtgccacgccgagctgaatgccatcatgaacaagaacagcacagatgtgaagggctgcagcatgtatgtggccctcttcccctgcaatgaatgtgccaagctgatcatccaggccggcatcaaggaggtgatcttcatgtctgacaagtaccatgacagtgatgaggccacagctgcccggctgctcttcaacatggccggcgtgaccttcaggaagttcatccccaagtgcagcaagatcgtcatcgactttgacagcatcaacagccggcccagccagaagctgcagtag

SEQ ID NO: 325767 - DNA, 510 bp, Artificial Sequence
  derived and/or modified sequence
atgtctgaggtgtcctgcaagaagagagatgactacctggagtggccagagtacttcatggctgtggccttcctgagcgcccagaggagcaaggaccccaacagccaggtgggcgcctgcatcgtgaacagcgagaacaagatcgtgggcatcggctacaacggcatgcccaacggctgcagtgatgatgtgctgccctggaggagaacagctgagaacaagctggacaccaagtacccctacgtgtgccacgccgagctgaatgccatcatgaacaagaacagcacagatgtgaagggctgcagcatgtatgtggccctcttcccctgcaatgaatgtgccaagctgatcatccaggccggcatcaaggaggtgatcttcatgtctgacaagtaccatgacagtgatgaggccacagctgcccggctgctcttcaacatggccggcgtgaccttcaggaagttcatccccaagtgcagcaagatcgtcatcgactttgacagcatctag

SEQ ID NO: 325768 - DNA, 222 bp, Artificial Sequence
  derived and/or modified sequence
atgtctgaggtgtcctgcaagaagagagatgactacctggagtggccagagtacttcatggctgtggccttcctgagcgcccagaggagcaaggaccccaacagccaggtgggcgcctgcatcgtgaacagcgagaacaagatcgtgggcatcggctacaacggcatgcccaacggctgcagtgatgatgtgctgccctggaggagaacagctgagaactag

SEQ ID NO: 325769 - DNA, 180 bp, Artificial Sequence
  derived and/or modified sequence
atgtctgaggtgtcctgcaagaagagagatgactacctggagtggccagagtacttcatggctgtggccttcctgagcgcccagaggagcaaggaccccaacagccaggtgggcgcctgcatcgtgaacagcgagaacaagatcgtgggcatcggctacaacggcatgcccaacggctag

SEQ ID NO: 325770 - DNA, 72 bp, Artificial Sequence
  derived and/or modified sequence
atgtctgaggtgtcctgcaagaagagagatgactacctggagtggccagagtacttcatggctgtggcctag

SEQ ID NO: 325771 - DNA, 363 bp, Artificial Sequence
  derived and/or modified sequence
atgtctgaggtgtcctgcaagaagagagatgactacctggagtggccagagtacttcatggctgtggccttcctgagcgcccagaggagcaaggaccccaacagccaggtgggcgcctgcatcgtgaacagcgagaacaagatcgtgggcatcggctacaacggcatgcccaacggctgcagtgatgatgtgctgccctggaggagaacagctgagaacaagctggacaccaagtacccctacgtgtgccacgccgagctgaatgccatcatgaacaagaacagcacagatgtgaagggctgcagcatgtatgtggccctcttcccctgcaatgaatgtgccaagctgatcatccaggcctag

SEQ ID NO: 325772 - DNA, 360 bp, Artificial Sequence
  derived and/or modified sequence
atgtctgaggtgtcctgcaagaagagagatgactacctggagtggccagagtacttcatggctgtggccttcctgagcgcccagaggagcaaggaccccaacagccaggtgggcgcctgcatcgtgaacagcgagaacaagatcgtgggcatcggctacaacggcatgcccaacggctgcagtgatgatgtgctgccctggaggagaacagctgagaacaagctggacaccaagtacccctacgtgtgccacgccgagctgaatgccatcatgaacaagaacagcacagatgtgaagggctgcagcatgtatgtggccctcttcccctgcaatgaatgtgccaagctgatcatccagtag

SEQ ID NO: 325773 - DNA, 297 bp, Artificial Sequence
  derived and/or modified sequence
atgtctgaggtgtcctgcaagaagagagatgactacctggagtggccagagtacttcatggctgtggccttcctgagcgcccagaggagcaaggaccccaacagccaggtgggcgcctgcatcgtgaacagcgagaacaagatcgtgggcatcggctacaacggcatgcccaacggctgcagtgatgatgtgctgccctggaggagaacagctgagaacaagctggacaccaagtacccctacgtgtgccacgccgagctgaatgccatcatgaacaagaacagcacagatgtgtag

SEQ ID NO: 325774 - DNA, 537 bp, Artificial Sequence
  derived and/or modified sequence
atgagcgaggtgagctgcaagaagcgggacgactacctggagtggcccgagtacttcatggccgtggccttcctcagtgcccagaggagtaaggacccaaatagccaggtaggtgcttgcatcgtaaacagcgaaaataagatagtcggcattgggtacaacggcatgcccaacgggtgttccgacgacgtgttaccatggcgtcgcacagccgaaaacaagctggatacaaagtacccttatgtgtgtcatgctgaactgaacgctattatgaataaaaacagtactgacgtgaaagggtgttctatgtatgttgcactatttccttgtaacgaatgcgctaagctgatcattcaagccggtatcaaggaggtcatattcatgagtgataagtatcatgattcagatgaagcaaccgctgcacgactgctgtttaatatggccggggtgacatttaggaagtttattccaaaatgctcgaagattgttatagacttcgatagtatcaactctaggccttcccaaaagctccaatag

SEQ ID NO: 325775 - DNA, 510 bp, Artificial Sequence
  derived and/or modified sequence
atgagcgaggtgagctgcaagaagcgggacgactacctggagtggccagagtatttcatggccgttgcattcctgagtgcccagcggtcgaaggatccaaattcacaggttggcgcgtgtattgtgaatagtgaaaacaaaattgtgggcatcggttataatgggatgcctaacggctgctctgatgacgtgttaccatggaggcgcaccgcagagaacaaactcgatactaagtacccctacgtctgtcacgccgagctgaacgctatcatgaataagaacagcacagacgttaaaggctgcagcatgtacgtagccctttttccttgtaatgagtgtgccaagttgattattcaggctggtataaaggaggtgattttcatgagtgacaaatatcacgattccgacgaagcgacagccgctaggttattgtttaatatggctggtgtcacatttaggaaatttattcctaaatgtagcaaaatcgtaatcgattttgacagcatttag

SEQ ID NO: 325776 - DNA, 222 bp, Artificial Sequence
  derived and/or modified sequence
atgagcgaggtgagctgcaagaagcgggacgactacctggagtggccagaatacttcatggctgtcgccttcttgtccgcccagaggagcaaggatccgaattcccaggtcggggcatgcattgtaaattccgagaacaagattgtaggcatcggctacaatgggatgcccaatgggtgttctgacgacgtattgccatggcggagaacagccgagaattag

SEQ ID NO: 325777 - DNA, 180 bp, Artificial Sequence
  derived and/or modified sequence
atgagcgaggtgagctgcaagaagcgggacgactacctggagtggccagagtacttcatggctgtggccttcttgagtgcccagcgctccaaagacccaaactcccaggttggagcgtgtattgttaattctgagaataagatcgtgggcatcggatataacggcatgcccaatggttag

SEQ ID NO: 325778 - DNA, 72 bp, Artificial Sequence
  derived and/or modified sequence
atgagcgaggtgagctgcaagaagcgggacgactacctggagtggcctgaatactttatggctgtagcctag

SEQ ID NO: 325779 - DNA, 363 bp, Artificial Sequence
  derived and/or modified sequence
atgagcgaggtgagctgcaagaagcgggacgactacctggagtggcccgagtacttcatggccgtcgcattcctgtccgcgcaaagatccaaggaccctaactcgcaggtgggagcgtgcattgttaattcagagaataaaattgtcggcattggatacaacggcatgcccaacggatgtagcgacgatgtcctcccatggagaagaacagcggagaataagctggataccaaatacccctacgtttgccatgcagaactgaatgccattatgaacaagaattcaaccgatgtgaagggatgctcgatgtacgtggccctattcccttgcaatgagtgtgcaaaactcatcattcaggcctag

SEQ ID NO: 325780 - DNA, 537 bp, Artificial Sequence
  derived and/or modified sequence
atgagcgaggtgagctgcaagaagcgggacgactacctggagtggccagaatacttcatggctgtggcatttctgtctgcgcagagaagcaaagacccaaattcccaggttggggcttgcattgtgaattctgaaaacaagatcgtaggtatcggctacaatggaatgcccaatggatgctctgacgatgtgctgccttggcggaggactgccgagaacaagctggacaccaaatacccttatgtgtgccatgccgaacttaacgccattatgaataaaaacagcaccgatgtcaagggctgttcaatgtacgtcgctctgttcccgtgtaacgaatgtgcaaagctcataatccaggccggtataaaagaggttatttttatgagcgacaagtaccatgacagcgatgaagccaccgccgcccgactgctcttcaatatggccggcgtgacatttcggaaatttattccaaagtgcagcaaaatcgtgatagacttcgacagtattaacagtagaccaagtcaaaagttgcagtag

SEQ ID NO: 325781 - DNA, 360 bp, Artificial Sequence
  derived and/or modified sequence
atgagcgaggtgagctgcaagaagcgggacgactacctggagtggcccgaatactttatggctgtggcattcttatccgcccagcggtccaaagaccctaacagccaggttggagcatgtattgttaatagcgaaaacaagatagtgggcatcggttataatggaatgcctaacggctgttcagatgatgtgttgccctggcggcgcactgctgagaataaactggacactaagtatccatacgtctgccacgccgaactgaacgcaataatgaataagaatagcaccgacgtgaaaggctgttccatgtacgttgcgctattcccttgtaacgagtgtgcaaaactgattattcaatag

SEQ ID NO: 325782 - DNA, 297 bp, Artificial Sequence
  derived and/or modified sequence
atgagcgaggtgagctgcaagaagcgggacgactacctggagtggcccgagtactttatggccgtggcgtttcttagtgcgcaaaggagcaaagatccaaattcacaagtgggggcgtgtattgtaaactcggaaaataagattgtcggcatcggatacaacggtatgccaaatggctgctcagacgacgtcttgccctggcgaaggactgccgagaataagcttgacactaaatatccatatgtgtgccatgcagagctcaacgccatcatgaacaaaaatagtactgacgtgtag

SEQ ID NO: 325783 - DNA, 537 bp, Artificial Sequence
  derived and/or modified sequence
atgtcagaggtgtcttgcaaaaaacgggacgactacctggagtggcccgagtactttatggcggttgcctttctgagcgcccagcgctccaaggaccccaactcccaggtgggcgcttgcatcgtaaattccgaaaataaaatagtcggtatcggctacaacggcatgccaaatggctgctccgatgatgtcctgccctggcgacggactgcggagaacaagctggacacaaagtacccttacgtatgtcacgcagagttaaacgctataatgaacaagaattccactgatgtgaaggggtgctcgatgtacgtggctttattcccatgtaacgaatgcgcaaaactgattatccaggccggaatcaaagaagtgatcttcatgtcagacaaataccatgattccgacgaggctactgccgctaggctgctgtttaacatggccggagtgactttcagaaagtttattccgaagtgcagcaagatcgtaatcgatttcgactcaataaactcacgcccttctcagaagttgcaatag

SEQ ID NO: 325784 - DNA, 510 bp, Artificial Sequence
  derived and/or modified sequence
atgagtgaggtttcttgtaagaagcgcgacgactacttagagtggccagagtacttcatggctgtcgcctttctatcggcacagagaagcaaggatcccaacagccaagtcggtgcttgtatcgtgaactctgaaaataaaatagtggggattggctacaatggaatgccaaatggatgttcagacgatgtgctgccctggcgtcggaccgccgaaaacaagctggacactaagtatccctatgtgtgtcacgccgaattgaatgccatcatgaataagaactccaccgatgttaaggggtgctctatgtacgtggcgctgttcccctgtaatgaatgcgctaaactaatcatccaggccggtataaaggaagtgatttttatgtctgacaaatatcatgactcggatgaggccacagctgccagactgttatttaatatggcgggagtgacttttcggaagttcattcctaaatgttccaagattgtgattgatttcgactccatttag

SEQ ID NO: 325785 - DNA, 222 bp, Artificial Sequence
  derived and/or modified sequence
atgtcagaggtgtcgtgtaagaaacgtgacgactacttggaatggccggaatacttcatggccgtcgcctttttaagcgcgcagcggtcaaaagatcctaattcccaagtgggtgcctgcatagtgaacagcgagaacaagattgttggcatcggttataacggaatgccaaacgggtgttccgacgacgtcctcccttggcgacgaacagcagaaaactag

SEQ ID NO: 325786 - DNA, 180 bp, Artificial Sequence
  derived and/or modified sequence
atgtctgaagtgtcttgtaaaaagcgggatgattacctggaatggccagagtacttcatggccgtggccttcctctcagcacagagaagcaaagatcctaatagccaggtgggcgcttgcattgtcaatagcgaaaacaagatcgtcggcatcgggtacaacggcatgcctaacggctag

SEQ ID NO: 325787 - DNA, 72 bp, Artificial Sequence
  derived and/or modified sequence
atgtctgaagtctcctgtaagaagagagatgactacctggaatggcctgaatatttcatggcagtcgcgtag

SEQ ID NO: 325788 - DNA, 363 bp, Artificial Sequence
  derived and/or modified sequence
atgtcagaagtttcctgcaaaaagcgggatgattatctcgagtggcccgaatattttatggccgtggcattcctcagtgctcaaagaagtaaggacccgaatagtcaagtgggggcatgtatcgtgaatagcgagaacaaaatcgtgggtattggctataatggcatgcccaacggatgttccgacgacgtactcccttggcgacgcacagccgagaacaaactcgacaccaagtatccctatgtgtgccacgctgagctgaacgccattatgaacaaaaacagcacggatgtcaagggctgttccatgtatgtcgccctgttcccatgcaatgagtgtgctaagctgattatccaggcatag

SEQ ID NO: 325789 - DNA, 537 bp, Artificial Sequence
  derived and/or modified sequence
atgtctgaagtgagttgcaagaagagagatgactatctggagtggcccgaatatttcatggctgtggctttcctatccgcccaaagaagtaaggatcccaatagccaggttggtgcatgcatcgtcaatagtgaaaataagatcgttggcatcgggtacaatggcatgcccaacggatgcagcgatgacgtcctgccttggaggcgcaccgctgaaaacaaacttgacacaaagtacccttatgtgtgccatgcggagctgaatgccataatgaacaagaatagcacagacgtcaagggctgttcaatgtatgttgccctgtttccctgcaacgagtgcgctaagctcataatccaagccggtatcaaggaggtgatatttatgagtgataagtaccacgattccgacgaggcgactgctgccaggttattattcaacatggcaggggtcactttccggaagtttatacccaagtgttcaaagatcgttatcgacttcgacagtattaattcccggccatcccaaaagctccagtag

SEQ ID NO: 325790 - DNA, 360 bp, Artificial Sequence
  derived and/or modified sequence
atgagcgaggtttcatgcaaaaaacgcgatgattacctggagtggccagagtattttatggcagtggctttcctttccgcgcagagatcaaaagacccaaacagccaggtgggggcatgtatagtgaatagcgagaataagattgtggggatcggctataatggcatgcctaatggctgttctgatgatgtcttaccttggaggcgtacagcggagaataaactggatacgaagtacccatacgtgtgtcacgcagagctcaatgcgattatgaacaaaaatagtacggacgtaaaaggttgctcaatgtacgttgccttgtttccctgcaatgagtgtgctaagcttataatccagtag

SEQ ID NO: 325791 - DNA, 297 bp, Artificial Sequence
  derived and/or modified sequence
atgtcagaagtgagttgtaaaaagcgtgatgactatttagaatggccggaatatttcatggccgtggcctttttaagtgctcagcgcagcaaagacccaaactcccaagtgggggcttgcattgtcaactctgaaaacaagatagtgggaatcggttacaacggcatgcccaatggatgctcagacgacgtgctcccgtggaggcggactgccgagaacaagttggacaccaaatatccctacgtttgtcacgcggaactcaacgccataatgaataagaattcgactgacgtgtag

SEQ ID NO: 325792 - DNA, 537 bp, Artificial Sequence
  derived and/or modified sequence
atgagcgaggtgagctgcaagaagagagacgactacctggagtggcccgagtacttcatggccgtggccttcctgagcgcccagagaagcaaggaccccaacagccaggtgggcgcctgcatcgtgaacagcgagaacaagatcgtgggcatcggctacaacggcatgcccaacggctgcagcgacgacgtgctgccctggagaagaaccgccgagaacaagctggacaccaagtacccctacgtgtgccacgccgagctgaacgccatcatgaacaagaacagcaccgacgtgaagggctgcagcatgtacgtggccctgttcccctgcaacgagtgcgccaagctgatcatccaggccggcatcaaggaggtgatcttcatgagcgacaagtaccacgacagcgacgaggccaccgccgccagactgctgttcaacatggccggcgtgaccttcagaaagttcatccccaagtgcagcaagatcgtgatcgacttcgacagcatcaacagcagacccagccagaagctgcagtag

SEQ ID NO: 325793 - DNA, 510 bp, Artificial Sequence
  derived and/or modified sequence
atgagcgaggtgagctgcaagaagagagacgactacctggagtggcccgagtacttcatggccgtggccttcctgagcgcccagagaagcaaggaccccaacagccaggtgggcgcctgcatcgtgaacagcgagaacaagatcgtgggcatcggctacaacggcatgcccaacggctgcagcgacgacgtgctgccctggagaagaaccgccgagaacaagctggacaccaagtacccctacgtgtgccacgccgagctgaacgccatcatgaacaagaacagcaccgacgtgaagggctgcagcatgtacgtggccctgttcccctgcaacgagtgcgccaagctgatcatccaggccggcatcaaggaggtgatcttcatgagcgacaagtaccacgacagcgacgaggccaccgccgccagactgctgttcaacatggccggcgtgaccttcagaaagttcatccccaagtgcagcaagatcgtgatcgacttcgacagcatctag

SEQ ID NO: 325794 - DNA, 222 bp, Artificial Sequence
  derived and/or modified sequence
atgagcgaggtgagctgcaagaagagagacgactacctggagtggcccgagtacttcatggccgtggccttcctgagcgcccagagaagcaaggaccccaacagccaggtgggcgcctgcatcgtgaacagcgagaacaagatcgtgggcatcggctacaacggcatgcccaacggctgcagcgacgacgtgctgccctggagaagaaccgccgagaactag

SEQ ID NO: 325795 - DNA, 180 bp, Artificial Sequence
  derived and/or modified sequence
atgagcgaggtgagctgcaagaagagagacgactacctggagtggcccgagtacttcatggccgtggccttcctgagcgcccagagaagcaaggaccccaacagccaggtgggcgcctgcatcgtgaacagcgagaacaagatcgtgggcatcggctacaacggcatgcccaacggctag

SEQ ID NO: 325796 - DNA, 72 bp, Artificial Sequence
  derived and/or modified sequence
atgagcgaggtgagctgcaagaagagagacgactacctggagtggcccgagtacttcatggccgtggcctag

SEQ ID NO: 325797 - DNA, 363 bp, Artificial Sequence
  derived and/or modified sequence
atgagcgaggtgagctgcaagaagagagacgactacctggagtggcccgagtacttcatggccgtggccttcctgagcgcccagagaagcaaggaccccaacagccaggtgggcgcctgcatcgtgaacagcgagaacaagatcgtgggcatcggctacaacggcatgcccaacggctgcagcgacgacgtgctgccctggagaagaaccgccgagaacaagctggacaccaagtacccctacgtgtgccacgccgagctgaacgccatcatgaacaagaacagcaccgacgtgaagggctgcagcatgtacgtggccctgttcccctgcaacgagtgcgccaagctgatcatccaggcctag

SEQ ID NO: 325798 - DNA, 360 bp, Artificial Sequence
  derived and/or modified sequence
atgagcgaggtgagctgcaagaagagagacgactacctggagtggcccgagtacttcatggccgtggccttcctgagcgcccagagaagcaaggaccccaacagccaggtgggcgcctgcatcgtgaacagcgagaacaagatcgtgggcatcggctacaacggcatgcccaacggctgcagcgacgacgtgctgccctggagaagaaccgccgagaacaagctggacaccaagtacccctacgtgtgccacgccgagctgaacgccatcatgaacaagaacagcaccgacgtgaagggctgcagcatgtacgtggccctgttcccctgcaacgagtgcgccaagctgatcatccagtag

SEQ ID NO: 325799 - DNA, 297 bp, Artificial Sequence
  derived and/or modified sequence
atgagcgaggtgagctgcaagaagagagacgactacctggagtggcccgagtacttcatggccgtggccttcctgagcgcccagagaagcaaggaccccaacagccaggtgggcgcctgcatcgtgaacagcgagaacaagatcgtgggcatcggctacaacggcatgcccaacggctgcagcgacgacgtgctgccctggagaagaaccgccgagaacaagctggacaccaagtacccctacgtgtgccacgccgagctgaacgccatcatgaacaagaacagcaccgacgtgtag

SEQ ID NO: 325800 - DNA, 414 bp, Artificial Sequence
  derived and/or modified sequence
atggccgatctcgttgctgtgactaagagtgacggagacctgatagttcccgccagacggattcaggccgaatacgtgtcagcactgaagctgctgcgtaaaaggagccaagtgtggaagccaaaagtaatacgaatatccgctaggagcggtgaggggatttcggagatgtgggataaaatgaaagatttccaagacctcatgcttgcctctggggaacttacagccaagcgacgaaagcagcagaaggtgtggatgtggaatctaattcaggaaagtgtcctggagcacttccggacccaccctaccgtccgcgaacagatccctctcttggagcagaaggtgctgattggtgccttgagcccgggactcgccgcagattttctcctgaaagcgtttaaatctagggattag

SEQ ID NO: 325801 - DNA, 414 bp, Artificial Sequence
  derived and/or modified sequence
atggctgacctggtggccgtgaccaagagtgatggagacctgattgtgcctgcccggcgcatccaggccgagtatgtgtctgccctgaagctgctgaggaagaggagccaggtgtggaagcccaaggtgatccgcatcagcgcccggagcggggagggcatcagcgagatgtgggacaagatgaaggacttccaggacctgatgctggccagcggggagctgacagccaagaggaggaagcagcagaaggtgtggatgtggaacctgatccaggagagcgtgctggagcacttccgcacccaccccaccgtgcgggagcagatccccctgctggagcagaaggtgctgattggagccctgagccctggcctggccgctgacttcctgctgaaggccttcaagagccgggactag

SEQ ID NO: 325802 - DNA, 414 bp, Artificial Sequence
  derived and/or modified sequence
atggccgacctggtggccgtgaccaagagcgacggcgacctgatcgtgcccgcccgccgtattcaggccgaatacgtttccgcactcaagttgctgcgcaaacgaagccaggtgtggaaacccaaggtgattagaatcagcgcccgctccggagagggcatctctgagatgtgggataaaatgaaggactttcaggatctgatgctcgccagcggggagctcaccgcaaagcgacgaaaacagcaaaaggtctggatgtggaacctgatccaggaatctgtgctcgaacactttcggacccacccaacagtgcgagagcaaattcctctgttggaacagaaggtgttgatcggagccctctctcccgggctcgccgcagacttcctgctgaaggctttcaaatccagggattag

SEQ ID NO: 325803 - DNA, 414 bp, Artificial Sequence
  derived and/or modified sequence
atggctgacttggttgcagttaccaaatccgatggagatctgatcgtgccggcaaggcgtattcaggcagagtatgtcagcgcacttaagctcctgaggaaaaggagtcaggtctggaaacctaaagtcattagaatttccgcacgctccggggaggggatatccgaaatgtgggacaaaatgaaggactttcaggaccttatgctggcctcaggtgagctgactgctaagcgtcggaagcagcaaaaagtgtggatgtggaacctcatccaggaatcagtccttgaacactttcgaacgcatcccactgttcgggagcagattccattgctggagcagaaggtgctcatcggagcacttagcccaggcctcgccgcagatttcctcctaaaagccttcaaaagcagagattag

SEQ ID NO: 325804 - DNA, 414 bp, Artificial Sequence
  derived and/or modified sequence
atggccgacctggtggccgtgaccaagagcgacggcgacctgatcgtgcccgccagaagaatccaggccgagtacgtgagcgccctgaagctgctgagaaagagaagccaggtgtggaagcccaaggtgatcagaatcagcgccagaagcggcgagggcatcagcgagatgtgggacaagatgaaggacttccaggacctgatgctggccagcggcgagctgaccgccaagagaagaaagcagcagaaggtgtggatgtggaacctgatccaggagagcgtgctggagcacttcagaacccaccccaccgtgagagagcagatccccctgctggagcagaaggtgctgatcggcgccctgagccccggcctggccgccgacttcctgctgaaggccttcaagagcagagactag

SEQ ID NO: 325805 - protein, 337 aa, Artificial Sequence
  derived and/or modified sequence
MTMMAHQYPSWIFINEKTFITREQLNSLLKTYNIFYENQKNLHILYGETEDGKLIVEGMLDIFWGVKRPIQLKIQDEKPFSSFTSMKSSDVFSSKGMTRWGEFDDLYRISELDRTQIPMSEKRNSQEDYLSYHSNTLKPHAKDEPDSPVLYRTMSEAALVRKRMKPLMMDRKERQKNRASINGHFYNHETSIFIPAFESETKVRVNSNMRTEEVIKQLLQKFKIENSPQDFALHIIFATGEQRRLKKTDIPLLQRLLQGPSEKNARIFLMDKDAEEISSDVAQYINFHFSLLESILQRLNEEEKREIQRIVTKFNKEKAIILKCLQNKLVIKTETTV

SEQ ID NO: 325806 - DNA, 1014 bp, Artificial Sequence
  derived and/or modified sequence
atgactatgatggcgcaccagtacccctcatggatctttatcaacgagaaaactttcatcacaagggagcaattaaactctcttctgaaaacgtacaacatcttttatgagaaccagaagaacttacacatcctatacggagaaacagaggatggaaagctgatcgtggaaggaatgctggacattttctggggggtgaaacggcccattcaactaaaaatccaggatgaaaaaccattcagctcattcaccagcatgaagtcctctgatgtgttttctagcaaaggcatgacgcgctggggcgagttcgacgatctatataggatctccgagctcgacaggacgcagatccccatgtccgagaagcggaattcccaggaggattacctgtcctaccacagtaacacactcaaacctcacgcaaaggatgaacctgattctcccgtactgtaccgcaccatgtccgaagccgctttggtgcgcaagcggatgaaacccctgatgatggataggaaggaacgccagaagaaccgcgcgagtattaacggacatttttataatcatgaaacttcaattttcatcccagcttttgagtccgaaaccaaagtgcgggtgaactcgaacatgcgtactgaggaagtgattaaacaactgctgcagaagtttaagatcgagaattcccctcaggactttgctttacacattatattcgccacgggggagcagaggagactgaaaaagacagacatccccctcctgcagcgtctgcttcaaggtccctctgagaaaaatgccaggatattcctcatggacaaagacgctgaggagattagcagcgacgttgcacagtacattaacttccacttttctctgctggaatctatcttacagagacttaatgaggaagaaaaacgcgaaattcagaggattgtgaccaaatttaacaaagaaaaagccattattctaaagtgtctccaaaataaactggtgattaaaactgagacaaccgtgtag

SEQ ID NO: 325807 - DNA, 1014 bp, Artificial Sequence
  derived and/or modified sequence
atgaccatgatggcccaccagtaccccagctggatcttcatcaatgagaagaccttcatcacccgggagcagctgaacagcctgctgaagacctacaacatcttctatgagaaccagaagaacctgcacatcctgtatggagaaacagaagatggcaagctgattgtggagggcatgctggacatcttctggggcgtgaagaggcccatccagctgaagatccaggatgagaagcccttcagcagcttcacctccatgaagagcagtgatgtgttcagcagcaagggcatgacccgctggggcgagtttgatgacctgtaccgcatcagcgagctggacaggacccagatccccatgtctgagaagaggaacagccaggaggactacctgagctaccacagcaacaccctgaagccccacgccaaggatgagccagacagccctgtgctgtaccgcaccatgtctgaggccgccctggtgaggaagaggatgaagcccctgatgatggacaggaaggagcggcagaagaacagagccagcatcaatggccacttctacaaccacgagaccagcatcttcatcccagcctttgaaagtgagaccaaggtgcgggtgaacagcaacatgaggacagaggaggtgatcaagcagctgctgcagaagttcaagattgagaacagcccccaggactttgccctgcacatcatctttgccactggagagcagaggcggctgaagaagacagacatccccctgctgcagaggctgctgcagggccccagcgagaagaatgcccgcatcttcctgatggacaaggatgctgaggagatcagcagtgatgtggcccagtacatcaacttccacttcagcctgctggagagcatcctgcagaggctgaatgaggaggagaagcgggagatccagagaattgtgaccaagttcaacaaggagaaggccatcatcctgaagtgcctgcagaacaagctggtgatcaagacagagaccaccgtgtag

SEQ ID NO: 325808 - DNA, 1014 bp, Artificial Sequence
  derived and/or modified sequence
atgaccatgatggcccaccagtaccccagctggatcttcatcaacgagaagaccttcattactagggaacagctgaactccctcctcaagacctacaacatcttctacgagaaccaaaagaatttgcatattctgtatggcgagaccgaggacggaaaactaattgttgaaggcatgctcgatattttttggggcgtgaagcggccaattcagctgaaaattcaggacgagaagccattcagcagcttcacatcaatgaaaagcagtgacgtatttagctccaagggaatgacgcgttggggcgagtttgatgacttgtatagaatcagtgagctggaccgcacccaaattccaatgtctgaaaagcggaattcacaagaggactatctctcctatcactccaacactttaaagcctcacgcgaaagacgagcccgactcccctgttctgtacaggaccatgtcggaggccgcgctcgttcggaaacggatgaagcctttaatgatggatcgcaaggaacggcagaagaacagggcatcaatcaacgggcacttctacaaccacgaaacatccatcttcatcccagccttcgagtcagaaaccaaggtgcgggtgaatagcaatatgcgcacagaagaggtgattaagcagctgttgcagaaattcaaaatcgagaattctcctcaggactttgccctacatatcattttcgcaaccggcgagcagaggcggcttaagaagacagatatccctctcctgcagcgcttgttacagggtccgtccgaaaaaaacgcgcggatcttcctgatggacaaggatgccgaggagatctcatccgatgttgcccagtacattaatttccatttttcactgctcgagagtatactgcagcgattaaatgaggaggagaagagagaaattcagcggatagtgaccaaatttaacaaagagaaggccattatacttaaatgtctccagaacaagctagttattaaaacagagactaccgtgtag

SEQ ID NO: 325809 - DNA, 1014 bp, Artificial Sequence
  derived and/or modified sequence
atgacaatgatggcgcaccaatacccttcatggatcttcattaatgaaaaaacttttataaccagagaacagttgaattcactgttgaaaacctacaatatattttatgagaatcagaaaaacctccatatcctatacggggagaccgaagacggaaagctgatagttgagggtatgctcgatatcttctggggggttaagagaccgattcagctcaaaatccaagacgaaaaacccttcagctccttcacctcaatgaaatcgtccgacgtgttcagcagcaaagggatgacaaggtggggggaatttgatgacctgtacagaatctccgagctggatcgcactcagatcccaatgtcggagaaaagaaactcacaggaagactacctatcctaccattccaacaccctcaagccacacgcaaaggacgagccagatagcccagtcttgtatcgtaccatgagtgaagccgcactggttaggaagagaatgaaaccgttgatgatggacaggaaggaacggcagaagaatcgtgcctcaatcaacgggcacttttataatcatgaaacgtcaatttttattcctgcattcgaaagcgagactaaggtcagagttaacagcaatatgcgcactgaagaggtcatcaaacagctcctgcagaagtttaaaattgaaaatagcccacaggacttcgcgctccacattatttttgctacgggggagcaaagacggctcaagaagaccgacattccgctcctgcaacgtctcctgcagggaccttcggaaaaaaacgctcgcatctttttaatggacaaggatgctgaagagatttcgtccgacgtggctcagtatatcaattttcacttttctctccttgagtcaatcctacaacgcttgaatgaagaagagaaacgcgaaattcagaggattgtgaccaaatttaacaaggagaaggctatcatactgaagtgcctgcagaacaaactggtcataaagacggaaacaacggtgtag

SEQ ID NO: 325810 - DNA, 1014 bp, Artificial Sequence
  derived and/or modified sequence
atgaccatgatggcccaccagtaccccagctggatcttcatcaacgagaagaccttcatcaccagagagcagctgaacagcctgctgaagacctacaacatcttctacgagaaccagaagaacctgcacatcctgtacggcgagaccgaggacggcaagctgatcgtggagggcatgctggacatcttctggggcgtgaagagacccatccagctgaagatccaggacgagaagcccttcagcagcttcaccagcatgaagagcagcgacgtgttcagcagcaagggcatgaccagatggggcgagttcgacgacctgtacagaatcagcgagctggacagaacccagatccccatgagcgagaagagaaacagccaggaggactacctgagctaccacagcaacaccctgaagccccacgccaaggacgagcccgacagccccgtgctgtacagaaccatgagcgaggccgccctggtgagaaagagaatgaagcccctgatgatggacagaaaggagagacagaagaacagagccagcatcaacggccacttctacaaccacgagaccagcatcttcatccccgccttcgagagcgagaccaaggtgagagtgaacagcaacatgagaaccgaggaggtgatcaagcagctgctgcagaagttcaagatcgagaacagcccccaggacttcgccctgcacatcatcttcgccaccggcgagcagagaagactgaagaagaccgacatccccctgctgcagagactgctgcagggccccagcgagaagaacgccagaatcttcctgatggacaaggacgccgaggagatcagcagcgacgtggcccagtacatcaacttccacttcagcctgctggagagcatcctgcagagactgaacgaggaggagaagagagagatccagagaatcgtgaccaagttcaacaaggagaaggccatcatcctgaagtgcctgcagaacaagctggtgatcaagaccgagaccaccgtgtag

SEQ ID NO: 325811 - protein, 303 aa, Artificial Sequence
  derived and/or modified sequence
MTMMAHQYPSWIFINEKTFITREQLNSLLKTYNIFYENQKNLHILYGETEDGKLIVEGMLDIFWGVKRPIQLKIQDEKPFSSFTSMKSSDVFSSKGMTRWGEFDDLYRISELDRTQIPMSEKRNSQEDYLSYHSNTLKPHAKDEPDSPVLYRTMSEAALVRKRMKPLMMDRKERQKNRASINGHFYNHEIENSPQDFALHIIFATGEQRRLKKTDIPLLQRLLQGPSEKNARIFLMDKDAEEISSDVAQYINFHFSLLESILQRLNEEEKREIQRIVTKFNKEKAIILKCLQNKLVIKTETTV

SEQ ID NO: 325812 - DNA, 2735 bp, Artificial Sequence
  derived and/or modified sequence
ggcagagacagggcactggtttccctctaccagagttcctgacccagccgagaacaaaccgcgaagcaagttcagccgaacaacgatggtgaaaagggtcctcctgctcacagtgtgaataacaggatatcctcagaccatctcaaaaaggaggaaaagatgactatgatggctcaccagtacccctcttggatcttcattaatgagaagacattcataaccagggaacaacttaattctttattgaagacctataacattttttatgagaaccagaaaaatctgcatattttatatggagagactgaagatggcaaactaattgttgaaggaatgctggacattttctggggagtaaaacgacctatacagctaaaaatacaagatgagaagccattctcttcttttactagtatgaagtcatcagacgtcttctccagcaaaggaatgacacgctggggggaatttgacgatctctatcgtattagtgagctggacaggacccagattcctatgtctgaaaaaaggaattcccaggaagactatttatcttatcacagcaacaccctgaagccacatgcaaaggatgaaccagactccccagtgctctatagaaccatgagtgaagcagctctggtgagaaaaaggatgaagcctctgatgatggacagaaaagaaagacagaaaaatagagcctctattaatggacacttctataaccatgaaattgaaaatagtccccaggattttgctcttcacattatttttgcaacaggagaacaaagacgactaaagaagacagacattccgctactgcagaggctcctacagggaccttctgaaaagaatgctcgcattttcctcatggataaagatgcagaagaaattagcagtgatgtggctcagtacattaactttcacttttctctcttggaatccattcttcaaagattaaatgaagaagagaaaagagagattcaaagaatagtaacaaaattcaataaagaaaaggcgattatactgaaatgtcttcaaaataaactagtaataaaaacagagacaacagtttagcagtacaagcttctattgctaaaacatttcaaaaaactcagagatattactctttgatgaatgcataagttctgtacttgcatttatacgaacatatatgagacttgaatcgtagaaaattgaatgtcaaaaaaagctcatttctttttgaagtgatgaggttaattagggttcacagttggacaaaatgagtttgagtttagtttcagtaactgaaataagcttgaatactgcatatgccaaatagcttttatagtaaaccatgtaatgaactcaaatttaaatggtgtcttcagataagcagtttaaacttcatttagcttggactctcaagagaactgaaacataatcaatggattcagaaatgactcagaaaaaagaagctgccagttcttggaatgaaaaagaaatacagtcttacaccatcaaggaatctacctgatagtgacagtagcttcttgaaaactctggcattttcataaaatctaggactatcttaaatggcctgttgacttctgactatctgtaacatcagagctgtctggcctttggaaaggaaaaattatggactctgttaagaaatcctaattgaaattttctgaacctccccccagcccttttattctctctcttctgctgatgaaagacctttcatcagttcaaagcttttcttaagctcttttttaagttaattgaactttttctttatttatttttcaaaaaaatgtttatatcacatagacatattacatcggctaaagtaagacttggcccacaaatacctatttgttgctgaatgaatacaatggataaagcaaggctgttgtagctgaagttacatagggaatcccaaactctgccctcttagcatcttattctacatgacaactctcaaggtactcacagatctgtttaacccacttgaaaaaaaaacactaaaaatgaagaaatgctataagtataaactatgattttatttataaattctgtattaaaatggaattatatgcaacattctttcattctgtaaactaattccatttgcattcctcataagcattgtagtaaattgatcatattacatgtactaaggaatgagattatatgcagtaaacccaactggaagattaacaatattaaaatatgaaacatttttaagacaaaggcattacttctcagtattaccaaacctaaactggttgaaggtgaaagtgtgctatggccttttcaagcctaagaagtctctcttactgagtaaaccagaggcttgcatcgctattctttcacctgtcaatattaataagaaaatagtctcatctcacttaaatgaggcaaatgtaatagttaaaattcaacatacttataaaaaactagtgtcatgtacctgccatgaacatgacaaaaggttagtcttcaatagactgaaatgtataagagaagaaccaagtcttacatagaaaaaaaaggtagatatgaaaagaaaaatcacagaagagagaatgcaaatggccactaagtatatgaaaaaagtcgtatcttaacagtgaacaactgtgttagtctgtatcaatcagaagacagaaacaaggtagtaatttaaacagggaaagtttaatataaataataattaagctatgataggagaataataataaagatgaaaa

SEQ ID NO: 325813 - DNA, 2682 bp, Artificial Sequence
  derived and/or modified sequence
tgggcatagatttcctctttgagaacatcaacctgatttttgagactttttgaaaaaattctttgtgaactacggagggtagaggtatcacacccaactatgaagatcagcatcctgctcatgttcctttggggattatcctgtgctctcccagtaaccaggtatcaaaataatgaatctgaggattctgaagaatggaagggtcatttggctcaggcaccaacaccacccttggagagcagtgagtcatcagaaggcagtaaagttagctcagaggaacaggcaaatgaagaccccagtgacagcactcagtcagaggagggcctgggctctgatgatcatcaatacatttataggctagctggtggcttctccaggagcacaggaaaaggaggagatgataaagatgacgatgaagatgacagtggagatgacacctttggtgacgatgacagtggcccagggcccaaagacagacaagaaggaggaaactccagactgggaagtgatgaggactctgatgacaccatacaagccagtgaagagagtgccccacaagggcaagacagtgcccaagataccaccagtgagagcagggaacttgacaatgaggaccgggtggacagcaagcctgagggaggtgactccactcaagagagtgagagtgaagagcactgggtgggaggtggcagtgatggggagagcagccatggagacggctccgagttggacgatgagggaatgcagagtgatgacccagagagcatcaggagtgaaaggggaaactccagaatgaacagtgcaggcatgaaatcaaaagaatctggagaaaacagtgagcaagcaaacactcaagattcaggtggcagccaattgctggagcatcccagtaggaaaatttttaggaagtctcgcatctcagaggaagatgacagaagcgagcttgatgacaacaacacaatggaagaagtcaagagtgactctacagaaaacagcaactccagagacactggcctcagccaacccaggagagacagcaagggtgactctcaagaagacagcaaggagaatctgtcccaggaagagagccaaaacgtagatggtcccagcagtgagtccagccaagaggccaacctgtcatctcaagagaacagcagtgagtctcaggaagaggtggtgagtgagtccaggggagataaccccgaccccacaactagttatgtagaagaccaggaagacagtgactccagcgaggaggacagctcgcacacactctcccactcaaaaagtgaatccagagaggagcaagcagacagcgaatccagtgagagcctcaacttctcagaggaaagcccggagtcccctgaggatgagaacagctccagccaggagggcctccagtctcacagcagctcagcagagagtcagagcgaggaaagccattctgaggaagacgacagtgactctcaagacagcagcagatccaaagaagatagcaactccacggagagcaaatcaagcagtgaggaagatggccagttgaaaaacattgagatagagagccggaaattaacagttgatgcctatcacaacaaacccattggggaccaagatgacaatgactgccaagacggctattagcatcagctgtcctaagaagcagttgtcacataaaggagtcttagggacttgaaaatgtatcatgataactataatttattgatgttttgatcaaaagaataaccagatgccatatttttcctgaaaggaattgctggacattacacttgtttttagggtgtcatcatttcacagaggtttaaatactgtggagtgacaccagaacacagccaaagaggctagaagcaagaaaggatctgcatgataactttgcagctgagatagttcctaattcatcaacgtaacaaacaaagctattgggtgtccatgatataccaggcactatgctaggtgttgagaatgtaaagcaggttaagacttgtttcttgctcctgaggagcgtatagaaggacccacaaagctacagagttaaagagggatatgtataagagaaacaagaattgttacaacccagtatggtgagtgccaagacagagagctatgaacacgatatctatctgggaacactgagaagggtgaccaatgcgttggagaacgagggagggcttcatagcagaagacattggagttggaaggttgcatagggtttcctcattggagaccgggaaattctattcttgggataaataatagtaaattctataggattcaatacttagtttgcaaaagcactttgaaattatggcacagtgagttgttttggataagaaaatctttttctcccaattaatttaccaattcatcatttttttttttttgtagaactcccataaacatcaccttactaatcactggtgatgataagaaggattgggtcaggaagagtgggagaaagaaattcctctttacgtagatactttttagctttattttttctaaaatcagtttgcgtgcaatgctagaaaaaaactgttctctgagtcctttacagagcaaaattctgtatgtaagattcaattgatttttgacaaataccatttgaaatattacctcaacataaaatacttgttttgtaataaagattataatacccagaagaaa

SEQ ID NO: 325814 - DNA, 2634 bp, Artificial Sequence
  derived and/or modified sequence
tgggcatagatttcctctttgagaacatcaacctgatttttgagactttttgaaaaaattctttgtgaactacggagggtagaggtatcacacccaactatgaagatcagcatcctgctcatgttcctttggggattatcctgtgctctcccagtaaccaggtatcaaaataatgaatctgaggattctgaagaatggaagggtcatttggctcaggcaccaacaccacccttggcaaatgaagaccccagtgacagcactcagtcagaggagggcctgggctctgatgatcatcaatacatttataggctagctggtggcttctccaggagcacaggaaaaggaggagatgataaagatgacgatgaagatgacagtggagatgacacctttggtgacgatgacagtggcccagggcccaaagacagacaagaaggaggaaactccagactgggaagtgatgaggactctgatgacaccatacaagccagtgaagagagtgccccacaagggcaagacagtgcccaagataccaccagtgagagcagggaacttgacaatgaggaccgggtggacagcaagcctgagggaggtgactccactcaagagagtgagagtgaagagcactgggtgggaggtggcagtgatggggagagcagccatggagacggctccgagttggacgatgagggaatgcagagtgatgacccagagagcatcaggagtgaaaggggaaactccagaatgaacagtgcaggcatgaaatcaaaagaatctggagaaaacagtgagcaagcaaacactcaagattcaggtggcagccaattgctggagcatcccagtaggaaaatttttaggaagtctcgcatctcagaggaagatgacagaagcgagcttgatgacaacaacacaatggaagaagtcaagagtgactctacagaaaacagcaactccagagacactggcctcagccaacccaggagagacagcaagggtgactctcaagaagacagcaaggagaatctgtcccaggaagagagccaaaacgtagatggtcccagcagtgagtccagccaagaggccaacctgtcatctcaagagaacagcagtgagtctcaggaagaggtggtgagtgagtccaggggagataaccccgaccccacaactagttatgtagaagaccaggaagacagtgactccagcgaggaggacagctcgcacacactctcccactcaaaaagtgaatccagagaggagcaagcagacagcgaatccagtgagagcctcaacttctcagaggaaagcccggagtcccctgaggatgagaacagctccagccaggagggcctccagtctcacagcagctcagcagagagtcagagcgaggaaagccattctgaggaagacgacagtgactctcaagacagcagcagatccaaagaagatagcaactccacggagagcaaatcaagcagtgaggaagatggccagttgaaaaacattgagatagagagccggaaattaacagttgatgcctatcacaacaaacccattggggaccaagatgacaatgactgccaagacggctattagcatcagctgtcctaagaagcagttgtcacataaaggagtcttagggacttgaaaatgtatcatgataactataatttattgatgttttgatcaaaagaataaccagatgccatatttttcctgaaaggaattgctggacattacacttgtttttagggtgtcatcatttcacagaggtttaaatactgtggagtgacaccagaacacagccaaagaggctagaagcaagaaaggatctgcatgataactttgcagctgagatagttcctaattcatcaacgtaacaaacaaagctattgggtgtccatgatataccaggcactatgctaggtgttgagaatgtaaagcaggttaagacttgtttcttgctcctgaggagcgtatagaaggacccacaaagctacagagttaaagagggatatgtataagagaaacaagaattgttacaacccagtatggtgagtgccaagacagagagctatgaacacgatatctatctgggaacactgagaagggtgaccaatgcgttggagaacgagggagggcttcatagcagaagacattggagttggaaggttgcatagggtttcctcattggagaccgggaaattctattcttgggataaataatagtaaattctataggattcaatacttagtttgcaaaagcactttgaaattatggcacagtgagttgttttggataagaaaatctttttctcccaattaatttaccaattcatcatttttttttttttgtagaactcccataaacatcaccttactaatcactggtgatgataagaaggattgggtcaggaagagtgggagaaagaaattcctctttacgtagatactttttagctttattttttctaaaatcagtttgcgtgcaatgctagaaaaaaactgttctctgagtcctttacagagcaaaattctgtatgtaagattcaattgatttttgacaaataccatttgaaatattacctcaacataaaatacttgttttgtaataaagattataatacccagaagaaa

SEQ ID NO: 325815 - protein, 125 aa, Artificial Sequence
  derived and/or modified sequence
MQAPRAALVFALVIALVPVGRGNYEELENSGDTTVESERPNKVTIPSTFAAVTIKETLNANINSTNFAPDENQLEFILMVLIPLILLVLLLLSVVFLATYYKRKRTKQEPSSQGSQSALQTYLLV

SEQ ID NO: 325816 - DNA, 378 bp, Artificial Sequence
  derived and/or modified sequence
atgcaggcccccagagccgccctggtgttcgccctggtgatcgccctggtgcccgtgggcagaggcaactacgaggagctggagaacagcggcgacaccaccgtggagagcgagagacccaacaaggtgaccatccccagcaccttcgccgccgtgaccatcaaggagaccctgaacgccaacatcaacagcaccaacttcgcccccgacgagaaccagctggagttcatcctgatggtgctgatccccctgatcctgctggtgctgctgctgctgagcgtggtgttcctggccacctactacaagagaaagagaaccaagcaggagcccagcagccagggcagccagagcgccctgcagacctacctgctggtgtag

SEQ ID NO: 325817 - DNA, 378 bp, Artificial Sequence
  derived and/or modified sequence
atgcaggccccccgggctgctttggtctttgctcttgtgattgccctggtgcctgtcggacgcgggaactacgaggaactggaaaactctggcgatacaaccgtcgaatcagaacgccctaacaaagtgacgatccccagtacttttgccgctgtaacgattaaagaaactctaaacgccaacatcaattctactaattttgctcccgacgagaaccagctcgagttcatcctcatggtcttgattcctctgatcctactggtgctgctgctcctgagtgtagtgttcctcgccacctactataagcgcaaacggaccaaacaagagccctcctcacagggatctcagtccgctcttcagacttaccttttggtgtag

SEQ ID NO: 325818 - DNA, 378 bp, Artificial Sequence
  derived and/or modified sequence
atgcaggccccccgggccgccctggtgtttgccctggtgattgccctggtgcctgtgggccggggcaactatgaggagctggagaacagcggggacaccaccgtggagagcgagcggcccaacaaggtgaccatccccagcacctttgctgctgtgaccatcaaggagaccctgaatgccaacatcaacagcaccaactttgccccagatgagaaccagctggagttcatcctgatggtgctgatccccctcatcctgctggtgctgctgctgctgtctgtggtgttcctggccacctactacaagaggaagaggaccaagcaggagcccagcagccagggcagccagagcgccctgcagacctacctgctggtgtag

SEQ ID NO: 325819 - DNA, 378 bp, Artificial Sequence
  derived and/or modified sequence
atgcaggccccccgggccgccctggtgttcgccctggtgatcgccctggttcctgttggccgcggcaattacgaggaactagagaactccggagatacaaccgtcgaaagcgagagacctaataaagtaaccatcccaagcacattcgcagcggtgaccattaaagagactttaaacgcaaacatcaattcgacgaactttgccccagatgagaaccagctggagtttatcctgatggtcctcatccccctcattctgcttgttctgcttctgctgagcgtggtgttcttagccacctattacaagcgcaagagaacaaagcaggaaccaagctctcagggcagccaaagtgccctgcagacctatttactggtgtag

SEQ ID NO: 325820 - DNA, 378 bp, Artificial Sequence
  derived and/or modified sequence
atgcaggccccaagagctgccttggtgtttgcgctagtgatcgccttggtgcccgtcgggagaggcaactacgaggaactggagaactcaggggatacaacggtcgaatccgagagaccaaataaggttacgataccttccaccttcgctgctgttaccataaaggagactctgaacgccaacatcaatagcacgaacttcgcacccgacgaaaatcagctggagttcatcctgatggttctcattccgcttattttactggttcttctgcttctgtccgtggtgttcctggcaacttattacaagcgcaagcgcactaagcaggagcctagctcccagggatcacaatcagcgttgcaaacctaccttttggtttag

SEQ ID NO: 325821 - DNA, 878 bp, Artificial Sequence
  derived and/or modified sequence
aaacaggaaatgttcacgtttcagagaggctgcagcccggcgcagcatcctgagcgcgcctctgccgaggcgagcggacatgcaggctccccgcgcagccctagtcttcgccctggtgatcgcgctcgttcccgtcggccggggtaattatgaggaattagaaaactcaggagatacaactgtggaatctgaaagaccaaataaagtgactattccaagcacatttgctgcagtgaccatcaaagaaacattaaatgcaaatataaattctaccaactttgctccggatgaaaatcagttagagtttatactgatggtgttaatcccattgattttattggtcctcttacttttatccgtggtattccttgcaacatactataaaagaaaaagaactaaacaagaaccttctagccaaggatctcagagtgctttacagacatacctcctggtatgaaatttgcagtgtcttgatgtgtgaggtctctctgaaagagctgcagggaaaacagcgggcgataaactacccctttaaacaggctgtggctacatgatgcctggcttactcagtaaatcttctggaaagagactctttctcttgctcactgctcagcgtggaaacaagaaaaggaagccagaggctcctgtagctcctgccctcccctagcctccaccagacaaccccactatcgaatgcacagaggagaggatctgagaggagagtactgtcaggctaagtgggggggaagtaggaactgaaggaggaggacaaagtgggttggaggagatgaaatggaaggattgttggagggaaaatggaataggggtttgagatggagctttgtaagagctgcatttgcctcctggttgcaaaggga

SEQ ID NO: 325822 - protein, 698 aa, Artificial Sequence
  derived and/or modified sequence
MQAHELFRYFRMPELVDFRQYVRTLPTNTLMGFGAFAALTTFWYATRPKPLKPPCDLSMQSVEVAGSGGARRSALLDSDEPLVYFYDDVTTLYEGFQRGIQVSNNGPCLGSRKPDQPYEWLSYKQVAELSECIGSALIQKGFKTAPDQFIGIFAQNRPEWVIIEQGCFAYSMVIVPLYDTLGNEAITYIVNKAELSLVFVDKPEKAKLLLEGVENKLIPGLKIIVVMDAYGSELVERGQRCGVEVTSMKAMEDLGRANRRKPKPPAPEDLAVICFTSGTTGNPKGAMVTHRNIVSDCSAFVKATENTVNPCPDDTLISFLPLAHMFERVVECVMLCHGAKIGFFQGDIRLLMDDLKVLQPTVFPVVPRLLNRMFDRIFGQANTTLKRWLLDFASKRKEAELRSGIIRNNSLWDRLIFHKVQSSLGGRVRLMVTGAAPVSATVLTFLRAALGCQFYEGYGQTECTAGCCLTMPGDWTAGHVGAPMPCNLIKLVDVEEMNYMAAEGEGEVCVKGPNVFQGYLKDPAKTAEALDKDGWLHTGDIGKWLPNGTLKIIDRKKHIFKLAQGEYIAPEKIENIYMRSEPVAQVFVHGESLQAFLIAIVVPDVETLCSWAQKRGFEGSFEELCRNKDVKKAILEDMVRLGKDSGLKPFEQVKGITLHPELFSIDNGLLTPTMKAKRPELRNYFRSQIDDLYSTIKV

SEQ ID NO: 325823 - DNA, 2097 bp, Artificial Sequence
  derived and/or modified sequence
atgcaggcccacgagttatttcggtactttagaatgcctgagctggttgatttcaggcagtacgtgaggactctgcctaccaacaccctgatgggcttcggggcttttgcggcattaacaaccttttggtatgccacccgccctaagcccctgaagcctccctgtgatctgagcatgcagtccgtggaggtggccgggtctggaggtgcaaggcgaagtgcactgctggactctgacgagcctctcgtctacttctacgatgacgtcactacgctttacgaaggcttccagcgcggtatccaagtgtcaaacaacggcccatgcctcggcagtcggaagcctgaccagccttatgaatggttgtcttataagcaggtggctgagctgagtgaatgtatcggcagcgcgctgatccagaaagggtttaagaccgcccccgaccaatttatcggtatttttgctcaaaatagacctgagtgggtcattattgagcaaggctgtttcgcctactctatggtcattgtgccattgtacgataccctggggaatgaagctataacctacatagttaacaaggctgagctctctctcgttttcgtcgataagccagaaaaagctaagctgcttttggagggcgtagagaacaaactcatacccggattgaaaattatcgttgtcatggacgcctatggatccgaactcgttgagcgcggccaacggtgtggggtcgaagtgacgagcatgaaagccatggaggatcttggtagggccaatcggagaaagccgaaaccgcctgctcctgaagacctggcagttatttgttttacctccggaactacgggcaatcctaaaggggccatggttacacatcggaatattgtgtccgactgttccgcgtttgtgaaggccactgagaacaccgtgaatccatgtccggatgacaccctgatttcttttctgcctctggcacatatgttcgaaagagtggtggaatgcgtaatgctctgtcacggagccaaaatcggtttctttcaaggggacatcagacttcttatggacgatctgaaggtgttgcagcccaccgttttcccagtcgtgccacgtcttctgaaccggatgtttgaccgtatctttggccaggcaaacaccacactcaaacgatggctattggatttcgctagcaagaggaaggaagctgaactcaggagtggcattatccggaacaattcactgtgggaccgattgatcttccataaagtgcagagctcccttggcgggagagtccggctcatggtcacaggcgcggcaccggtgtccgctaccgttctgacttttttgagggccgctctcgggtgtcaattctacgaaggttatgggcagaccgagtgcaccgcaggctgctgcctgactatgcccggggactggactgcaggccacgtgggtgctcctatgccatgcaacctgatcaaacttgttgatgttgaagagatgaactacatggccgccgagggggagggggaggtttgcgtaaaagggcccaatgtcttccagggctatctgaaggaccctgcaaagaccgccgaggctctggacaaggatggttggctgcacaccggcgatatcggcaaatggcttcctaacggcactctaaagatcattgatcgcaaaaaacacattttcaagttggcccagggagagtatatcgcccctgagaagattgaaaacatctacatgcgcagcgagcccgtggctcaggtctttgtccatggtgaaagcctacaggcctttctgatcgccatagtcgttcctgacgtcgagacactctgcagttgggcacagaagaggggcttcgaagggtctttcgaagagctgtgtcgaaacaaggatgtcaagaaagccatactcgaagacatggtcaggctgggcaaggactccggccttaagccttttgagcaggtgaagggcattactctgcaccctgagctgttctccatcgataacggtttgctcaccccaacgatgaaggcgaagaggcccgagctgagaaattacttccgcagccaaatcgatgacctctattctactataaaggtgtag

SEQ ID NO: 325824 - DNA, 1584 bp, Artificial Sequence
  derived and/or modified sequence
atggttatcgtccctctgtatgataccttaggtaatgaagccatcacctacattgtgaacaaagccgaactctcactggtgttcgtcgacaaaccagagaaagctaagctgttactcgaaggcgtggagaataaactcatacccggcctcaagatcatcgtcgttatggacgcttacggatctgagctggtagaaagaggccagagatgcggcgtcgaagtcacttccatgaaagcgatggaggatctcggacgggccaacaggcgtaagccaaagcctccggcccctgaggatctagcagtcatctgtttcacgtccggtaccactggcaatcctaagggagccatggtgacccataggaatatcgtatcagattgcagtgcatttgtgaaagccaccgaaaacaccgttaatccttgccctgatgataccctcatcagctttctgcccctcgcccacatgttcgagagagtcgtggagtgtgtgatgctgtgccacggggccaagattggattcttccagggtgatatacgactgcttatggacgatctcaaggtgctacagcctacggtgtttcccgtggtgccacgacttctaaatcgaatgttcgaccggatctttggtcaggcaaacacaaccctgaagcgctggttgcttgactttgctagcaaaaggaaggaggctgagcttcggtcaggcattatccgaaacaattccctgtgggatcgccttatctttcacaaggttcagtcatcgttggggggcagagtccgcctcatggtgacaggtgccgcacctgtctctgcgacagtgctgactttcctgcgtgcagccctgggatgtcagttctacgaagggtacgggcagactgagtgtaccgccggatgttgccttactatgccaggcgactggactgccggccacgtgggggccccaatgccatgcaacctgattaagctggtggatgtggaggaaatgaactatatggctgcagaaggcgagggtgaagtgtgcgtaaagggacccaacgtattccagggctatctgaaggaccccgccaagaccgctgaggcacttgacaaggacgggtggctccacaccggcgacatagggaagtggttgccgaatggcaccctgaagatcatcgatcgcaaaaagcatatctttaaattggcccagggagaatatatcgccccggagaagatcgagaatatctatatgaggtccgagccagttgctcaagttttcgtccacggggagagcctacaggctttcctgatcgctatcgtcgtaccggacgtagaaaccctctgctcctgggcccagaaacggggatttgagggttcttttgaggaactttgtaggaacaaggacgtcaaaaaagccatcctcgaggacatggtcaggctgggtaaagattctggactaaaaccattcgagcaggttaaaggcatcaccttgcatcctgaactgtttagtatagacaatggcctactgacgcctactatgaaggccaagagaccagagctgcgaaactactttcgctcgcagattgacgacctttatagcaccatcaaagtatag

SEQ ID NO: 325825 - DNA, 1584 bp, Artificial Sequence
  derived and/or modified sequence
atggtcatagtcccattgtatgacactctgggaaacgaggcaattacctacatcgtgaataaagcagagctctcgttggtgttcgtggataaaccagagaaggctaaattgcttctggagggcgtggaaaataagctgattcctggcttgaagattatcgtagtcatggatgcatacgggtctgagcttgtggagcggggccagcgctgtggcgtcgaagtgacatctatgaaagcgatggaagatttaggccgagctaatcgtcgtaaaccaaagccacctgccccggaagatcttgcggttatatgttttacaagcgggaccaccgggaacccaaaaggggctatggtcacccatcggaacatcgtctctgattgtagtgccttcgtgaaggcaactgagaatacggttaacccttgcccagatgatacactcatctcatttttgcccctggcacatatgtttgagcgcgtcgtggaatgtgtgatgttgtgccacggagccaaaattggctttttccagggcgacattcgcctgctgatggatgacctgaaggtactccagcctaccgtgttcccggtggtgccgcggctcctgaatcggatgtttgaccgtatctttggtcaagccaacaccacactgaaaagatggctgctagattttgcctcaaaaaggaaagaagcggaactgcgaagtggtatcatacgtaacaactctctttgggatcggctgatattccacaaagtgcagtcatcactgggtggccgcgtccgtctgatggtgaccggggctgcccctgtgagtgcaacagtcctgacctttttgagagccgccctgggctgtcagttctatgagggctatggacagacggaatgcactgccggctgctgcctgacgatgcctggagactggacagccggccacgtgggggccccaatgccttgcaatctcattaaactagtggacgtagaagaaatgaactacatggccgcagagggagagggtgaagtgtgcgtgaaaggcccaaatgtgtttcaggggtatctgaaagacccagctaaaacagccgaggctcttgacaaagatgggtggcttcacacaggtgatataggaaagtggcttcctaacggcaccctgaaaattatcgaccgtaaaaagcatatttttaaactggctcagggtgagtatattgccccagagaaaattgagaatatctatatgaggtcagaacctgtggcccaggtctttgtgcacggcgagtcactgcaggcatttctgattgctattgtggtcccggatgtcgagacgttgtgttcttgggcccaaaagagaggtttcgagggctctttcgaagaactgtgcagaaacaaagatgtcaagaaggcaatcctcgaggacatggttagattgggtaaggatagtggactgaaacccttcgaacaggttaaagggattaccctgcaccctgagctgttcagcatagacaacggcctgcttacacctacaatgaaagcaaagcgtcctgagctcaggaattattttagaagccagattgatgacctttacagcactattaaagtgtag

SEQ ID NO: 325826 - DNA, 2097 bp, Artificial Sequence
  derived and/or modified sequence
atgcaggctcatgagttgtttcgttactttaggatgcctgaacttgtggattttaggcagtatgttcgcaccctgccaaccaacaccctcatgggctttggcgcattcgcagcactcaccacattttggtatgctacaaggccgaagcccctgaaaccaccctgtgatctctctatgcagagtgtcgaggtggccggaagtggaggcgcacgaagatctgcgctgctggacagcgacgagccactggtctacttctacgatgacgtgactactctgtacgaggggtttcagagaggcattcaggtaagcaacaatgggccatgtttaggcagcagaaagcccgaccagccttacgaatggctgtcctacaagcaggtggccgagctgtccgaatgtatcggaagcgccctgattcagaaaggtttcaagacagcccccgaccaattcatcggtatctttgcccaaaatcgcccggagtgggtcattatagaacaaggctgtttcgcctactctatggtgatagtgccactatacgacacattgggaaacgaggcaatcacttacatcgtaaacaaagctgaactttcactggtgtttgtggataagcctgagaaagccaagttgctcctcgaaggcgtggagaacaaacttatccctgggctcaagattatcgtagttatggatgcgtacggtagtgagcttgttgagcgcgggcagcggtgtggtgtggaggtgacatcaatgaaggccatggaggaccttggtcgcgcaaataggagaaaacccaagccccctgccccagaagatctggcagtgatttgtttcacctcagggaccaccgggaaccccaaaggggccatggtaacacaccggaatattgtcagtgattgttccgccttcgtaaaagccacagagaacacagtcaacccttgtcctgacgataccctcattagttttctgccattagcgcacatgttcgagcgtgtcgtggaatgtgtgatgctgtgtcatggcgccaagataggcttcttccagggggacattcgcctgcttatggatgacctgaaggtgcttcagccaacggtgtttcccgtggtgccaagactgttgaaccgaatgttcgacagaatctttggacaagcgaacaccacattgaaacgatggctcttagactttgcatccaaaagaaaggaggctgagctcaggtcaggtatcatacggaataatagcttgtgggaccggctcatatttcacaaggtgcagagcagcctgggtggaagggtcaggctcatggttaccggagcagctccagtgagcgcaacggtcttgacatttctgcgggctgctttggggtgtcagttctacgaaggttacggccagactgaatgtaccgctggttgctgtcttaccatgcctggggattggaccgctggccacgttggagccccaatgccatgcaacctcatcaagctcgttgacgtggaggaaatgaattatatggcagctgagggcgagggcgaagtgtgtgtgaaaggacccaacgtgttccagggttacctgaaggacccagcgaagacagcagaggcgctagacaaggatgggtggttgcacactggcgacattgggaagtggctgccaaatggtacactgaaaatcatcgatcgtaagaaacacatctttaaactggcccaaggcgagtacattgctccagaaaaaatcgaaaatatctatatgagatcagagcccgtggctcaggtgtttgtgcacggagagagcctgcaggcattcctgatcgctatcgtggtgcccgacgttgagactttgtgcagctgggctcagaagagaggctttgaagggtcattcgaggagctgtgtagaaataaagatgtgaagaaggcaatccttgaagacatggtcaggttgggcaaggactctggcctgaagcctttcgagcaggtcaaggggattacactccatcctgagctgttctcaattgacaacgggctcctgactcctaccatgaaggctaagaggccggagttgagaaattactttaggagtcagatagatgatctctattctacaattaaagtgtag

SEQ ID NO: 325827 - DNA, 2097 bp, Artificial Sequence
  derived and/or modified sequence
atgcaagctcatgaattgttccggtacttccggatgccagaattagtggactttcgacagtatgtgagaactcttcccactaacactttaatggggtttggcgctttcgccgcccttactacattttggtacgcaacaaggcccaagcccctcaagcccccttgtgacctctcaatgcagtcagtcgaagtggcaggctccggtggggcccggagaagcgctctcctagattcggacgagccgttggtgtacttctatgatgacgtgacaaccctatatgaaggttttcaacggggcatacaggtgtccaataacggtccttgccttgggtctaggaagccggatcaaccttacgagtggctgtcctacaaacaggtggctgaattaagcgaatgtattggcagcgctctgattcagaaggggttcaagaccgctccagaccagttcatcgggatcttcgctcagaaccgtccagagtgggtgatcattgagcagggttgttttgcttactctatggtgatcgtcccactctatgacactctgggtaacgaggcaatcacatatatcgtcaataaagctgagctttccctagtgttcgtcgataaacccgagaaagctaaacttctgttagaaggagttgagaataaactcatcccaggcctgaaaatcatcgtggttatggacgcctacggtagtgaactcgtcgagcgcggccagcgctgtggtgtggaggtgacgtccatgaaggccatggaggacctagggagagccaaccggaggaaaccaaagcctcccgcacccgaggatcttgctgttatatgttttacatctgggacaaccggtaacccaaaaggagccatggtaacgcaccgtaatatcgtctcagattgctctgccttcgttaaggcaaccgaaaatacagtgaatccttgcccagacgacacactaatctcatttctgccattggcacacatgttcgagcgagttgtcgagtgcgtgatgctatgccacggcgcaaagatcggcttctttcagggtgacatccggctcctcatggatgacctcaaggtgttgcaacctacagtttttcccgtcgttccacgcttacttaatcgaatgtttgatagaattttcggacaggccaataccacactcaagcgatggctcttagactttgcctctaagaggaaggaagctgaacttagaagcggcataattcgtaataacagcctttgggaccgactgattttccacaaggtgcaaagcagcctgggcggaagagtccgcttgatggtcactggtgcagctcccgtgtccgctacggtgttaaccttcctgcgcgctgcattgggatgccagttctacgaaggctacggacagaccgaatgtaccgccggctgctgcttaacgatgcccggcgactggactgccgggcatgttggagctcccatgccgtgcaacttgatcaaacttgtggacgtcgaagaaatgaattacatggctgccgaaggagaaggagaggtctgtgtgaagggcccaaatgtcttccagggatacctgaaagacccagctaaaacagccgaagctctcgataaggacggctggctgcatacaggggacattggtaaatggttacctaacggcactttaaaaatcattgaccggaagaagcacattttcaagcttgcacagggagagtacatcgctcccgaaaaaattgagaatatctatatgagaagtgagcctgtagcccaggtgttcgtgcatggcgagagtctgcaggctttcctgatcgcaatagtggtgccagacgtagagaccctatgctcctgggcacagaaacgcgggtttgagggaagtttcgaagagctttgcaggaataaagacgtcaagaaagcaatcctggaggatatggttcgcttaggaaaggatagcggactgaagccctttgagcaggttaaggggattacactgcatcctgagctgttttctatcgacaacggcctcctaacacctacaatgaaggccaaacgtccagaactaagaaactacttccggtcccagatagacgatttatacagcacgattaaggtatag

SEQ ID NO: 325828 - DNA, 2097 bp, Artificial Sequence
  derived and/or modified sequence
atgcaggcccacgagctgttccgctacttcaggatgcctgagctggtggacttccggcagtatgtgaggaccctgcccaccaacaccctgatgggctttggagcctttgctgccctgaccaccttctggtacgccacccggcccaagcccctgaagccaccctgtgacctgtccatgcagagcgtggaggtggccggcagcggcggggccaggagaagtgccctgctggacagtgatgagcccctggtgtacttctatgatgatgtgaccaccctgtatgagggcttccagaggggcatccaggtgagcaacaacggcccctgcctgggcagcaggaagccagaccagccctatgagtggctgagctacaagcaggtggccgagctgtctgaatgtattggcagcgccctgatccagaagggcttcaagacagccccagaccagttcatcggcatctttgcccagaacagacctgagtgggtgatcatcgagcagggctgctttgcctacagcatggtgattgtgcccctgtatgacaccctgggcaatgaggccatcacctacatcgtgaacaaggccgagctgagcctggtgtttgtggacaagccagagaaggccaagctgctgctggagggcgtggagaacaagctgatccctggcctgaagatcatcgtggtgatggatgcctacggcagcgagctggtggagcggggccagagatgtggggtggaggtgacctccatgaaggccatggaggacctgggccgggccaacagaaggaagcccaagcccccagcccctgaggacctggccgtcatctgcttcaccagcggcaccaccggcaaccccaagggggccatggtgacccacagaaatattgtgtctgactgcagcgcctttgtgaaggccacagaaaatacagtgaacccctgcccagatgacaccctcatctccttcctgcccctggcccacatgtttgagcgggtggtggagtgtgtgatgctgtgccacggggccaagattggcttcttccagggcgacatccggctgctgatggatgacctgaaggtgctgcagcccaccgtcttccctgtggtgccccggctgctgaacaggatgtttgaccgcatcttcggccaggccaacaccaccctgaagcgctggctgctggactttgccagcaagaggaaggaggccgagctgcggagcggcatcatccggaacaacagcctgtgggacaggctcatcttccacaaggtgcagagcagcctgggcggccgggtgcggctgatggtgactggagctgcccctgtgtctgccaccgtgctgaccttcctgcgggccgccctgggctgccagttctatgagggctacggccagacagagtgcacagctggctgctgcctgaccatgcctggggactggacagctggccacgtgggcgcccccatgccctgcaacctgatcaagctggtggatgtggaggagatgaactacatggctgctgagggggagggggaggtgtgtgtgaagggccccaacgtgttccagggctacctgaaggaccctgccaagacagctgaggccctggacaaggatggctggctgcacactggagacatcggcaagtggctgcccaacggcaccctgaagatcatcgacaggaagaagcacatcttcaagctggcccagggcgagtacatcgcccctgagaagattgagaacatctacatgaggtctgagcctgtggcccaggtgtttgtgcatggagagagcctgcaggccttcctgattgccatcgtggtgcctgatgtggagaccctgtgctcctgggcccagaagaggggctttgagggcagctttgaggagctgtgcaggaacaaggatgtgaagaaggccatcctggaggacatggtgcggctgggcaaggacagcggcctgaagccctttgagcaggtgaagggcatcaccctgcaccctgagctgttcagcattgacaatggcctgctgacccccaccatgaaggccaagaggcctgagctgaggaactacttccgcagccagattgatgacctgtacagcaccatcaaggtgtag

SEQ ID NO: 325829 - DNA, 1584 bp, Artificial Sequence
  derived and/or modified sequence
atggtgattgtgcccctgtatgacaccctgggcaatgaggccatcacctacatcgtgaacaaggccgagctgagcctggtgtttgtggacaagccagagaaggccaagctgctgctggagggcgtggagaacaagctgatccctggcctgaagatcatcgtggtgatggatgcctacggcagcgagctggtggagcggggccagagatgtggggtggaggtgacctccatgaaggccatggaggacctgggccgggccaacagaaggaagcccaagcccccagcccctgaggacctggccgtcatctgcttcaccagcggcaccactggaaaccccaagggggccatggtgacccacaggaacatcgtgtctgactgcagcgcctttgtgaaggccacagagaacacagtgaacccctgcccagatgacaccctcatctccttcctgcccctggcccacatgtttgagcgggtggtggagtgtgtgatgctgtgccacggggccaagattggcttcttccagggcgacatccggctgctgatggatgacctgaaggtgctgcagcccaccgtcttccctgtggtgccccggctgctgaacaggatgtttgaccgcatcttcggccaggccaacaccaccctgaagcgctggctgctggactttgccagcaagaggaaggaggccgagctgcggagcggcatcatccggaacaacagcctgtgggacaggctcatcttccacaaggtgcagagcagcctgggcggccgggtgcggctgatggtgactggagctgcccctgtgtctgccaccgtgctgaccttcctgcgggccgccctgggctgccagttctatgagggctacggccagacagaatgtacagctggctgctgcctgaccatgcctggggactggacagctggccacgtgggcgcccccatgccctgcaacctgatcaagctggtggatgtggaggagatgaactacatggctgctgagggggagggggaggtgtgtgtgaagggccccaacgtgttccagggctacctgaaggaccctgccaagacagctgaggccctggacaaggatggctggctgcacactggagacatcggcaagtggctgcccaacggcaccctgaagatcatcgacaggaagaagcacatcttcaagctggcccagggcgagtacatcgcccctgagaagattgagaacatctacatgaggtctgagcctgtggcccaggtgtttgtgcacggggagagcctgcaggccttcctgattgccatcgtggtgcctgatgtggagaccctgtgctcctgggcccagaagaggggctttgagggcagctttgaggagctgtgcaggaacaaggatgtgaagaaggccatcctggaggacatggtgcggctgggcaaggacagcggcctgaagccctttgagcaggtgaagggcatcaccctgcaccctgagctgttcagcattgacaatggcctgctgacccccaccatgaaggccaagaggcctgagctgaggaactacttccgcagccagattgatgacctgtacagcaccatcaaggtgtag

SEQ ID NO: 325830 - DNA, 2097 bp, Artificial Sequence
  derived and/or modified sequence
atgcaggcccacgagctgttccggtacttccggatgcccgagctggtcgacttcaggcaatacgtgcggaccctccctactaacaccctgatgggatttggggcatttgccgccctgaccaccttctggtacgcaacaagacccaagccacttaagccaccctgtgatctctctatgcagtccgtggaagtcgcaggcagcggcggcgcaagaaggagcgccctgctcgactctgatgagccactggtctacttctacgatgacgtgacaacgctctacgaaggctttcaacgaggcatacaggttagtaacaacggaccctgtcttggaagccgcaaaccggaccagccttacgaatggctgtcatataagcaggtggccgaactgagcgagtgtataggttccgccctgattcagaaagggtttaagactgcgcccgatcaatttattggaatctttgcccagaatcggccggaatgggtgattatcgaacaaggatgttttgcatacagcatggttattgtgcccttgtatgacacactgggcaatgaggctatcacctatattgttaataaggcagagttatcccttgtatttgtggataaacccgagaaagccaaactgttgcttgaaggcgtagagaataagctgatccctggactgaaaatcattgtagtgatggacgcgtatggatcagagctggtcgaacggggccagaggtgtggagttgaggtgactagtatgaaggcaatggaagatctgggccgggccaatcgcaggaagccaaagcctccagctcccgaagatctggctgttatttgcttcaccagtggtaccacagggaatcctaagggtgccatggtgacacacaggaacatagtgtcagattgctccgccttcgttaaagcaaccgagaacactgttaatccatgtcccgatgatacgctcatttcatttctgcctctggcgcacatgtttgagagggtggtcgagtgcgtaatgctgtgtcatggcgccaagatcggctttttccagggggatatccggctgctcatggacgatcttaaggtcttacagcctacagttttccctgttgtgccgaggctgttgaatcgcatgtttgacaggatttttggtcaggcaaatacgacactcaaacgatggttgctcgacttcgccagcaagagaaaggaagctgagttgagatcaggcatcattcgaaacaacagcctctgggaccggttaatattccacaaggtgcaatcgtcattagggggaagagtgcgcctaatggtgactggggctgccccagtttcggccaccgtgctgacattcctacgcgctgccttgggatgtcagttttacgagggatacggccagaccgaatgtactgctggatgttgcctgaccatgcccggcgactggaccgccggtcacgtgggtgctcccatgccctgcaacctgattaagctcgtggatgttgaggagatgaattatatggcagccgagggtgaaggagaagtgtgtgtaaagggcccgaacgtgttccagggttacctgaaagatccggcgaagacagcagaagctctggacaaagacggatggctgcatacaggcgatattggtaaatggctgccaaacgggacgctgaagatcattgatagaaaaaagcatatcttcaagttagcgcagggtgagtatatcgcgcccgagaaaattgaaaacatttacatgaggtcggagccagtcgctcaggtattcgttcacggagaaagcttgcaagccttccttattgctattgtggtgccagacgtggagacactatgctcttgggcgcagaagaggggctttgaggggagcttcgaagaactgtgcaggaataaggacgtgaagaaggctattctggaagacatggtgcgcttaggaaaagactctggtctgaaaccgttcgaacaggtgaagggtataaccttgcatcctgagctgttctctatagacaatgggctgctgactccaactatgaaagccaaaagaccagagctgcggaactacttccgttcacaaattgacgatttatactcaacgattaaagtctag

SEQ ID NO: 325831 - DNA, 1584 bp, Artificial Sequence
  derived and/or modified sequence
atggtgatcgtgcccctgtacgacaccctgggcaacgaggccatcacctacatagtgaataaggccgagctaagcctcgtgtttgtcgataaaccggagaaggccaagctcttgttggaaggggtggaaaataagctcatcccaggactgaagattatcgtggtgatggacgcatacggatccgaacttgtcgaaaggggccagcgctgcggggtagaggtgacctccatgaaagcgatggaagacttaggacgggcaaaccgccgcaagcccaagccccctgcgcctgaggatctggctgtgatatgcttcacctctggtaccaccggaaacccgaagggggccatggttacgcacagaaatattgtttccgattgcagtgccttcgtgaaggcgacagagaacaccgttaatccctgccctgatgatacgctcatctctttcctgccgctggcgcacatgtttgagagagttgtggaatgtgtgatgctgtgccatggagccaagatcgggtttttccaaggagatatacgcctgcttatggatgatttgaaggtgctgcagcccaccgtgtttcctgtggtgcccaggctgctcaatagaatgttcgaccgaattttcggccaggcgaacacaaccctgaaacgatggttgttggacttcgcctcgaaacgaaaggaggccgaacttagatctggcatcattcgcaacaactccctgtgggatcgcctcatttttcacaaagttcagtcaagtctggggggcagggtgcggctaatggtgaccggagccgcccccgtaagtgccaccgtgctaacctttctccgcgccgcccttgggtgccagttctacgagggatacggacagacagaatgcaccgctgggtgttgcttgacgatgcctggggactggactgctggacacgtgggtgccccgatgccttgcaacctgatcaagttggtcgacgtggaggaaatgaactatatggcagcggagggtgagggggaggtgtgcgtgaagggacccaacgtgtttcagggctaccttaaagatcctgcgaagacagccgaagccctggataaagatggctggctgcacaccggcgacattggaaagtggcttcccaatggtacccttaaaattattgataggaagaagcatatctttaagctcgcacagggagaatatatagcccctgaaaagatcgagaacatttacatgagaagcgaaccggtagcacaggtttttgtgcacggggagtcccttcaggcctttttaatcgcaatcgtcgtgccagacgtggaaactctgtgcagttgggcacagaaacggggatttgaagggtcatttgaagagctgtgccgaaataaagatgtcaaaaaggcaatcctggaagacatggtgcggctggggaaagactctggacttaagccatttgagcaggtaaagggcattactctgcatccagagttattctcaatcgataacgggttactgacgccgacaatgaaggctaaacggcctgagttgcgaaactactttcgctcccagatcgacgatttatatagcactatcaaggtctag

SEQ ID NO: 325832 - DNA, 1584 bp, Artificial Sequence
  derived and/or modified sequence
atggtgatcgtgcccctgtacgacaccctgggcaacgaggccatcacctatatcgtgaataaagccgaactgagcttggtgttcgtggacaagcccgaaaaagcgaaactgctcttggaaggcgtagagaataagctgatacctggcctgaaaattattgtcgtgatggacgcctacgggagtgagttagttgagcggggacagaggtgcggtgtggaggtcaccagcatgaaagcaatggaggatctgggaagggcgaaccgccgtaaacctaagcctccggcgcctgaggacctagctgtcatctgttttacaagcggcaccaccggaaatccaaaaggcgccatggtaacacaccgcaacatcgtgtccgattgcagtgcctttgttaaagctactgagaacacagtaaatccatgtccagacgacacccttatttccttcctccctctcgcgcacatgtttgaaagagtcgtagagtgcgtaatgctgtgccatggggctaagatcggcttcttccagggcgatatacgtctcctcatggatgacctgaaggtacttcagccaaccgtttttccagtggtgcctagattgctgaacagaatgtttgatcgcattttcggtcaggctaacactacattgaaacggtggttgctggatttcgcctccaagaggaaggaggcggagctccgcagcggcattatacgtaataacagtctgtgggaccggctgattttccataaagtgcagagcagtcttggcggcagggtccgtcttatggtaacgggagctgccccagtcagcgctaccgtgttgactttcctgcgggccgccttgggctgtcaattctatgaaggatacggtcagaccgaatgtactgccgggtgttgtttaacgatgccaggagattggaccgccgggcacgtcggcgccccgatgccgtgcaatcttattaagcttgtggatgttgaagaaatgaattacatggctgccgaaggcgaaggagaggtctgtgttaaaggccctaacgtgtttcaggggtatctgaaagaccctgccaaaacggctgaggcgctggataaggatgggtggctccacaccggcgacatcggtaagtggctcccaaatggtaccttgaaaatcatcgatagaaagaagcatatcttcaaattggcgcaaggggagtacattgccccagaaaagattgagaacatatacatgcgttctgaaccagtggcccaggtgtttgtccatggggagtcgctgcaggcatttttaattgccatcgtggtgcccgacgtggaaacactgtgtagctgggcccagaaacgaggatttgagggctccttcgaagagctgtgccgcaacaaagacgtcaaaaaagcaattctcgaagacatggttaggttagggaaagactcaggtttaaaaccatttgaacaggtcaaaggaatcacccttcacccagagttattttcaatagacaatgggctactcacacccacaatgaaggctaagcgccctgagttacgcaattacttcaggtctcagatcgatgatttgtattccaccataaaggtgtag

SEQ ID NO: 325833 - DNA, 2097 bp, Artificial Sequence
  derived and/or modified sequence
atgcaggcccacgagctgttccggtacttccggatgcccgagctggtggacttcagacagtacgtacgaacgttgcctacgaatactctcatggggttcggagctttcgccgcccttactaccttctggtatgccacacgcccgaagccgctcaaacccccatgtgatctgtcaatgcaaagcgtggaagtggcaggctccggcggcgcaaggcgatctgcactactggactcagacgaacccttggtctacttttatgatgatgtaaccactctatacgagggcttccaacggggcatccaagtgtcgaataacggcccctgtctcggttctaggaaacctgatcagccatatgaatggctgtcctacaaacaggttgccgaactttctgagtgtataggctcggccctgatccagaaaggcttcaagaccgcacctgatcaattcataggaatcttcgcccagaataggcctgagtgggtgataattgaacagggctgttttgcgtatagcatggtgattgtgcccttgtacgacacccttgggaacgaagcaattacctatatcgtgaataaggctgaactcagcctggtgttcgtagataaaccggaaaaggccaagttgctactggaaggcgtggaaaacaaactgatcccgggcctcaagatcatcgtggttatggatgcatacggctccgaactggtcgaaagggggcagcgctgtggtgtggaagtcacgagcatgaaagctatggaagacctcgggagggccaataggaggaaacctaagccacctgctcccgaagacttggctgtgatttgctttacaagcggtactaccgggaaccccaagggagccatggtgacccaccgaaatattgtaagcgattgtagcgcgtttgtgaaggccacagagaacaccgtcaacccgtgtcccgacgatacactgatctcctttctgccactcgcccacatgtttgagagggtggttgagtgcgttatgctgtgtcacggagccaagatcggattttttcaaggagatataagattactgatggacgatcttaaagtgcttcagcctaccgtctttcctgttgttccacggcttcttaatcgcatgttcgaccggatatttggtcaggccaatacaaccttaaagagatggctgttggactttgcctcaaagagaaaagaggccgaactccgatccggtattatcagaaataattctctttgggatagactaatattccataaggttcagtcaagcctcgggggcagagtgaggctcatggtgactggagcagcgccagtttctgcgaccgtgttgactttcctccgagccgcgctgggttgtcagttctacgaaggctacgggcaaaccgagtgcaccgcaggctgttgtttgaccatgcccggtgactggaccgccgggcacgtgggtgcacccatgccctgcaatctgataaagctggtagatgtggaggagatgaattacatggctgctgagggggagggtgaggtgtgtgtgaaagggccaaacgtgtttcaggggtatctcaaggatcctgccaaaaccgccgaagccctggataaagacggttggttgcatacgggggacattgggaagtggctgccgaatggaacgttgaaaatcatcgacagaaaaaagcacatcttcaagttagcccagggagaatatatagccccagaaaaaatagaaaacatatacatgagaagcgagcccgtcgcacaggtcttcgtgcacggagaatcactgcaggcctttctcatagctatagtggttcccgatgtcgaaaccctgtgctcctgggcacagaagagagggtttgagggcagcttcgaggagctctgccgaaataaagatgtaaagaaggctattctcgaggacatggtccgcttgggaaaggactctgggctgaagccgttcgagcaagtcaaaggaattactctccaccctgaattgttctctatagataacggcttactgacgcccacaatgaaagctaagcgccccgagcttcggaattattttcgcagccagattgatgatctgtacagcactattaaagtctag

SEQ ID NO: 325834 - DNA, 2097 bp, Artificial Sequence
  derived and/or modified sequence
atgcaggcccacgagctgttccggtacttccggatgcccgagctggtggactttcgtcagtatgtgagaaccttacccactaatactttgatgggtttcggggccttcgcagccctgaccacattttggtatgcaacaaggccgaaaccgctaaagcccccttgtgacctgtcgatgcagagcgttgaagtggctgggagcggaggcgcacggagatctgccttgctggactctgatgagcctttggtttatttttatgacgacgtaacaaccttgtacgagggctttcagaggggaatccaagtgtctaacaacggcccatgcttggggagtaggaagcctgaccagccatacgagtggcttagctacaagcaggtagcagagctaagcgaatgcattgggtcagcattaatccagaaggggtttaagactgcaccagatcaatttattggaatttttgcccagaaccgccccgaatgggttattatcgaacaggggtgctttgcatatagcatggtgatcgttccgctgtacgataccctcgggaacgaggcaataacatacatcgtgaataaagccgaacttagtttggtgtttgtcgataaacctgagaaggccaaattactgcttgagggggtagagaacaaattgattccagggcttaagattattgtggtaatggatgcatacggcagcgagctggtggaacggggtcagcgatgtggagtcgaggtgacctctatgaaggcgatggaagacctgggacgggccaaccggcggaaacccaagccccccgctcccgaggacttagcggtcatttgcttcacatccggcactaccggaaatcccaagggcgctatggtgacgcatcggaacattgtttccgactgctcagcctttgtcaaggccactgagaacacagtgaatccttgccctgacgacacactgattagcttcttgcccctggcacacatgtttgaaagggtcgtcgagtgcgtgatgctgtgccatggggctaagatcggtttcttccagggtgacatacgactgcttatggacgacctgaaagttctgcagcccacggtcttcccggttgtccccaggttgctgaatcgtatgttcgatagaatatttggacaggcaaacacaacccttaagaggtggctcctggacttcgcgtcaaagcggaaagaagccgagctgcgctctggtattattcgtaataattctctgtgggacagacttattttccataaggtgcagagcagcctgggtggcagagtgaggctcatggtgaccggcgcagctccagtctccgccacagtgctgacgtttctgcgcgctgctttaggttgccagttctacgaaggctacggccagaccgaatgtacggcaggttgttgtctgaccatgcccggggattggaccgcgggccacgtcggcgctcccatgccctgcaacctgataaaattagtagacgtggaagaaatgaactatatggcagctgagggagagggcgaggtatgtgtgaaagggcccaacgtcttccaagggtacttaaaggatccagctaagaccgcagaggcactggataaagatggatggttgcacactggagatatcggtaagtggctccctaacggcacgctgaaaatcattgaccgcaagaaacacatctttaagctggctcaaggggagtatatagcccctgagaaaattgagaacatttatatgaggagcgagccggtggctcaggtgtttgttcatggtgagagtctccaagcgtttttaattgctattgtggtgccggatgtcgaaacgctgtgttcatgggcccaaaagagggggtttgaaggctcctttgaagagctttgcagaaataaagacgtgaaaaaagccattctcgaggacatggtgcggctaggaaaagacagtggcttgaagccattcgaacaggtcaaaggaatcacactgcatccggagctgttctccatcgacaacgggctccttacaccgacaatgaaagccaaacggcccgaactgcggaattatttcagaagccagattgatgacctctattccacaatcaaagtgtag

SEQ ID NO: 325835 - DNA, 2097 bp, Artificial Sequence
  derived and/or modified sequence
atgcaggcccacgagttgtttagatattttaggatgcctgagcttgttgactttcggcaatatgtaaggaccctcccaaccaacaccctgatgggatttggggcttttgccgcactgactactttctggtacgctaccagacctaagccgcttaaaccaccttgtgatttatcgatgcaatccgtcgaagtggccggaagcggcggagccagacgcagcgccctactagactcagacgagccccttgtgtatttctatgatgatgtcaccacgctgtacgagggctttcagcggggaattcaagtgtcaaataatgggccatgcctcggatccagaaagccggaccagccctatgagtggttatcttacaagcaggtcgcagagcttagtgagtgcatcggcagcgccctgatccaaaaggggttcaagactgcccctgaccaatttattgggatctttgcccagaaccggcctgaatgggtgatcattgaacaggggtgcttcgcttactctatggtcattgtgcccctctatgacactctgggcaatgaggccattacctatatcgtgaataaagctgagctgtccctagtcttcgttgacaagccagaaaaggccaagcttcttttagaaggcgttgaaaataagctgattcccggactcaaaatcatcgttgttatggatgcctacggtagtgagctcgtggaacgcggtcagcgatgcggcgttgaagtcacctcaatgaaagccatggaagatctaggacgtgccaaccgcagaaagcccaaacctcctgcaccagaggatctggcagtgatatgttttacaagcggtacaaccgggaatccaaagggtgctatggtgacccatagaaatattgtgtctgactgtagcgcctttgtgaaagccaccgaaaacactgtgaatccttgtccagacgataccctgatcagtttcctaccacttgcacacatgtttgagcgcgttgtggaatgcgtgatgctttgtcacggcgcaaagattggattcttccagggagatatacgcctgttgatggatgaccttaaggtgttgcagcctaccgtgttccctgttgtgcctagactcctcaacagaatgttcgacaggatatttggacaggctaataccacactgaagcgatggctgctggacttcgcatcgaaaagaaaagaggcagagttaagatcgggaataattcgcaacaattcattgtgggaccgcctgatatttcataaggtacaaagctcactcgggggaagagtgcgcctgatggtcacaggagcagcaccggtgagtgctacggtactgactttccttagagcagcccttggttgtcaattctatgagggctacggacagactgagtgcactgccggatgctgcttaacgatgccgggagactggacagcagggcacgttggagcccctatgccttgcaacttaattaagttagtggacgtagaggaaatgaattatatggccgcagagggcgaaggcgaggtgtgtgtcaagggcccaaacgtgttccaaggttacctgaaagatcccgctaagaccgctgaagcactagacaaagatggatggctgcacacaggggacatcggaaagtggttgcctaatggcacgcttaaaattatagatcgaaaaaagcacatcttcaagctagcgcagggggaatatatcgctccggagaaaatcgaaaacatctacatgagatcagagcctgttgcgcaagtctttgtgcacggagagagtctccaagcatttctaatcgccattgtcgtgcccgatgtggaaactctgtgctcatgggcccagaaacgcggtttcgagggtagtttcgaggaattatgccgaaataaggacgtaaagaaggccattttagaggacatggtgagattaggcaaagatagcggcctcaagccttttgagcaggttaaagggatcactctacaccccgagttgtttagtatagataacggactgttgactcccacaatgaaggccaaacggcctgagttgcgcaactatttccgaagtcagatcgatgatttgtactccaccatcaaagtctag

SEQ ID NO: 325836 - DNA, 1584 bp, Artificial Sequence
  derived and/or modified sequence
atggtcatagtgccactgtacgatacgctggggaacgaggcaatcacatatatcgtgaacaaagctgagttaagcttagtgtttgtggacaagcccgagaaggctaagctcttacttgagggggtggagaataagctcataccaggcctaaaaatcatcgtagtgatggacgcctacggctcggaattagtggaacggggacaaaggtgtggggtagaggtgaccagtatgaaggccatggaagacttgggaagagcaaacagacggaagcccaagccccctgcgcctgaggatttagcagtgatttgcttcacatctggaacaacaggaaaccctaagggagcaatggtaacgcatagaaacatcgtgtccgattgcagtgccttcgtgaaggctaccgagaatacagttaatccatgtcccgatgacaccctaatctcctttctccctttggcgcacatgtttgagagagtggtcgaatgcgtgatgctttgccatggagccaaaattgggttctttcagggggatattcggttgctaatggatgacctcaaagtccttcagccaaccgtattcccagtagtgcctcgcttgctgaataggatgttcgatagaatttttggacaagctaacaccacgttgaagaggtggctgcttgacttcgcttcaaaaaggaaggaagcagaactcaggagcggcataattcgaaataatagcttgtgggatcgtcttattttccataaggtccagtcttctttagggggacgcgtgcgtttgatggtgaccggcgctgccccagtgtcggcaactgtactgacgttcctgcgcgctgcccttggatgccaattctacgagggatatggccagacagagtgtaccgcagggtgttgcctgacgatgcctggcgactggacagccggtcatgtcggggcacccatgccatgtaacctcattaaactcgtggatgttgaggaaatgaactacatggcagccgagggagagggcgaagtatgcgtcaagggcccaaatgtgttccagggatacctgaaggatcctgctaagactgcagaggccctggacaaagacggatggctgcataccggcgatattggcaagtggctcccaaacgggacattgaaaatcatcgatagaaagaaacacatttttaaactggcacagggcgaatacatcgctcctgagaagatcgagaacatttacatgcggagcgagcccgtggcccaggtctttgtacatggggaatccttacaggcctttctcattgcaatcgtggtgcctgacgttgagaccttatgctcatgggcccaaaaacggggttttgaagggtccttcgaagagctctgccggaacaaggatgtaaagaaggcaatcctggaagatatggtaagactgggaaaagactctggcctgaagccgttcgagcaggtcaagggaataactctacaccccgaacttttctcaatagataatgggctgctcacgccaactatgaaggcaaagcggccagagctcaggaactattttcgctcacagatcgacgatctttactccactatcaaagtctag

SEQ ID NO: 325837 - DNA, 1584 bp, Artificial Sequence
  derived and/or modified sequence
atggtgatcgttccactctacgatacgttgggaaacgaagcaattacttacatcgtgaacaaggcggagttgtcattggtgttcgttgacaaacctgagaaggcaaaactgctgttagagggggtcgagaacaaactcatccctggcctgaaaattatagttgtgatggacgcatatgggtctgaacttgttgagcggggtcagagatgcggggtggaggtcacttccatgaaggctatggaggacctcgggcgagctaaccgccgaaagcccaagccccctgcaccggaagacctggcagtgatctgcttcacctctggcactacgggcaacccgaagggggcaatggtgacccaccggaacattgtgtctgattgctctgcttttgtgaaggccactgagaacacagttaacccatgcccagacgacactctcatctcttttcttccactggcacacatgttcgaaagagttgtggaatgcgtgatgttgtgccacggagccaagatcggattttttcagggtgacatccgtctcttgatggatgacttgaaagtcctccaaccaaccgtttttcccgtcgtgcctcggctgctgaaccgaatgtttgaccgtattttcgggcaggcgaacactacgctgaagagatggttgcttgacttcgcatccaaaagaaaagaagccgagcttcggtcaggcataatcagaaacaacagtttgtgggatcgcctcatttttcataaagtccagagcagcctcggtgggagggtgaggctgatggtcacgggggctgcacctgtgtccgccactgtgttaaccttcttgagagccgctttaggatgtcaattttatgaagggtacgggcagaccgaatgcactgctggctgctgtctgaccatgccaggagattggaccgccggacatgtcggtgctcccatgccatgcaacctaattaagcttgtggatgtggaagagatgaattacatggccgctgaaggcgaaggcgaggtgtgtgtcaaggggcctaatgttttccagggttacctgaaggatccagctaagaccgctgaagccctcgacaaggatggctggctgcatacaggagatattggcaagtggctaccaaatggcacactgaagattattgatcggaaaaagcatatttttaagctcgcacagggagagtacattgctccggagaagattgagaatatttacatgagatccgagcctgtggcccaagtgttcgtgcatggcgagagcctacaggccttccttatagcgattgtggtcccggatgttgagacactttgtagttgggctcagaaacgtggctttgaaggtagctttgaagaattatgtcgcaataaagatgtgaaaaaagccattttagaagatatggttcggctcgggaaggactcgggccttaaacctttcgagcaggtgaagggcatcaccttgcatcctgaactgttttccatagacaacggcctcctcactcctacaatgaaagccaaacgccctgagttgcgcaactactttaggagccagatcgacgacctgtattcaactataaaggtctag

SEQ ID NO: 325838 - DNA, 2097 bp, Artificial Sequence
  derived and/or modified sequence
atgcaggcccacgagctctttagatactttcgtatgcccgagctggtggacttccggcagtacgtgcggactttgccaacaaacacacttatgggattcggagcattcgcggcactcacaaccttctggtacgctactagacctaagcctctgaaacctccctgtgacctctcgatgcagtccgtggaagtagctggcagcggaggcgcaagaagatctgctctcctcgactctgatgagcctctggtatacttttatgacgacgtcacaactttgtatgagggatttcagcgcggaatacaggtgtccaacaatggcccatgtttgggcagtagaaagcccgatcagccttatgagtggctttcgtacaagcaagtggcagagctgtctgagtgcatcggatccgcgctgatccagaaaggctttaagaccgccccagaccagttcattgggatcttcgcacaaaataggcctgagtgggtgatcatagaacaagggtgcttcgcatactcaatggtaattgttccactgtacgatacgctggggaacgaagctattacgtacatcgtcaataaagcagagctcagcctcgtttttgttgataaacctgagaaggccaagctcctcctggaaggtgttgagaataagctgattcccggacttaaaattattgtggtcatggacgcctatgggtccgagcttgttgaacgaggccagcgctgtggagtggaagttacctctatgaaggcaatggaggacctgggccgagctaacagacggaagcccaaacccccagcacctgaagacctcgccgtaatttgtttcacatcagggacaacaggaaatccaaagggagcgatggtaacacaccggaacattgttagcgactgttccgcattcgtgaaagccactgaaaatacagtcaacccgtgtcccgatgatactttgatcagcttcctccccctggctcacatgtttgaaagggtcgttgagtgcgtgatgctctgtcatggggctaagatcggtttttttcagggggatattagactcttgatggacgacctgaaggtgcttcagccaactgtcttccctgtagtgccacggctgctcaaccggatgtttgatcggattttcggccaggcaaacacaactttgaaaaggtggcttctcgattttgcttccaagcggaaggaagctgaactccggagtgggatcattcgtaataactctctgtgggatagactcatctttcacaaagtgcagagttccctcgggggtcgtgtaaggctgatggttaccggggctgcgccagtatccgctaccgtgctaaccttccttcgcgctgccctggggtgccaattctacgaaggctatggccagacagagtgtacggccggttgctgcctcactatgccgggtgactggacagccggtcacgtaggcgctccaatgccgtgcaatcttatcaagctggtcgatgttgaggagatgaattacatggccgcagagggagaaggggaggtgtgtgtgaagggcccaaatgttttccaggggtatctgaaggaccccgctaagaccgccgaggccttagataaagacggatggttgcataccggcgatatcgggaaatggttgcctaacggcacacttaaaatcatcgatcggaagaaacatatcttcaagcttgcacagggcgaatacattgccccagagaagatagaaaacatttatatgaggtccgaaccagtagcccaagtcttcgtgcatggggaaagcctccaggcctttctaattgctatcgttgtccctgatgtggagaccctgtgctcgtgggcccagaagcgagggtttgagggaagttttgaagagttgtgtcgaaacaaagacgtcaagaaagctattcttgaagacatggtccgcctcggaaaagattctggccttaagccctttgagcaggtgaaggggattactctacacccagaacttttcagcatcgataacggcttgctcacaccaaccatgaaggcgaaaaggcctgagctccggaattattttcggtcccagatagatgatctctactccaccataaaggtatag

SEQ ID NO: 325839 - DNA, 2097 bp, Artificial Sequence
  derived and/or modified sequence
atgcaagcgcacgaactgtttcggtacttcaggatgccagaattggttgatttcagacagtacgtaagaacactacctacaaacacgctcatgggattcggcgcttttgctgcccttacaaccttttggtatgctactcggccaaaacctctgaagcctccttgcgacctaagcatgcagtccgtggaagtggctggtagcggcggtgcgaggcgctctgcactactggacagcgatgaacctttggtgtatttctacgatgacgtcactacgctgtacgagggctttcagagggggattcaagtgtccaataatgggccatgtctcggctcaaggaaacctgaccagccctatgaatggctgtcttacaagcaggtggcggaactgtcagagtgtataggctctgccctcatacagaagggctttaaaacagcccctgaccagttcatcgggatttttgcccaaaacaggcccgagtgggtgatcatcgagcagggctgtttcgcctatagcatggtgatcgtccctctttacgacacgctcgggaatgaggctatcacatatattgtaaacaaagcagagttatccttggtgtttgtagataaaccagaaaaggccaaactgctgctcgaaggcgtcgaaaacaagctgataccgggtttgaagataattgtggtgatggatgcctacggctccgagctcgtcgaacgcggacagcggtgtggcgtggaagttacaagtatgaaagccatggaggatttaggcagagctaatcgcaggaagccaaaaccccctgcccctgaagacctggccgtgatttgtttcacctccggtacgacaggaaaccctaaaggagcaatggtcacccaccgcaatatagtatctgactgctctgcattcgtgaaggcgaccgagaatacagtgaacccatgccccgacgataccttaatcagtttcttacctctcgcacacatgtttgagagagttgtggaatgcgttatgctctgccatggcgctaaaatagggtttttccagggagatatccgcctcctgatggacgatctgaaggttcttcagcccaccgtttttcccgtcgttcctcgattactaaaccgcatgttcgaccggatcttcggccaggctaacacgaccctgaagcggtggttactggacttcgcatctaagaggaaagaggctgagctgagatcaggtatcattcgcaacaactccctctgggacaggctgatatttcacaaggtgcagtcgagcctaggcggaagggtgcgactgatggtgactggggcagcccctgtatccgctacagtgctgacttttctccgtgcagctttggggtgtcagttttacgaaggatatggacagaccgagtgcacagcgggatgctgtttaacaatgcccggagattggactgccggacacgtcggcgcaccaatgccctgtaatctgataaaactggtggatgtcgaggagatgaattatatggcagctgaaggcgagggcgaggtgtgcgtcaaaggtccgaacgttttccagggataccttaaggaccccgcaaaaacggccgaggctcttgacaaagacggctggctacatacaggggatatcggcaaatggctgcctaatggtacactgaagatcattgatagaaaaaaacacatttttaagttggctcagggggagtatattgccccagaaaagatcgagaacatttacatgcgtagcgaaccagtggcacaggtgttcgtgcacggagagtcacttcaggcttttttgattgctatcgttgtacctgacgtggagacgttatgttcttgggcccagaagcgagggttcgagggaagctttgaggagctttgccgaaacaaggatgtgaagaaagcaatacttgaggacatggtccgcttggggaaagattctgggttaaaacccttcgagcaagtgaaaggtattacgttgcaccccgagttattctccatagacaatggcctgctgacccctactatgaaggccaaacgaccagaactgcgaaactactttagaagccagatcgatgatctgtacagcacgatcaaagtgtag

SEQ ID NO: 325840 - DNA, 2097 bp, Artificial Sequence
  derived and/or modified sequence
atgcaggcccacgagctgttcagatacttcagaatgcccgagctggtggacttcagacagtacgtgagaaccctgcccaccaacaccctgatgggcttcggcgccttcgccgccctgaccaccttctggtacgccaccagacccaagcccctgaagcccccctgcgacctgagcatgcagagcgtggaggtggccggcagcggcggcgccagaagaagcgccctgctggacagcgacgagcccctggtgtacttctacgacgacgtgaccaccctgtacgagggcttccagagaggcatccaggtgagcaacaacggcccctgcctgggcagcagaaagcccgaccagccctacgagtggctgagctacaagcaggtggccgagctgagcgagtgcatcggcagcgccctgatccagaagggcttcaagaccgcccccgaccagttcatcggcatcttcgcccagaacagacccgagtgggtgatcatcgagcagggctgcttcgcctacagcatggtgatcgtgcccctgtacgacaccctgggcaacgaggccatcacctacatcgtgaacaaggccgagctgagcctggtgttcgtggacaagcccgagaaggccaagctgctgctggagggcgtggagaacaagctgatccccggcctgaagatcatcgtggtgatggacgcctacggcagcgagctggtggagagaggccagagatgcggcgtggaggtgaccagcatgaaggccatggaggacctgggcagagccaacagaagaaagcccaagccccccgcccccgaggacctggccgtgatctgcttcaccagcggcaccaccggcaaccccaagggcgccatggtgacccacagaaacatcgtgagcgactgcagcgccttcgtgaaggccaccgagaacaccgtgaacccctgccccgacgacaccctgatcagcttcctgcccctggcccacatgttcgagagagtggtggagtgcgtgatgctgtgccacggcgccaagatcggcttcttccagggcgacatcagactgctgatggacgacctgaaggtgctgcagcccaccgtgttccccgtggtgcccagactgctgaacagaatgttcgacagaatcttcggccaggccaacaccaccctgaagagatggctgctggacttcgccagcaagagaaaggaggccgagctgagaagcggcatcatcagaaacaacagcctgtgggacagactgatcttccacaaggtgcagagcagcctgggcggcagagtgagactgatggtgaccggcgccgcccccgtgagcgccaccgtgctgaccttcctgagagccgccctgggctgccagttctacgagggctacggccagaccgagtgcaccgccggctgctgcctgaccatgcccggcgactggaccgccggccacgtgggcgcccccatgccctgcaacctgatcaagctggtggacgtggaggagatgaactacatggccgccgagggcgagggcgaggtgtgcgtgaagggccccaacgtgttccagggctacctgaaggaccccgccaagaccgccgaggccctggacaaggacggctggctgcacaccggcgacatcggcaagtggctgcccaacggcaccctgaagatcatcgacagaaagaagcacatcttcaagctggcccagggcgagtacatcgcccccgagaagatcgagaacatctacatgagaagcgagcccgtggcccaggtgttcgtgcacggcgagagcctgcaggccttcctgatcgccatcgtggtgcccgacgtggagaccctgtgcagctgggcccagaagagaggcttcgagggcagcttcgaggagctgtgcagaaacaaggacgtgaagaaggccatcctggaggacatggtgagactgggcaaggacagcggcctgaagcccttcgagcaggtgaagggcatcaccctgcaccccgagctgttcagcatcgacaacggcctgctgacccccaccatgaaggccaagagacccgagctgagaaactacttcagaagccagatcgacgacctgtacagcaccatcaaggtgtag

SEQ ID NO: 325841 - DNA, 1584 bp, Artificial Sequence
  derived and/or modified sequence
atggtgatcgtgcccctgtacgacaccctgggcaacgaggccatcacctacatcgtgaacaaggccgagctgagcctggtgttcgtggacaagcccgagaaggccaagctgctgctggagggcgtggagaacaagctgatccccggcctgaagatcatcgtggtgatggacgcctacggcagcgagctggtggagagaggccagagatgcggcgtggaggtgaccagcatgaaggccatggaggacctgggcagagccaacagaagaaagcccaagccccccgcccccgaggacctggccgtgatctgcttcaccagcggcaccaccggcaaccccaagggcgccatggtgacccacagaaacatcgtgagcgactgcagcgccttcgtgaaggccaccgagaacaccgtgaacccctgccccgacgacaccctgatcagcttcctgcccctggcccacatgttcgagagagtggtggagtgcgtgatgctgtgccacggcgccaagatcggcttcttccagggcgacatcagactgctgatggacgacctgaaggtgctgcagcccaccgtgttccccgtggtgcccagactgctgaacagaatgttcgacagaatcttcggccaggccaacaccaccctgaagagatggctgctggacttcgccagcaagagaaaggaggccgagctgagaagcggcatcatcagaaacaacagcctgtgggacagactgatcttccacaaggtgcagagcagcctgggcggcagagtgagactgatggtgaccggcgccgcccccgtgagcgccaccgtgctgaccttcctgagagccgccctgggctgccagttctacgagggctacggccagaccgagtgcaccgccggctgctgcctgaccatgcccggcgactggaccgccggccacgtgggcgcccccatgccctgcaacctgatcaagctggtggacgtggaggagatgaactacatggccgccgagggcgagggcgaggtgtgcgtgaagggccccaacgtgttccagggctacctgaaggaccccgccaagaccgccgaggccctggacaaggacggctggctgcacaccggcgacatcggcaagtggctgcccaacggcaccctgaagatcatcgacagaaagaagcacatcttcaagctggcccagggcgagtacatcgcccccgagaagatcgagaacatctacatgagaagcgagcccgtggcccaggtgttcgtgcacggcgagagcctgcaggccttcctgatcgccatcgtggtgcccgacgtggagaccctgtgcagctgggcccagaagagaggcttcgagggcagcttcgaggagctgtgcagaaacaaggacgtgaagaaggccatcctggaggacatggtgagactgggcaaggacagcggcctgaagcccttcgagcaggtgaagggcatcaccctgcaccccgagctgttcagcatcgacaacggcctgctgacccccaccatgaaggccaagagacccgagctgagaaactacttcagaagccagatcgacgacctgtacagcaccatcaaggtgtag

SEQ ID NO: 325842 - DNA, 3832 bp, Artificial Sequence
  derived and/or modified sequence
ggggccggcgcggcgagcgcaccagcagcatcctggctcagccgcggcggtggcgggggcgcaaccagcgggccgaggcggcggcgccagcggcgccttaaatagcatccagagccggcgcggggcagggagtgggctgcagtgacagccggcggcggagcggccggtccacggaggagaattcagcttagagaactatcaacacaggacaatgcaagcccatgagctgttccggtattttcgaatgccagagctggttgacttccgacagtacgtgcgtactcttccgaccaacacgcttatgggcttcggagcttttgcagcactcaccaccttctggtacgccacgagacccaaacccctgaagccgccatgcgacctctccatgcagtcagtggaagtggcgggtagtggtggtgcacgaagatccgcactacttgacagcgacgagcccttggtgtatttctatgatgatgtcacaacattatacgaaggtttccagaggggaatacaggtgtcaaataatggcccttgtttaggctctcggaaaccagaccaaccctatgaatggctttcatataaacaggttgcagaattgtcggagtgcataggctcagcactgatccagaagggcttcaagactgccccagatcagttcattggcatctttgctcaaaatagacctgagtgggtgattattgaacaaggatgctttgcttattcgatggtgatcgttccactttatgatacccttggaaatgaagccatcacgtacatagtcaacaaagctgaactctctctggtttttgttgacaagccagagaaggccaaactcttattagagggtgtagaaaataagttaataccaggccttaaaatcatagttgtcatggatgcctacggcagtgaactggtggaacgaggccagaggtgtggggtggaagtcaccagcatgaaggcgatggaggacctgggaagagccaacagacggaagcccaagcctccagcacctgaagatcttgcagtaatttgtttcacaagtggaactacaggcaaccccaaaggagcaatggtcactcaccgaaacatagtgagcgattgttcagcttttgtgaaagcaacagagaatacagtcaatccttgcccagatgatactttgatatctttcttgcctctcgcccatatgtttgagagagttgtagagtgtgtaatgctgtgtcatggagctaaaatcggatttttccaaggagatatcaggctgctcatggatgacctcaaggtgcttcaacccactgtcttccccgtggttccaagactgctgaaccggatgtttgaccgaattttcggacaagcaaacaccacgctgaagcgatggctcttggactttgcctccaagaggaaagaagcagagcttcgcagcggcatcatcagaaacaacagcctgtgggaccggctgatcttccacaaagtacagtcgagcctgggcggaagagtccggctgatggtgacaggagccgccccggtgtctgccactgtgctgacgttcctcagagcagccctgggctgtcagttttatgaaggatacggacagacagagtgcactgccgggtgctgcctgaccatgcctggagactggaccgcaggccatgttggggccccgatgccgtgcaatttgataaaacttgttgatgtggaagaaatgaattacatggctgccgagggcgagggcgaggtgtgtgtgaaagggccaaatgtatttcagggctacttgaaggacccagcgaaaacagcagaagctttggacaaagacggctggttacacacaggggacattggaaaatggttaccaaatggcaccttgaaaattatcgaccggaaaaagcacatatttaagctggcacaaggagaatacatagcccctgaaaagattgaaaatatctacatgcgaagtgagcctgttgctcaggtgtttgtccacggagaaagcctgcaggcatttctcattgcaattgtggtaccagatgttgagacattatgttcctgggcccaaaagagaggatttgaagggtcgtttgaggaactgtgcagaaataaggatgtcaaaaaagctatcctcgaagatatggtgagacttgggaaggattctggtctgaaaccatttgaacaggtcaaaggcatcacattgcaccctgaattattttctatcgacaatggccttctgactccaacaatgaaggcgaaaaggccagagctgcggaactatttcaggtcgcagatagatgacctctattccactatcaaggtttagtgtgaagaagaaagctcagaggaaatggcacagttccacaatctcttctcctgctgatggccttcatgttgttaattttgaatacagcaagtgtagggaaggaagcgttcgtgtttgacttgtccattcggggttcttctcataggaatgctagaggaaagagaacactgccttacagtcacctcatgttgcagaccatgtttatggtaatacacactttccaaaatgagccttaaaaattgtaaaggggatactataaatgtgctaagttatttgagacttcctcagtttaaaaagtgggttttaaatcttctgtctccctgtttctctaatcaaggggttaggactttgctatctctgagatgtctgctacttgctgcaaattctgcagctgtctgctgctctaaagagtacagtgcactagagggaagtgttccctttaaaaataagaacaactgtcctggctggagaatctcacaagcggaccagagatctttttaaatccctgctactgtcccttctcacaggcattcacagaacccttctgattcgtaagggttacgaaactcatgttcttctccagtcccctgtggtttctgttggagcataaggtttccagtaagcgggagggcagatccaactcagaaccatgcagataaggagcctctggcaaatgggtgctcatcagaacgcgtggattctctttcatggcagaatgctcttggactcggttctccaggcctgattccccgactccatcctttttcaggggttatttaaaaatctgccttagattctatagtgaagacaagcatttcaagaaagagttacctggatcagccatgctcagctgtgacgcctgaataactgtctactttatcttcactgaaccactcactctgtgtaaaggccaacagatttttaatgtggttttcatatcaaaagatcatgttgggattaacttgcctttttccccaaaaaataaactctcaggcaagcatttctttaaagctattaagggagtatatacttgagtacttattgaaatggacagtaataagcaaatgttcttataatgctacctgatttctatgaaatgtgtttgacaagccaaaattctaggatgtagaaatctggaaagttcatttcctgggattcacttctccagggattttttaaagttaatttgggaaattaacagcagttcactttattgtgagtctttgccacatttgactgaattgagctgtcatttgtacatttaaagcagctgttttggggtctgtgagagtacatgtattatatacaagcacaacagggcttgcactaaagaattgtcattgtaataacactacttggtagcctaacttcatatatgtattcttaattgcacaaaaagtcaataatttgtcaccttggggttttgaatgtttgctttaagtgttggctatttctatgttttataaaccaaaacaaaatttccaaaaacaatgaaggaaaccaaaataaatatttctgcatttc

SEQ ID NO: 325843 - DNA, 2646 bp, Artificial Sequence
  derived and/or modified sequence
atttatgtgggtttgtttgagggctgcattcctagtgaagtattccatcaaactgccattattcatcttgatgaaagcttgaggaactttagaaggagagaaacatccagaccacccggtttttggtttctaaatgacatgaagagaatacaatgttaataattcagcttagagaactatcaacacaggacaatgcaagcccatgagctgttccggtattttcgaatgccagagctggttgacttccgacagtacgtgcgtactcttccgaccaacacgcttatgggcttcggagcttttgcagcactcaccaccttctggtacgccacgagacccaaacccctgaagccgccatgcgacctctccatgcagtcagtggaagtggcgggtagtggtggtgcacgaagatccgcactacttgacagcgacgagcccttggtgtatttctatgatgatgtcacaacattatacgaaggtttccagaggggaatacaggtgtcaagatcgctcaggcccctctgtgtccactgtaactttcccagagtcggtcccaaagctcactggaccctctagatgttccctgtggccctgggggctccatggtcaaatatgtgagtgtcacatcctgtattttatgataatggcccttgtttaggctctcggaaaccagaccaaccctatgaatggctttcatataaacaggttgcagaattgtcggagtgcataggctcagcactgatccagaagggcttcaagactgccccagatcagttcattggcatctttgctcaaaatagacctgagtgggtgattattgaacaaggatgctttgcttattcgatggtgatcgttccactttatgatacccttggaaatgaagccatcacgtacatagtcaacaaagctgaactctctctggtttttgttgacaagccagagaaggccaaactcttattagagggtgtagaaaataagttaataccaggccttaaaatcatagttgtcatggatgcctacggcagtgaactggtggaacgaggccagaggtgtggggtggaagtcaccagcatgaaggcgatggaggacctgggaagagccaacagacggaagcccaagcctccagcacctgaagatcttgcagtaatttgtttcacaagtggaactacaggcaaccccaaaggagcaatggtcactcaccgaaacatagtgagcgattgttcagcttttgtgaaagcaacagagaatacagtcaatccttgcccagatgatactttgatatctttcttgcctctcgcccatatgtttgagagagttgtagagtgtgtaatgctgtgtcatggagctaaaatcggatttttccaaggagatatcaggctgctcatggatgacctcaaggtgcttcaacccactgtcttccccgtggttccaagactgctgaaccggatgtttgaccgaattttcggacaagcaaacaccacgctgaagcgatggctcttggactttgcctccaagaggaaagaagcagagcttcgcagcggcatcatcagaaacaacagcctgtgggaccggctgatcttccacaaagtacagtcgagcctgggcggaagagtccggctgatggtgacaggagccgccccggtgtctgccactgtgctgacgttcctcagagcagccctgggctgtcagttttatgaaggatacggacagacagagtgcactgccgggtgctgcctgaccatgcctggagactggaccgcaggccatgttggggccccgatgccgtgcaatttgataaaacttgttgatgtggaagaaatgaattacatggctgccgagggcgagggcgaggtgtgtgtgaaagggccaaatgtatttcagggctacttgaaggacccagcgaaaacagcagaagctttggacaaagacggctggttacacacaggggacattggaaaatggttaccaaatggcaccttgaaaattatcgaccggaaaaagcacatatttaagctggcacaaggagaatacatagcccctgaaaagattgaaaatatctacatgcgaagtgagcctgttgctcaggtgtttgtccacggagaaagcctgcaggcatttctcattgcaattgtggtaccagatgttgagacattatgttcctgggcccaaaagagaggatttgaagggtcgtttgaggaactgtgcagaaataaggatgtcaaaaaagctatcctcgaagatatggtgagacttgggaaggattctggtctgaaaccatttgaacaggtcaaaggcatcacattgcaccctgaattattttctatcgacaatggccttctgactccaacaatgaaggcgaaaaggccagagctgcggaactatttcaggtcgcagatagatgacctctattccactatcaaggtttagtgtgaagaagaaagctcagaggaaatggcacagttccacaatctcttctcctgctgatggccttcatgttgttaattttgaatacagcaagtgtagggaaggaagcgttcgtgtttgacttgtccattcggggttcttctcataggaatgctagaggaaagagaacactgccttacagtcacctcatgttgcagaccatgtttatggtaatacacactttcc

SEQ ID NO: 325844 - DNA, 3636 bp, Artificial Sequence
  derived and/or modified sequence
gggcggggcggggccgcgggagggcggggccggcgcggcgagcgcaccagcagcatcctggctcagccgcggcggtggcgggggcgcaaccagcgggccgaggcggcggcgccagcggcgccttaaatagcatccagagccggcgcggggcagggagtgggctgcagtgacagccggcggcggagcggccggtccacggaggagggtagtggtggtgcacgaagatccgcactacttgacagcgacgagcccttggtgtatttctatgatgatgtcacaacattatacgaaggtttccagaggggaatacaggtgtcaaataatggcccttgtttaggctctcggaaaccagaccaaccctatgaatggctttcatataaacaggttgcagaattgtcggagtgcataggctcagcactgatccagaagggcttcaagactgccccagatcagttcattggcatctttgctcaaaatagacctgagtgggtgattattgaacaaggatgctttgcttattcgatggtgatcgttccactttatgatacccttggaaatgaagccatcacgtacatagtcaacaaagctgaactctctctggtttttgttgacaagccagagaaggccaaactcttattagagggtgtagaaaataagttaataccaggccttaaaatcatagttgtcatggatgcctacggcagtgaactggtggaacgaggccagaggtgtggggtggaagtcaccagcatgaaggcgatggaggacctgggaagagccaacagacggaagcccaagcctccagcacctgaagatcttgcagtaatttgtttcacaagtggaactacaggcaaccccaaaggagcaatggtcactcaccgaaacatagtgagcgattgttcagcttttgtgaaagcaacagagaatacagtcaatccttgcccagatgatactttgatatctttcttgcctctcgcccatatgtttgagagagttgtagagtgtgtaatgctgtgtcatggagctaaaatcggatttttccaaggagatatcaggctgctcatggatgacctcaaggtgcttcaacccactgtcttccccgtggttccaagactgctgaaccggatgtttgaccgaattttcggacaagcaaacaccacgctgaagcgatggctcttggactttgcctccaagaggaaagaagcagagcttcgcagcggcatcatcagaaacaacagcctgtgggaccggctgatcttccacaaagtacagtcgagcctgggcggaagagtccggctgatggtgacaggagccgccccggtgtctgccactgtgctgacgttcctcagagcagccctgggctgtcagttttatgaaggatacggacagacagagtgcactgccgggtgctgcctgaccatgcctggagactggaccgcaggccatgttggggccccgatgccgtgcaatttgataaaacttgttgatgtggaagaaatgaattacatggctgccgagggcgagggcgaggtgtgtgtgaaagggccaaatgtatttcagggctacttgaaggacccagcgaaaacagcagaagctttggacaaagacggctggttacacacaggggacattggaaaatggttaccaaatggcaccttgaaaattatcgaccggaaaaagcacatatttaagctggcacaaggagaatacatagcccctgaaaagattgaaaatatctacatgcgaagtgagcctgttgctcaggtgtttgtccacggagaaagcctgcaggcatttctcattgcaattgtggtaccagatgttgagacattatgttcctgggcccaaaagagaggatttgaagggtcgtttgaggaactgtgcagaaataaggatgtcaaaaaagctatcctcgaagatatggtgagacttgggaaggattctggtctgaaaccatttgaacaggtcaaaggcatcacattgcaccctgaattattttctatcgacaatggccttctgactccaacaatgaaggcgaaaaggccagagctgcggaactatttcaggtcgcagatagatgacctctattccactatcaaggtttagtgtgaagaagaaagctcagaggaaatggcacagttccacaatctcttctcctgctgatggccttcatgttgttaattttgaatacagcaagtgtagggaaggaagcgttcgtgtttgacttgtccattcggggttcttctcataggaatgctagaggaaagagaacactgccttacagtcacctcatgttgcagaccatgtttatggtaatacacactttccaaaatgagccttaaaaattgtaaaggggatactataaatgtgctaagttatttgagacttcctcagtttaaaaagtgggttttaaatcttctgtctccctgtttctctaatcaaggggttaggactttgctatctctgagatgtctgctacttgctgcaaattctgcagctgtctgctgctctaaagagtacagtgcactagagggaagtgttccctttaaaaataagaacaactgtcctggctggagaatctcacaagcggaccagagatctttttaaatccctgctactgtcccttctcacaggcattcacagaacccttctgattcgtaagggttacgaaactcatgttcttctccagtcccctgtggtttctgttggagcataaggtttccagtaagcgggagggcagatccaactcagaaccatgcagataaggagcctctggcaaatgggtgctcatcagaacgcgtggattctctttcatggcagaatgctcttggactcggttctccaggcctgattccccgactccatcctttttcaggggttatttaaaaatctgccttagattctatagtgaagacaagcatttcaagaaagagttacctggatcagccatgctcagctgtgacgcctgaataactgtctactttatcttcactgaaccactcactctgtgtaaaggccaacagatttttaatgtggttttcatatcaaaagatcatgttgggattaacttgcctttttccccaaaaaataaactctcaggcaagcatttctttaaagctattaagggagtatatacttgagtacttattgaaatggacagtaataagcaaatgttcttataatgctacctgatttctatgaaatgtgtttgacaagccaaaattctaggatgtagaaatctggaaagttcatttcctgggattcacttctccagggattttttaaagttaatttgggaaattaacagcagttcactttattgtgagtctttgccacatttgactgaattgagctgtcatttgtacatttaaagcagctgttttggggtctgtgagagtacatgtattatatacaagcacaacagggcttgcactaaagaattgtcattgtaataacactacttggtagcctaacttcatatatgtattcttaattgcacaaaaagtcaataatttgtcaccttggggttttgaatgtttgctttaagtgttggctatttctatgttttataaaccaaaacaaaatttccaaaaacaatgaaggaaaccaaaataaatatttctgcatttcaggtga

SEQ ID NO: 325845 - DNA, 2333 bp, Artificial Sequence
  derived and/or modified sequence
gggactgtgttaagaaccaagggcatataaagacagatgggaggagaccctggccggggagaggaagaagcatctacataggtactaagtaccattcgctaattcagcttagagaactatcaacacaggacaatgcaagcccatgagctgttccggtattttcgaatgccagagctggttgacttccgacagtacgtgcgtactcttccgaccaacacgcttatgggcttcggagcttttgcagcactcaccaccttctggtacgccacgagacccaaacccctgaagccgccatgcgacctctccatgcagtcagtggaagtggcgggtagtggtggtgcacgaagatccgcactacttgacagcgacgagcccttggtgtatttctatgatgatgtcacaacattatacgaaggtttccagaggggaatacaggtgtcaaataatggcccttgtttaggctctcggaaaccagaccaaccctatgaatggctttcatataaacaggttgcagaattgtcggagtgcataggctcagcactgatccagaagggcttcaagactgccccagatcagttcattggcatctttgctcaaaatagacctgagtgggtgattattgaacaaggatgctttgcttattcgatggtgatcgttccactttatgatacccttggaaatgaagccatcacgtacatagtcaacaaagctgaactctctctggtttttgttgacaagccagagaaggccaaactcttattagagggtgtagaaaataagttaataccaggccttaaaatcatagttgtcatggatgcctacggcagtgaactggtggaacgaggccagaggtgtggggtggaagtcaccagcatgaaggcgatggaggacctgggaagagccaacagacggaagcccaagcctccagcacctgaagatcttgcagtaatttgtttcacaagtggaactacaggcaaccccaaaggagcaatggtcactcaccgaaacatagtgagcgattgttcagcttttgtgaaagcaacagagaatacagtcaatccttgcccagatgatactttgatatctttcttgcctctcgcccatatgtttgagagagttgtagagtgtgtaatgctgtgtcatggagctaaaatcggatttttccaaggagatatcaggctgctcatggatgacctcaaggtgcttcaacccactgtcttccccgtggttccaagactgctgaaccggatgtttgaccgaattttcggacaagcaaacaccacgctgaagcgatggctcttggactttgcctccaagaggaaagaagcagagcttcgcagcggcatcatcagaaacaacagcctgtgggaccggctgatcttccacaaagtacagtcgagcctgggcggaagagtccggctgatggtgacaggagccgccccggtgtctgccactgtgctgacgttcctcagagcagccctgggctgtcagttttatgaaggatacggacagacagagtgcactgccgggtgctgcctgaccatgcctggagactggaccgcaggccatgttggggccccgatgccgtgcaatttgataaaacttgttgatgtggaagaaatgaattacatggctgccgagggcgagggcgaggtgtgtgtgaaagggccaaatgtatttcagggctacttgaaggacccagcgaaaacagcagaagctttggacaaagacggctggttacacacaggggacattggaaaatggttaccaaatggcaccttgaaaattatcgaccggaaaaagcacatatttaagctggcacaaggagaatacatagcccctgaaaagattgaaaatatctacatgcgaagtgagcctgttgctcaggtgtttgtccacggagaaagcctgcaggcatttctcattgcaattgtggtaccagatgttgagacattatgttcctgggcccaaaagagaggatttgaagggtcgtttgaggaactgtgcagaaataaggatgtcaaaaaagctatcctcgaagatatggtgagacttgggaaggattctggtctgaaaccatttgaacaggtcaaaggcatcacattgcaccctgaattattttctatcgacaatggccttctgactccaacaatgaaggcgaaaaggccagagctgcggaactatttcaggtcgcagatagatgacctctattccactatcaaggtttagtgtgaagaagaaagctcagaggaaatggcacagttccacaatctcttctcctgctgatggccttcatgttgttaattttgaatacagcaagtgtagggaaggaa

SEQ ID NO: 325846 - DNA, 3948 bp, Artificial Sequence
  derived and/or modified sequence
aaactccacggtaacggggaccaatgttgttagaggttgaggttcctggtaggtcccaggtgctaaaaggaagagcagcctttgggatgtgagcccgaaaaccatcgtgttggcttctgaagccccaagatgggcatggcagggacgcggaagccctcagaaccgcggaagccctcagaaccgcacagcaggtggccgccgtggtgcagcgcgcagtcggccctcagctcccctgcaccggcgcgagctgcgggcgctgcccacgtcaggctctgcagacaccagacagaaaagaattcagcttagagaactatcaacacaggacaatgcaagcccatgagctgttccggtattttcgaatgccagagctggttgacttccgacagtacgtgcgtactcttccgaccaacacgcttatgggcttcggagcttttgcagcactcaccaccttctggtacgccacgagacccaaacccctgaagccgccatgcgacctctccatgcagtcagtggaagtggcgggtagtggtggtgcacgaagatccgcactacttgacagcgacgagcccttggtgtatttctatgatgatgtcacaacattatacgaaggtttccagaggggaatacaggtgtcaaataatggcccttgtttaggctctcggaaaccagaccaaccctatgaatggctttcatataaacaggttgcagaattgtcggagtgcataggctcagcactgatccagaagggcttcaagactgccccagatcagttcattggcatctttgctcaaaatagacctgagtgggtgattattgaacaaggatgctttgcttattcgatggtgatcgttccactttatgatacccttggaaatgaagccatcacgtacatagtcaacaaagctgaactctctctggtttttgttgacaagccagagaaggccaaactcttattagagggtgtagaaaataagttaataccaggccttaaaatcatagttgtcatggatgcctacggcagtgaactggtggaacgaggccagaggtgtggggtggaagtcaccagcatgaaggcgatggaggacctgggaagagccaacagacggaagcccaagcctccagcacctgaagatcttgcagtaatttgtttcacaagtggaactacaggcaaccccaaaggagcaatggtcactcaccgaaacatagtgagcgattgttcagcttttgtgaaagcaacagagaatacagtcaatccttgcccagatgatactttgatatctttcttgcctctcgcccatatgtttgagagagttgtagagtgtgtaatgctgtgtcatggagctaaaatcggatttttccaaggagatatcaggctgctcatggatgacctcaaggtgcttcaacccactgtcttccccgtggttccaagactgctgaaccggatgtttgaccgaattttcggacaagcaaacaccacgctgaagcgatggctcttggactttgcctccaagaggaaagaagcagagcttcgcagcggcatcatcagaaacaacagcctgtgggaccggctgatcttccacaaagtacagtcgagcctgggcggaagagtccggctgatggtgacaggagccgccccggtgtctgccactgtgctgacgttcctcagagcagccctgggctgtcagttttatgaaggatacggacagacagagtgcactgccgggtgctgcctgaccatgcctggagactggaccgcaggccatgttggggccccgatgccgtgcaatttgataaaacttgttgatgtggaagaaatgaattacatggctgccgagggcgagggcgaggtgtgtgtgaaagggccaaatgtatttcagggctacttgaaggacccagcgaaaacagcagaagctttggacaaagacggctggttacacacaggggacattggaaaatggttaccaaatggcaccttgaaaattatcgaccggaaaaagcacatatttaagctggcacaaggagaatacatagcccctgaaaagattgaaaatatctacatgcgaagtgagcctgttgctcaggtgtttgtccacggagaaagcctgcaggcatttctcattgcaattgtggtaccagatgttgagacattatgttcctgggcccaaaagagaggatttgaagggtcgtttgaggaactgtgcagaaataaggatgtcaaaaaagctatcctcgaagatatggtgagacttgggaaggattctggtctgaaaccatttgaacaggtcaaaggcatcacattgcaccctgaattattttctatcgacaatggccttctgactccaacaatgaaggcgaaaaggccagagctgcggaactatttcaggtcgcagatagatgacctctattccactatcaaggtttagtgtgaagaagaaagctcagaggaaatggcacagttccacaatctcttctcctgctgatggccttcatgttgttaattttgaatacagcaagtgtagggaaggaagcgttcgtgtttgacttgtccattcggggttcttctcataggaatgctagaggaaagagaacactgccttacagtcacctcatgttgcagaccatgtttatggtaatacacactttccaaaatgagccttaaaaattgtaaaggggatactataaatgtgctaagttatttgagacttcctcagtttaaaaagtgggttttaaatcttctgtctccctgtttctctaatcaaggggttaggactttgctatctctgagatgtctgctacttgctgcaaattctgcagctgtctgctgctctaaagagtacagtgcactagagggaagtgttccctttaaaaataagaacaactgtcctggctggagaatctcacaagcggaccagagatctttttaaatccctgctactgtcccttctcacaggcattcacagaacccttctgattcgtaagggttacgaaactcatgttcttctccagtcccctgtggtttctgttggagcataaggtttccagtaagcgggagggcagatccaactcagaaccatgcagataaggagcctctggcaaatgggtgctcatcagaacgcgtggattctctttcatggcagaatgctcttggactcggttctccaggcctgattccccgactccatcctttttcaggggttatttaaaaatctgccttagattctatagtgaagacaagcatttcaagaaagagttacctggatcagccatgctcagctgtgacgcctgaataactgtctactttatcttcactgaaccactcactctgtgtaaaggccaacagatttttaatgtggttttcatatcaaaagatcatgttgggattaacttgcctttttccccaaaaaataaactctcaggcaagcatttctttaaagctattaagggagtatatacttgagtacttattgaaatggacagtaataagcaaatgttcttataatgctacctgatttctatgaaatgtgtttgacaagccaaaattctaggatgtagaaatctggaaagttcatttcctgggattcacttctccagggattttttaaagttaatttgggaaattaacagcagttcactttattgtgagtctttgccacatttgactgaattgagctgtcatttgtacatttaaagcagctgttttggggtctgtgagagtacatgtattatatacaagcacaacagggcttgcactaaagaattgtcattgtaataacactacttggtagcctaacttcatatatgtattcttaattgcacaaaaagtcaataatttgtcaccttggggttttgaatgtttgctttaagtgttggctatttctatgttttataaaccaaaacaaaatttccaaaaacaatgaaggaaaccaaaataaatatttctgcatttca

SEQ ID NO: 325847 - protein, 969 aa, Artificial Sequence
  derived and/or modified sequence
MVKLVLLSIVLLKVTVPKLSNDLLQLDFMPIHRGILAIAWSMADPELLLSCGKDAKILCSNPNTGEVLYELPTNTQWCFDIQWCPRNPAVLSAASFDGRISVYSIMGGSTDGLRQKQVDKLSSSFGNLDPFGTGQPLPPLQIPQQTAQHSIVLPLKKPPKWIRRPVGASFSFGGKLVTFENVRMPSHQGAEQQQQQHHVFISQVVTEKEFLSRSDQLQQAVQSQGFINYCQKKIDASQTEFEKNVWSFLKVNFEDDSRGKYLELLGYRKEDLGKKHIKEEKEESEFLPSSGGTFNISVSGDIDGLITQALLTGNFESAVDLCLHDNRMADAIILAIAGGQELLARTQKKYFAKSQSKITRLITAVVMKNWKEIVESCDLKNWREALAAVLTYAKPDEFSALCDLLGTRLENEGDSLLQTQACLCYICAGNVEKLVACWTKAQDGSHPLSLQDLIEKVVILRKAVQLTQAMDTSTVGVLLAAKMSQYANLLAAQGSIAAALAFLPDNTNQPNIMQLRDRLCRAQGEPVAGHESPKIPYEKQQLPKGRPGPVAGHHQMPRVQTQQYYPHVRIAPTVTTWSNKTPTALPSHPPAASPSDTQGENPPPPGFIMHGNVNPNAAGQLPTSPGHMHTQVPPYPQPQPYQPAQPYPFGTGGSAMYRPQQPVAPPTSNAYPNTPYISSASSYTGQSQLYAAQHQASSPTSSPATSFPPPPSSGASFQHGGPGAPPSSSAYALPPGTTGPQNGWNDPPALNRVPKKKKMPENFMPPVPITSPIMNPLGDPQSQMLQQQPSAPVPLSSQSSFPQPHLPGGQPFHGVQQPLGQTGMPPSFSKPNIEGAPGAPIGNTFQHVQSLPTKKITKKPIPDEHLILKTTFEDLIQRCLSSATDPQTKRKLDDASKRLEFLYDKLREQTLSPTITSGLHNIARSIETRNYSEGLTMHTHIVSTSNFSETSAFMPVLKVVLTQANKLGV

SEQ ID NO: 325848 - protein, 1233 aa, Artificial Sequence
  derived and/or modified sequence
MKLKEVDRTAMQAWSPAQNHPIYLATGTSAQQLDATFSTNASLEIFELDLSDPSLDMKSCATFSSSHRYHKLIWGPYKMDSKGDVSGVLIAGGENGNIILYDPSKIIAGDKEVVIAQNDKHTGPVRALDVNIFQTNLVASGANESEIYIWDLNNFATPMTPGAKTQPPEDISCIAWNRQVQHILASASPSGRATVWDLRKNEPIIKVSDHSNRMHCSGLAWHPDVATQMVLASEDDRLPVIQMWDLRFASSPLRVLENHARGILAIAWSMADPELLLSCGKDAKILCSNPNTGEVLYELPTNTQWCFDIQWCPRNPAVLSAASFDGRISVYSIMGGSTDGLRQKQVDKLSSSFGNLDPFGTGQPLPPLQIPQQTAQHSIVLPLKKPPKWIRRPVGASFSFGGKLVTFENVRMPSHQGAEQQQQQHHVFISQVVTEKEFLSRSDQLQQAVQSQGFINYCQKKIDASQTEFEKNVWSFLKVNFEDDSRGKYLELLGYRKEDLGKKIALALNKVDGANVALKDSDQVAQSDGEESPAAEEQLLGEHIKEEKEESEFLPSSGGTFNISVSGDIDGLITQALLTGNFESAVDLCLHDNRMADAIILAIAGGQELLARTQKKYFAKSQSKITRLITAVVMKNWKEIVESCDLKNWREALAAVLTYAKPDEFSALCDLLGTRLENEGDSLLQTQACLCYICAGNVEKLVACWTKAQDGSHPLSLQDLIEKVVILRKAVQLTQAMDTSTVGVLLAAKMSQYANLLAAQGSIAAALAFLPDNTNQPNIMQLRDRLCRAQGEPVAGHESPKIPYEKQQLPKGRPGPVAGHHQMPRVQTQQYYPHGENPPPPGFIMHGNVNPNAAGQLPTSPGHMHTQVPPYPQPQPYQPAQPYPFGTGGSAMYRPQQPVAPPTSNAYPNTPYISSASSYTGQSQLYAAQHQASSPTSSPATSFPPPPSSGASFQHGGPGAPPSSSAYALPPGTTGTLPAASELPASQRTENQSIQDQAPMLEGPQNGWNDPPALNRVPKKKKMPENFMPPVPITSPIMNPLGDPQSQMLQQQPSAPVPLSSQSSFPQPHLPGGQPFHGVQQPLGQTGMPPSFSKPNIEGAPGAPIGNTFQHVQSLPTKKITKKPIPDEHLILKTTFEDLIQRCLSSATDPQTKRKLDDASKRLEFLYDKLREQTLSPTITSGLHNIARSIETRNYSEGLTMHTHIVSTSNFSETSAFMPVLKVVLTQANKLGV

SEQ ID NO: 325849 - protein, 66 aa, Artificial Sequence
  derived and/or modified sequence
MKLKEVDRTAMQAWSPAQNHPIYLATGTSAQQLDATFSTNASLEIFELDLSDPSLDMKSCATFSSS

SEQ ID NO: 325850 - protein, 27 aa, Artificial Sequence
  derived and/or modified sequence
MKLKEVDRTAMQAWSPAQNHPIYLATG

SEQ ID NO: 325851 - protein, 165 aa, Artificial Sequence
  derived and/or modified sequence
MKLKEVDRTAMQAWSPAQNHPIYLATGTSAQQLDATFSTNASLEIFELDLSDPSLDMKSCATFSSSHRYHKLIWGPYKMDSKGDVSGVLIAGGENGNIILYDPSKIIAGDKEVVIAQNDKHTGPVRALDVNIFQTNLVASGANESEIYIWDLNNFATPMTPGAKT

SEQ ID NO: 325852 - protein, 166 aa, Artificial Sequence
  derived and/or modified sequence
MKLKEVDRTAMQAWSPAQNHPIYLATGTSAQQLDATFSTNASLEIFELDLSDPSLDMKSCATFSSSHRYHKLIWGPYKMDSKGDVSGVLIAGGENGNIILYDPSKIIAGDKEVVIAQNDKHTGPVRALDVNIFQTNLVASGANESEIYIWDLNNFATPMTPGAKTQ

SEQ ID NO: 325853 - DNA, 2910 bp, Artificial Sequence
  derived and/or modified sequence
atggtgaagctggtgctgctgagcatcgtgctgctgaaggtgaccgtgcccaagctgagcaacgacctgctgcagctggacttcatgcccatccacagaggcatcctggccatcgcctggagcatggccgaccccgagctgctgctgagctgcggcaaggacgccaagatcctgtgcagcaaccccaacaccggcgaggtgctgtacgagctgcccaccaacacccagtggtgcttcgacatccagtggtgccccagaaaccccgccgtgctgagcgccgccagcttcgacggcagaatcagcgtgtacagcatcatgggcggcagcaccgacggcctgagacagaagcaggtggacaagctgagcagcagcttcggcaacctggaccccttcggcaccggccagcccctgccccccctgcagatcccccagcagaccgcccagcacagcatcgtgctgcccctgaagaagccccccaagtggatcagaagacccgtgggcgccagcttcagcttcggcggcaagctggtgaccttcgagaacgtgagaatgcccagccaccagggcgccgagcagcagcagcagcagcaccacgtgttcatcagccaggtggtgaccgagaaggagttcctgagcagaagcgaccagctgcagcaggccgtgcagagccagggcttcatcaactactgccagaagaagatcgacgccagccagaccgagttcgagaagaacgtgtggagcttcctgaaggtgaacttcgaggacgacagcagaggcaagtacctggagctgctgggctacagaaaggaggacctgggcaagaagcacatcaaggaggagaaggaggagagcgagttcctgcccagcagcggcggcaccttcaacatcagcgtgagcggcgacatcgacggcctgatcacccaggccctgctgaccggcaacttcgagagcgccgtggacctgtgcctgcacgacaacagaatggccgacgccatcatcctggccatcgccggcggccaggagctgctggccagaacccagaagaagtacttcgccaagagccagagcaagatcaccagactgatcaccgccgtggtgatgaagaactggaaggagatcgtggagagctgcgacctgaagaactggagagaggccctggccgccgtgctgacctacgccaagcccgacgagttcagcgccctgtgcgacctgctgggcaccagactggagaacgagggcgacagcctgctgcagacccaggcctgcctgtgctacatctgcgccggcaacgtggagaagctggtggcctgctggaccaaggcccaggacggcagccaccccctgagcctgcaggacctgatcgagaaggtggtgatcctgagaaaggccgtgcagctgacccaggccatggacaccagcaccgtgggcgtgctgctggccgccaagatgagccagtacgccaacctgctggccgcccagggcagcatcgccgccgccctggccttcctgcccgacaacaccaaccagcccaacatcatgcagctgagagacagactgtgcagagcccagggcgagcccgtggccggccacgagagccccaagatcccctacgagaagcagcagctgcccaagggcagacccggccccgtggccggccaccaccagatgcccagagtgcagacccagcagtactacccccacgtgagaatcgcccccaccgtgaccacctggagcaacaagacccccaccgccctgcccagccacccccccgccgccagccccagcgacacccagggcgagaacccccccccccccggcttcatcatgcacggcaacgtgaaccccaacgccgccggccagctgcccaccagccccggccacatgcacacccaggtgcccccctacccccagccccagccctaccagcccgcccagccctaccccttcggcaccggcggcagcgccatgtacagaccccagcagcccgtggccccccccaccagcaacgcctaccccaacaccccctacatcagcagcgccagcagctacaccggccagagccagctgtacgccgcccagcaccaggccagcagccccaccagcagccccgccaccagcttcccccccccccccagcagcggcgccagcttccagcacggcggccccggcgccccccccagcagcagcgcctacgccctgccccccggcaccaccggcccccagaacggctggaacgacccccccgccctgaacagagtgcccaagaagaagaagatgcccgagaacttcatgccccccgtgcccatcaccagccccatcatgaaccccctgggcgacccccagagccagatgctgcagcagcagcccagcgcccccgtgcccctgagcagccagagcagcttcccccagccccacctgcccggcggccagcccttccacggcgtgcagcagcccctgggccagaccggcatgccccccagcttcagcaagcccaacatcgagggcgcccccggcgcccccatcggcaacaccttccagcacgtgcagagcctgcccaccaagaagatcaccaagaagcccatccccgacgagcacctgatcctgaagaccaccttcgaggacctgatccagagatgcctgagcagcgccaccgacccccagaccaagagaaagctggacgacgccagcaagagactggagttcctgtacgacaagctgagagagcagaccctgagccccaccatcaccagcggcctgcacaacatcgccagaagcatcgagaccagaaactacagcgagggcctgaccatgcacacccacatcgtgagcaccagcaacttcagcgagaccagcgccttcatgcccgtgctgaaggtggtgctgacccaggccaacaagctgggcgtgtag

SEQ ID NO: 325854 - DNA, 3702 bp, Artificial Sequence
  derived and/or modified sequence
atgaagctgaaggaggtggacagaaccgccatgcaggcctggagccccgcccagaaccaccccatctacctggccaccggcaccagcgcccagcagctggacgccaccttcagcaccaacgccagcctggagatcttcgagctggacctgagcgaccccagcctggacatgaagagctgcgccaccttcagcagcagccacagataccacaagctgatctggggcccctacaagatggacagcaagggcgacgtgagcggcgtgctgatcgccggcggcgagaacggcaacatcatcctgtacgaccccagcaagatcatcgccggcgacaaggaggtggtgatcgcccagaacgacaagcacaccggccccgtgagagccctggacgtgaacatcttccagaccaacctggtggccagcggcgccaacgagagcgagatctacatctgggacctgaacaacttcgccacccccatgacccccggcgccaagacccagccccccgaggacatcagctgcatcgcctggaacagacaggtgcagcacatcctggccagcgccagccccagcggcagagccaccgtgtgggacctgagaaagaacgagcccatcatcaaggtgagcgaccacagcaacagaatgcactgcagcggcctggcctggcaccccgacgtggccacccagatggtgctggccagcgaggacgacagactgcccgtgatccagatgtgggacctgagattcgccagcagccccctgagagtgctggagaaccacgccagaggcatcctggccatcgcctggagcatggccgaccccgagctgctgctgagctgcggcaaggacgccaagatcctgtgcagcaaccccaacaccggcgaggtgctgtacgagctgcccaccaacacccagtggtgcttcgacatccagtggtgccccagaaaccccgccgtgctgagcgccgccagcttcgacggcagaatcagcgtgtacagcatcatgggcggcagcaccgacggcctgagacagaagcaggtggacaagctgagcagcagcttcggcaacctggaccccttcggcaccggccagcccctgccccccctgcagatcccccagcagaccgcccagcacagcatcgtgctgcccctgaagaagccccccaagtggatcagaagacccgtgggcgccagcttcagcttcggcggcaagctggtgaccttcgagaacgtgagaatgcccagccaccagggcgccgagcagcagcagcagcagcaccacgtgttcatcagccaggtggtgaccgagaaggagttcctgagcagaagcgaccagctgcagcaggccgtgcagagccagggcttcatcaactactgccagaagaagatcgacgccagccagaccgagttcgagaagaacgtgtggagcttcctgaaggtgaacttcgaggacgacagcagaggcaagtacctggagctgctgggctacagaaaggaggacctgggcaagaagatcgccctggccctgaacaaggtggacggcgccaacgtggccctgaaggacagcgaccaggtggcccagagcgacggcgaggagagccccgccgccgaggagcagctgctgggcgagcacatcaaggaggagaaggaggagagcgagttcctgcccagcagcggcggcaccttcaacatcagcgtgagcggcgacatcgacggcctgatcacccaggccctgctgaccggcaacttcgagagcgccgtggacctgtgcctgcacgacaacagaatggccgacgccatcatcctggccatcgccggcggccaggagctgctggccagaacccagaagaagtacttcgccaagagccagagcaagatcaccagactgatcaccgccgtggtgatgaagaactggaaggagatcgtggagagctgcgacctgaagaactggagagaggccctggccgccgtgctgacctacgccaagcccgacgagttcagcgccctgtgcgacctgctgggcaccagactggagaacgagggcgacagcctgctgcagacccaggcctgcctgtgctacatctgcgccggcaacgtggagaagctggtggcctgctggaccaaggcccaggacggcagccaccccctgagcctgcaggacctgatcgagaaggtggtgatcctgagaaaggccgtgcagctgacccaggccatggacaccagcaccgtgggcgtgctgctggccgccaagatgagccagtacgccaacctgctggccgcccagggcagcatcgccgccgccctggccttcctgcccgacaacaccaaccagcccaacatcatgcagctgagagacagactgtgcagagcccagggcgagcccgtggccggccacgagagccccaagatcccctacgagaagcagcagctgcccaagggcagacccggccccgtggccggccaccaccagatgcccagagtgcagacccagcagtactacccccacggcgagaacccccccccccccggcttcatcatgcacggcaacgtgaaccccaacgccgccggccagctgcccaccagccccggccacatgcacacccaggtgcccccctacccccagccccagccctaccagcccgcccagccctaccccttcggcaccggcggcagcgccatgtacagaccccagcagcccgtggccccccccaccagcaacgcctaccccaacaccccctacatcagcagcgccagcagctacaccggccagagccagctgtacgccgcccagcaccaggccagcagccccaccagcagccccgccaccagcttcccccccccccccagcagcggcgccagcttccagcacggcggccccggcgccccccccagcagcagcgcctacgccctgccccccggcaccaccggcaccctgcccgccgccagcgagctgcccgccagccagagaaccgagaaccagagcatccaggaccaggcccccatgctggagggcccccagaacggctggaacgacccccccgccctgaacagagtgcccaagaagaagaagatgcccgagaacttcatgccccccgtgcccatcaccagccccatcatgaaccccctgggcgacccccagagccagatgctgcagcagcagcccagcgcccccgtgcccctgagcagccagagcagcttcccccagccccacctgcccggcggccagcccttccacggcgtgcagcagcccctgggccagaccggcatgccccccagcttcagcaagcccaacatcgagggcgcccccggcgcccccatcggcaacaccttccagcacgtgcagagcctgcccaccaagaagatcaccaagaagcccatccccgacgagcacctgatcctgaagaccaccttcgaggacctgatccagagatgcctgagcagcgccaccgacccccagaccaagagaaagctggacgacgccagcaagagactggagttcctgtacgacaagctgagagagcagaccctgagccccaccatcaccagcggcctgcacaacatcgccagaagcatcgagaccagaaactacagcgagggcctgaccatgcacacccacatcgtgagcaccagcaacttcagcgagaccagcgccttcatgcccgtgctgaaggtggtgctgacccaggccaacaagctgggcgtgtag

SEQ ID NO: 325855 - DNA, 246 bp, Artificial Sequence
  derived and/or modified sequence
atgaagctgaaggaggtggacagaaccgccatgcaggcctggagccccgcccagaaccaccccatctacctggccaccggcaccagcgcccagcagctggacgccaccttcagcaccaacgccagcctggagatcttcgagctggacctgagcgaccccagcctggacatgaagagctgcgccaccttcagcagcagccacagataccacaagctgatctggggcccctacaagatggacagctag

SEQ ID NO: 325856 - DNA, 201 bp, Artificial Sequence
  derived and/or modified sequence
atgaagctgaaggaggtggacagaaccgccatgcaggcctggagccccgcccagaaccaccccatctacctggccaccggcaccagcgcccagcagctggacgccaccttcagcaccaacgccagcctggagatcttcgagctggacctgagcgaccccagcctggacatgaagagctgcgccaccttcagcagcagctag

SEQ ID NO: 325857 - DNA, 84 bp, Artificial Sequence
  derived and/or modified sequence
atgaagctgaaggaggtggacagaaccgccatgcaggcctggagccccgcccagaaccaccccatctacctggccaccggctag

SEQ ID NO: 325858 - DNA, 2910 bp, Artificial Sequence
  derived and/or modified sequence
atggtcaaactggtgcttttgtcaatcgtgttgctcaaggtcactgtcccgaaattgtccaacgaccttttacagctggactttatgcctattcaccgcgggattctggctattgcttggtccatggcggaccccgaactcctcctaagttgcggaaaagacgctaaaatcctctgctctaaccctaatacaggagaggtgctttatgagctgccgacaaacacgcaatggtgtttcgatatacagtggtgcccccggaacccagctgtcctgagtgcggcttcctttgatggcaggatttccgtctactccatcatgggcggctctactgatggactgaggcagaaacaggtggataaactaagctcgagtttcgggaatttagatcctttcggaaccgggcaaccactgcctcctctgcagatccctcagcagactgctcagcacagcatcgtgttgccgctcaagaagccacccaaatggatcagacggcccgtgggcgcttctttttccttcgggggcaaactggtcacgtttgagaatgttcggatgccctctcatcaaggtgcggaacaacagcagcaacagcaccacgtattcattagccaggttgtgaccgagaaggaattcctgagtcggagcgaccaactgcagcaggccgttcagtctcagggattcatcaactattgccagaaaaaaatagacgctagccagacggaattcgagaagaacgtctggtccttcctgaaggtcaactttgaggacgattccagggggaagtacctcgaattgttaggctatcgcaaggaggacctcgggaaaaagcatatcaaagaggaaaaagaggagtcagagttcctgccaagttctggcggaacatttaatatttctgtcagcggggacatcgatgggctgatcacacaggctcttctcaccgggaattttgaaagcgccgtcgacttatgcctacacgataatcggatggccgatgctatcatcctcgcaatcgcggggggccaggaactactggccaggacacagaagaagtactttgccaaatctcagtccaagataacaaggcttatcaccgctgttgtgatgaagaactggaaagaaattgtggaatcatgtgaccttaagaactggagggaggctctcgctgcagtgctgacctatgctaagcctgacgagttcagcgccctatgcgacctcttgggcacccgcctggagaatgagggagattccctgctgcaaacccaggcctgtctttgctatatctgcgcgggtaatgtggaaaaactggtggcctgctggacgaaggcccaggatggatctcacccgcttagcctccaggacctgattgagaaagtcgtgatcctgcgaaaggctgtgcaattgacccaggcgatggatacttctacagtaggagtactgctggccgccaagatgagtcaatatgccaatctgctggccgcccagggctctatcgctgccgccctcgccttcctgcccgataatactaatcagcccaacatcatgcagttacgggaccggctgtgtagagcacagggcgagccagttgctggacacgagagccccaagatcccttatgagaagcaacagctgcccaaaggcagaccgggcccagtggctggtcaccaccagatgccaagagtccagacacagcagtattatcctcatgttaggatcgcccccacagtgaccacttggtctaataaaacccctaccgcgctgcccagccaccctcctgctgcaagcccttccgatacacagggggaaaatcctcctccacccggatttataatgcacggaaatgtgaatccaaacgctgctggacagctccccaccagtccggggcatatgcacacacaagtgccaccctaccctcaaccacaaccttatcagccggctcagccctatcccttcggtaccggaggatcagcaatgtatagacctcagcagccggtcgctccgccaacctcaaatgcctatcctaacaccccttacatttctagcgcttccagctatacaggtcagtcgcagctttatgcagcccaacaccaggcctccagtcctacaagtagccccgctacaagtttcccccctcctccatccagtggagcctccttccaacacggcggccccggggccccgccatcttcctccgcatatgcccttccccccggcacaaccgggccacaaaatggttggaacgatcctccagcgctgaatagagtgccaaagaaaaagaaaatgcccgagaatttcatgcctccagtgcccatcactagtccaattatgaaccctctgggcgacccccagtcacagatgttgcaacaacagccatccgcaccagtcccattatctagccagagctctttccctcagccacacttaccgggagggcagccattccacggcgtccagcaaccactgggccagaccgggatgccacctagtttctcaaaacccaacattgagggagcccccggagcacctatcgggaatacattccagcatgtgcagtctcttcccaccaagaagattacgaagaagcctatacccgatgaacacctgattctcaagactacttttgaagacctaatccaacgctgcttatcgtcagcaacagaccctcagaccaagcgcaaactggacgatgcttccaagcggctggaatttctctacgacaaattgagggaacagaccctaagcccaacaattaccagcggtctccacaacatcgctagatcaatagagactaggaattactcagaggggctaacgatgcacacacacatcgtctccacttctaatttcagcgagacgtctgcatttatgcccgtgttgaaagtagtgcttacacaggctaacaagctgggagtttag

SEQ ID NO: 325859 - DNA, 3702 bp, Artificial Sequence
  derived and/or modified sequence
atgaagttgaaggaggtcgatagaacagctatgcaggcttggagccccgctcagaatcatcccatttacctggcaacgggaacgtcggcccagcagctcgacgccacattctcaacgaacgccagcctggaaatctttgagctggatttaagcgatccgtccttagacatgaagtcatgtgccacattcagtagttcacaccgatatcacaagctgatttgggggccatacaaaatggattcgaagggagacgtgtccggcgtcctgatagctggcggagagaacggtaacataatcctgtatgacccaagcaaaataatcgctggagacaaagaagtggtgatagcacaaaatgacaaacatactgggccagtgagagccctggatgtaaatattttccaaactaatctcgtggctagcggggcaaatgagagcgaaatttacatttgggatttgaataactttgcaactcccatgacgccgggcgccaagacacagccaccagaggatattagttgtatagcttggaacaggcaggtgcaacatatcctggccagcgcttctccctccggacgtgccaccgtttgggatctaagaaaaaatgagcctatcatcaaagttagtgaccactctaatcgcatgcattgtagtggtctcgcctggcaccctgatgtggctacccagatggtgttggcatcggaggacgaccgtctgccagtgatacagatgtgggatttgcgctttgctagtagcccactgcgggtcctggagaaccacgctaggggcattcttgccatcgcctggtctatggccgatccagagttgctgctgagctgtggcaaagacgccaagattctctgcagtaaccccaacactggtgaagtcctctatgaactacctacaaacactcaatggtgtttcgatattcagtggtgccccagaaacccggccgtgctctccgccgccagctttgatggcaggatcagcgtctactctatcatgggaggttcaaccgacggcctccggcaaaaacaggtcgacaaattgagcagtagctttggcaacttggaccctttcggtacaggtcaacccctgccaccactgcagatccctcaacagactgcgcaacattcaattgtgctccccttgaagaaacctcccaagtggattcgcaggcctgtgggcgcctctttctcctttggtgggaaattggtcacttttgaaaatgtgcgcatgccttcgcaccagggggcagagcaacaacagcagcagcatcatgtattcataagccaggtagtcaccgaaaaagaatttctttctagatcagaccaactccagcaggccgtacaatcacagggctttataaattattgtcaaaagaagatcgatgcttcccagacggagttcgagaagaatgtttggtcctttttgaaagtcaattttgaggatgacagccgcggaaagtatctagagttattgggttacagaaaggaggatcttggaaagaaaatcgcactggcactgaacaaggtggatggggctaatgttgccttaaaggattccgatcaggtggcgcagtcagacggggaggaatccccggcggcagaagagcagctgctgggcgaacacatcaaggaggaaaaggaagagtccgagttccttccgagctcgggcggaacttttaatataagcgtaagcggcgacattgacggactgattacccaagccctcctgaccgggaactttgagagtgctgtagatttgtgcctgcatgataacagaatggcagatgcaatcatcctggccattgctgggggccaggaactgctggcgaggactcagaaaaaatacttcgcgaagtctcagagcaagataacccgcctgataactgccgtcgtcatgaagaactggaaggaaattgtcgagagctgtgatttgaagaattggagggaggcactcgccgctgtactgacatatgccaagcctgatgagttcagtgccctgtgcgacctgctgggaactcggttggagaacgagggagatagcttgttacagactcaggcatgtctttgctacatctgcgcaggcaacgtggaaaaactcgtcgcctgttggactaaggcccaggacggaagtcacccactaagtcttcaggacctcattgaaaaggttgtgatcctacggaaggcagtgcagctgactcaggcgatggatacgtcaaccgtgggggtgcttcttgctgccaagatgagccagtacgccaatctgttggcggcccagggctccatagccgcagctctagcatttctccctgacaatacaaaccaacccaatattatgcaactccgcgaccgcttatgtagagcccagggagagccggttgccgggcacgagtcccctaagattccctatgagaagcagcagctgccaaaaggtcgccccggacctgtggctgggcaccaccagatgcctcgcgtccagactcaacagtattacccccatggcgaaaaccccccaccccccggattcataatgcacggcaacgtgaatccgaacgctgccggccagctgcctacatctcccggacatatgcacacacaggtccctccctatccccagccacagccatatcaacctgctcagccttaccccttcgggaccggaggcagtgcaatgtatcgacctcagcagcccgtggccccgcccacttcaaacgcttaccctaacacaccatacatcagttccgcatcatcctatacaggccagtcacagctgtacgccgcacagcatcaagcgtcctctcctacatcatcacccgcgacctccttccctcctcccccatcctccggcgcgagtttccagcatggcggaccaggcgcgccgccaagcagctcagcatatgcgctgccaccaggaaccacagggacgctgccagccgctagtgagctgcccgcgtctcagcgcacggagaaccagagtattcaggaccaggcgcctatgttggagggtccccagaatggatggaatgatccacctgccctcaaccgggtcccaaaaaaaaaaaaaatgcctgaaaactttatgccgcccgtgccaataacaagtccaatcatgaatccactaggcgacccccagagtcagatgcttcagcagcagccctccgcgcccgttcctctttctagccaatcatcctttccgcaacctcacttgccgggtggtcaaccttttcacggtgttcagcagcccttaggccagaccggcatgcctccctcattctcaaaacccaacatcgagggagcccccggtgctccgataggcaacacttttcagcatgtgcaaagtttacctacaaagaaaattacaaagaagcctatccccgacgagcacctgattctgaaaactactttcgaagatctcatccagagatgcttgagcagtgccacagatccccaaacgaagcgaaaactcgatgatgccagcaagcgcctggagttcctgtatgacaagttacgcgaacagactttgagccccacgatcacttcagggctgcacaacatcgcacgcagcatcgagacaagaaactacagcgagggcctgacaatgcatacgcatatcgtgtccacgtccaattttagcgagacctctgcatttatgcctgtcctgaaggtcgttctgacacaagccaataagctgggagtatag

SEQ ID NO: 325860 - DNA, 246 bp, Artificial Sequence
  derived and/or modified sequence
atgaagctgaaggaggtggacaggacggcgatgcaggcgtggagccctgcccagaaccaccccatatacctagctacagggacctctgcccaacagctggatgccacattttctacaaacgcaagcctagaaatttttgaactggatctgtctgatccaagcttagacatgaagtcttgcgccacgttctcctcctcgcacagatatcacaagctcatctgggggccatataagatggactcatag

SEQ ID NO: 325861 - DNA, 201 bp, Artificial Sequence
  derived and/or modified sequence
atgaaactcaaggaggttgatagaaccgcaatgcaagcatggtcccccgcacagaatcatccaatctacctcgccacaggtactagtgctcagcagcttgacgccacattcagcacaaatgcaagcttggaaatttttgaattagacctgagcgatccaagcctggatatgaagtcatgtgcaaccttctcgtcaagctag

SEQ ID NO: 325862 - DNA, 84 bp, Artificial Sequence
  derived and/or modified sequence
atgaagctcaaggaagtggatagaaccgctatgcaggcctggagtccagcccagaatcaccccatctacctggctaccgggtag

SEQ ID NO: 325863 - DNA, 2910 bp, Artificial Sequence
  derived and/or modified sequence
atggtgaagctggtgctgctgagcatcgtgctgctgaaggtgacagtgcccaagctgagcaatgacctgctgcagctggacttcatgcccatccaccggggcatcctggccatcgcctggagcatggctgaccctgagctgctgctgagctgtgggaaggatgccaagatcctgtgcagcaaccccaacacaggagaggtgctgtatgagctgcccaccaacacccagtggtgctttgacatccagtggtgccccaggaacccagctgtgctgtctgctgccagctttgatggccgcatctctgtgtacagcatcatgggcggcagcacagatggcctgcggcagaagcaggtggacaagctgagcagcagctttggaaacctggacccctttggaacaggccagcccctgccccccctgcagatcccccagcagacagcccagcacagcatcgtgctgcccctgaagaagccacccaagtggatcagaagacctgtgggcgccagcttctcctttggaggcaagctggtgacctttgaaaatgtgaggatgcccagccaccagggcgctgagcagcagcagcagcagcaccacgtgttcatcagccaggtggtgacagagaaggagttcctgagcagaagtgaccagctgcagcaggccgtgcagagccagggcttcatcaactactgccagaagaagattgatgccagccagacagaatttgagaagaatgtgtggagcttcctgaaggtgaactttgaagatgacagccggggcaagtacctggagctgctgggctacaggaaggaggacctgggcaagaagcacatcaaggaggagaaggaggagagcgagttcctgcccagcagcggcggcaccttcaacatctctgtgtctggggacattgatggcctcatcacccaggccctgctgaccggcaactttgaatctgctgtggacctgtgcctgcatgacaacaggatggctgatgccatcatcctggccatcgccggcggccaggagctgctggcccggacccagaagaagtactttgccaagagccagagcaagatcaccaggctcatcacagctgtggtgatgaagaactggaaggagatcgtggagagctgtgacctgaagaactggagggaggccctggccgctgtgctgacctacgccaagccagatgagttcagcgccctgtgtgacctgctgggcacccggctggagaatgaaggagacagcctgctgcagacccaggcctgcctgtgctacatctgtgctggaaatgtggagaagctggtggcctgctggaccaaggcccaggacggcagccaccccctgagcctgcaggacctgattgagaaggtggtgatcctgaggaaggctgtgcagctgacccaggccatggacaccagcacagtgggcgtgctgctggccgccaagatgagccagtatgccaacctgctggccgcccagggcagcattgctgctgccctggccttcctgcctgacaacaccaaccagcccaacatcatgcagctgcgggaccggctgtgccgggcccagggcgagcctgtggccggccacgagagccccaagatcccctatgagaagcagcagctgcccaagggccggcccggccctgtggccggccaccaccagatgccccgggtgcagacccagcagtactacccccacgtgcgcatcgcccccaccgtgaccacctggagcaacaagacccccacagccctgcccagccaccccccagctgccagccccagcgacacccagggcgagaaccccccacctcctggcttcatcatgcacggcaatgtgaaccccaatgctgctggccagctgcccaccagccctggccacatgcacacccaggtgcccccctacccccagccccagccctaccagcctgcccagccctacccctttggaactggaggcagcgccatgtaccggccccagcagcctgtggccccacccaccagcaatgcctaccccaacaccccctacatcagcagcgccagcagctacacaggccagagccagctgtatgctgcccagcaccaggccagcagccccaccagcagccctgccaccagcttccccccaccacccagcagcggggccagcttccagcacggcggccctggggccccacccagcagcagcgcctatgccctgcccccaggcaccaccggcccccagaatggctggaatgaccccccagccctgaacagagtgcccaagaagaagaagatgcctgagaacttcatgcctcctgtgcccatcaccagccccatcatgaaccccctgggggacccccagagccagatgctgcagcagcagcccagcgcccctgtgcccctgagcagccagagcagcttcccccagccccacctgcccggcggccagcccttccatggagtgcagcagcccctgggccagacaggcatgcctccttccttcagcaagcccaacattgaaggagcccctggggcccccatcggcaacaccttccagcacgtgcagagcctgcccaccaagaagatcaccaagaagcccatcccagatgagcacctgatcctgaagaccacctttgaagatctcatccagcgctgcctgagcagcgccacagacccccagaccaagaggaagctggatgatgccagcaagaggctggagttcctgtatgacaagctgcgggagcagaccctgagccccaccatcaccagcggcctgcacaacatcgcccggagcattgagaccaggaactacagcgagggcctgaccatgcacacccacatcgtgtccaccagcaacttcagcgagaccagcgccttcatgcctgtgctgaaggtggtgctgacccaggccaacaagctgggcgtgtag

SEQ ID NO: 325864 - DNA, 3702 bp, Artificial Sequence
  derived and/or modified sequence
atgaagctgaaggaggtggacagaacagccatgcaggcctggagccctgcccagaaccaccccatctacctggccaccggcaccagcgcccagcagctggatgccaccttcagcaccaatgccagcctggagatctttgagctggacctgagtgaccccagcctggacatgaagagctgtgccaccttcagcagcagccaccgctaccacaagctgatctggggcccctacaagatggacagcaaaggagatgtgtctggagtgctgattgctggaggagaaaatggaaacatcatcctgtatgaccccagcaagatcatcgccggggacaaggaggtggtgattgcccagaatgacaagcacacaggccctgtgcgggccctggatgtgaacatcttccagaccaacctggtggccagcggggccaatgaaagtgagatctacatctgggacctgaacaactttgccacccccatgacccctggggccaagacccagcccccagaggacatcagctgcatcgcctggaaccggcaggtgcagcacatcctggccagcgccagccccagcggccgggccaccgtgtgggacctgaggaagaatgagcccatcatcaaggtgtctgaccacagcaacaggatgcactgcagcggcctggcctggcacccagatgtggccacccagatggtgctggcctctgaagatgaccggctgcctgtgatccagatgtgggacctgcgctttgccagcagccccctgcgggtgctggagaaccacgcccggggcatcctggccatcgcctggagcatggctgaccctgagctgctgctgagctgtgggaaggatgccaagatcctgtgcagcaaccccaacacaggagaggtgctgtatgagctgcccaccaacacccagtggtgctttgacatccagtggtgccccaggaacccagctgtgctgtctgctgccagctttgatggccgcatctctgtgtacagcatcatgggcggcagcacagatggcctgcggcagaagcaggtggacaagctgagcagcagctttggaaacctggacccctttggaacaggccagcccctgccccccctgcagatcccccagcagacagcccagcacagcatcgtgctgcccctgaagaagccacccaagtggatcagaagacctgtgggcgccagcttctcctttggaggcaagctggtgacctttgaaaatgtgaggatgcccagccaccagggcgctgagcagcagcagcagcagcaccacgtgttcatcagccaggtggtgacagagaaggagttcctgagcagaagtgaccagctgcagcaggccgtgcagagccagggcttcatcaactactgccagaagaagattgatgccagccagacagaatttgagaagaatgtgtggagcttcctgaaggtgaactttgaagatgacagccggggcaagtacctggagctgctgggctacaggaaggaggacctgggcaagaagatcgccctggccctgaacaaggtggatggagccaacgtggccctgaaggacagcgaccaggtggcccagagtgatggagaggagagccctgctgctgaggagcagctgctgggggagcacatcaaggaggagaaggaggagagcgagttcctgcccagcagcggcggcaccttcaacatctctgtgtctggggacattgatggcctcatcacccaggccctgctgactggaaactttgagagcgctgtggacctgtgcctgcatgacaacaggatggctgatgccatcatcctggccatcgccggcggccaggagctgctggcccggacccagaagaagtactttgccaagagccagagcaagatcaccaggctcatcacagctgtggtgatgaagaactggaaggagatcgtggagagctgtgacctgaagaactggagggaggccctggccgctgtgctgacctacgccaagccagatgagttcagcgccctgtgtgacctgctgggcacccggctggagaatgaaggagacagcctgctgcagacccaggcctgcctgtgctacatctgtgctggaaatgtggagaagctggtggcctgctggaccaaggcccaggacggcagccaccccctgagcctgcaggacctgattgagaaggtggtgatcctgaggaaggctgtgcagctgacccaggccatggacaccagcacagtgggcgtgctgctggccgccaagatgagccagtatgccaacctgctggccgcccagggcagcattgctgctgccctggccttcctgcctgacaacaccaaccagcccaacatcatgcagctgcgggaccggctgtgccgggcccagggcgagcctgtggccggccacgagagccccaagatcccctatgagaagcagcagctgcccaagggccggcccggccctgtggccggccaccaccagatgccccgggtgcagacccagcagtactacccccacggggagaaccccccacctcctggcttcatcatgcacggcaatgtgaaccccaatgctgctggccagctgcccaccagccctggccacatgcacacccaggtgcccccctacccccagccccagccctaccagcctgcccagccctacccctttggaactggaggcagcgccatgtaccggccccagcagcctgtggccccacccaccagcaatgcctaccccaacaccccctacatcagcagcgccagcagctacacaggccagagccagctgtatgctgcccagcaccaggccagcagccccaccagcagccctgccaccagcttccccccaccacccagcagcggggccagcttccagcacggcggccctggggccccacccagcagcagcgcctatgccctgcccccaggcaccaccggcaccctgcctgctgccagcgagctgcctgccagccagaggacagagaaccagagcatccaggaccaggcccccatgctggagggcccccagaatggctggaatgaccccccagccctgaacagagtgcccaagaagaagaagatgcctgagaacttcatgcctcctgtgcccatcaccagccccatcatgaaccccctgggggacccccagagccagatgctgcagcagcagcccagcgcccctgtgcccctgagcagccagagcagcttcccccagccccacctgcccggcggccagcccttccatggagtgcagcagcccctgggccagacaggcatgcctccttccttcagcaagcccaacattgaaggagcccctggggcccccatcggcaacaccttccagcacgtgcagagcctgcccaccaagaagatcaccaagaagcccatcccagatgagcacctgatcctgaagaccacctttgaagatctcatccagcgctgcctgagcagcgccacagacccccagaccaagaggaagctggatgatgccagcaagaggctggagttcctgtatgacaagctgcgggagcagaccctgagccccaccatcaccagcggcctgcacaacatcgcccggagcattgagaccaggaactacagcgagggcctgaccatgcacacccacatcgtgtccaccagcaacttcagcgagaccagcgccttcatgcctgtgctgaaggtggtgctgacccaggccaacaagctgggcgtgtag

SEQ ID NO: 325865 - DNA, 246 bp, Artificial Sequence
  derived and/or modified sequence
atgaagctgaaggaggtggacagaacagccatgcaggcctggagccctgcccagaaccaccccatctacctggccaccggcaccagcgcccagcagctggatgccaccttcagcaccaatgccagcctggagatctttgagctggacctgagtgaccccagcctggacatgaagagctgtgccaccttcagcagcagccaccgctaccacaagctgatctggggcccctacaagatggacagctag

SEQ ID NO: 325866 - DNA, 201 bp, Artificial Sequence
  derived and/or modified sequence
atgaagctgaaggaggtggacagaacagccatgcaggcctggagccctgcccagaaccaccccatctacctggccaccggcaccagcgcccagcagctggatgccaccttcagcaccaatgccagcctggagatctttgagctggacctgagtgaccccagcctggacatgaagagctgtgccaccttcagcagcagctag

SEQ ID NO: 325867 - DNA, 84 bp, Artificial Sequence
  derived and/or modified sequence
atgaagctgaaggaggtggacagaacagccatgcaggcctggagccctgcccagaaccaccccatctacctggccaccggctag

SEQ ID NO: 325868 - DNA, 2910 bp, Artificial Sequence
  derived and/or modified sequence
atggtgaagctggtgctgctgagcatcgtgctgctgaaggtgaccgtacctaagctgagcaatgatctgctgcaactcgacttcatgcccattcaccgggggatcttggccattgcatggtcgatggcggatcctgaactactgctatcttgcggtaaggacgctaaaatattgtgttccaatcccaatactggagaggtcctttacgagctgccaacgaacacacagtggtgctttgatattcagtggtgtcctcggaacccggcagtgctgagcgctgccagttttgatggcagaatcagcgtctactcgattatgggaggcagtacggacggactcagacaaaaacaggtggacaaattgtcctcatcctttggcaaccttgacccctttggcaccggccaacccctgcctccattgcagataccccagcaaacggctcagcactcgatcgtattgccgctgaaaaaaccgccgaagtggataaggaggcccgtgggcgcaagtttttcgttcggaggcaagctcgtgacatttgaaaacgtcagaatgccaagccatcagggcgcagaacaacagcagcaacagcaccacgtttttatatcacaggtcgtaaccgaaaaagagtttcttagtaggtctgatcagctgcagcaggctgtccagtcccagggtttcatcaactactgccaaaagaagatagacgcctcccagacagagttcgagaaaaacgtatggtccttcctcaaagttaatttcgaggatgatagccgcgggaaatacctggagttactgggctatcgcaaggaagaccttggaaaaaaacacataaaggaagaaaaggaagaaagcgagtttctgcccagttcagggggcacttttaatattagcgtgagcggagatatagacgggctaattacccaggccttacttaccggaaattttgagtcagccgtggatctatgcctgcacgacaatcgcatggccgacgcaatcatactggccatcgctggcggacaggaactgctcgcaagaacgcagaaaaagtatttcgcaaaatcccagtcgaagattacccggctgatcactgctgtggttatgaagaactggaaagagattgtggagtcatgcgatctgaagaactggagagaggcactggccgcagtcctaacctatgctaagcccgatgagtttagtgccctgtgtgacctgctggggactagactggaaaatgagggtgacagcctcctccagactcaggcgtgcttgtgttatatttgtgcaggaaacgtagaaaaacttgttgcatgctggactaaggctcaggatggatcccatcctctgtcactgcaggatctgatcgaaaaggttgtgatactgcggaaggccgtccagctcactcaagcaatggatacaagcactgtcggagttctcctggcagcaaagatgtcacaatatgctaacctgctcgccgcccaggggtcaatcgctgctgccctagccttcctaccagataataccaatcagccaaatataatgcaactgcgcgacagactgtgcagagctcagggtgaaccagtagccggccacgagtcgcccaagattccttacgaaaaacagcagttacctaaggggagaccagggcccgtagctggacaccaccagatgcctagagtacagacccaacagtactaccctcatgtgagaattgcccctactgtgacaacctggagcaacaagactccaaccgctttaccctctcacccacccgcggcgagcccctccgatacgcagggtgaaaaccccccgcccccaggttttatcatgcacggcaacgtgaaccctaacgcagctggccagttgccaactagcccaggacacatgcacacacaggtgcctccttatccccagccacagccttaccaacccgcccagccctacccgtttgggaccggggggtccgccatgtaccgcccccagcagccagtcgcacctcccacgtctaatgcttatcctaacactccctatatctcttccgcctcgagttacactggacagtcacagctctatgcagcgcagcatcaagcctcaagcccgacctccagtcccgcaacaagctttccgccaccacccagttctggtgcatcttttcagcacggcggaccaggtgcacccccatcatcatcggcttatgctctgcctcctggcaccactgggccgcaaaacgggtggaacgaccctccagccttgaatcgggtgcctaaaaaaaagaagatgccggaaaacttcatgcctcccgtcccaatcaccagcccgataatgaaccccttgggagacccacaaagccaaatgctgcagcagcagccatccgcccccgttcccctaagtagccaatcttcatttccccaaccacacctcccagggggacagcccttccatggggtacaacagcctctgggtcagactggcatgcctccaagtttttccaagccgaatatcgagggagcgccgggcgccccaatcggaaatacctttcaacacgtgcagagtctgccgacaaaaaagatcactaagaagccaatccctgatgaacatctcatactgaagactacgtttgaggatctgattcaacgctgcctatcatccgccactgacccccagaccaagcggaaacttgatgacgccagcaaaaggttagaattcctctacgataagctgagagaacagactctctcgccgaccatcacctcagggcttcacaacatcgccagatccattgaaacaagaaattattccgaaggactcactatgcacacccatatcgttagcacatctaatttctcagaaacttcggccttcatgcctgtgctgaaagttgtattgactcaggctaataagctcggcgtttag

SEQ ID NO: 325869 - DNA, 3702 bp, Artificial Sequence
  derived and/or modified sequence
atgaagctgaaggaggtggaccggaccgccatgcaggcctggagccccgcacagaatcatccaatctaccttgccacaggtactagcgcacagcagctggacgctacgttttccaccaacgcatccttagagatcttcgagctcgacttgagcgatccttctcttgatatgaagagctgtgctactttcagttcctcacataggtaccacaaactgatatggggcccttacaagatggattccaaaggggatgtgtctggcgtcctcatagccggaggcgaaaacggtaatatcattctctacgacccctccaaaatcatcgccggggacaaggaggtagttattgcacagaacgataagcacacaggaccagttcgtgccttggacgtcaacatcttccagacaaatttggtagcgtccggagccaacgagtcagaaatttatatctgggacctgaacaacttcgccacgcccatgacccctggagccaagacccaacccccggaagatatctcctgcatcgcatggaatagacaggtccagcacatactcgcaagtgctagcccctccggacgcgctacagtgtgggacctgaggaaaaacgaacccatcataaaagtgagtgatcattccaataggatgcactgtagcggcctggcctggcacccggatgtagccacccagatggtgctcgccagcgaggacgacagactccccgtcatccaaatgtgggatctgagatttgcctccagtccattgcgggtcctggagaaccatgctaggggtatacttgcgatcgcctggagcatggccgatcctgaactgctgctctcatgtggcaaggacgctaagattctttgctcaaaccccaacacgggggaagtactgtacgagctaccgactaacacccaatggtgctttgatatccaatggtgcccaagaaatcctgcggtgttaagcgccgcttcctttgacggaagaatttctgtgtatagcatcatgggtggctccacagacggcttaaggcagaaacaggtggataaactttcttcatcctttggcaatttggatccatttggaacgggtcaacccctcccacccctacagattccacagcaaacggcccaacactctattgtcctcccacttaagaaacccccaaagtggatccggcgtcccgtgggcgctagcttttcattcggtggaaagttggtgacgtttgagaacgtccggatgccctctcatcagggtgctgagcagcagcagcagcagcatcatgtattcattagccaggttgtaactgagaaggaatttctgtcccgctcagaccagcttcagcaggccgtgcagagtcagggattcataaactattgtcagaaaaagatcgacgcctctcaaaccgagtttgaaaagaatgtgtggagcttcttgaaggtgaatttcgaggatgatagccgaggcaagtacctggagctgctcggttacaggaaggaggacttggggaagaagatcgccctcgcgctcaataaagtcgacggcgcaaatgtggcgttaaaagacagcgaccaggtggcccagtccgatggtgaagagtcccctgcagccgaagaacagctactcggtgagcacattaaggaggagaaagaggaaagcgaattcctacctagtagcggcggcactttcaatatctcggtgtcgggagatatagacggactcattacgcaggcgttactcactggcaacttcgagagcgcagtcgatttgtgtctgcacgataaccgaatggccgatgcgatcattttagccatcgccgggggccaggaattacttgcccgcactcagaaaaaatactttgcaaaatcccagagcaaaattacccggctgatcaccgctgtcgtcatgaagaactggaaagaaatcgtcgagagctgtgacctaaagaactggagggaggccctggccgcagttttgacctacgcaaagccggacgagttctccgctctgtgtgaccttctcggcacacgcctcgaaaatgaaggcgatagcctgttgcaaactcaggcctgtttgtgctacatctgtgcaggaaatgtagagaagctggtcgcatgctggacaaaggcacaggacgggtcccatccattgtctcttcaggatctgatcgaaaaagtggtgattctgcgaaaagccgttcagctcactcaggctatggacacctccaccgtaggcgtcctgctcgctgcaaaaatgtcacagtacgcgaacttgctggcagcacaggggagcatcgctgccgccttagcgttcctccccgataacaccaaccagccaaatattatgcaactacgcgacaggctgtgccgcgcacagggtgaacctgtggctggccatgagagccctaaaatcccatatgaaaagcaacaactgcctaaaggccgtcccgggcccgttgctggccaccaccagatgcctcgcgtacaaacgcagcagtattatcctcacggcgagaaccctcctcctcctggatttatcatgcacgggaatgtcaatcccaatgctgccggtcagttgcccacatccccaggtcacatgcatacgcaggttcccccttatccacaaccacaaccatatcaacccgcccaaccgtacccttttggaactggcggttccgcaatgtaccgaccacagcagcccgtggcacccccgacctctaacgcatatccgaatacgccatatatctcctcagcatccagctatactggccagtctcaactgtatgctgcacagcatcaagccagctctcccacttctagccctgccactagcttcccacccccgccttcaagcggcgcaagcttccaacatggagggcccggtgcccctccatctagcagcgcgtatgctctgccacctggtacgaccggtactctgcccgctgcctccgaactgcccgcctctcagaggacagagaaccagtcgattcaagatcaggctccaatgttggaggggcctcagaatggatggaacgacccgcctgccctcaatcgcgttccaaagaagaaaaaaatgcctgagaacttcatgccccctgtgcctatcacttcacctatcatgaacccattaggcgacccccaatcacagatgctgcagcagcagcccagtgctccagtgcccctgtcatcacagtcctccttcccacaaccacacctgcccggcggccagccctttcacggagtgcagcagccactgggccagaccggcatgcccccgtcattttccaagcctaacattgaaggcgctcccggtgctccaattggaaataccttccagcatgtccagagcctgcccacaaaaaaaattaccaagaagcccatccctgatgagcatctcatcctgaagactacattcgaggacttgatccaaaggtgcttgagctcagctacagatccacagactaagagaaagctcgacgatgccagcaagcgtctggagttcctctacgataaactccgggaacagacactgtccccaacaattacaagcggtttacataacatcgcccggagcatagaaacccggaactattctgaagggctgacaatgcacacccatatcgtttctacctccaatttcagcgagacatctgcgttcatgccggtactgaaagttgtgctgacacaagcaaacaaactcggtgtctag

SEQ ID NO: 325870 - DNA, 246 bp, Artificial Sequence
  derived and/or modified sequence
atgaagctgaaggaggtggaccggaccgccatgcaggcctggagcccggcccagaaccatccaatctacctggctactggcactagtgcccagcagctggacgccacattctcaaccaatgctagcctcgagatatttgaactggatttaagcgatccctccttggacatgaagtcctgcgctactttttcatcctctcacagataccacaagctgatctggggcccatacaagatggattcttag

SEQ ID NO: 325871 - DNA, 201 bp, Artificial Sequence
  derived and/or modified sequence
atgaagctgaaggaggtggaccggaccgccatgcaggcctggagcccggcacagaaccacccaatctatctggccaccgggaccagcgctcaacaactggatgccactttctccaccaatgcttctctcgaaatcttcgagttggatctgtccgaccccagcttggacatgaagtcctgcgcgactttttctagctcctag

SEQ ID NO: 325872 - DNA, 84 bp, Artificial Sequence
  derived and/or modified sequence
atgaagctgaaggaggtggaccggaccgccatgcaggcctggagccctgctcagaatcatccgatataccttgcaaccgggtag

SEQ ID NO: 325873 - DNA, 2910 bp, Artificial Sequence
  derived and/or modified sequence
atggtcaagctcgttcttctgtccatcgtcctgctcaaggtgacagttccaaaacttagcaatgacttactacagctcgactttatgcccattcacaggggcatattggccattgcctggagcatggctgaccccgagcttctcctgtcttgtggaaaggacgccaagatcctttgctctaaccccaacaccggcgaagttctgtacgagctgccaacaaatacccagtggtgttttgacatccagtggtgtccacggaacccagccgtgctatctgcggcaagctttgacgggagaatcagcgtatattccatcatgggaggctcgaccgacggactgagacagaagcaagtggataagttatcgtcgtccttcggcaacttggaccccttcggtactggacaacctctgccccctctgcagatccctcagcagaccgcacagcactccatcgtgttacctttaaagaagccaccaaaatggattagacggccagtgggggctagtttctcctttggcggaaagctcgtcaccttcgaaaacgtgcggatgccttctcaccaaggcgcagaacagcagcagcaacaacaccatgtctttatttcccaggtggtgacagagaaggagttcctgtcccggtccgatcagctgcagcaggccgttcagagccaaggattcatcaactactgccaaaagaaaatagatgctagccagaccgagttcgagaagaatgtgtggtcatttttgaaggtgaatttcgaagatgactctcggggaaagtacctcgagctcctagggtaccgaaaagaagatcttggcaagaaacacataaaggaagaaaaggaggaatccgagtttctcccaagctccggaggaacatttaatattagcgttagcggcgatatcgacggactgatcacccaggccctcctgaccggcaacttcgagtcagcagtggatttatgtcttcacgacaatagaatggctgacgctattatcctggctatcgcgggaggacaggaactactggcgaggacacagaaaaaatacttcgcaaagagtcagtctaagattacccgcctgatcactgctgtggttatgaaaaattggaaggaaatagtggaatcttgtgacctgaaaaattggagggaggctctggccgcagtgctcacatacgctaaaccagacgagttttctgccttatgtgatcttctggggacccgcttggagaacgagggtgactcactgctccagacccaagcctgcttatgttatatctgtgctgggaacgttgagaaactggtagcatgttggaccaaagctcaggatggaagccatccactgagtttgcaggatctgatcgaaaaagtggtgatcttgaggaaggccgtgcaactgactcaagctatggatacctctacagttggtgttctgctcgccgcaaaaatgagccagtatgccaatctgcttgcagcgcagggatctattgccgcagccctggcctttcttcccgataataccaatcagcctaatatcatgcaactcagagatcgcctgtgccgcgcacagggggagcccgtagcaggacatgagtccccaaaaatcccgtatgagaaacaacaactgcccaagggtcgccctgggccagtcgcagggcaccatcaaatgccccgtgtgcagacacagcagtactacccacatgtacgaatcgccccaactgttactacgtggagcaacaagactcccaccgctttgccaagccaccctcctgcagccagtccctcagacacccagggcgaaaaccctccgccaccaggattcatcatgcacggtaacgtgaatccaaatgctgcaggtcagctccccacaagccccggacacatgcacactcaagtacccccttacccccagccgcagccctaccagcccgctcaaccatacccatttggcaccggcggatccgctatgtacagacctcaacaaccagtcgctccgcctacgtctaacgcctatccgaacacgccgtacatcagtagcgcctccagctacactggacagtcacagctttacgccgctcagcaccaagcatcctcaccaacatccagtcccgcaacttcattccccccacctccgagcagtggcgcatcattccagcacggagggcctggggctccgccatcctcctctgcctatgctttgcccccaggtacaaccggccctcagaacggatggaatgacccccctgccttaaatcgagtgcctaagaagaagaagatgcctgagaacttcatgcctccagtgcctattacttctcctattatgaatccattgggggatccccagtcacagatgctgcagcagcagccttcagcacctgttcccctgagcagccagtcatcttttccgcagccccacctgcccggaggccaaccttttcacggtgtgcagcaacccctcgggcagaccggtatgccccctagcttctccaagcccaatatagagggagctcctggggcacctattggtaatacgttccagcatgtacagtctcttcccacaaaaaagataaccaagaagcctattccagacgaacatctgatcctcaagacaacttttgaggaccttatacagaggtgcctgtcatctgccacagacccacagaccaagaggaagcttgacgatgcaagcaaacgactcgaatttctatacgacaagttgcgcgagcagactttgtcaccaacaatcacctcaggcttgcacaatatcgcaagatccattgagacaaggaactacagtgaaggcttgaccatgcacacccacattgtttccacttctaacttttcagagacctccgcctttatgcccgtcttaaaagtggtcctcacacaagccaacaagctcggcgtttag

SEQ ID NO: 325874 - DNA, 3702 bp, Artificial Sequence
  derived and/or modified sequence
atgaaactgaaggaggttgatcgaacagccatgcaggcatggagccctgcgcaaaaccaccccatctatcttgccacagggacgagtgcccaacagctcgatgccactttctcaactaacgcatcactagaaattttcgagctggacctatccgatccctccctggatatgaaaagctgcgcgacgttttccagctcccaccggtatcataagctcatttggggcccttacaagatggattcaaaaggagacgtttcaggcgtactcatcgctgggggtgaaaatgggaatatcatcctctacgacccaagcaagatcatagccggtgataaggaggtcgtcatcgcacagaatgacaagcataccgggcctgttagggctctggatgtgaacatctttcagaccaatctcgtggcaagcggggcaaacgaatcagaaatctacatttgggatctgaacaacttcgccactcctatgactcctggcgctaaaacccaacccccagaagacatcagttgtatagcatggaacagacaggttcagcatatcctggccagcgcctcgcccagtggacgggcaacggtttgggaccttcggaaaaacgaacccattatcaaagtgtctgatcatagcaatagaatgcattgctccggactcgcatggcatccagatgtggccacccaaatggtgctggcaagtgaagacgataggctccccgtgatacagatgtgggatttaaggttcgccagcagtccactgcgcgtgcttgaaaatcacgcacggggaatcctggcgattgcatggagtatggcagatccggaattgctcctttcttgtggaaaagacgcaaaaatcctgtgttcaaacccgaataccggagaggtgctgtatgagttgccaacaaatacgcagtggtgcttcgacatccagtggtgtccacgcaaccctgcagtgttgtcggctgctagtttcgacgggaggatcagcgtttattcgattatggggggatctacagacggccttaggcagaagcaagtcgacaagctttcatcgtcatttggaaatctcgacccttttggcactggtcagccactgccacctttacaaatcccccagcaaaccgcgcagcatagtatagttttaccactgaaaaagcctcctaaatggatccggaggcctgtcggggctagtttctcattcggcggtaaactggtcacttttgagaatgtcaggatgccctctcatcagggcgctgagcagcaacagcagcagcatcacgtgttcatcagccaggttgtcactgagaaggaatttctgagtcgctccgatcagctccagcaggcagtccagtctcaggggttcatcaattactgtcaaaaaaagatcgacgcatctcaaaccgagttcgagaagaacgtctggagttttttgaaagttaacttcgaggacgatagtcggggaaaatacctggagctgcttggctacaggaaagaagacttggggaagaaaattgccttggcactcaacaaagttgatggcgctaatgtcgcactgaaagactccgaccaagtggcacagagcgatggtgaagaaagccccgcagcggaggaacagctgctgggagaacatatcaaggaagaaaaagaggaatctgagtttttgcctagctcaggagggacgttcaacatcagcgtcagcggggatatcgatggccttattacccaagcgttgctgactggaaacttcgagtccgctgttgacctgtgcttgcacgacaaccgtatggccgacgctattattctcgctatcgctggcggtcaagaactgcttgcacggacgcaaaagaagtacttcgccaagtcccaatccaagatcacccgtttaataaccgccgtcgtcatgaaaaactggaaagagatagtggagtcttgcgacctgaaaaactggcgtgaagcactcgccgcagttctgacatacgctaagcctgatgagtttagcgccctatgcgacttactggggaccagactggagaacgaaggtgacagcctgctgcagacacaggcctgcctgtgctacatctgcgctggaaatgttgaaaagctcgttgcatgttggacaaaagcccaggacggaagccatccactgtccctgcaggatctcatagagaaagtagtcatactgaggaaggcagtgcagctgactcaagccatggatacatccacagtcggtgtgttgctcgcagctaagatgtcccagtatgctaacctgctggccgcacagggttctatcgccgctgctctcgcttttttgcctgacaacaccaatcaaccaaatattatgcaattgagggataggctctgtcgggcacagggtgagcctgttgccggacacgagtcccccaagatcccttatgagaaacaacaactcccaaaggggagaccaggcccagtagccggtcaccaccagatgcccagggttcagacccagcagtactatcctcacggagagaaccccccaccgccagggttcataatgcacggaaatgtcaacccaaacgccgctggccaactccccactagccctggtcacatgcacacacaagtgccaccctatccccagccgcaaccatatcagccggcacagccatatccctttggtaccgggggtagcgctatgtacagaccacaacagccagtggcgcctcctacaagcaatgcatatcccaataccccatacatttcatctgctagttcatacaccggacagtcgcagttatacgcggctcaacatcaggcatcaagccccacgagttctccggcaaccagcttccctccccctccgtcttctggagcaagttttcaacatggtggtcctggcgcacctccaagtagttctgcatacgctctgcctcctggcacaacaggcacccttccggctgccagtgagctccctgcctcccagcggacggagaatcagagcattcaggaccaggccccaatgctggaaggccctcagaacgggtggaatgatccgccagcactgaatcgagtgcctaagaagaagaaaatgcccgaaaacttcatgcccccagtcccgatcacgtctccaatcatgaaccctttgggagatccccagtcgcagatgctccagcaacagccctcggctcctgtgccattatccagccagtcttcattcccccagccgcaccttcccggtgggcagcccttccacggcgttcagcagcctctgggccaaaccggcatgcctccaagttttagcaaaccgaatattgagggagcacctggagctcctatcgggaataccttccagcacgtgcagtcacttcccacaaaaaagatcacaaaaaaacctataccggatgaacacctaatcctcaaaacgacctttgaagacctgatccagagatgcctttccagcgctacagaccctcagacaaagcgaaagctggacgacgccagtaagagactagaatttttatatgacaaattgagagaacagacactttctcctacgattaccagtgggttgcacaatatcgctagatctattgagactcgcaattactccgaaggactgacaatgcatacgcacattgtgtctacctctaacttctcagaaacgagcgcctttatgcctgtactaaaggtggtccttactcaggccaacaagctgggtgtgtag

SEQ ID NO: 325875 - DNA, 246 bp, Artificial Sequence
  derived and/or modified sequence
atgaaattgaaagaggtagataggacggccatgcaagcatggtctcctgctcagaaccaccctatatatttagcgacaggaacctccgcccagcagctggacgcgacattctcaacgaatgctagcctggaaatttttgagcttgacttgtctgaccctagcctggacatgaaatcctgcgccactttctcctccagccacagataccacaagctaatctggggaccctacaaaatggacagctag

SEQ ID NO: 325876 - DNA, 201 bp, Artificial Sequence
  derived and/or modified sequence
atgaagctgaaggaggtggacaggactgccatgcaggcatggagtccggcacagaatcatccgatctacctagcaacagggacttctgcccagcagctggacgctacgttctctacgaacgcttcattagaaattttcgagctggacttatccgacccaagccttgatatgaaaagttgcgcgactttcagcagttcatag

SEQ ID NO: 325877 - DNA, 84 bp, Artificial Sequence
  derived and/or modified sequence
atgaagcttaaggaggtggatcgtactgccatgcaagcttggtcccccgctcagaaccaccctatatacctcgcaaccggatag

SEQ ID NO: 325878 - DNA, 3447 bp, Artificial Sequence
  derived and/or modified sequence
atgccaggtatcgtgctgctgttacaaagaacttgatttgtttattttctgaacatgtcggtgatgttttcgtgaccagaaatacaccataggacacaggaacttttttttttagatggagttttgctctgtcacttaggctggagtgcagtggcaagatcttggctcactgcaacctctgcctcccaggttcaaacgattctcctgcctcagcctcctgagtagctgggattacaggcgcaagccaccatgccaggaaatttttatagttttataaaaattttatagctgggattacatgcatgcgccaccacgcccagctaattttcatagttttagtagagatggggttttaccatgttggccaggctggtctcaaacttctgacctcaagtgatctgcccacctttgcctcccaaagtgctgggaatacaggcatgggccaccgtaggaacttaatgtttatgtcagttatcagttagtctatggtaaaattggttttgttatccattgttttgcttaaagtcacagttcctaaattaagtaacgacttactgcagttagatttcatgcccatccatagggggattttggcaattgcttggagcatggcagatcctgaattgttactgagctgtggaaaagatgctaagattctctgctccaatccaaacacaggagaggtgttatatgaacttcccaccaacacacagtggtgcttcgatattcagtggtgtccccgaaatcctgctgtcttatcagctgcttcgtttgatgggcgtatcagtgtttattctatcatgggaggtagcacagatggtttaagacagaaacaagttgacaagctttcatcatcttttgggaatcttgatccctttggcacaggacagccccttcctccgttacaaattccacagcagactgctcagcatagtatagtgctgcctctgaagaagccgcccaagtggattcgaaggcctgttggtgcttctttttcatttggaggcaaactggttacgtttgagaatgtcagaatgccttctcatcagggagctgagcagcagcagcagcagcaccatgtgttcattagtcaggttgtaacagaaaaggagttcctcagccgatcagaccaacttcagcaggctgtgcagtcacaaggatttatcaattattgccaaaaaaaaattgatgcttctcagactgaatttgagaaaaatgtgtggtcctttttgaaggtaaactttgaggatgattctcgtggaaaataccttgaacttctaggatacagaaaagaagatctaggaaagaagcacattaaagaggaaaaagaagaatctgaatttctaccctcatctggaggaacatttaatatctctgtcagtggggacattgatggtttaattactcaggctttgctgacgggcaattttgagagtgctgttgacctttgtttacatgataaccgcatggccgatgccattatattggccatagcaggtggacaagaactcttggctcgaacccagaaaaaatacttcgcaaaatcccaaagcaaaattaccaggctcatcactgcagtggtgatgaagaactggaaagagattgttgagtcttgtgatcttaaaaattggagagaggctttagctgcagtattgacttatgcaaagccggatgaattttcagccctttgtgatcttttgggaaccaggcttgaaaatgaaggagatagcctcctgcagactcaagcatgtctctgctatatttgtgcagggaatgtagagaaattagttgcatgttggactaaagctcaagatggaagccaccctttgtcacttcaggatctgattgagaaagttgtcatcctgcgaaaagctgtgcaactcactcaagccatggacactagtactgtaggagttctcttggctgcgaagatgagtcagtatgccaatttgttggcagctcagggcagtattgctgcagccttggcttttcttcctgacaacaccaaccagccaaatatcatgcagcttcgtgacagactttgtagagcacaaggagagcctgtagcaggacatgaatcacctaaaattccgtacgagaaacagcagctccccaagggcaggcctggaccagttgctggccaccaccagatgccaagagttcaaactcaacaatattatccccatgttagaattgcccctactgtcactacctggagtaacaaaactcctactgcccttcccagccatccacctgcagcctctccctctgacacacagggagaaaatcctccacctccgggtttcataatgcatggaaatgttaatccaaatgctgctggtcagcttcccacatctccaggtcatatgcacacccaggtaccaccttatccacagccacagccttatcaaccagcccagccgtatcccttcggaacaggggggtcagcaatgtatcgacctcagcagcctgttgctcctcctacttcaaacgcttaccctaacaccccttacatatcttctgcttcttcctatactgggcagtctcagctgtacgcagcacagcaccaggcctcttcacctacctccagccctgctacttctttccctcctcccccttcctctggagcatccttccagcatggcggaccaggagctccaccatcatcttcagcttatgcactgcctcctggaacaacaggtcctcagaatggttggaatgaccctccagctttgaacagagtacccaaaaagaagaagatgcctgaaaacttcatgcctcctgttcccatcacatcaccaatcatgaacccgttgggtgacccccagtcacaaatgctgcagcaacagccttcagctccagtaccactgtcaagccagtcttcattcccacagccacatcttccaggtggccagcccttccatggcgtacagcaacctcttggtcaaacaggcatgccaccatctttttcaaagcccaatattgaaggtgccccaggggctcctattggaaataccttccagcatgtgcagtctttgccaacaaaaaaaattaccaagaaacctattccagatgagcacctcattctaaagaccacatttgaggatcttattcagcgctgcctttcttcagcaacagaccctcaaaccaagaggaagctagatgatgccagcaaacgtttggagtttctgtatgataaacttagggaacagacactttcaccaacaatcaccagtggtttacacaacattgcaaggagcattgaaactcgaaactactcagaaggattgaccatgcatacccacatagttagcaccagcaacttcagtgagacctctgctttcatgccagttctcaaagttgttctcacccaggccaataagctgggtgtctaaaaggacagcttctcttccactcaatattgccatttttccaaagaaacatgtt

SEQ ID NO: 325879 - DNA, 4278 bp, Artificial Sequence
  derived and/or modified sequence
cggaagtgttgggcgcagggcgtggctgcggctgcggctgccacgttggaacggaacgtggaggtggccctggccggggaggaggggcggcggcgaatgctgggagagtccgacgagcgctgcactaacgcaggatccggctgccgaaggtcctcgccagcaggatgaagttaaaggaagtagatcgtacagccatgcaggcatggagccctgcccagaatcaccccatttacctagcaacaggaacatctgctcagcaattggatgcaacatttagtacgaatgcttcccttgagatatttgaattagacctctctgatccatccttggatatgaaatcttgtgccacattctcctcttctcacaggtaccacaagttgatttgggggccttataaaatggattccaaaggagatgtctctggagttctgattgcaggtggtgaaaatggaaatattattctctatgatccttctaaaattatagctggagacaaggaagttgtgattgcccagaatgacaagcatactggcccagtgagagccttggatgtgaacattttccagactaatctggtagcttctggtgctaatgaatctgaaatctacatatgggatctaaataattttgcaaccccaatgacaccaggagccaaaacacagccgccagaagatatcagctgcattgcatggaacagacaagttcagcatattttagcatcagccagtcccagtggccgggccactgtatgggatcttagaaaaaatgagccaatcatcaaagtcagtgaccatagtaacagaatgcattgttctgggttggcatggcatcctgatgttgctactcagatggtccttgcctccgaggatgaccggttaccagtgatccagatgtgggatcttcgatttgcttcctctccacttcgtgtcctggaaaaccatgccagggggattttggcaattgcttggagcatggcagatcctgaattgttactgagctgtggaaaagatgctaagattctctgctccaatccaaacacaggagaggtgttatatgaacttcccaccaacacacagtggtgcttcgatattcagtggtgtccccgaaatcctgctgtcttatcagctgcttcgtttgatgggcgtatcagtgtttattctatcatgggaggtagcacagatggtttaagacagaaacaagttgacaagctttcatcatcttttgggaatcttgatccctttggcacaggacagccccttcctccgttacaaattccacagcagactgctcagcatagtatagtgctgcctctgaagaagccgcccaagtggattcgaaggcctgttggtgcttctttttcatttggaggcaaactggttacgtttgagaatgtcagaatgccttctcatcagggagctgagcagcagcagcagcagcaccatgtgttcattagtcaggttgtaacagaaaaggagttcctcagccgatcagaccaacttcagcaggctgtgcagtcacaaggatttatcaattattgccaaaaaaaaattgatgcttctcagactgaatttgagaaaaatgtgtggtcctttttgaaggtaaactttgaggatgattctcgtggaaaataccttgaacttctaggatacagaaaagaagatctaggaaagaagattgctttggccttgaacaaagtggatggagccaatgtggctcttaaagactctgaccaagtagcacagagtgatggggaggagagccctgctgctgaagagcagctcttgggagagcacattaaagaggaaaaagaagaatctgaatttctaccctcatctggaggaacatttaatatctctgtcagtggggacattgatggtttaattactcaggctttgctgacgggcaattttgagagtgctgttgacctttgtttacatgataaccgcatggccgatgccattatattggccatagcaggtggacaagaactcttggctcgaacccagaaaaaatacttcgcaaaatcccaaagcaaaattaccaggctcatcactgcagtggtgatgaagaactggaaagagattgttgagtcttgtgatcttaaaaattggagagaggctttagctgcagtattgacttatgcaaagccggatgaattttcagccctttgtgatcttttgggaaccaggcttgaaaatgaaggagatagcctcctgcagactcaagcatgtctctgctatatttgtgcagggaatgtagagaaattagttgcatgttggactaaagctcaagatggaagccaccctttgtcacttcaggatctgattgagaaagttgtcatcctgcgaaaagctgtgcaactcactcaagccatggacactagtactgtaggagttctcttggctgcgaagatgagtcagtatgccaatttgttggcagctcagggcagtattgctgcagccttggcttttcttcctgacaacaccaaccagccaaatatcatgcagcttcgtgacagactttgtagagcacaaggagagcctgtagcaggacatgaatcacctaaaattccgtacgagaaacagcagctccccaagggcaggcctggaccagttgctggccaccaccagatgccaagagttcaaactcaacaatattatccccatggagaaaatcctccacctccgggtttcataatgcatggaaatgttaatccaaatgctgctggtcagcttcccacatctccaggtcatatgcacacccaggtaccaccttatccacagccacagccttatcaaccagcccagccgtatcccttcggaacaggggggtcagcaatgtatcgacctcagcagcctgttgctcctcctacttcaaacgcttaccctaacaccccttacatatcttctgcttcttcctatactgggcagtctcagctgtacgcagcacagcaccaggcctcttcacctacctccagccctgctacttctttccctcctcccccttcctctggagcatccttccagcatggcggaccaggagctccaccatcatcttcagcttatgcactgcctcctggaacaacaggtacactgcctgctgccagtgagctgcctgcgtcccaaagaacagaaaaccagtctatccaagaccaggcacctatgttggaaggtcctcagaatggttggaatgaccctccagctttgaacagagtacccaaaaagaagaagatgcctgaaaacttcatgcctcctgttcccatcacatcaccaatcatgaacccgttgggtgacccccagtcacaaatgctgcagcaacagccttcagctccagtaccactgtcaagccagtcttcattcccacagccacatcttccaggtggccagcccttccatggcgtacagcaacctcttggtcaaacaggcatgccaccatctttttcaaagcccaatattgaaggtgccccaggggctcctattggaaataccttccagcatgtgcagtctttgccaacaaaaaaaattaccaagaaacctattccagatgagcacctcattctaaagaccacatttgaggatcttattcagcgctgcctttcttcagcaacagaccctcaaaccaagaggaagctagatgatgccagcaaacgtttggagtttctgtatgataaacttagggaacagacactttcaccaacaatcaccagtggtttacacaacattgcaaggagcattgaaactcgaaactactcagaaggattgaccatgcatacccacatagttagcaccagcaacttcagtgagacctctgctttcatgccagttctcaaagttgttctcacccaggccaataagctgggtgtctaaaaggacagcttctcttccactcaatattgccatttttccaaagaaacatgttaaaaaaaaaaattataagacatggactagtcctcattagcatgtttgcatagcaaccagtcaagagcatttacactatttctgctgatatactcaccttagaactgctcagaaccctggtgctttatttttgttttaatcttttgttgccagtgatgattttcctattctgcaaatagtgtatttcctggattacacatagtatggtttcctgaagtattctgataaatgtgttttttaaaacctcaatatactttttagaaaaggagcatctggttatgcataaagcagagctaaaactaaatttctttcatgtcctccctacttcctcagtgtcaatcagattaaagtgtgtaatcct

SEQ ID NO: 325880 - protein, 506 aa, Artificial Sequence
  derived and/or modified sequence
MAETPPPPTAGAESCSEEPARGGEWRPEEPRRAPAGGTDREGEAGPPPASPAGQSEPDSPVAAPFFLLYPGDGGAGFGVRPPPQQQRSWRTPPSPGSPLPFLLLSYPSGGGGSSGSGKHHPNYLMANERMNLMNMAKLSIKGLIESALNLGRTLDSDYAPLQQFFVVMEHCLKHGLKAKKTFLGQNKSFWGPLELVEKLVPEAAEITASVKDLPGLKTPVGRGRAWLRLALMQKKLSEYMKALINKKELLSEFYEPNALMMEEEGAIIAGLLVGLNVIDANFCMKGEDLDSQVGVIDFSMYLKDGNSSKGTEGDGQITAILDQKNYVEELNRHLNATVNNLQAKVDALEKSNTKLTEELAVANNRIITLQEEMERVKEESSYILESNRKGPKQDRTAEGQALSEARKHLKEETQLRLDVEKELEMQISMRQEMELAMKMLEKDVCEKQDALVSLRQQLDDLRALKHELAFKLQSSDLGVKQKSELNSRLEEKTNQMAATIKQLEQR

SEQ ID NO: 325881 - protein, 98 aa, Artificial Sequence
  derived and/or modified sequence
MAETPPPPTAGAESCSEEPARGGEWRPEEPRRAPAGGTDREGEAGPPPASPAGQSEPDSPVAAPFFLLYPGDGGAGFGVRPPPQQQRSWRTPPSPGSP

SEQ ID NO: 325882 - DNA, 87 bp, Artificial Sequence
  derived and/or modified sequence
atgagcggaacatcttcacacgaatcattctacgacagcctttccgatatgcaggaagaatctaaaaacacggatttctttccttag

SEQ ID NO: 325883 - DNA, 87 bp, Artificial Sequence
  derived and/or modified sequence
atgagcggcaccagcagccatgagagcttctatgacagcctgagtgacatgcaggaggagagcaagaacacagacttcttcccctag

SEQ ID NO: 325884 - DNA, 87 bp, Artificial Sequence
  derived and/or modified sequence
atgagcggcaccagcagccacgagagcttctacgacagcctgagcgacatgcaggaggagtctaagaatacggatttctttccctag

SEQ ID NO: 325885 - DNA, 87 bp, Artificial Sequence
  derived and/or modified sequence
atgagtggtacgtccagtcatgaatcgttctacgacagcctttccgatatgcaggaagagtcaaagaatactgatttctttccatag

SEQ ID NO: 325886 - DNA, 87 bp, Artificial Sequence
  derived and/or modified sequence
atgagcggcaccagcagccacgagagcttctacgacagcctgagcgacatgcaggaggagagcaagaacaccgacttcttcccctag

SEQ ID NO: 325887 - protein, 1001 aa, Artificial Sequence
  derived and/or modified sequence
MPQAQKKTTSVSLTIGSSSPKTGVTTAVIQPLSVPVQQVHSPTSYLCRPDGTTTAYFPPVFTKELQNTAVAEGQVVVLECRVRGAPPLQVQWFRQGSEIQDSPDFRILQKKPRSTAEPEEICTLVIAETFPEDAGIFTCSARNDYGSATSTAQLVVTSANTENCSYESMGESNNDHFQHFPPPPPILETSSLELASKKPSEIQQVNNPELGLSRAALQMQFNAAERETNGVHPSRGVNGLINGKANSNKSLPTPAVLLSPTKEPPPLLAKPKLDPLKLQQLQNQIRLEQEAGARQPPPAPRSAPPSPPFPPPPAFPELAACTPPASPEPMSALASRSAPAMQSSGSFNYARPKQFIAAQNLGPASGHGTPASSPSSSSLPSPMSPTPRQFGRAPVPPFAQPFGAEPEAPWGSSSPSPPPPPPPVFSPTAAFPVPDVFPLPPPPPPLPSPGQASHCSSPATRFGHSQTPAAFLSALLPSQPPPAAVNALGLPKGVTPAGFPKKASRTARIASDEEIQGTKDAVIQDLERKLRFKEDLLNNGQPRLTYEERMARRLLGADSATVFNIQEPEEETANQEYKVSSCEQRLISEIEYRLERSPVDESGDEVQYGDVPVENGMAPFFEMKLKHYKIFEGMPVTFTCRVAGNPKPKIYWFKDGKQISPKSDHYTIQRDLDGTCSLHTTASTLDDDGNYTIMAANPQGRISCTGRLMVQAVNQRGRSPRSPSGHPHVRRPRSRSRDSGDENEPIQERFFRPHFLQAPGDLTVQEGKLCRMDCKVSGLPTPDLSWQLDGKPVRPDSAHKMLVRENGVHSLIIEPVTSRDAGIYTCIATNRAGQNSFSLELVVAAKEAHKPPVFIEKLQNTGVADGYPVRLECRVLGVPPPQIFWKKENESLTHSTDRVSMHQDNHGYICLLIQGATKEDAGWYTVSAKNEAGIVSCTARLDVYTQWHQQSQSTKPKKVRPSASRYAALSDQGLDIKAAFQPEANPSHLTLNTALVESEDL

SEQ ID NO: 325888 - DNA, 3006 bp, Artificial Sequence
  derived and/or modified sequence
atgcctcaggctcaaaaaaagaccacgagcgtgagcctcaccatcgggagctcctcaccgaagaccggcgtcaccacagccgtgatccaaccactgtccgtgccagttcagcaggttcactcccccaccagttacctgtgcaggcctgatggcactaccactgcctacttccctcctgtgttcaccaaggaactgcaaaacacagccgtggccgaaggacaggtggttgttctggagtgccgggtgcgcggcgctcctccccttcaggtgcaatggttccggcagggttccgaaattcaggactctccagatttcaggatccttcagaagaaacctcgctccacggcagagcccgaggaaatttgtacactggtcattgccgagacctttcctgaggacgccgggattttcacttgctccgcgcggaacgactacggctcagctacctccacggcccagctggtcgtgactagtgccaacactgagaattgttcctatgagtcgatgggtgagtccaacaacgaccactttcagcatttccccccccccccgcctatcctagagaccagcagtctggagctggccagtaagaaaccgagtgagattcagcaagtaaataatcctgaactcggcttgtcaagggcagctctgcagatgcaatttaacgctgctgaaagagagaccaacggagttcacccaagtcggggggtgaacggtcttattaacgggaaagcaaattccaataagtcgctgccaacccccgcggtgctgttatcacctactaaagaacccccaccattgctagcaaagcccaagttggatccgctcaaactgcagcagctgcagaatcagattaggttagaacaggaggcgggcgcccggcaacctccccccgctcccaggtctgctccacctagccctccattccccccccccccagcttttcctgaattggccgcctgcacaccacccgctagtcctgaacctatgtcagccttggcatccaggtctgctcctgctatgcagtcttcggggagttttaactacgcaagacctaaacagtttattgctgcccagaatcttggtccagccagtggacacggaacacctgcttcatctccttccagtagtagtctcccttctccaatgtcccccacgccgaggcagttcggacgcgctccagtgccgccattcgcccagccttttggagccgagcctgaggccccctggggctcaagctcaccttctcctccaccaccccctcctcctgtgttctcaccaacagcagcttttccagtgccggacgtgttccctctccccccgcccccacccccgctgccatctcctggtcaagcttctcattgcagctctcctgcaacaagatttggccattcccagactccagctgcctttttaagcgctcttcttccaagtcagcccccgccagcagccgtgaatgcattaggactaccaaaaggcgtcacccccgccggttttcccaagaaagcctctcgtactgctcgaattgcctccgacgaggaaattcagggcactaaggacgcagtcatccaggaccttgagaggaagttaaggtttaaggaggatttgctcaacaacgggcagccccggctgacatatgaagagaggatggcaagaaggttactgggagccgactccgccaccgtgttcaatatccaggaacccgaagaagagacagccaaccaggagtacaaagttagcagctgtgaacagagactaatctccgagattgagtacaggctagagcgctctccggtcgacgaatctggagacgaggtgcaatatggggacgtcccagtagagaacggaatggccccattctttgagatgaagctcaagcactataaaatctttgagggtatgcccgtaacgtttacatgtcgcgtggctggaaatcccaagccgaagatctactggtttaaagatggcaaacaaatctcgccgaagagtgaccattacaccatccagcgcgaccttgacggcacatgctctctgcacaccaccgcttccacattggacgacgatggcaactacacaatcatggctgctaaccctcaaggccgtatcagttgcactgggagactaatggtgcaggcagttaatcaacgcggaagatcccccagatctccatcggggcacccacatgtgaggcgccccagaagcagatctcgcgacagcggcgatgagaatgagcccatccaggaaaggttcttccggcctcactttctgcaagcgcccggggacctgaccgtgcaggaaggaaagctctgtagaatggactgtaaggtgtccgggctcccaacccccgacttgtcctggcagctggacggaaagcctgtgcgcccagacagtgcccacaaaatgctggttcgcgaaaacggcgtgcattcattgattatcgagcccgtcacttcccgcgatgcagggatttatacctgtattgctaccaacagggctggtcagaattcctttagcctggagctcgtggtcgcagctaaggaagcccacaagcctccagtatttatcgaaaaacttcaaaacaccggagtagctgacggctaccctgtgagacttgagtgccgtgtcctgggtgtgccaccgccccagatcttttggaagaaggagaacgaatctctcacacactccacggaccgggtgagcatgcaccaggacaaccatggatacatatgccttctcattcagggcgcaactaaagaagatgccggatggtatacggtcagtgcaaaaaatgaagccggcattgtgagttgcacagctaggttggatgtttatacccaatggcaccagcagtcacaatcaacaaagcctaagaaggtgcgcccatcagcgagcagatacgccgctctgtccgaccaggggttggatataaaggctgcttttcagccagaggctaatcctagtcatctcactctcaataccgctctggtggagtctgaggatctgtag

SEQ ID NO: 325889 - DNA, 3006 bp, Artificial Sequence
  derived and/or modified sequence
atgccccaggcccagaagaagaccacctctgtgtccctgaccatcggcagcagcagccccaagacaggagtgaccacagctgtgatccagcccctgtctgtgcctgtgcagcaggtgcacagccccaccagctacctgtgcaggccagatggcaccaccacagcctacttcccccctgtgttcaccaaggagctgcagaacacagctgtggccgagggccaggtggtggtgctggagtgccgggtgcggggggccccacccctgcaggtgcagtggttccggcagggcagcgagatccaggacagcccagacttccgcatcctgcagaagaagcccaggagcacagctgagcctgaggagatctgcaccctggtgattgctgagaccttcccagaagatgctggcatcttcacctgcagcgccagaaatgactatggcagcgccaccagcacagcccagctggtggtgaccagcgccaacacagagaactgcagctatgagagcatgggagagagcaacaatgaccacttccagcacttccccccacctccacccatcctggagaccagcagcctggagctggccagcaagaagcccagcgagatccagcaggtgaacaaccctgagctgggcctgagcagagctgccctgcagatgcagttcaatgctgctgagcgggagaccaatggagtgcaccccagccggggcgtgaatggcctcatcaacgggaaggccaacagcaacaagagcctgcccaccccagctgtgctgctgagccccaccaaggagcccccacccctgctggccaagcccaagctggaccccctgaagctgcagcagctgcagaaccagatccggctggagcaggaggccggggcccggcagcccccaccagcccccaggtctgccccacccagcccccccttccccccacctccagccttccctgagctggccgcctgcaccccaccagccagccctgagcccatgtctgccctggccagccgcagcgccccagccatgcagagcagcggcagcttcaactatgcccggcccaagcagttcatcgccgcccagaacctgggccctgccagcggccacggcaccccagccagcagccccagcagcagcagcctgcccagccccatgagccccaccccccggcagtttggccgggcccctgtgcccccatttgcccagccctttggagctgagcctgaggccccctggggcagcagcagccccagccccccacctcctcctcctcctgtgttcagccccacagctgccttccctgtgcctgatgtgttccccctgcccccacctcctccacccctgcccagccctggccaggccagccactgcagcagccctgccacccgcttcggccacagccagaccccagctgccttcctgagcgccctgctgcccagccagcccccacctgctgctgtgaatgccctgggcctgcccaagggcgtgaccccagctggcttccccaagaaggccagcaggacagccagaattgccagtgatgaggagatccagggcaccaaggatgctgtgatccaggacctggagaggaagctgcgcttcaaggaggacctgctgaacaacggccagccccggctgacctatgaggagaggatggcccggcggctgctgggcgctgacagcgccaccgtcttcaacatccaggagcctgaggaggagacagccaaccaggagtacaaggtgagcagctgtgagcagaggctcatcagcgagattgagtaccgcctggagaggagccctgtggatgagagcggagatgaggtgcagtatggagatgtgcctgtggagaatggcatggcccccttctttgagatgaagctgaagcactacaagatctttgagggcatgcctgtgaccttcacctgccgggtggccggcaaccccaagcccaagatctactggttcaaggatggcaagcagatcagccccaagagtgaccactacaccatccagagggacctggatggcacctgcagcctgcacaccacagccagcaccctggatgatgatggcaactacaccatcatggccgccaacccccagggccgcatcagctgcaccggccgcctgatggtgcaggccgtgaaccagaggggccgcagccccaggagccccagcggccacccccacgtgcggcggcccaggagccgcagccgggacagcggagatgaaaatgagcccatccaggagcgcttcttccggccccacttcctgcaggcccctggggacctgactgtgcaggagggcaagctgtgcaggatggactgcaaggtgtctggcctgcccaccccagacctgtcctggcagctggatggcaagcctgtgcggccagattctgcccacaagatgctggtgagagaaaatggagtgcacagcctcatcatcgagcctgtgaccagcagagatgctggcatctacacctgcatcgccaccaacagagctggccagaacagcttcagcctggagctggtggtggccgccaaggaggcccacaagccccctgtgttcatcgagaagctgcagaacacaggagtggctgatggctaccctgtgcggctggagtgccgggtgctgggcgtgcccccaccccagatcttctggaagaaggaaaatgaaagcctgacccacagcacagacagagtgtccatgcaccaggacaaccacggctacatctgcctgctgatccagggcgccaccaaggaggatgctggctggtacacagtgtctgccaagaatgaggccggcatcgtgtcctgcacagcccggctggatgtgtacacccagtggcaccagcagagccagagcaccaagcccaagaaggtgcggcccagcgccagccgctatgctgccctgagtgaccagggcctggacatcaaggccgccttccagcctgaggccaaccccagccacctgaccctgaacacagccctggtggagagcgaggacctgtag

SEQ ID NO: 325890 - DNA, 3006 bp, Artificial Sequence
  derived and/or modified sequence
atgccccaggcccagaagaagaccaccagcgtgagcctgaccatcggttcatctagtccaaaaaccggcgtgacaaccgcagtgattcaaccacttagcgtgcctgttcagcaggttcattcccctaccagctacctctgccgtccagacgggacgactacagcctattttccacctgtctttaccaaagaattgcagaatacagctgtcgctgaaggacaagtcgtcgtcttggagtgccgggtgcgaggggcccctcctctgcaggtgcagtggtttcggcaaggctctgagatccaggattcccctgatttccgcatcctgcagaagaagcccaggtccactgcagagcccgaggagatttgcacccttgttatcgctgagacctttcctgaggatgcaggcatttttacttgttcagccaggaatgactatggcagtgcgaccagcaccgcccagttagtagtgacctccgctaatactgaaaattgtagttacgaatctatgggggagtctaacaacgaccatttccagcacttcccccccccgcctcctattctggagacctcctcgctggagctggcctctaagaagccttccgagattcagcaggtcaacaaccctgaactggggctgtccagggctgcccttcagatgcagttcaacgccgcagagcgagaaaccaatggggtccacccaagtcgtggagtaaatggacttatcaacggaaaagcaaactctaataagtccctgccaacacccgctgtcctactgtcccccaccaaggagcctcctcctctgctggcaaagcctaagcttgacccgctaaagttacagcaactccagaaccagatccggctggaacaagaagctggggcaagacagccccctccagcacctcgctccgccccgcctagccctccttttccaccccctcccgcctttcccgagttggctgcctgtacgccaccagcgtctccagagccaatgagcgcgttggccagccgtagtgcccccgccatgcaaagctctggtagttttaattatgccagaccgaaacagtttatcgcagctcaaaatctcggccctgccagcggccatgggacgcctgcaagtagccctagtagctccagcctgcccagtccaatgtctcccacgcctcgccagttcggcagagctcctgttcctccctttgcacagccatttggcgccgaacctgaagccccgtggggatcttctagtcccagccctccaccaccacctcctccagtcttttcccctaccgcagcatttcccgtgccggatgtatttccgctgccccccccaccacctcctctgcctagtcctggtcaggcatcacattgttcatctcccgccaccaggtttggccactcgcagactccagcggcatttctcagcgctctgttacctagccagccgcctccggctgcggtcaatgcactggggttgcccaagggtgtgacaccagctgggttcccgaagaaagcatctcgtaccgcgagaatcgcttctgatgaggaaattcagggaaccaaggacgctgtcattcaagatctagagcggaagttgaggtttaaagaagacctgctaaacaacggccagcccaggctgacatatgaggagcgcatggcacggaggctgttgggggcagactctgctactgtgttcaacatccaggagcccgaggaggagaccgccaaccaggagtataaagtctcaagctgcgagcaacggctgatcagcgagatagagtatcgactggaacgctcacctgttgacgaaagtggggatgaagtgcaatacggggatgttcccgtggagaacgggatggccccatttttcgaaatgaagctgaaacactataagatcttcgaaggtatgccagtgactttcacttgtcgcgtcgcaggaaaccccaagccaaagatttactggtttaaggacggcaagcaaatctcgccgaaatcagaccattacaccatccagcgagacctagatggtacttgttctctgcacaccactgcctccacattagacgatgacggcaattacaccatcatggccgctaacccacagggcaggatcagttgtaccggcaggctgatggtgcaggctgtcaatcagcggggaaggtctcccagatcaccaagcggtcatcctcacgtccgacggcccaggtcaaggagccgagattcaggagacgagaatgaacccatccaggagcgtttttttagaccccacttcctgcaggccccaggcgaccttactgtccaagaaggcaagctgtgcaggatggactgcaaggtctctggcctcccaaccccagacctgtcctggcagctggatggcaagccagtgagaccagactcggcgcacaagatgctagtccgagaaaacggtgtacattcccttataatagagcccgtcacaagccgcgatgccggcatttatacctgtatcgcaaccaatagggccggacaaaactcctttagcttagagctggtcgtcgcagcaaaagaagctcacaaacctcctgtcttcattgagaaactgcagaacacaggagtggccgatggatatccagtgagattagaatgccgggtgttaggggtcccacccccccaaatcttttggaagaaggaaaacgaatccttgacacacagcacggatcgcgtgagcatgcaccaggacaaccatggttacatttgcctcctgattcagggcgctactaaggaggatgccgggtggtacaccgtaagcgccaaaaacgaggcaggaatcgtgtcctgtacagccagattggatgtatacacccagtggcatcagcagtcacagagcacaaagcccaaaaaggtacgcccctccgcaagtagatatgctgcccttagtgaccagggattagacattaaggctgcttttcagccggaggccaaccccagccacctcaccctgaatacggcccttgtggaaagcgaggacctgtag

SEQ ID NO: 325891 - DNA, 4379 bp, Artificial Sequence
  derived and/or modified sequence
cctgagtcacccggcgggcgaggtataaagcccgatacctgccccgcgcccggtccgcggagcccgctgcagctcccgctcgctccggacgcggaatcgggcagcagcgggaggcggcccggagagccgagggaccctctgaagctccagcaactccagaaccaaatccgactggagcaggaggccggcgctcggcagcctccgccagccccgcgcagcgcgccgccctcgccccccttcccgccgccgcccgccttccccgagctcgcggcctgcacgccgcccgcgtccccggagcccatgagcgcgctggcctcccgctccgcccccgccatgcagtcctccggctccttcaactacgcgcgccccaagcagttcatcgccgcgcagaacctcgggcccgcgtcgggccacggcacgccggcctccagccccagctcgtccagcctcccgtcgcccatgtccccgacgccgaggcagttcggccgcgcccccgtgccgcccttcgcgcagcccttcggcgctgagcccgaggccccgtggggctcctcctcgccgtcgcccccgcccccgccacccccggtcttcagccccacggctgccttcccggtgcccgacgtgttcccactgccgccgccaccaccgccgctcccgagcccgggacaggcgtcccactgctcgtcgcctgccacccgcttcggccacagccagacgcccgcggccttcctcagcgctctgctgccctcgcagccgccgccggcggccgtcaacgccctggggctgcccaagggtgtcacccccgcaggatttccaaagaaggccagtagaactgctagaatagcctccgatgaggaaattcaaggcacaaaggatgctgttattcaagacctggaacgaaaacttcgcttcaaggaggacctcctgaacaatggccagccgaggttaacatacgaagaaagaatggctcgtcgactgctaggtgctgacagtgcaactgtctttaatattcaggagccagaagaggaaacagctaatcaggaatacaaagtctccagctgtgaacagagactcatcagtgaaatagagtacaggctagaaaggtctcctgtggatgaatcaggtgatgaagttcagtatggagatgtgcctgtggaaaatggaatggcaccattctttgagatgaagctgaaacattacaagatctttgagggaatgccagtaactttcacatgtagagtggctggaaatccaaagccaaagatctattggtttaaagatgggaagcagatctctccaaagagtgatcactacaccattcaaagagatctcgatgggacctgctccctccataccacagcctccaccctagatgatgatgggaattatacaattatggctgcaaaccctcagggccgcatcagttgtactggacggctaatggtacaggctgtcaaccaaagaggtcgaagtccccggtctccctcaggccatcctcatgtcagaaggcctcgttctagatcaagggacagtggagacgaaaatgaaccaattcaggagcgattcttcagacctcacttcttgcaggctcctggagatctgactgttcaagaaggaaaactctgcagaatggactgcaaagtcagtgggttaccaaccccagatctaagctggcaactagatggaaagcccgtacgccctgacagtgctcacaagatgctggtgcgtgagaacggggtgcactctctgatcatagagccagtcacgtcacgtgatgccggcatctacacatgtatagctaccaaccgagcaggacagaactcattcagcctggagcttgtggttgctgctaaagaagcacacaaaccccctgtgtttattgagaagctccaaaacacaggagttgctgatgggtacccagtgcggctggaatgtcgtgtattgggagtgccaccacctcagatattttggaagaaagaaaatgaatcactcactcacagcactgaccgagtgagcatgcaccaggacaaccacggctacatctgcctgctcattcagggagccacaaaagaagatgctgggtggtatactgtgtcagccaagaatgaagcagggattgtgtcctgtactgccaggctggacgtttacacccagtggcatcagcagtcacagagcaccaagccaaaaaaagtacggccctcagccagtcgctatgcagcactttcggaccagggactagacatcaaagcagcgttccaacctgaggccaacccatctcacctgacactgaatactgccttggtagaaagtgaggacctgtaatccagcattcttgttaaagctgaaacactgaaacagccattgccttgaccaacatattcctttgtcacattatgtaaaaggcagaaacatacctttgactataagaaattaaaaaaaaaacaccaaaataatatttttcttacttgatataccaaacttagtttaagtagataatgctaatacaaatatacacattgcacagaaaatacacatttactgtccaatttaaaactttggaattgctgtgattaaagtgatcaaaatgccaaaatactaaaggaaatcaattgttcacaggtaactacaatttgtattatctacaagtgcctttaaacacaagatataggtgctgtgtagcctgatagtgtgaaatgtttaatgagggagttgtaccacaaacagtactacaatgattctgaagcacagtgtattcagacagatacagtgaaccaagtgcaatatgtaaggatgaaagaagaagagatgacaaagaaatccaagtaaatgccttgtctttgcaaatgtttttatattaaatcataaggaaggaactacttgccttaaatgttaatatcaaaagagttttctaacaaggttaataccttagttcttaacattttttttctttatgtgtagtgttttcatgctaccttggtaggaaacttatttacaaaccatattaaaaggctaatttaaatataaataatataaagtgctctgaataaagcagaaatatattacagttcattccacagaaagcatccaaaccacccaaatgaccaaggcatatatagtatttggaggaatcaggggtttggaaggagtagggaggagaatgaaggaaaatgcaaccagcatgattatagtgtgttcatttagataaaagtagaaggcacaggagaggtagcaaaggccaggcttttctttggttttcttcaaacataggtgaaaaaaacactgccattcacaagtcaaggaacccagggccagctggaagtgtggagcacacatgctgtggagcacacatgctgtggagattgcagtgtgtctgaggtttgtgtagtagtggaagattttaggtatgtagagcaagttgaaaatggattgagactgcatggtggcataaatgagaaattgcctgtagcatctagtctacttgaaggaagtggagacataaggagagacaaaaacaggtttgtgccataaagtattttttcaaagacaccaagatgtggtaaatgaaaattattagttcacttccctgctgccatgaaactttgccttaagaaggtgctggattccaaggtttgtaaaggcatctcggtaaagactgctttttgaatgcatatgattttgcatcagctagactgagttgattctgaccagacttgatggttttaagtcggaaccgataaattttaaaaaggagaaaaaataatttgacctagtagtataaaacatgaggctttaatggtactttgctatgaaaagaaaacactgtattccttatgcaaaacacatgtatctttcattatttataagtggcctctcttagctcagttactcaattcatacgtagtattttttaaaataattttatatctgtgtaccaccccatatatttcatattactgtttcacatgtacagctttctacttctttgtaagaacaccaaccaaccaaggtttaagtgattaataggcttgagcaccgggtggcagatgttctatgcagtgtggttcaagtttctttgaccgcacttatatgcattgctaatatggaatttaagataccatacacagtctctcatggacctatctctattgtagaattatgacttatgtcttacttgccaaatttttctgaatgtgacctttttttgctgatttgctgggtttgggattaactagcattattttgccacctttatattgtatttataaaaaaaaaagtactatcaatcaatcatactactttggattgttgtgctggtgtaatgtggatttaacatcaataaatatttgacaaataatagttgcagttttgtgaagcaaaataaa

SEQ ID NO: 325892 - DNA, 6435 bp, Artificial Sequence
  derived and/or modified sequence
gtgaccacggaccaggcagtctctaatgaataggcaaggccacaacctccattctcccagaaaagaagaaatgctcatctgaaattcatcacctctctggagtcttcaaactgaccaagcattgaaaagaacacagtttcagaaaacagtttccagtgcctctggccttcctactgaaagcagacacagagtgcatgaagaccgttcaaatatgtcagggacctcctcccatgagtccttctatgactccctctcagacatgcaggaagaaagcaagaatactgacttcttcccgggcctttctgctttcctcagccaggaagagataaacaagagtcttgacctggcccggagagccatagccgactccgaaacagaagattttgactcggaaaaggagatctcgcagattttcagtacttctcctgcaagcctctgtgaacatccttcccataaggagaccaaattgggtgaacacgcctcgaggagacctcaggataacaggtcaacacctgtccagcctctggcagagaaacaaactaagagtatctcttcacctgtttcaaagaggaaacctgccatgtcacccctgctcaccaggcccagctacatccggagcctccgaaaggctgaaaagcgtggtgcaaaaactcccagcacaaacgtaaagcccaaaacgccacatcaaagaaagggtggcccccagagccagctgtgtgacaaggcagctaatttaattgaggagctaacatccatatttaaagccgcaaagccaagaaacagaagcccaaatggggagtcctcgtcaccagacagtgggtacctgtctcctaaaaatcagccgtcagccctgctgagtgcctcagccagccagagccctatggaagaccaaggggagatggaaagagaggtcaagtcccctggggccaggcattgctaccaggacaaccaggacttggcagtgccacacaaccgcaagtctcacccacagccccacagcgccctccacttcccagctgcacctcgattcatccaaaagctgaggagccaagaagtagcagaagggagccgagtttatctggagtgtagagtcactggaaaccccactcctcgagtcagatggttctgtgaagggaaagaactgcacaacactcctgatattcaaatccactgtgagggaggggacctccataccctgatcatagcagaggcctttgaggacgacacaggtcgctacacctgtttggctacgaatcccagcggctcagacacaacatctgctgaggtgttcattgaaggtgccagttcaacagattctgacagtgaaagtttagctttcaaatcaagagctggagctatgccacaagctcaaaagaaaacaacttctgtttccttgacaataggatcatcatctccaaagacaggggtgaccacagctgtgattcaaccactgtctgtccctgtgcaacaggttcacagtccaacttcatatctctgccgacctgatggaaccactactgcctactttcctcctgtttttacaaaggaactgcaaaacacagccgtggcggaaggccaggtggtggttctggagtgccgggtccgtggggcaccccctctgcaggtccagtggtttcggcaagggagtgaaatccaagactctccagatttccgaattctacagaaaaaacctagatctacagctgaacctgaggagatttgcaccctagttatcgctgagactttccctgaagatgcagggatctttacatgttcagcaagaaatgattatggatcagcaaccagcactgcccagctggttgtcacctcagccaacactgaaaactgtagttacgagtcaatgggagaatccaacaatgaccacttccaacactttccacctccccctccaatcttggagacaagttccttggagttggcttcaaagaaaccatctgagatccagcaggtgaacaaccctgagttaggcctgagcagggcagcccttcaaatgcaattcaatgctgctgagagggaaacgaacggagtccatcccagccgtggagtaaatggactgattaacggcaaagctaacagtaataaatctcttccaacaccagctgtcctgctttcacccactaaggagccaccacctctgcttgccaaaccaaaactggaccctctgaagctccagcaactccagaaccaaatccgactggagcaggaggccggcgctcggcagcctccgccagccccgcgcagcgcgccgccctcgccccccttcccgccgccgcccgccttccccgagctcgcggcctgcacgccgcccgcgtccccggagcccatgagcgcgctggcctcccgctccgcccccgccatgcagtcctccggctccttcaactacgcgcgccccaagcagttcatcgccgcgcagaacctcgggcccgcgtcgggccacggcacgccggcctccagccccagctcgtccagcctcccgtcgcccatgtccccgacgccgaggcagttcggccgcgcccccgtgccgcccttcgcgcagcccttcggcgctgagcccgaggccccgtggggctcctcctcgccgtcgcccccgcccccgccacccccggtcttcagccccacggctgccttcccggtgcccgacgtgttcccactgccgccgccaccaccgccgctcccgagcccgggacaggcgtcccactgctcgtcgcctgccacccgcttcggccacagccagacgcccgcggccttcctcagcgctctgctgccctcgcagccgccgccggcggccgtcaacgccctggggctgcccaagggtgtcacccccgcaggatttccaaagaaggccagtagaactgctagaatagcctccgatgaggaaattcaaggcacaaaggatgctgttattcaagacctggaacgaaaacttcgcttcaaggaggacctcctgaacaatggccagccgaggttaacatacgaagaaagaatggctcgtcgactgctaggtgctgacagtgcaactgtctttaatattcaggagccagaagaggaaacagctaatcaggaatacaaagtctccagctgtgaacagagactcatcagtgaaatagagtacaggctagaaaggtctcctgtggatgaatcaggtgatgaagttcagtatggagatgtgcctgtggaaaatggaatggcaccattctttgagatgaagctgaaacattacaagatctttgagggaatgccagtaactttcacatgtagagtggctggaaatccaaagccaaagatctattggtttaaagatgggaagcagatctctccaaagagtgatcactacaccattcaaagagatctcgatgggacctgctccctccataccacagcctccaccctagatgatgatgggaattatacaattatggctgcaaaccctcagggccgcatcagttgtactggacggctaatggtacaggctgtcaaccaaagaggtcgaagtccccggtctccctcaggccatcctcatgtcagaaggcctcgttctagatcaagggacagtggagacgaaaatgaaccaattcaggagcgattcttcagacctcacttcttgcaggctcctggagatctgactgttcaagaaggaaaactctgcagaatggactgcaaagtcagtgggttaccaaccccagatctaagctggcaactagatggaaagcccgtacgccctgacagtgctcacaagatgctggtgcgtgagaacggggtgcactctctgatcatagagccagtcacgtcacgtgatgccggcatctacacatgtatagctaccaaccgagcaggacagaactcattcagcctggagcttgtggttgctgctaaagaagcacacaaaccccctgtgtttattgagaagctccaaaacacaggagttgctgatgggtacccagtgcggctggaatgtcgtgtattgggagtgccaccacctcagatattttggaagaaagaaaatgaatcactcactcacagcactgaccgagtgagcatgcaccaggacaaccacggctacatctgcctgctcattcagggagccacaaaagaagatgctgggtggtatactgtgtcagccaagaatgaagcagggattgtgtcctgtactgccaggctggacgtttacacccagtggcatcagcagtcacagagcaccaagccaaaaaaagtacggccctcagccagtcgctatgcagcactttcggaccagggactagacatcaaagcagcgttccaacctgaggccaacccatctcacctgacactgaatactgccttggtagaaagtgaggacctgtaatccagcattcttgttaaagctgaaacactgaaacagccattgccttgaccaacatattcctttgtcacattatgtaaaaggcagaaacatacctttgactataagaaattaaaaaaaaaacaccaaaataatatttttcttacttgatataccaaacttagtttaagtagataatgctaatacaaatatacacattgcacagaaaatacacatttactgtccaatttaaaactttggaattgctgtgattaaagtgatcaaaatgccaaaatactaaaggaaatcaattgttcacaggtaactacaatttgtattatctacaagtgcctttaaacacaagatataggtgctgtgtagcctgatagtgtgaaatgtttaatgagggagttgtaccacaaacagtactacaatgattctgaagcacagtgtattcagacagatacagtgaaccaagtgcaatatgtaaggatgaaagaagaagagatgacaaagaaatccaagtaaatgccttgtctttgcaaatgtttttatattaaatcataaggaaggaactacttgccttaaatgttaatatcaaaagagttttctaacaaggttaataccttagttcttaacattttttttctttatgtgtagtgttttcatgctaccttggtaggaaacttatttacaaaccatattaaaaggctaatttaaatataaataatataaagtgctctgaataaagcagaaatatattacagttcattccacagaaagcatccaaaccacccaaatgaccaaggcatatatagtatttggaggaatcaggggtttggaaggagtagggaggagaatgaaggaaaatgcaaccagcatgattatagtgtgttcatttagataaaagtagaaggcacaggagaggtagcaaaggccaggcttttctttggttttcttcaaacataggtgaaaaaaacactgccattcacaagtcaaggaacccagggccagctggaagtgtggagcacacatgctgtggagcacacatgctgtggagattgcagtgtgtctgaggtttgtgtagtagtggaagattttaggtatgtagagcaagttgaaaatggattgagactgcatggtggcataaatgagaaattgcctgtagcatctagtctacttgaaggaagtggagacataaggagagacaaaaacaggtttgtgccataaagtattttttcaaagacaccaagatgtggtaaatgaaaattattagttcacttccctgctgccatgaaactttgccttaagaaggtgctggattccaaggtttgtaaaggcatctcggtaaagactgctttttgaatgcatatgattttgcatcagctagactgagttgattctgaccagacttgatggttttaagtcggaaccgataaattttaaaaaggagaaaaaataatttgacctagtagtataaaacatgaggctttaatggtactttgctatgaaaagaaaacactgtattccttatgcaaaacacatgtatctttcattatttataagtggcctctcttagctcagttactcaattcatacgtagtattttttaaaataattttatatctgtgtaccaccccatatatttcatattactgtttcacatgtacagctttctacttctttgtaagaacaccaaccaaccaaggtttaagtgattaataggcttgagcaccgggtggcagatgttctatgcagtgtggttcaagtttctttgaccgcacttatatgcattgctaatatggaatttaagataccatacacagtctctcatggacctatctctattgtagaattatgacttatgtcttacttgccaaatttttctgaatgtgacctttttttgctgatttgctgggtttgggattaactagcattattttgccacctttatattgtatttataaaaaaaaaagtactatcaatcaatcatactactttggattgttgtgctggtgtaatgtggatttaacatcaataaatatttgacaaataatagttgcagttttgtgaagcaaaataaatattcagtttta

SEQ ID NO: 325893 - DNA, 3006 bp, Artificial Sequence
  derived and/or modified sequence
atgccgcaggcacaaaagaagacgaccagtgtatctctgaccatcgggagctcatcccctaagacaggtgtgacaaccgccgtgatccagccgctcagtgttcccgtccaacaagtacacagtccaaccagttatctgtgccggcctgacgggacaactactgcttactttccaccagtcttcaccaaggagctccaaaacaccgcggtcgctgaaggccaggtggtggtcctggaatgcagagttcgcggtgcacctcccttgcaggtgcaatggtttcggcagggaagcgagatccaggatagtcccgatttcagaattctgcaaaagaaaccaagaagtaccgcagagccagaggagatttgtaccttagtgatagccgagacctttccagaggacgcagggatctttacctgtagtgccagaaacgactacgggagtgccacaagcactgcgcagttggtggtcacttctgccaataccgaaaattgttcctatgaaagcatgggcgaaagcaataatgaccatttccaacactttccaccccctccacccatactggaaacgtcttctttggagcttgcttcgaagaagccgagcgagatccagcaggtcaataaccctgaacttggattatctagagctgctctccagatgcagttcaacgctgccgagcgcgagactaacggggtgcacccaagccgaggtgttaacggtctgattaacggcaaagctaattcgaacaaaagcctgcccaccccagccgtgctactgtcccccactaaagagcccccaccacttctcgctaagccaaaactggatcccctgaaactgcagcagctgcagaaccagataaggctggagcaggaggccggtgccagacagcctcccccagctcccagatccgcgcctccatcaccccctttccctccccctccggcatttcccgagctggccgcttgcactccacccgcaagccccgaacctatgtccgccctggcatcacggtctgccccagccatgcaatcctctggcagttttaattacgcacggccaaagcaatttatcgcagctcaaaacttagggcctgcttcagggcacggcacaccagccagttcccccagcagttcgagcctaccaagccctatgagccccacacctcgacagttcggaagagctccggtacccccatttgcccagcccttcggagcagagcccgaggccccatggggttcaagcagcccaagccccccaccccctcctccccctgtcttttctcccacagctgcttttcctgtaccggatgtgtttccccttcctccaccacctccccctctaccttctcccggtcaagcctcacattgcagcagtccagctacaaggttcggccatagtcagacaccagccgcttttctgtctgctctattacccagtcagccaccacccgctgcagttaacgcactgggactgcccaagggggtcacccccgcaggtttccctaaaaaagcctccagaactgctaggattgcttccgacgaagagatccagggtacaaaagatgcggtcatccaggacctagagagaaaactgagattcaaagaggaccttctcaacaacggccagccccgacttacgtacgaagaacggatggcaagaaggctcctcggggcagactctgcgactgtattcaacatccaggagcccgaagaagaaacagcaaatcaggagtataaagtgagttcttgcgagcagaggctgatatctgagatagagtatcgtttggaacgtagtccagtcgatgaaagcggcgacgaggtccagtatggcgatgtaccggtggaaaatggaatggccccatttttcgagatgaaactaaaacactataagatcttcgagggcatgcccgtaacctttacatgtcgggttgccggaaaccctaagccaaagatttactggtttaaggacggaaagcaaatctcccccaagtctgatcattacaccatccagcgggacctcgatggcacatgttctttgcatacaaccgcctcaaccctggacgatgatggaaattatactattatggccgctaacccccagggccgaatctcttgcaccgggaggctaatggtccaagcagtgaaccagagaggaagaagtccgagatcacccagcggccacccacacgtgcgcagaccaaggagccggtctcgagatagtggtgacgaaaacgagcccattcaagagaggttctttcggcctcattttctgcaggctccgggtgacctgacagtgcaggagggaaaactctgtaggatggactgtaaggtgtctggcttgccaaccccagatttgagctggcagctagatggcaaacccgtgcgtcctgattctgcccataaaatgctggtcagggaaaacggagtccactcattaattatcgaacctgttacttcgcgggacgctggtatctacacgtgtatagcaactaaccgggctgggcaaaactccttctcgctggagctcgttgtcgccgcaaaggaggctcacaaaccaccagtcttcattgaaaaactgcagaatactggcgtcgctgacggatacccagtgcggctcgaatgtcgagtcctgggagtgcctccacctcagattttttggaagaaggagaacgagagcctcacccactccactgaccgggtgtccatgcatcaagataatcacggttatatttgtctgctaatccagggagctaccaaggaggacgccggatggtacaccgtgtctgctaagaatgaggccggaatagtatcgtgtacagccagactcgacgtttacactcagtggcaccagcagagtcagagcacaaagccgaagaaggtgaggcccagtgcctctcgctacgccgctctttctgaccaggggttggacattaaggccgctttccaaccagaggctaacccttcccacctaacacttaatacggctctggtggagtccgaagatttgtag

SEQ ID NO: 325894 - DNA, 3006 bp, Artificial Sequence
  derived and/or modified sequence
atgccccaggcccagaagaagaccaccagcgtgagcctgaccatcggcagcagcagccccaagaccggcgtgaccaccgccgtgatccagcccctgagcgtgcccgtgcagcaggtgcacagccccaccagctacctgtgcagacccgacggcaccaccaccgcctacttcccccccgtgttcaccaaggagctgcagaacaccgccgtggccgagggccaggtggtggtgctggagtgcagagtgagaggcgccccccccctgcaggtgcagtggttcagacagggcagcgagatccaggacagccccgacttcagaatcctgcagaagaagcccagaagcaccgccgagcccgaggagatctgcaccctggtgatcgccgagaccttccccgaggacgccggcatcttcacctgcagcgccagaaacgactacggcagcgccaccagcaccgcccagctggtggtgaccagcgccaacaccgagaactgcagctacgagagcatgggcgagagcaacaacgaccacttccagcacttccccccccccccccccatcctggagaccagcagcctggagctggccagcaagaagcccagcgagatccagcaggtgaacaaccccgagctgggcctgagcagagccgccctgcagatgcagttcaacgccgccgagagagagaccaacggcgtgcaccccagcagaggcgtgaacggcctgatcaacggcaaggccaacagcaacaagagcctgcccacccccgccgtgctgctgagccccaccaaggagcccccccccctgctggccaagcccaagctggaccccctgaagctgcagcagctgcagaaccagatcagactggagcaggaggccggcgccagacagcccccccccgcccccagaagcgccccccccagcccccccttcccccccccccccgccttccccgagctggccgcctgcaccccccccgccagccccgagcccatgagcgccctggccagcagaagcgcccccgccatgcagagcagcggcagcttcaactacgccagacccaagcagttcatcgccgcccagaacctgggccccgccagcggccacggcacccccgccagcagccccagcagcagcagcctgcccagccccatgagccccacccccagacagttcggcagagcccccgtgccccccttcgcccagcccttcggcgccgagcccgaggccccctggggcagcagcagccccagccccccccccccccccccccccgtgttcagccccaccgccgccttccccgtgcccgacgtgttccccctgccccccccccccccccccctgcccagccccggccaggccagccactgcagcagccccgccaccagattcggccacagccagacccccgccgccttcctgagcgccctgctgcccagccagcccccccccgccgccgtgaacgccctgggcctgcccaagggcgtgacccccgccggcttccccaagaaggccagcagaaccgccagaatcgccagcgacgaggagatccagggcaccaaggacgccgtgatccaggacctggagagaaagctgagattcaaggaggacctgctgaacaacggccagcccagactgacctacgaggagagaatggccagaagactgctgggcgccgacagcgccaccgtgttcaacatccaggagcccgaggaggagaccgccaaccaggagtacaaggtgagcagctgcgagcagagactgatcagcgagatcgagtacagactggagagaagccccgtggacgagagcggcgacgaggtgcagtacggcgacgtgcccgtggagaacggcatggcccccttcttcgagatgaagctgaagcactacaagatcttcgagggcatgcccgtgaccttcacctgcagagtggccggcaaccccaagcccaagatctactggttcaaggacggcaagcagatcagccccaagagcgaccactacaccatccagagagacctggacggcacctgcagcctgcacaccaccgccagcaccctggacgacgacggcaactacaccatcatggccgccaacccccagggcagaatcagctgcaccggcagactgatggtgcaggccgtgaaccagagaggcagaagccccagaagccccagcggccacccccacgtgagaagacccagaagcagaagcagagacagcggcgacgagaacgagcccatccaggagagattcttcagaccccacttcctgcaggcccccggcgacctgaccgtgcaggagggcaagctgtgcagaatggactgcaaggtgagcggcctgcccacccccgacctgagctggcagctggacggcaagcccgtgagacccgacagcgcccacaagatgctggtgagagagaacggcgtgcacagcctgatcatcgagcccgtgaccagcagagacgccggcatctacacctgcatcgccaccaacagagccggccagaacagcttcagcctggagctggtggtggccgccaaggaggcccacaagccccccgtgttcatcgagaagctgcagaacaccggcgtggccgacggctaccccgtgagactggagtgcagagtgctgggcgtgccccccccccagatcttctggaagaaggagaacgagagcctgacccacagcaccgacagagtgagcatgcaccaggacaaccacggctacatctgcctgctgatccagggcgccaccaaggaggacgccggctggtacaccgtgagcgccaagaacgaggccggcatcgtgagctgcaccgccagactggacgtgtacacccagtggcaccagcagagccagagcaccaagcccaagaaggtgagacccagcgccagcagatacgccgccctgagcgaccagggcctggacatcaaggccgccttccagcccgaggccaaccccagccacctgaccctgaacaccgccctggtggagagcgaggacctgtag

SEQ ID NO: 325895 - protein, 160 aa, Artificial Sequence
  derived and/or modified sequence
  misc_feature (1)..(1): Xaa can be any naturally occurring amino acid
XGKPVRPDSAHKMLVRENGVHSLIIEPVTSRDAGIYTCIATNRAGQNSFSLELVVAAKEAHKPPVFIEKLQNTGVADGYPVRLECRVLGVPPPQIFWKKENESLTHSTDRVSMHQDNHGYICLLIQGATKEDAGWYTVSAKNEAGIVSCTARLDVYISRH

SEQ ID NO: 325896 - protein, 28 aa, Artificial Sequence
  derived and/or modified sequence
MSGTSSHESFYDSLSDMQEESKNTDFFP

SEQ ID NO: 325897 - protein, 410 aa, Artificial Sequence
  derived and/or modified sequence
MSPLLTRPSYIRSLRKAEKRGAKTPSTNVKPKTPHQRKGGPQSQLCDKAANLIEELTSIFKAAKPRNRSPNGESSSPDSGYLSPKNQPSALLSASASQSPMEDQGEMEREVKSPGARHCYQDNQDLAVPHNRKSHPQPHSALHFPAAPRFIQKLRSQEVAEGSRVYLECRVTGNPTPRVRWFCEGKELHNTPDIQIHCEGGDLHTLIIAEAFEDDTGRYTCLATNPSGSDTTSAEVFIEGASSTDSDSESLAFKSRAGAMPQAQKKTTSVSLTIGSSSPKTGVTTAVIQPLSVPVQQVHSPTSYLCRPDGTTTAYFPPVFTKELQNTAVAEGQVVVLECRVRGAPPLQVQWFRQGSEIQDSPDFRILQKKPRSTAEPDVLYVFVRVRCHQMKIQYYNLAHLISSWLSSFL

SEQ ID NO: 325898 - DNA, 3637 bp, Artificial Sequence
  derived and/or modified sequence
gccacaacctccattctcccagaaaagaagaaatgctcatctgaaattcatcacctctctggagtcttcaaactgaccaagcattgaaaagaacacagtttcagaaaacagtttccagtgcctctggccttcctactgaaagcagacacagagtgcatgaagaccgttcaaatatgtcagggacctcctcccatgagtccttctatgactccctctcagacatgcaggaagaaagcaagaatactgacttcttcccgggcctttctgctttcctcagccaggaagagataaacaagagtcttgacctggcccggagagccatagccgactccgaaacagaagattttgactcggaaaaggagatctcgcagattttcagtacttctcctgcaagcctctgtgaacatccttcccataaggagaccaaattgggtgaacacgcctcgaggagacctcaggataacaggtcaacacctgtccagcctctggcagagaaacaaactaagagtatctcttcacctgtttcaaagaggaaacctgccatgtcacccctgctcaccaggcccagctacatccggagcctccgaaaggctgaaaagcgtggtgcaaaaactcccagcacaaacgtaaagcccaaaacgccacatcaaagaaagggtggcccccagagccagctgtgtgacaaggcagctaatttaattgaggagctaacatccatatttaaagccgcaaagccaagaaacagaagcccaaatggggagtcctcgtcaccagacagtgggtacctgtctcctaaaaatcagccgtcagccctgctgagtgcctcagccagccagagccctatggaagaccaaggggagatggaaagagaggtcaagtcccctggggccaggcattgctaccaggacaaccaggacttggcagtgccacacaaccgcaagtctcacccacagccccacagcgccctccacttcccagctgcacctcgattcatccaaaagctgaggagccaagaagtagcagaagggagccgagtttatctggagtgtagagtcactggaaaccccactcctcgagtcagatggttctgtgaagggaaagaactgcacaacactcctgatattcaaatccactgtgagggaggggacctccataccctgatcatagcagaggcctttgaggacgacacaggtcgctacacctgtttggctacgaatcccagcggctcagacacaacatctgctgaggtgttcattgaaggtgccagttcaacagattctgacagtgaaagtttagctttcaaatcaagagctggagctatgccacaagctcaaaagaaaacaacttctgtttccttgacaataggatcatcatctccaaagacaggggtgaccacagctgtgattcaaccactgtctgtccctgtgcaacaggttcacagtccaacttcatatctctgccgacctgatggaaccactactgcctactttcctcctgtttttacaaaggaactgcaaaacacagccgtggcggaaggccaggtggtggttctggagtgccgggtccgtggggcaccccctctgcaggtccagtggtttcggcaagggagtgaaatccaagactctccagatttccgaattctacagaaaaaacctagatctacagctgaacctgaggagatttgcaccctagttatcgctgagactttccctgaagatgcagggatctttacatgttcagcaagaaatgattatggatcagcaaccagcactgcccagctggttgtcacctcagccaacactgaaaactgtagttacgagtcaatgggagaatccaacaatgaccacttccaacactttccacctccccctccaatcttggagacaagttccttggagttggcttcaaagaaaccatctgagatccagcaggtgaacaaccctgagttaggcctgagcagggcagcccttcaaatgcaattcaatgctgctgagagggaaacgaacggagtccatcccagccgtggagtaaatggactgattaacggcaaagctaacagtaataaatctcttccaacaccagctgtcctgctttcacccactaaggagccaccacctctgcttgccaaaccaaaactaggatttccaaagaaggccagtagaactgctagaatagcctccgatgaggaaattcaaggcacaaaggatgctgttattcaagacctggaacgaaaacttcgcttcaaggaggacctcctgaacaatggccagccgaggttaacatacgaagaaagaatggctcgtcgactgctaggtgctgacagtgcaactgtctttaatattcaggagccagaagaggaaacagctaatcaggacattggttctcctcatgcttctgtagggagtcctctggatggtcaaaaggaatacaaagtctccagctgtgaacagagactcatcagtgaaatagagtacaggctagaaaggtctcctgtggatgaatcaggtgatgaagttcagtatggagatgtgcctgtggaaaatggaatggcaccattctttgagatgaagctgaaacattacaagatctttgagggaatgccagtaactttcacatgtagagtggctggaaatccaaagccaaagatctattggtttaaagatgggaagcagatctctccaaagagtgatcactacaccattcaaagagatctcgatgggacctgctccctccataccacagcctccaccctagatgatgatgggaattatacaattatggctgcaaaccctcagggccgcatcagttgtactggacggctaatggtacaggctgtcaaccaaagaggtcgaagtccccggtctccctcaggccatcctcatgtcagaaggcctcgttctagatcaagggacagtggagacgaaaatgaaccaattcaggagcgattcttcagacctcacttcttgcaggctcctggagatctgactgttcaagaaggaaaactctgcagaatggactgcaaagtcagtgggttaccaaccccagatctaagctggcaactagatggaaagcccgtacgccctgacagtgctcacaagatgctggtgcgtgagaacggggtgcactctctgatcatagagccagtcacgtcacgtgatgccggcatctacacatgtatagctaccaaccgagcaggacagaactcattcagcctggagcttgtggttgctgctaaagaagcacacaaaccccctgtgtttattgagaagctccaaaacacaggagttgctgatgggtacccagtgcggctggaatgtcgtgtattgggagtgccaccacctcagatattttggaagaaagaaaatgaatcactcactcacagcactgaccgagtgagcatgcaccaggacaaccacggctacatctgcctgctcattcagggagccacaaaagaagatgctgggtggtatactgtgtcagccaagaatgaagcagggattgtgtcctgtactgccaggctggacgtttacatttctcgacattaatagtgaaccacaccaggagaacaaatacccaacccagtggcatcagcagtcacagagcaccaagccaaaaaaagtacggccctcagccagtc

SEQ ID NO: 325899 - DNA, 2334 bp, Artificial Sequence
  derived and/or modified sequence
atgccgcaagcccagaagaaaacaacttccgtttcacttacaataggctcttccagtcctaaaactggtgtcaccactgcagtgatacagcccttaagtgtcccagtacagcaagtgcattctcccacatcctacctctgtcggcccgacggcaccacgactgcttacttcccccctgttttcacaaaggagctgcagaacaccgctgttgctgagggacaagtggtggtcctggagtgtagagttaggggtgcgccccctctccaggtgcagtggtttcgtcagggctctgaaatccaggactctccagactttagaatacttcaaaagaaacctagaagtaccgctgagcctgaggaaatttgtactctcgtcatcgccgaaaccttcccagaagatgctggaatctttacctgctccgcgagaaacgactacggcagcgccacgagcaccgcacaactggtggtgaccagcgcaaacacagagaattgctcctatgagagtatgggtgagtctaacaacgatcactttcagcatttcccaccaccccctcccattctggagaccagctccctcgagctcgcgtctaagaaaccgagcgaaatccagcaggttaacaaccctgaactaggacttagtagagccgcactgcagatgcaattcaacgctgcggaacgggagaccaacggcgtgcacccttctagaggtgtgaatggtttaatcaatggaaaagctaatagcaacaagtctctgcctacccctgccgttctgttgagtccaactaaagagcctcccccattgctagctaagcctaagctcggctttcccaagaaggcgtctaggacggctcggatcgcctccgacgaagagatacaggggaccaaggatgctgtgatccaggacctagagcggaagctcaggttcaaggaagacttacttaacaacgggcagcccagactgacctacgaggagcgcatggctagaaggctgttgggagctgactccgctaccgtgtttaatattcaagagcctgaggaggagacagcaaatcaggagtacaaagtctcttcctgtgagcaacgcttaatttctgaaattgaatatcgcttggaacggtcaccagtggatgagtccggcgacgaggtacaatacggcgacgtccccgtggagaacggcatggccccattttttgagatgaagctgaagcactataagatcttcgaggggatgccggtcacattcacttgcagagtggccggaaatccaaaaccaaaaatctactggttcaaggatggtaagcagatctctccaaagtcagaccattacactatccagagagatcttgacgggacctgtagcctgcatacaacagccagcacgcttgatgatgacggcaactataccattatggccgcgaatcctcaagggagaatttcttgcaccgggagacttatggtgcaggccgtgaatcaaaggggaaggtcaccgcgatcaccttctggtcatccccacgtccggagacccaggtcacgctcgagggactcaggtgatgagaacgagccaattcaggagcgcttcttcagacctcacttccttcaggctccgggcgacctcaccgtacaagagggcaaactttgtaggatggactgcaaagtttccggactgcctactcccgatctctcctggcaactggatggcaaaccagtccggccagatagtgcccacaagatgcttgtccgggagaatggtgtgcacagtctcatcatagagcctgttacttctagggatgctggcatttacacttgcattgcaaccaatcgggctgggcagaatagcttctcccttgaactggtggtagcagcgaaagaagcacataagccccctgtttttattgagaagttgcaaaatactggagtcgccgatgggtatccagtgcggctcgagtgtagagttttgggggtcccgcctccccagatcttttggaaaaaggaaaacgaaagtttgacgcactctaccgatcgcgtttctatgcaccaggataatcatggatatatctgtctgctcatccagggagctaccaaagaggacgccggatggtacacggtcagtgccaagaacgaggccggcatcgtgtcttgtaccgcgcggctggatgtatacacccaatggcaccagcaaagccagtctacaaaacctaagaaggttcgcccttctgcctctaggtacgccgctttgtccgaccagggcctggacatcaaggctgccttccagccggaggcgaatccaagccacttgaccttaaacacagctctggttgaatctgaggatctctag

SEQ ID NO: 325900 - DNA, 1539 bp, Artificial Sequence
  derived and/or modified sequence
aagaatactgactttttccccggcctctctgcatttctctcccaggaggagatcaacaaaagtcttgacctcgcaaggcgcgcgattgccgattccgagaccgaggacttcgactccgagaaagagatctcacagatcttttctacctccccagcttccctttgtgaacacccttcccataaggagacaaaactgggcgaacacgcttctcgcagaccacaggataatcgatcaacccctgttcagcctttggccgagaaacagacaaaatcaatttcgtcacctgtatctaaaagaaagccggcaatgtctccacttttgactcggccatcgtacatcaggtcgttaaggaaggctgagaagaggggtgcaaagacgcccagtactaatgtcaagcccaaaacaccccaccaacgcaagggagggcctcagtcccagttgtgtgataaagcagctaatcttatcgaagaacttaccagcatctttaaggcggctaagcccaggaaccgaagtcctaacggggaatcatcatcaccagactcaggatacctttcacccaaaaaccagccaagcgccttactgagcgcgagcgcctcgcaatcaccaatggaagaccagggagaaatggaacgggaagtgaagtctccaggagctagacactgctatcaggacaaccaggatcttgccgtcccccacaatcggaagagccatccccagccacattcggccctgcactttcctgctgcaccccggttcatccagaaacttaggagccaggaagttgccgagggcagtagggtgtacctcgagtgcagagttacagggaatcccacccctcgggtaaggtggttttgtgaaggcaaagagttacacaacacccctgatatccagattcactgtgagggcggcgatctgcacacactgatcatagcggaggcttttgaggatgacaccggtaggtatacctgtttggcaacaaaccccagtggatcagataccacttcggctgaagtgttcatcgagggcgcatctagtacggacagtgattcagagtctttagcattcaaaagccgcgctggcgccatgcctcaggcacagaaaaaaacaaccagcgtctccctgacaatcggcagttcaagtccaaagaccggcgttaccactgccgtcattcagccgctatccgtaccggttcagcaggtccacagccctacatcctacttatgccggcccgatgggacaacaactgcctactttccccccgtgtttactaaagaacttcaaaacacagccgtagctgaaggccaggtagtcgtattagaatgccgggtcagaggggccccccctctccaggtgcagtggttcagacagggatcagaaatacaggatagtccagactttagaattctacagaagaaacctcgttcaaccgccgaaccagatgtgctgtacgtctttgtgcgagtgcgatgccaccagatgaagattcaatactacaacctggctcacctgatcagttcctggctgtcaagtttcctctag

SEQ ID NO: 325901 - DNA, 2334 bp, Artificial Sequence
  derived and/or modified sequence
atgccccaggcccagaagaagaccacctctgtgtccctgaccatcggcagcagcagccccaagacaggagtgaccacagctgtgatccagcccctgtctgtgcctgtgcagcaggtgcacagccccaccagctacctgtgcaggccagatggcaccaccacagcctacttcccccctgtgttcaccaaggagctgcagaacacagctgtggccgagggccaggtggtggtgctggagtgccgggtgcggggggccccacccctgcaggtgcagtggttccggcagggcagcgagatccaggacagcccagacttccgcatcctgcagaagaagcccaggagcacagctgagcctgaggagatctgcaccctggtgattgctgagaccttcccagaagatgctggcatcttcacctgcagcgccagaaatgactatggcagcgccaccagcacagcccagctggtggtgaccagcgccaacacagagaactgcagctatgagagcatgggagagagcaacaatgaccacttccagcacttccccccacctccacccatcctggagaccagcagcctggagctggccagcaagaagcccagcgagatccagcaggtgaacaaccctgagctgggcctgagcagagctgccctgcagatgcagttcaatgctgctgagcgggagaccaatggagtgcaccccagccggggcgtgaatggcctcatcaacgggaaggccaacagcaacaagagcctgcccaccccagctgtgctgctgagccccaccaaggagcccccacccctgctggccaagcccaagctgggcttccccaagaaggccagcaggacagccagaattgccagtgatgaggagatccagggcaccaaggatgctgtgatccaggacctggagaggaagctgcgcttcaaggaggacctgctgaacaacggccagccccggctgacctatgaggagaggatggcccggcggctgctgggcgctgacagcgccaccgtcttcaacatccaggagcctgaggaggagacagccaaccaggagtacaaggtgagcagctgtgagcagaggctcatcagcgagattgagtaccgcctggagaggagccctgtggatgagagcggagatgaggtgcagtatggagatgtgcctgtggagaatggcatggcccccttctttgagatgaagctgaagcactacaagatctttgagggcatgcctgtgaccttcacctgccgggtggccggcaaccccaagcccaagatctactggttcaaggatggcaagcagatcagccccaagagtgaccactacaccatccagagggacctggatggcacctgcagcctgcacaccacagccagcaccctggatgatgatggcaactacaccatcatggccgccaacccccagggccgcatcagctgcaccggccgcctgatggtgcaggccgtgaaccagaggggccgcagccccaggagccccagcggccacccccacgtgcggcggcccaggagccgcagccgggacagcggagatgaaaatgagcccatccaggagcgcttcttccggccccacttcctgcaggcccctggggacctgactgtgcaggagggcaagctgtgcaggatggactgcaaggtgtctggcctgcccaccccagacctgtcctggcagctggatggcaagcctgtgcggccagattctgcccacaagatgctggtgagagaaaatggagtgcacagcctcatcatcgagcctgtgaccagcagagatgctggcatctacacctgcatcgccaccaacagagctggccagaacagcttcagcctggagctggtggtggccgccaaggaggcccacaagccccctgtgttcatcgagaagctgcagaacacaggagtggctgatggctaccctgtgcggctggagtgccgggtgctgggcgtgcccccaccccagatcttctggaagaaggaaaatgaaagcctgacccacagcacagacagagtgtccatgcaccaggacaaccacggctacatctgcctgctgatccagggcgccaccaaggaggatgctggctggtacacagtgtctgccaagaatgaggccggcatcgtgtcctgcacagcccggctggatgtgtacacccagtggcaccagcagagccagagcaccaagcccaagaaggtgcggcccagcgccagccgctatgctgccctgagtgaccagggcctggacatcaaggccgccttccagcctgaggccaaccccagccacctgaccctgaacacagccctggtggagagcgaggacctgtag

SEQ ID NO: 325902 - DNA, 1539 bp, Artificial Sequence
  derived and/or modified sequence
aagaacacagacttcttccctggcctgagcgccttcctgagccaggaggagatcaacaagagcctggacctggcccggcgggccatcgctgacagcgagacagaagattttgattctgagaaggagatcagccagatcttcagcaccagccctgccagcctgtgtgagcaccccagccacaaggagaccaagctgggggagcacgccagcagaagaccccaggacaacagaagcacccctgtgcagcccctggccgagaagcagaccaagagcatcagcagccctgtgtccaagaggaagccagccatgagccccctgctgacccggcccagctacatccgcagcctgaggaaggccgagaagagaggagccaagacccccagcaccaacgtgaagcccaagaccccccaccagaggaagggcggcccccagagccagctgtgtgacaaggccgccaacctgattgaggagctgaccagcatcttcaaggccgccaagcccaggaacagaagccccaatggagagagcagcagcccagattctggctacctgagccccaagaaccagcccagcgccctgctgagcgccagcgccagccagagccccatggaggaccagggcgagatggagcgggaggtgaagagccctggggcccggcactgctaccaggacaaccaggacctggccgtgccccacaacaggaagagccacccccagccccacagcgccctgcacttccctgctgccccccgcttcatccagaagctgcggagccaggaggtggccgagggcagccgggtgtacctggagtgccgggtgacaggcaaccccaccccccgggtgcgctggttctgtgagggcaaggagctgcacaacaccccagacatccagatccactgtgagggcggggacctgcacaccctcatcatcgccgaggcctttgaagatgacaccggccgctacacctgcctggccaccaaccccagcggcagtgacaccaccagcgctgaggtgttcatcgagggcgccagcagcacagacagcgacagcgagagcctggccttcaagagcagagctggggccatgccccaggcccagaagaagaccacctctgtgtccctgaccatcggcagcagcagccccaagacaggagtgaccacagctgtgatccagcccctgtctgtgcctgtgcagcaggtgcacagccccaccagctacctgtgcaggccagatggcaccaccacagcctacttcccccctgtgttcaccaaggagctgcagaacacagctgtggccgagggccaggtggtggtgctggagtgccgggtgcggggggccccacccctgcaggtgcagtggttccggcagggcagcgagatccaggacagcccagacttccgcatcctgcagaagaagcccaggagcacagctgagccagatgtgctgtatgtgtttgtgcgggtgcgctgccaccagatgaagatccagtactacaacctggcccacctgatcagctcctggctgagcagcttcctgtag

SEQ ID NO: 325903 - DNA, 2334 bp, Artificial Sequence
  derived and/or modified sequence
atgccccaggcccagaagaagaccaccagcgtgagcctgaccatcggttcgtcatccccaaagactggagttaccacagcagtcatccagcccctcagcgttcctgtccagcaggtgcacagtcctacatcttatctctgtaggccagacggtactacaaccgcttatttccctccagtgttcaccaaggagcttcagaacaccgctgtggcagagggacaggttgtggtcttggagtgtagagtgcgcggcgcccctcctctccaagtacaatggttccggcagggatcagaaattcaggactctccagactttcgcattctacagaagaagcctaggtcgactgcggagcctgaggaaatctgcacattggtcattgccgagacgttccctgaggacgccgggatcttcacttgctcggcgagaaatgattacgggtcagcaacctccaccgctcagctggtggtaaccagcgccaacactgaaaattgttcttacgagtcaatgggagagtctaacaatgaccatttccagcactttcctccacctcccccaattctagagacaagcagtcttgagcttgcctccaagaagccatccgaaatccagcaagttaacaaccccgagctgggtctcagcagagccgctctgcagatgcagtttaatgccgccgaacgagaaacaaacggagtgcatccaagcagaggggtgaatggcctgataaatgggaaagcgaacagtaataaatcattacctacacccgccgttctcctcagtcctaccaaagaacctcctccccttctggccaagcccaagttgggcttccctaagaaagcctcccgaaccgcaagaattgcctctgatgaagaaatccagggcaccaaagatgccgtcatccaggacctagagagaaaactgcgctttaaagaagacttgctcaacaacggtcaaccacggctgacttacgaggaacgcatggctcgcaggctgctgggtgccgattcagcaactgtgtttaatatccaggagccagaggaggaaaccgccaaccaggaatataaggtgtccagttgcgaacaacgccttatcagcgaaattgaataccgccttgaacggtcacctgtggatgaaagtggggacgaagtacaatatggagatgtccccgttgagaatggcatggctccattctttgaaatgaagctgaagcattacaaaatttttgaggggatgcctgtaacttttacatgccgggtggccggaaacccaaagccaaagatttattggtttaaagatggcaagcagatcagccctaaaagcgaccattataccatccagcgcgatcttgatggtacatgctcactacatacaacggcctccaccctagatgacgatgggaactatactatcatggccgctaatccccagggaaggatttcttgtaccggacgccttatggtgcaggccgtgaatcagcgcggaagaagcccgcgatccccatctggccacccacacgtgaggcgaccgagatcccggtcccgcgattctggcgatgagaatgaaccgattcaggagaggttctttcgtccccacttcctgcaggcccctggcgatctgactgtccaagagggaaaattgtgtaggatggactgtaaggtgtcaggcctcccaacacctgatctcagttggcagcttgatgggaaaccagttcgacctgactcagcacacaaaatgctcgtccgtgagaatggagtgcactctctcatcatcgagccggtgacctcccgcgacgccgggatctatacatgcattgccaccaatcgcgcaggacaaaattcgttcagtctcgagcttgtggtcgcagctaaagaagcccacaaaccccctgtgttcatcgaaaagctgcagaataccggtgttgctgacggataccctgttagactggagtgtcgggtgctaggggttccacctccccagatcttttggaaaaaagagaatgagtctctcacgcacagcaccgatcgcgtgtctatgcaccaagataaccatggctatatttgcctactgattcaaggggctactaaagaggatgccgggtggtacacagtgtctgccaaaaacgaggccggaatcgtcagctgcacagcccgcctagatgtgtacacccagtggcatcagcaatctcagtcaacaaagccgaagaaggtgaggccatctgcatcacggtacgcagctcttagcgaccagggacttgacatcaaagccgcctttcagccggaggcgaacccaagtcatctgactcttaatacagcattagttgagagtgaagatctgtag

SEQ ID NO: 325904 - DNA, 1539 bp, Artificial Sequence
  derived and/or modified sequence
aagaacaccgacttcttccccggcctgagcgccttcctgagccaggaagagattaacaaaagcctggacctggcaagacgggctatcgctgactccgaaaccgaagactttgattccgaaaaggagatatcccagatattctctacatcacctgccagcctttgcgaacatccgtcccacaaggaaactaaactgggcgaacacgcgtcaagacggccccaagataacaggtcaaccccagttcagcctcttgccgagaagcagaccaagagtatctcgtctccagtgagcaaaagaaagcctgccatgagtccactgctgactcgccctagctatatccgctccctccgaaaggccgagaaaaggggcgctaagactccctcaactaatgtcaagccaaagacaccccatcaacgaaagggagggcctcagtcacaactgtgtgataaggcagctaatctcatcgaggagctgaccagtattttcaaggcggctaagcctcgaaaccgcagtccgaacggcgaatccagcagccctgactcaggttatctgtcaccaaagaaccagcctagcgccctgctgtcagcttcagccagtcagagccctatggaggaccaaggggagatggaacgtgaagtgaagagccccggggcccggcactgctatcaggataaccaggacttggccgtgccacataacaggaagtcccatcctcagcctcactctgccctgcactttccagccgcccctcggttcattcagaagctccggtcccaggaagttgccgagggctctcgcgtctatctggaatgccgcgtcacaggaaaccccaccccacgggtgcgttggttttgcgagggaaaagagctgcacaacacccccgacatccaaattcactgcgagggcggtgacttacacacgctgatcatagccgaagcattcgaagatgataccggacgttatacatgcctcgcgactaatccctctgggtcggacactactagcgcagaggtatttatcgaaggggcgtccagcacggatagcgatagcgagtccttggctttcaagtcccgcgctggagcaatgccacaggcccagaagaagaccaccagtgtttctttgacaatagggagttctagtcccaaaacaggagtgacaacggcggtgatccaacccctgagcgtccccgtgcagcaggtgcactctccaacttcttatttgtgtcgccctgatggcacgacaaccgcatacttccctccagtgtttactaaagagctgcagaatacagccgtagctgaaggacaggttgtcgtgttagagtgtcgggtccggggcgccccgccattgcaagtacagtggtttcgccaagggtctgaaatccaggactccccggacttccgaattctgcagaagaagccccgcagtaccgcagagcctgacgttttatacgtcttcgttagagtcaggtgtcaccagatgaagatacaatattataacctggctcatttgatttcctcatggctatcctcttttctctag

SEQ ID NO: 325905 - DNA, 2958 bp, Artificial Sequence
  derived and/or modified sequence
attcgcgcgctggagaccggcggcctctcaccgagcctgagtcgtggccgctgcgccgccaggaggcttcccgggagccggcggggcccaggacctctcgagcgcagcaggcaaggggccggccttttggcagcgcggctgccagttaattttctccgttgcattctgcaaacgagatcgcattcagagcccagaagttgcaagctgggaataagcgagatctgaaagacccccaagaggagcttgtttgggagtgggggcagacggcgttttgcgcccaactgatggttctgtgaagggaaagaactgcacaacactcctgatattcaaatccactgtgagggaggggacctccataccctgatcatagcagaggcctttgaggacgacacaggtcgctacacctgtttggctacgaatcccagcggctcagacacaacatctgctgaggtgttcattgaaggtgccagttcaacagattctgacagtgaaagtttagctttcaaatcaagagctggagctatgccacaagctcaaaagaaaacaacttctgtttccttgacaataggatcatcatctccaaagacaggggtgaccacagctgtgattcaaccactgtctgtccctgtgcaacaggttcacagtccaacttcatatctctgccgacctgatggaaccactactgcctactttcctcctgtttttacaaaggaactgcaaaacacagccgtggcggaaggccaggtggtggttctggagtgccgggtccgtggggcaccccctctgcaggtccagtggtttcggcaagggagtgaaatccaagactctccagatttccgaattctacagaaaaaacctagatctacagctgaacctgaggagatttgcaccctagttatcgctgagactttccctgaagatgcagggatctttacatgttcagcaagaaatgattatggatcagcaaccagcactgcccagctggttgtcacctcagccaacactgaaaactgtagttacgagtcaatgggagaatccaacaatgaccacttccaacactttccacctccccctccaatcttggagacaagttccttggagttggcttcaaagaaaccatctgagatccagcaggtgaacaaccctgagttaggcctgagcagggcagcccttcaaatgcaattcaatgctgctgagagggaaacgaacggagtccatcccagccgtggagtaaatggactgattaacggcaaagctaacagtaataaatctcttccaacaccagctgtcctgctttcacccactaaggagccaccacctctgcttgccaaaccaaaactaggatttccaaagaaggccagtagaactgctagaatagcctccgatgaggaaattcaaggcacaaaggatgctgttattcaagacctggaacgaaaacttcgcttcaaggaggacctcctgaacaatggccagccgaggttaacatacgaagaaagaatggctcgtcgactgctaggtgctgacagtgcaactgtctttaatattcaggagccagaagaggaaacagctaatcaggaatacaaagtctccagctgtgaacagagactcatcagtgaaatagagtacaggctagaaaggtctcctgtggatgaatcaggtgatgaagttcagtatggagatgtgcctgtggaaaatggaatggcaccattctttgagatgaagctgaaacattacaagatctttgagggaatgccagtaactttcacatgtagagtggctggaaatccaaagccaaagatctattggtttaaagatgggaagcagatctctccaaagagtgatcactacaccattcaaagagatctcgatgggacctgctccctccataccacagcctccaccctagatgatgatgggaattatacaattatggctgcaaaccctcagggccgcatcagttgtactggacggctaatggtacaggctgtcaaccaaagaggtcgaagtccccggtctccctcaggccatcctcatgtcagaaggcctcgttctagatcaagggacagtggagacgaaaatgaaccaattcaggagcgattcttcagacctcacttcttgcaggctcctggagatctgactgttcaagaaggaaaactctgcagaatggactgcaaagtcagtgggttaccaaccccagatctaagctggcaactagatggaaagcccgtacgccctgacagtgctcacaagatgctggtgcgtgagaacggggtgcactctctgatcatagagccagtcacgtcacgtgatgccggcatctacacatgtatagctaccaaccgagcaggacagaactcattcagcctggagcttgtggttgctgctaaagaagcacacaaaccccctgtgtttattgagaagctccaaaacacaggagttgctgatgggtacccagtgcggctggaatgtcgtgtattgggagtgccaccacctcagatattttggaagaaagaaaatgaatcactcactcacagcactgaccgagtgagcatgcaccaggacaaccacggctacatctgcctgctcattcagggagccacaaaagaagatgctgggtggtatactgtgtcagccaagaatgaagcagggattgtgtcctgtactgccaggctggacgtttacacccagtggcatcagcagtcacagagcaccaagccaaaaaaagtacggccctcagccagtcgctatgcagcactttcggaccagggactagacatcaaagcagcgttccaacctgaggccaacccatctcacctgacactgaatactgccttggtagaaagtgaggacctgtaatccagcattcttgttaaagctgaaacactgaaacagccattgccttgaccaacatattcctttgtcacattatgtaaaaggcagaaacatacctttgactat

SEQ ID NO: 325906 - DNA, 5809 bp, Artificial Sequence
  derived and/or modified sequence
gtgaccacggaccaggcagtctctaatgaataggcaaggccacaacctccattctcccagaaaagaagaaatgctcatctgaaattcatcacctctctggagtcttcaaactgaccaagcattgaaaagaacacagtttcagaaaacagtttccagtgcctctggccttcctactgaaagcagacacagagtgcatgaagaccgttcaaatatgtcagggacctcctcccatgagtccttctatgactccctctcagacatgcaggaagaaagcaagaatactgacttcttcccgggcctttctgctttcctcagccaggaagagataaacaagagtcttgacctggcccggagagccatagccgactccgaaacagaagattttgactcggaaaaggagatctcgcagattttcagtacttctcctgcaagcctctgtgaacatccttcccataaggagaccaaattgggtgaacacgcctcgaggagacctcaggataacaggtcaacacctgtccagcctctggcagagaaacaaactaagagtatctcttcacctgtttcaaagaggaaacctgccatgtcacccctgctcaccaggcccagctacatccggagcctccgaaaggctgaaaagcgtggtgcaaaaactcccagcacaaacgtaaagcccaaaacgccacatcaaagaaagggtggcccccagagccagctgtgtgacaaggcagctaatttaattgaggagctaacatccatatttaaagccgcaaagccaagaaacagaagcccaaatggggagtcctcgtcaccagacagtgggtacctgtctcctaaaaatcagccgtcagccctgctgagtgcctcagccagccagagccctatggaagaccaaggggagatggaaagagaggtcaagtcccctggggccaggcattgctaccaggacaaccaggacttggcagtgccacacaaccgcaagtctcacccacagccccacagcgccctccacttcccagctgcacctcgattcatccaaaagctgaggagccaagaagtagcagaagggagccgagtttatctggagtgtagagtcactggaaaccccactcctcgagtcagatggttctgtgaagggaaagaactgcacaacactcctgatattcaaatccactgtgagggaggggacctccataccctgatcatagcagaggcctttgaggacgacacaggtcgctacacctgtttggctacgaatcccagcggctcagacacaacatctgctgaggtgttcattgaaggtgccagttcaacagattctgacagtgaaagtttagctttcaaatcaagagctggagctatgccacaagctcaaaagaaaacaacttctgtttccttgacaataggatcatcatctccaaagacaggggtgaccacagctgtgattcaaccactgtctgtccctgtgcaacaggttcacagtccaacttcatatctctgccgacctgatggaaccactactgcctactttcctcctgtttttacaaaggaactgcaaaacacagccgtggcggaaggccaggtggtggttctggagtgccgggtccgtggggcaccccctctgcaggtccagtggtttcggcaagggagtgaaatccaagactctccagatttccgaattctacagaaaaaacctagatctacagctgaacctgaggagatttgcaccctagttatcgctgagactttccctgaagatgcagggatctttacatgttcagcaagaaatgattatggatcagcaaccagcactgcccagctggttgtcacctcagccaacactgaaaactgtagttacgagtcaatgggagaatccaacaatgaccacttccaacactttccacctccccctccaatcttggagacaagttccttggagttggcttcaaagaaaccatctgagatccagcaggtgaacaaccctgagttaggcctgagcagggcagcccttcaaatgcaattcaatgctgctgagagggaaacgaacggagtccatcccagccgtggagtaaatggactgattaacggcaaagctaacagtaataaatctcttccaacaccagctgtcctgctttcacccactaaggagccaccacctctgcttgccaaaccaaaactaggatttccaaagaaggccagtagaactgctagaatagcctccgatgaggaaattcaaggcacaaaggatgctgttattcaagacctggaacgaaaacttcgcttcaaggaggacctcctgaacaatggccagccgaggttaacatacgaagaaagaatggctcgtcgactgctaggtgctgacagtgcaactgtctttaatattcaggagccagaagaggaaacagctaatcaggaatacaaagtctccagctgtgaacagagactcatcagtgaaatagagtacaggctagaaaggtctcctgtggatgaatcaggtgatgaagttcagtatggagatgtgcctgtggaaaatggaatggcaccattctttgagatgaagctgaaacattacaagatctttgagggaatgccagtaactttcacatgtagagtggctggaaatccaaagccaaagatctattggtttaaagatgggaagcagatctctccaaagagtgatcactacaccattcaaagagatctcgatgggacctgctccctccataccacagcctccaccctagatgatgatgggaattatacaattatggctgcaaaccctcagggccgcatcagttgtactggacggctaatggtacaggctgtcaaccaaagaggtcgaagtccccggtctccctcaggccatcctcatgtcagaaggcctcgttctagatcaagggacagtggagacgaaaatgaaccaattcaggagcgattcttcagacctcacttcttgcaggctcctggagatctgactgttcaagaaggaaaactctgcagaatggactgcaaagtcagtgggttaccaaccccagatctaagctggcaactagatggaaagcccgtacgccctgacagtgctcacaagatgctggtgcgtgagaacggggtgcactctctgatcatagagccagtcacgtcacgtgatgccggcatctacacatgtatagctaccaaccgagcaggacagaactcattcagcctggagcttgtggttgctgctaaagaagcacacaaaccccctgtgtttattgagaagctccaaaacacaggagttgctgatgggtacccagtgcggctggaatgtcgtgtattgggagtgccaccacctcagatattttggaagaaagaaaatgaatcactcactcacagcactgaccgagtgagcatgcaccaggacaaccacggctacatctgcctgctcattcagggagccacaaaagaagatgctgggtggtatactgtgtcagccaagaatgaagcagggattgtgtcctgtactgccaggctggacgtttacatttctcgacattaatagtgaaccacaccaggagaacaaatacccaacccagtggcatcagcagtcacagagcaccaagccaaaaaaagtacggccctcagccagtcgctatgcagcactttcggaccagggactagacatcaaagcagcgttccaacctgaggccaacccatctcacctgacactgaatactgccttggtagaaagtgaggacctgtaatccagcattcttgttaaagctgaaacactgaaacagccattgccttgaccaacatattcctttgtcacattatgtaaaaggcagaaacatacctttgactataagaaattaaaaaaaaaacaccaaaataatatttttcttacttgatataccaaacttagtttaagtagataatgctaatacaaatatacacattgcacagaaaatacacatttactgtccaatttaaaactttggaattgctgtgattaaagtgatcaaaatgccaaaatactaaaggaaatcaattgttcacaggtaactacaatttgtattatctacaagtgcctttaaacacaagatataggtgctgtgtagcctgatagtgtgaaatgtttaatgagggagttgtaccacaaacagtactacaatgattctgaagcacagtgtattcagacagatacagtgaaccaagtgcaatatgtaaggatgaaagaagaagagatgacaaagaaatccaagtaaatgccttgtctttgcaaatgtttttatattaaatcataaggaaggaactacttgccttaaatgttaatatcaaaagagttttctaacaaggttaataccttagttcttaacattttttttctttatgtgtagtgttttcatgctaccttggtaggaaacttatttacaaaccatattaaaaggctaatttaaatataaataatataaagtgctctgaataaagcagaaatatattacagttcattccacagaaagcatccaaaccacccaaatgaccaaggcatatatagtatttggaggaatcaggggtttggaaggagtagggaggagaatgaaggaaaatgcaaccagcatgattatagtgtgttcatttagataaaagtagaaggcacaggagaggtagcaaaggccaggcttttctttggttttcttcaaacataggtgaaaaaaacactgccattcacaagtcaaggaacccagggccagctggaagtgtggagcacacatgctgtggagcacacatgctgtggagattgcagtgtgtctgaggtttgtgtagtagtggaagattttaggtatgtagagcaagttgaaaatggattgagactgcatggtggcataaatgagaaattgcctgtagcatctagtctacttgaaggaagtggagacataaggagagacaaaaacaggtttgtgccataaagtattttttcaaagacaccaagatgtggtaaatgaaaattattagttcacttccctgctgccatgaaactttgccttaagaaggtgctggattccaaggtttgtaaaggcatctcggtaaagactgctttttgaatgcatatgattttgcatcagctagactgagttgattctgaccagacttgatggttttaagtcggaaccgataaattttaaaaaggagaaaaaataatttgacctagtagtataaaacatgaggctttaatggtactttgctatgaaaagaaaacactgtattccttatgcaaaacacatgtatctttcattatttataagtggcctctcttagctcagttactcaattcatacgtagtattttttaaaataattttatatctgtgtaccaccccatatatttcatattactgtttcacatgtacagctttctacttctttgtaagaacaccaaccaaccaaggtttaagtgattaataggcttgagcaccgggtggcagatgttctatgcagtgtggttcaagtttctttgaccgcacttatatgcattgctaatatggaatttaagataccatacacagtctctcatggacctatctctattgtagaattatgacttatgtcttacttgccaaatttttctgaatgtgacctttttttgctgatttgctgggtttgggattaactagcattattttgccacctttatattgtatttataaaaaaaaaagtactatcaatcaatcatactactttggattgttgtgctggtgtaatgtggatttaacatcaataaatatttgacaaataatagttgcagttttgtgaagcaaaataaatattcagtttta

SEQ ID NO: 325907 - DNA, 2320 bp, Artificial Sequence
  derived and/or modified sequence
aagaatactgacttcttcccgggcctttctgctttcctcagccaggaagagataaacaagagtcttgacctggcccggagagccatagccgactccgaaacagaagattttgactcggaaaaggagatctcgcagattttcagtacttctcctgcaagcctctgtgaacatccttcccataaggagaccaaattgggtgaacacgcctcgaggagacctcaggataacaggtcaacacctgtccagcctctggcagagaaacaaactaagagtatctcttcacctgtttcaaagaggaaacctgccatgtcacccctgctcaccaggcccagctacatccggagcctccgaaaggctgaaaagcgtggtgcaaaaactcccagcacaaacgtaaagcccaaaacgccacatcaaagaaagggtggcccccagagccagctgtgtgacaaggcagctaatttaattgaggagctaacatccatatttaaagccgcaaagccaagaaacagaagcccaaatggggagtcctcgtcaccagacagtgggtacctgtctcctaaaaatcagccgtcagccctgctgagtgcctcagccagccagagccctatggaagaccaaggggagatggaaagagaggtcaagtcccctggggccaggcattgctaccaggacaaccaggacttggcagtgccacacaaccgcaagtctcacccacagccccacagcgccctccacttcccagctgcacctcgattcatccaaaagctgaggagccaagaagtagcagaagggagccgagtttatctggagtgtagagtcactggaaaccccactcctcgagtcagatggttctgtgaagggaaagaactgcacaacactcctgatattcaaatccactgtgagggaggggacctccataccctgatcatagcagaggcctttgaggacgacacaggtcgctacacctgtttggctacgaatcccagcggctcagacacaacatctgctgaggtgttcattgaaggtgccagttcaacagattctgacagtgaaagtttagctttcaaatcaagagctggagctatgccacaagctcaaaagaaaacaacttctgtttccttgacaataggatcatcatctccaaagacaggggtgaccacagctgtgattcaaccactgtctgtccctgtgcaacaggttcacagtccaacttcatatctctgccgacctgatggaaccactactgcctactttcctcctgtttttacaaaggaactgcaaaacacagccgtggcggaaggccaggtggtggttctggagtgccgggtccgtggggcaccccctctgcaggtccagtggtttcggcaagggagtgaaatccaagactctccagatttccgaattctacagaaaaaacctagatctacagctgaacctgatgtcttatacgtctttgttcgagtgagatgccaccagatgaaaattcagtattacaacctggctcatctcatttcctcatggctttcttcatttttataatgtcagaaccatacaagctatgatgcttctttctctcaacaaaatgtgagcctcttgtcactgttggatgaacttttctttgagaagaaaagctgaggaacctgtgggacattgtattcaaattttatctagttaaaaaaaaattatctagcaaaaattgctgtgacatttcaatgcatgaggatcactaaaagaacatcctagtgtttattttttatttttctatttttgttctttaattctgtaatttttctaaatgttccacgtgaactatatacaggcatataccttatttatgcatggaagtattcctataaaatcatacacaatgaattctgctcaatcaactttgaaacacacaaaggaagcttgtaggaaaattggtcttactgagaattcctttagaaaatagtctttttacaaagcaagtgtttttttccttcatctaaatttcatgcatgcatttatttaaacataattatagggagcctaccatgtgtgagatgctaagaatatggccatgaacaaaaattgtttctgcactcagaggttatatttcagcgaaccagaaactaacaaactaattacacaataaattatttagcagggtgaggtggcacatagtcccagctacccaggaggctgaggcaggaggattgcttgagcccaggagttcaaggctgcagtgagctatgatcatgccacttcactccagcctgggcaacagtgaaacccctgtttctaaaaaaaagattttaaaaataaaataaaacaaaattgc

SEQ ID NO: 325908 - DNA, 576 bp, Artificial Sequence
  derived and/or modified sequence
agaaaagaagaaatgctcatctgaaattcatcacctctctggagtcttcaaactgaccaagcattgaaaagctctcacttcagagtccaagaaggacacatctaatcgctgtctaggccaagtgccaagacttgtgcccagtctccaagcggctgggaaagaaaatacttggagatttcacatcccattacaagtgagttcagtttctcactgagcctcagaatatgaggaattctccaaaatgaagacgtccagatgacagcaacaccaaacgtgaaaccatgataaatgtgtgcaccccctggattactgcacaagccttctcacggaccgccctactgtcagtcttgtcttcctctttccctacctctgtcccggatccagactgcaatcagttatctctcaaaaataacacagtttcagaaaacagtttccagtgcctctggccttcctactgaaagcagacacagagtgcatgaagaccgttcaaatatgtcagggacctcctcccatgagtccttctatgactccctctcagacatgcaggaagaaagcaagaatactgacttcttcccg

SEQ ID NO: 325909 - DNA, 2334 bp, Artificial Sequence
  derived and/or modified sequence
atgccacaagctcaaaagaaaaccacctccgttagtctgactattggcagcagctcacctaaaaccggggtgactacagccgtcatccaaccactgagcgtgccggtgcagcaggtgcatagtcccacgtcatacttgtgtcgtcctgacggcactaccacagcatactttcctccagtctttacaaaggagttgcagaacacagccgtagccgaaggccaggtggtggttttagaatgccgggttagaggcgctccccctctccaggtacagtggttcagacaaggctccgagattcaggactctcccgattttcgcatcctgcagaagaagcccaggtccacagcagagcctgaggaaatctgcactctggtcattgcagagactttcccagaggacgctggtatttttacatgttcagccagaaatgattatggcagcgccacgagtacggcacaactggtcgtcactagcgctaatacagagaactgctcttatgagtccatgggcgagtctaacaatgaccacttccaacactttccacctcctccgcctattctcgaaacatcttcgctggagctggccagcaagaaaccctcagagattcagcaggtgaacaatcccgagttgggcctgtctcgagccgcactgcagatgcagtttaatgctgctgagcgcgagaccaatggcgtgcacccctcaagaggcgtgaatggattaatcaacggtaaggctaattcaaacaagagccttcccaccccagcagtgctgctatctcccacaaaggaaccacccccacttctcgccaaaccaaaattggggtttcctaaaaaagctagcaggacagccagaattgcctcagatgaagagatacagggcacgaaagatgcggtcattcaggacttggagaggaagctgaggttcaaggaggatctccttaataatggtcaacctcgtctgacttatgaagagagaatggcaaggaggcttctgggtgcggactccgcgacagtcttcaatatacaagaaccagaagaagaaacggctaaccaggaatacaaagtttcaagctgcgagcaaaggctcatctccgagattgagtacaggctcgaacgatccccagtcgatgaatcaggggatgaggtgcagtatggcgacgttcccgtagagaatgggatggccccatttttcgagatgaagctcaaacactataaaatttttgagggtatgcctgtcaccttcacgtgtcgcgtggccggaaatccaaaaccaaaaatctattggtttaaggacggcaagcagatttcaccgaaaagtgaccattatactattcagcgtgatctggatggaacttgtagcttacatacaaccgcctcgacccttgatgatgacggcaactacactattatggcagccaaccctcaggggcgaatttcctgtactggtagattaatggtccaggcggtcaaccagcggggacggtctcctcgatcccctagcggacacccacatgttcggagacctcgcagtcggtcccgagactctggcgacgaaaacgagcctattcaggaacggttctttcgcccacattttctccaagcgcctggagatttgaccgtgcaggaaggcaaactctgcagaatggattgtaaagtctctggtttgccaacccccgacctctcctggcaactggatggcaaacctgtgcgcccagatagtgctcataagatgctggtgagggagaatggtgtccactcactcatcattgagcctgtgacatcacgtgacgctggcatctatacctgcatcgccacaaaccgagcaggccagaactccttttcactcgagctcgtcgttgcagcaaaagaagctcacaagccacctgtctttatagagaagcttcagaacaccggagtggccgatgggtaccccgtgaggcttgaatgccgcgtgctcggtgtgccgcctccccagattttctggaagaaggagaatgagtctctgacccatagtactgacagggtatctatgcaccaggacaaccatggctacatctgtctcttgatccagggagcaaccaaggaagacgctgggtggtacacggtaagcgcaaagaatgaggccggaattgtctcctgcacggcaaggctggacgtgtacacccagtggcatcaacagtcacagtctactaagcccaagaaggtgaggcccagcgccagccggtatgccgcactttccgaccagggactcgacataaaagctgctttccagcccgaggccaatccttcccacctgactctgaacactgctctggtggaatccgaagacctatag

SEQ ID NO: 325910 - DNA, 1539 bp, Artificial Sequence
  derived and/or modified sequence
aaaaacactgacttttttcctggcctgtccgctttcctttcccaggaggagataaacaagagccttgatctggcgcgacgcgctattgctgatagcgaaactgaggatttcgattctgagaaggagatctcacagattttctccacctcccccgcttctttatgcgaacacccctcccataaggaaactaagcttggcgagcacgcgtccaggcgccctcaggataaccgatccacccccgtgcaacccctggccgagaaacagactaagagtatttccagcccggtcagtaaaaggaagcccgcaatgagccccctcctgactcgaccctcgtacattcgttccctaaggaaggcggagaagagaggagcgaagactcccagcacaaacgttaagccaaagacacctcaccagcgcaaggggggtccacagtcccagctctgcgataaagccgctaaccttattgaggaactcacatccatttttaaggccgctaaaccccgtaacaggtccccaaacggcgagtcctccagtccagattccggctatttgtctccaaagaaccagccgtccgccttgctgtctgcttcggcatctcaaagcccaatggaggatcaaggagaaatggaaagggaggtgaagagcccaggagccagacattgctatcaggataaccaggatctagcagtgccccacaataggaagagccaccctcagcctcactccgctctgcacttccctgccgcacccaggttcatccagaagcttaggagccaagaggtggctgagggatctcgtgtgtacctggaatgtagggttactggcaaccctacacccagggtaaggtggttttgcgaaggaaaagagctccataacacacctgatattcagatacattgtgaggggggtgacctgcatacgctgattattgccgaagcgttcgaagacgacaccggccgttacacttgcctcgccaccaatccgtctggctcagataccacctccgccgaagtgtttatcgagggcgcatcatccacggactctgattctgagagcctcgcctttaaatcacgagccggagcaatgccccaagcgcaaaaaaagaccacaagcgtgtccctgacgataggctctagttcccctaaaactggcgtgactacagccgtcatccagcccctttccgttcctgttcaacaggttcatagcccaacctcctatctgtgccgccctgatgggacaaccaccgcatactttcccccagttttcaccaaagagctccagaatacggctgtcgctgagggtcaggtggtggtgctggagtgtcgagtcagaggcgctcccccactgcaggtgcagtggttcagacagggaagcgagattcaggatagcccagattttagaattttacagaagaaacccaggtccacggccgaacctgacgttctctacgtcttcgtcagggtgcggtgccatcagatgaagattcagtactacaatctggcacatcttatctcttcttggctgtcgagcttcctgtag

SEQ ID NO: 325911 - DNA, 2334 bp, Artificial Sequence
  derived and/or modified sequence
atgccccaggcccagaagaagaccaccagcgtgagcctgaccatcggcagcagcagccccaagaccggcgtgaccaccgccgtgatccagcccctgagcgtgcccgtgcagcaggtgcacagccccaccagctacctgtgcagacccgacggcaccaccaccgcctacttcccccccgtgttcaccaaggagctgcagaacaccgccgtggccgagggccaggtggtggtgctggagtgcagagtgagaggcgccccccccctgcaggtgcagtggttcagacagggcagcgagatccaggacagccccgacttcagaatcctgcagaagaagcccagaagcaccgccgagcccgaggagatctgcaccctggtgatcgccgagaccttccccgaggacgccggcatcttcacctgcagcgccagaaacgactacggcagcgccaccagcaccgcccagctggtggtgaccagcgccaacaccgagaactgcagctacgagagcatgggcgagagcaacaacgaccacttccagcacttccccccccccccccccatcctggagaccagcagcctggagctggccagcaagaagcccagcgagatccagcaggtgaacaaccccgagctgggcctgagcagagccgccctgcagatgcagttcaacgccgccgagagagagaccaacggcgtgcaccccagcagaggcgtgaacggcctgatcaacggcaaggccaacagcaacaagagcctgcccacccccgccgtgctgctgagccccaccaaggagcccccccccctgctggccaagcccaagctgggcttccccaagaaggccagcagaaccgccagaatcgccagcgacgaggagatccagggcaccaaggacgccgtgatccaggacctggagagaaagctgagattcaaggaggacctgctgaacaacggccagcccagactgacctacgaggagagaatggccagaagactgctgggcgccgacagcgccaccgtgttcaacatccaggagcccgaggaggagaccgccaaccaggagtacaaggtgagcagctgcgagcagagactgatcagcgagatcgagtacagactggagagaagccccgtggacgagagcggcgacgaggtgcagtacggcgacgtgcccgtggagaacggcatggcccccttcttcgagatgaagctgaagcactacaagatcttcgagggcatgcccgtgaccttcacctgcagagtggccggcaaccccaagcccaagatctactggttcaaggacggcaagcagatcagccccaagagcgaccactacaccatccagagagacctggacggcacctgcagcctgcacaccaccgccagcaccctggacgacgacggcaactacaccatcatggccgccaacccccagggcagaatcagctgcaccggcagactgatggtgcaggccgtgaaccagagaggcagaagccccagaagccccagcggccacccccacgtgagaagacccagaagcagaagcagagacagcggcgacgagaacgagcccatccaggagagattcttcagaccccacttcctgcaggcccccggcgacctgaccgtgcaggagggcaagctgtgcagaatggactgcaaggtgagcggcctgcccacccccgacctgagctggcagctggacggcaagcccgtgagacccgacagcgcccacaagatgctggtgagagagaacggcgtgcacagcctgatcatcgagcccgtgaccagcagagacgccggcatctacacctgcatcgccaccaacagagccggccagaacagcttcagcctggagctggtggtggccgccaaggaggcccacaagccccccgtgttcatcgagaagctgcagaacaccggcgtggccgacggctaccccgtgagactggagtgcagagtgctgggcgtgccccccccccagatcttctggaagaaggagaacgagagcctgacccacagcaccgacagagtgagcatgcaccaggacaaccacggctacatctgcctgctgatccagggcgccaccaaggaggacgccggctggtacaccgtgagcgccaagaacgaggccggcatcgtgagctgcaccgccagactggacgtgtacacccagtggcaccagcagagccagagcaccaagcccaagaaggtgagacccagcgccagcagatacgccgccctgagcgaccagggcctggacatcaaggccgccttccagcccgaggccaaccccagccacctgaccctgaacaccgccctggtggagagcgaggacctgtag

SEQ ID NO: 325912 - DNA, 1539 bp, Artificial Sequence
  derived and/or modified sequence
aagaacaccgacttcttccccggcctgagcgccttcctgagccaggaggagatcaacaagagcctggacctggccagaagagccatcgccgacagcgagaccgaggacttcgacagcgagaaggagatcagccagatcttcagcaccagccccgccagcctgtgcgagcaccccagccacaaggagaccaagctgggcgagcacgccagcagaagaccccaggacaacagaagcacccccgtgcagcccctggccgagaagcagaccaagagcatcagcagccccgtgagcaagagaaagcccgccatgagccccctgctgaccagacccagctacatcagaagcctgagaaaggccgagaagagaggcgccaagacccccagcaccaacgtgaagcccaagaccccccaccagagaaagggcggcccccagagccagctgtgcgacaaggccgccaacctgatcgaggagctgaccagcatcttcaaggccgccaagcccagaaacagaagccccaacggcgagagcagcagccccgacagcggctacctgagccccaagaaccagcccagcgccctgctgagcgccagcgccagccagagccccatggaggaccagggcgagatggagagagaggtgaagagccccggcgccagacactgctaccaggacaaccaggacctggccgtgccccacaacagaaagagccacccccagccccacagcgccctgcacttccccgccgcccccagattcatccagaagctgagaagccaggaggtggccgagggcagcagagtgtacctggagtgcagagtgaccggcaaccccacccccagagtgagatggttctgcgagggcaaggagctgcacaacacccccgacatccagatccactgcgagggcggcgacctgcacaccctgatcatcgccgaggccttcgaggacgacaccggcagatacacctgcctggccaccaaccccagcggcagcgacaccaccagcgccgaggtgttcatcgagggcgccagcagcaccgacagcgacagcgagagcctggccttcaagagcagagccggcgccatgccccaggcccagaagaagaccaccagcgtgagcctgaccatcggcagcagcagccccaagaccggcgtgaccaccgccgtgatccagcccctgagcgtgcccgtgcagcaggtgcacagccccaccagctacctgtgcagacccgacggcaccaccaccgcctacttcccccccgtgttcaccaaggagctgcagaacaccgccgtggccgagggccaggtggtggtgctggagtgcagagtgagaggcgccccccccctgcaggtgcagtggttcagacagggcagcgagatccaggacagccccgacttcagaatcctgcagaagaagcccagaagcaccgccgagcccgacgtgctgtacgtgttcgtgagagtgagatgccaccagatgaagatccagtactacaacctggcccacctgatcagcagctggctgagcagcttcctgtag

SEQ ID NO: 325913 - protein, 1526 aa, Artificial Sequence
  derived and/or modified sequence
MAGLRRPQPGCYCRTAAAVNLLLGVFQVLLPCCRPGGAQGQAIEPLPNVVELWQAEEGELLLPTQGDSEEGLEEPSQEQSFSDKLFSGKGLHFQPSVLDFGIQFLGHPVAKILHAYNPSRDSEVVVNSVFAAAGHFHVPPVPCRVIPAMGKTSFRIIFLPTEEGSIESSLFINTSSYGVLSYHVSGIGTRRISTEGSAKQLPNAYFLLPKVQSIQLSQMQAETTNTSLLQVQLECSLHNKVCQQLKGCYLESDDVLRLQMSIMVTMENFSKEFEENTQHLLDHLSIVYVATDESETSDDSAVNMYILHSGNSLIWIQDIRHFSQRDALSLQFEPVLLPTSTTNFTKIASFTCKAATSCDSGIIEDVKKTTHTPTLKACLFSSVAQGYFRMDSSATQFHIETHENTSGLWSIWYRNHFDRSVVLNDVFLSKETKHMLKILNFTGPLFLPPGCWNIFSLKLAVKDIAINLFTNVFLTTNIGAIFAIPLQIYSAPTKEGSLGFEVIAHCGMHYFMGKSKAGNPNWNGSLSLDQSTWNVDSELANKLYERWKKYKNGDVCKFGTDMQMINFTTGEFQLTEACPYLGTHSEESRFGILHLHLQPLEMKRVGVVFTPADYGKVTSLILIRNNLTVIDMIGVEGFGARELLKVGGRLPGAGGSLRFKVPESTLMDCRRQLKDSKQILSITKNFKVENIGPLPITVSSLKINGYNCQGYGFEVLDCHQFSLDPNTSRDISIVFTPDFTSSWVIRDLSLVTAADLEFRFTLNVTLPHHLLPLCADVVPGPSWEESFWRLTVFFVSLSLLGVILIAFQQAQYILMEFMKTRQRQNASSSSQQNNGPMDVISPHSYKSNCKNFLDTYGPSDKGRGKNCLPVNTPQSRIQNAAKRSPATYGHSQKKHKCSVYYSKHKTSTAAASSTSTTTEEKQTSPLGSSLPAAKEDICTDAMRENWISLRYASGINVNLQKNLTLPKNLLNKEENTLKNTIVFSNPSSECSMKEGIQTCMFPKETDIKTSENTAEFKERELCPLKTSKKLPENHLPRNSPQYHQPDLPEISRKNNGNNQQVPVKNEVDHCENLKKVDTKPSSEKKIHKTSREDMFSEKQDIPFVEQEDPYRKKKLQEKREGNLQNLNWSKSRTCRKNKKRGVAPVSRPPEQSDLKLVCSDFERSELSSDINVRSWCIQESTREVCKADAEIASSLPAAQREAEGYYQKPEKKCVDKFCSDSSSDCGSSSGSVRASRGSWGSWSSTSSSDGDKKPMVDAQHFLPAGDSVSQNDFPSEAPISLNLSHNICNPMTVNSLPQYAEPSCPSLPAGPTGVEEDKGLYSPGDLWPTPPVCVTSSLNCTLENGVPCVIQESAPVHNSFIDWSATCEGQFSSAYCPLELNDYNAFPEENMNYANGFPCPADVQTDFIDHNSQSTWNTPPNMPAAWGHASFISSPPYLTSTRSLSPMSGLFGSIWAPQSDVYENCCPINPTTEHSTHMENQAVVCKEYYPGFNPFRAYMNLDIWTTTANRNANFPLSRDSSYCGNV

SEQ ID NO: 325914 - DNA, 4581 bp, Artificial Sequence
  derived and/or modified sequence
atggccggcctgagaagaccccagcccggctgctactgcagaaccgccgccgccgtgaacctgctgctgggcgtgttccaggtgctgctgccctgctgcagacccggcggcgcccagggccaggccatcgagcccctgcccaacgtggtggagctgtggcaggccgaggagggcgagctgctgctgcccacccagggcgacagcgaggagggcctggaggagcccagccaggagcagagcttcagcgacaagctgttcagcggcaagggcctgcacttccagcccagcgtgctggacttcggcatccagttcctgggccaccccgtggccaagatcctgcacgcctacaaccccagcagagacagcgaggtggtggtgaacagcgtgttcgccgccgccggccacttccacgtgccccccgtgccctgcagagtgatccccgccatgggcaagaccagcttcagaatcatcttcctgcccaccgaggagggcagcatcgagagcagcctgttcatcaacaccagcagctacggcgtgctgagctaccacgtgagcggcatcggcaccagaagaatcagcaccgagggcagcgccaagcagctgcccaacgcctacttcctgctgcccaaggtgcagagcatccagctgagccagatgcaggccgagaccaccaacaccagcctgctgcaggtgcagctggagtgcagcctgcacaacaaggtgtgccagcagctgaagggctgctacctggagagcgacgacgtgctgagactgcagatgagcatcatggtgaccatggagaacttcagcaaggagttcgaggagaacacccagcacctgctggaccacctgagcatcgtgtacgtggccaccgacgagagcgagaccagcgacgacagcgccgtgaacatgtacatcctgcacagcggcaacagcctgatctggatccaggacatcagacacttcagccagagagacgccctgagcctgcagttcgagcccgtgctgctgcccaccagcaccaccaacttcaccaagatcgccagcttcacctgcaaggccgccaccagctgcgacagcggcatcatcgaggacgtgaagaagaccacccacacccccaccctgaaggcctgcctgttcagcagcgtggcccagggctacttcagaatggacagcagcgccacccagttccacatcgagacccacgagaacaccagcggcctgtggagcatctggtacagaaaccacttcgacagaagcgtggtgctgaacgacgtgttcctgagcaaggagaccaagcacatgctgaagatcctgaacttcaccggccccctgttcctgccccccggctgctggaacatcttcagcctgaagctggccgtgaaggacatcgccatcaacctgttcaccaacgtgttcctgaccaccaacatcggcgccatcttcgccatccccctgcagatctacagcgcccccaccaaggagggcagcctgggcttcgaggtgatcgcccactgcggcatgcactacttcatgggcaagagcaaggccggcaaccccaactggaacggcagcctgagcctggaccagagcacctggaacgtggacagcgagctggccaacaagctgtacgagagatggaagaagtacaagaacggcgacgtgtgcaagttcggcaccgacatgcagatgatcaacttcaccaccggcgagttccagctgaccgaggcctgcccctacctgggcacccacagcgaggagagcagattcggcatcctgcacctgcacctgcagcccctggagatgaagagagtgggcgtggtgttcacccccgccgactacggcaaggtgaccagcctgatcctgatcagaaacaacctgaccgtgatcgacatgatcggcgtggagggcttcggcgccagagagctgctgaaggtgggcggcagactgcccggcgccggcggcagcctgagattcaaggtgcccgagagcaccctgatggactgcagaagacagctgaaggacagcaagcagatcctgagcatcaccaagaacttcaaggtggagaacatcggccccctgcccatcaccgtgagcagcctgaagatcaacggctacaactgccagggctacggcttcgaggtgctggactgccaccagttcagcctggaccccaacaccagcagagacatcagcatcgtgttcacccccgacttcaccagcagctgggtgatcagagacctgagcctggtgaccgccgccgacctggagttcagattcaccctgaacgtgaccctgccccaccacctgctgcccctgtgcgccgacgtggtgcccggccccagctgggaggagagcttctggagactgaccgtgttcttcgtgagcctgagcctgctgggcgtgatcctgatcgccttccagcaggcccagtacatcctgatggagttcatgaagaccagacagagacagaacgccagcagcagcagccagcagaacaacggccccatggacgtgatcagcccccacagctacaagagcaactgcaagaacttcctggacacctacggccccagcgacaagggcagaggcaagaactgcctgcccgtgaacaccccccagagcagaatccagaacgccgccaagagaagccccgccacctacggccacagccagaagaagcacaagtgcagcgtgtactacagcaagcacaagaccagcaccgccgccgccagcagcaccagcaccaccaccgaggagaagcagaccagccccctgggcagcagcctgcccgccgccaaggaggacatctgcaccgacgccatgagagagaactggatcagcctgagatacgccagcggcatcaacgtgaacctgcagaagaacctgaccctgcccaagaacctgctgaacaaggaggagaacaccctgaagaacaccatcgtgttcagcaaccccagcagcgagtgcagcatgaaggagggcatccagacctgcatgttccccaaggagaccgacatcaagaccagcgagaacaccgccgagttcaaggagagagagctgtgccccctgaagaccagcaagaagctgcccgagaaccacctgcccagaaacagcccccagtaccaccagcccgacctgcccgagatcagcagaaagaacaacggcaacaaccagcaggtgcccgtgaagaacgaggtggaccactgcgagaacctgaagaaggtggacaccaagcccagcagcgagaagaagatccacaagaccagcagagaggacatgttcagcgagaagcaggacatccccttcgtggagcaggaggacccctacagaaagaagaagctgcaggagaagagagagggcaacctgcagaacctgaactggagcaagagcagaacctgcagaaagaacaagaagagaggcgtggcccccgtgagcagaccccccgagcagagcgacctgaagctggtgtgcagcgacttcgagagaagcgagctgagcagcgacatcaacgtgagaagctggtgcatccaggagagcaccagagaggtgtgcaaggccgacgccgagatcgccagcagcctgcccgccgcccagagagaggccgagggctactaccagaagcccgagaagaagtgcgtggacaagttctgcagcgacagcagcagcgactgcggcagcagcagcggcagcgtgagagccagcagaggcagctggggcagctggagcagcaccagcagcagcgacggcgacaagaagcccatggtggacgcccagcacttcctgcccgccggcgacagcgtgagccagaacgacttccccagcgaggcccccatcagcctgaacctgagccacaacatctgcaaccccatgaccgtgaacagcctgccccagtacgccgagcccagctgccccagcctgcccgccggccccaccggcgtggaggaggacaagggcctgtacagccccggcgacctgtggcccaccccccccgtgtgcgtgaccagcagcctgaactgcaccctggagaacggcgtgccctgcgtgatccaggagagcgcccccgtgcacaacagcttcatcgactggagcgccacctgcgagggccagttcagcagcgcctactgccccctggagctgaacgactacaacgccttccccgaggagaacatgaactacgccaacggcttcccctgccccgccgacgtgcagaccgacttcatcgaccacaacagccagagcacctggaacaccccccccaacatgcccgccgcctggggccacgccagcttcatcagcagccccccctacctgaccagcaccagaagcctgagccccatgagcggcctgttcggcagcatctgggccccccagagcgacgtgtacgagaactgctgccccatcaaccccaccaccgagcacagcacccacatggagaaccaggccgtggtgtgcaaggagtactaccccggcttcaaccccttcagagcctacatgaacctggacatctggaccaccaccgccaacagaaacgccaacttccccctgagcagagacagcagctactgcggcaacgtgtag

SEQ ID NO: 325915 - DNA, 4581 bp, Artificial Sequence
  derived and/or modified sequence
atggctgggctgcgcagacctcagccagggtgctactgtcgtactgccgctgccgtcaacttgctgctcggcgtgtttcaggttctgctgccctgctgccgacccggcggtgctcaaggccaagctatcgagccccttccgaacgttgtggagctgtggcaggccgaagaaggcgagcttctgctccctacccaaggtgacagtgaagagggcctggaggaaccctctcaggagcagagtttcagcgataaactgttcagcggcaaagggctacactttcagccaagtgttcttgacttcggcatccaattcctcgggcatcctgttgctaagattcttcatgcatacaatcccagtagggatagcgaagtggtcgtgaatagtgtttttgccgcagccggccattttcatgtgccgcctgtaccttgtagagtcatcccagctatgggtaagacctccttccgaatcatcttcctccccacagaagaaggctctatcgagtcctcactgtttatcaacacctccagctatggagtgttgagctatcatgtgtccgggataggcacacgcaggatttctactgagggcagtgccaagcaactccccaatgcctatttcctgcttcccaaagtgcagtctatccagctgtcccaaatgcaggccgaaacaacgaatacaagccttttacaggtccagctagagtgcagtctgcacaacaaggtttgtcaacagctgaagggctgctacttggaaagcgatgacgtgctccgattgcaaatgtccatcatggtaaccatggaaaatttctccaaagagtttgaggagaacacccaacatctgctcgatcacctctccatagtttacgtcgcaacagatgagtccgagacaagcgacgactcagctgttaacatgtatattctgcactctggaaatagcctgatttggattcaggatatcaggcatttttcgcagagagatgccttgtcattacaatttgagcctgtgctgctcccgactagcaccacaaacttcactaagatcgcatcattcacatgtaaagcagccacaagctgtgattccggtattatcgaggatgtcaagaaaaccacacacacacctaccctgaaggcatgtcttttttctagcgtcgcccaaggttatttccgtatggacagcagtgcaacccagtttcacattgagactcacgagaacacttctggattatggtctatttggtatcggaaccactttgatcggagcgtcgtgctcaacgacgtgtttctgtccaaggagaccaagcacatgttgaagattctgaatttcacaggccctctcttcttgccacccggctgttggaatatcttctcacttaaactggccgtaaaagacattgctataaacctttttacaaacgtatttttaactactaacatcggcgcgatattcgcaatacctctgcagatatattcagcacctactaaagaagggtccctcggttttgaggttattgcacactgcggcatgcactattttatgggcaaatccaaggcaggaaaccctaattggaatgggagtctgtcactggaccagagcacgtggaacgtggactctgaattggcgaacaagctctatgaacgttggaaaaaatacaagaacggtgacgtgtgcaagtttggtaccgacatgcagatgataaactttaccacgggcgaattccaattaacagaggcttgtccttatctcggaactcactctgaggagagtcgttttggcatactgcatctccacttgcagccccttgagatgaagcgggtcggcgtggtgttcactcctgccgattacggcaaggttacctctcttattttgatccgcaataatctgacagtgatagatatgattggagttgaggggtttggggcacgcgaactattaaaagtaggcggccgattgccaggagccggggggtccctgcgcttcaaggtccctgaatccacgctgatggactgtagacggcagctgaaagactccaaacagatactcagcattacaaagaattttaaggtggaaaatattggcccactgccaattacagtaagttcacttaagatcaatggatacaactgccaaggatacggcttcgaagtactcgactgtcatcagttctcacttgatccaaatacttcccgtgacatttctatagtgttcactcccgatttcacatcttcgtgggtaatcagagatctctcactggtcacagcggcagatctagaatttagattcaccttgaatgtgacactgccccatcacctgttgcccctctgtgccgacgtggtcccggggccttcttgggaagaatccttttggagactcacggtgttctttgtcagtttatctctgctgggcgtcatcctaattgccttccagcaggcccaatacatcctgatggaattcatgaagaccagacagcgtcagaacgccagctcatcatcccagcaaaacaacgggcccatggatgtgattagtccacatagctataagagtaactgcaaaaactttctcgacacatatggtccatcagacaaggggcgcggaaaaaattgcttgcctgtgaatacaccccagtctcgcattcagaatgccgccaagcggtcccccgccacctacggtcatagtcaaaagaaacacaagtgcagcgtctactattccaagcataagacttcaactgcagctgcaagtagtacctctacaactacagaagaaaagcagacgtcccccctggggagttctctccctgccgctaaagaggacatatgcacagacgcgatgcgggagaattggatcagcttgcgatatgccagcggcattaacgtcaacctgcaaaaaaatctcaccctacccaaaaatctgctgaataaggaggaaaacacactaaaaaacactatcgttttttctaatccttctagcgagtgctccatgaaggagggtatacagacgtgcatgtttcccaaggagactgatatcaagacctcagagaacaccgcagagttcaaagaacgcgagttatgccccctcaagacgagcaagaagctgccagaaaaccatctacctcgcaactcgccacagtatcatcagccagaccttcctgaaatctctagaaaaaataacggaaacaatcagcaggtacccgttaaaaatgaagtggaccattgcgaaaacctgaagaaggtggatacgaagccctccagcgagaaaaagattcataagacctccagagaggatatgtttagcgagaagcaggatattccttttgtggaacaagaggatccatacaggaagaagaagctacaagaaaagcgtgaaggtaacctccagaatctaaactggtctaaatctagaacctgcagaaagaataagaagcggggcgtagccccagtcagccgccctcctgaacagtccgatttgaagctggtctgtagcgatttcgaaagatccgaactgtccagcgatatcaacgtaagatcttggtgcatccaggaatccacgcgcgaagtgtgtaaagccgatgccgaaattgctagctctctaccagccgcccagcgtgaggccgaaggatactaccagaagcccgagaaaaagtgcgtggacaaattctgtagcgacagctccagcgattgtggatccagctcgggaagcgttcgcgcttccagggggagttggggatcatggtcatccacatcttcttcggacggagacaagaaaccaatggttgacgcccagcacttcctccccgccggcgatagtgtgtcacagaatgacttcccctctgaagccccaatctctctgaacctgagtcacaatatctgtaaccccatgaccgtcaacagtttgccgcaatatgccgagccatcttgccctagcctgcctgccggccctacgggggtcgaagaggataaggggctttatagccccggtgacctttggccaacaccacccgtatgcgtgacttccagtcttaactgcacactcgagaacggagtaccgtgtgtgatccaagagagtgccccagttcataatagctttattgactggagtgctacatgcgagggccagttttcttccgcctactgtccccttgaactcaacgactacaacgctttcccggaggaaaacatgaattacgccaacgggtttccgtgtccagcagatgtccagaccgactttatcgatcacaactctcagagcacgtggaacacccccccaaacatgccggcggcctgggggcacgcaagtttcataagcagccctccctatctcacttccacccgatctctctcaccaatgtctggactcttcgggagtatctgggccccccagagtgacgtgtacgaaaactgctgtcccataaacccgacgacagagcatagtactcacatggagaaccaggcagtcgtctgtaaggaatattatcccgggttcaacccttttagggcctatatgaacctagatatctggacaaccacagctaaccgcaacgctaactttccactgagcagagacagttcgtactgcggaaacgtttag

SEQ ID NO: 325916 - DNA, 4581 bp, Artificial Sequence
  derived and/or modified sequence
atggccggcctgcggcggccccagcccggctgctactgcaggacagctgctgctgtgaacctgctgctgggcgtcttccaggtgctgctgccctgctgcaggcctggaggagcccagggccaggccatcgagcccctgcccaacgtggtggagctgtggcaggccgaggagggggagctgctgctgcccacccagggcgacagcgaggagggcctggaggagcccagccaggagcagagcttcagtgacaagctgttcagcggcaagggcctgcacttccagcccagcgtgctggactttggcatccagttcctgggccaccctgtggccaagatcctgcacgcctacaaccccagccgggacagcgaggtggtggtgaacagcgtgtttgctgctgctggccacttccacgtgccccctgtgccctgcagggtcatcccagccatgggcaagaccagcttccgcatcatcttcctgcccacagaggagggcagcattgagagcagcctcttcatcaacaccagcagctatggagtgctgagctaccacgtgtctggaattggcacccggcgcatcagcacagagggcagcgccaagcagctgcccaatgcctacttcctgctgcccaaggtgcagagcatccagctgagccagatgcaggccgagaccaccaacaccagcctgctgcaggtgcagctggagtgcagcctgcacaacaaggtgtgccagcagctgaagggctgctacctggagagtgatgatgtgctgcggctgcagatgagcatcatggtgaccatggagaacttcagcaaggagtttgaggagaacacccagcacctgctggaccacctgagcatcgtgtatgtggccacagatgagagcgagaccagtgatgacagcgctgtgaacatgtacatcctgcacagcggcaacagcctcatctggatccaggacatccgccacttcagccagagagatgccctgagcctgcagtttgagcctgtgctgctgcccaccagcaccaccaacttcaccaagatcgccagcttcacctgcaaggccgccaccagctgtgacagcggcatcattgaagatgtgaagaagaccacccacacccccaccctgaaggcctgcctcttcagctctgtggcccagggctacttcaggatggacagcagcgccacccagttccacatcgagacccatgagaacaccagcggcctgtggagcatctggtacagaaaccactttgacagatctgtggtgctgaatgatgtgttcctgagcaaggagaccaagcacatgctgaagatcctgaacttcaccggccccctcttcctgcccccaggctgctggaacatcttcagcctgaagctggccgtgaaggacatcgccatcaacctcttcaccaacgtgttcctgaccaccaacatcggggccatctttgccatccccctgcagatctacagcgcccccaccaaggagggcagcctgggctttgaggtgattgcccactgcggcatgcactacttcatgggcaagagcaaggccggcaaccccaactggaatggcagcctgagcctggaccagagcacctggaatgtggacagcgagctggccaacaagctgtatgagcgctggaagaagtacaagaatggagatgtgtgcaagtttggaacagacatgcagatgatcaacttcaccactggagagttccagctgacagaggcctgcccctacctgggcacccacagcgaggagagccgcttcggcatcctgcacctgcacctgcagcccctggagatgaagagggtgggcgtggtgttcaccccagctgactatggcaaggtgaccagcctcatcctgatccggaacaacctgaccgtcatcgacatgattggagtggagggctttggagcccgggagctgctgaaggtgggcggccgcctgcctggagctgggggcagcctgcgcttcaaggtgcctgagagcaccctgatggactgccggcggcagctgaaggacagcaagcagatcctgagcatcaccaagaacttcaaggtggagaacatcggccccctgcccatcaccgtgagcagcctgaagatcaatggctacaactgccagggctacggctttgaggtgctggactgccaccagttcagcctggaccccaacaccagccgggacatcagcatcgtgttcaccccagacttcaccagctcctgggtgatccgggacctgagcctggtgacagctgctgacctggagttccgcttcaccctgaatgtgaccctgccccaccacctgctgcccctgtgtgctgatgtggtgcccggccccagctgggaggagagcttctggaggctgactgtgttctttgtgtccctgagcctgctgggcgtcatcctgattgccttccagcaggcccagtacatcctgatggagttcatgaagacccggcagaggcagaatgccagcagcagcagccagcagaacaacggccccatggatgtgatcagcccccacagctacaagagcaactgcaagaacttcctggacacctacggccccagcgacaagggccggggcaagaactgcctgcctgtgaacaccccccagagccgcatccagaatgctgccaagaggagccctgccacctacggccacagccagaagaagcacaagtgcagcgtgtactacagcaagcacaagaccagcacagctgctgccagcagcaccagcaccaccacagaggagaagcagaccagccccctgggcagcagcctgcctgctgccaaggaggacatctgcacagatgccatgagggagaactggatcagcctgcgctatgccagcggcatcaacgtgaacctgcagaagaacctgaccctgcccaagaacctgctgaacaaggaggagaacaccctgaagaacaccatcgtgttcagcaaccccagcagtgaatgttccatgaaggagggcatccagacctgcatgttccccaaggagacagacatcaagaccagtgaaaatacagctgagttcaaggagcgggagctgtgccccctgaagaccagcaagaagctgcctgagaaccacctgcccaggaacagcccccagtaccaccagcctgacctgcctgagatcagcaggaagaacaatggaaacaaccagcaggtgcctgtgaagaatgaggtggaccactgtgagaacctgaagaaggtggacaccaagcccagcagcgagaagaagatccacaagaccagccgggaggacatgttcagcgagaagcaggacatcccctttgtggagcaggaggacccctacaggaagaagaagctgcaggagaagcgggagggcaacctgcagaacctgaactggagcaagagcaggacctgcaggaagaacaagaagaggggcgtggcccctgtgtcccggcccccagagcagagcgacctgaagctggtgtgcagcgactttgagaggtctgagctgagcagtgacatcaacgtgcgctcctggtgcatccaggagagcacccgggaggtgtgcaaggcagatgctgagatcgccagcagcctgcctgctgcccagcgggaggccgagggctactaccagaagccagagaagaagtgtgtggacaagttctgcagcgacagcagcagtgactgtggcagcagcagcggctctgtgcgggccagccggggctcctggggctcctggagcagcaccagcagcagtgatggagacaagaagcccatggtggatgcccagcacttcctgcctgctggggacagcgtgtcccagaatgacttccccagcgaggcccccatcagcctgaacctgagccacaacatctgcaaccccatgacagtgaacagcctgccccagtatgcagagcccagctgccccagcctgcctgctggccccaccggggtggaggaggacaagggcctgtacagccctggggacctgtggcccaccccacctgtgtgtgtgaccagcagcctgaactgcaccctggagaatggagtgccctgcgtcatccaggagagcgcccctgtgcacaacagcttcatcgactggagcgccacctgtgagggccagttcagcagcgcctactgccccctggagctgaatgactacaatgccttccctgaggagaacatgaactatgccaacggcttcccctgcccagcagatgtgcagacagacttcatcgaccacaacagccagagcacctggaacaccccacccaacatgcctgctgcctggggccacgccagcttcatcagcagccccccctacctgaccagcaccaggagcctgagccccatgagcggcctgtttggcagcatctgggccccccagagtgatgtgtatgagaactgctgccccatcaaccccaccacagagcacagcacccacatggagaaccaggccgtggtgtgcaaggagtactacccaggcttcaaccccttccgggcctacatgaacctggacatctggaccaccacagccaacagaaatgccaacttccccctgagccgggacagcagctactgtggaaatgtgtag

SEQ ID NO: 325917 - DNA, 4581 bp, Artificial Sequence
  derived and/or modified sequence
atggccggcctgcggcggccccagcccggctgctactgccggaccgccgcggccgtgaacctcttattaggcgtgtttcaagtgcttcttccatgctgtcggcccggaggagcccagggacaagcaattgaacccttacctaatgtggtggagctttggcaagcagaagaaggtgaactgctacttcccacccagggtgactcagaagaagggctcgaggagccttctcaggagcagagcttctctgacaaattatttagcggaaaggggctccattttcaaccctctgtacttgacttcgggattcaatttttaggccacccagtagccaagatcctgcacgcatataaccccagcagagacagcgaagtggtcgttaattcagttttcgccgctgctggccacttccacgtgccccctgtgccctgtcgggtgattcctgcaatgggcaagacgagttttcgaattattttcctgccaactgaggagggatcgatcgagtcttctctgtttataaatactagttcctatggcgtcctcagttaccacgtgagcggcataggcacgagaaggatttcgacagagggctccgctaagcaactacccaatgcatacttcctcctaccgaaggtgcagtccatacagttatcgcagatgcaggccgaaactaccaataccagtctcctgcaggtacagcttgaatgttcgctgcacaacaaggtatgccagcaacttaaaggatgctacctcgaatcggatgacgttcttaggctgcaaatgtccattatggtaaccatggaaaacttctccaaggagttcgaggagaatacccagcatctgctggaccatctctctattgtgtatgtggccacagacgagtccgaaacttcggacgattcagctgtaaacatgtacatcctccacagcggaaactctttgatttggatacaggacatcagacactttagtcagcgggatgccctgagcctccagttcgagccagtgctgctgcccacaagcacaactaactttaccaagatagcttctttcacttgcaaggctgctacatcctgtgacagtgggatcatcgaggacgtgaagaagaccacgcacaccccaaccctcaaggcatgcctgttcagtagtgtcgcacagggatacttccgcatggactcttctgcaacacaattccatatcgagacacatgagaacacttccggcctgtggtcaatttggtatcgaaaccatttcgatagatccgtggtgctcaatgacgttttcttgagcaaagagaccaagcacatgctgaaaatcctgaatttcactggacccctattcttgcccccggggtgttggaacatatttagtttaaaacttgctgtaaaggatatagctattaaccttttcaccaatgtattcttgaccaccaacataggagccattttcgccatccctcttcagatttactcagccccaaccaaagaaggatcccttggcttcgaggttatcgcccattgcgggatgcactatttcatgggtaagtccaaagccggaaaccccaattggaatgggtcactatcactggaccaatctacttggaatgtcgattccgagcttgccaataaactttatgagcgctggaagaaatacaagaacggggacgtatgtaaatttgggaccgacatgcagatgatcaattttactactggcgagtttcagctcaccgaggcctgtccttacctgggcacccactctgaagaatccagatttgggattcttcacctccatcttcagcctttggaaatgaaacgtgtgggggtcgtgtttacccccgctgactatggcaaagtcacatcattgatactcattcgtaacaatctgacggtcattgacatgattggggttgaagggttcggggccagagaattgttgaaggtcggcggccgacttccaggcgctgggggctctttgcggttcaaggtgcctgagtcaactctcatggactgtcggcgccaattgaaagacagcaaacaaattctgagcatcactaaaaacttcaaggtggagaatatcggacccctgcctatcacggtctcttccctgaagattaatggatacaattgccagggctacggtttcgaggttctggactgccaccagttctcccttgaccccaacacaagcagggatatcagtatagtcttcaccccagacttcactagtagttgggtcattagagacctgtcgctggttaccgctgctgacctagaatttcgattcaccctgaatgtgacactgcctcaccaccttctacccctatgcgccgacgtggtgcccgggccaagttgggaggagagtttttggcgcctgactgtctttttcgtgtctttaagcctactgggggtgattttaatcgccttccaacaagctcagtatatcctgatggagttcatgaaaacaaggcagagacaaaacgcaagtagctcctcccagcaaaacaatggaccgatggacgttattagtccacactcttacaaatcaaattgtaagaactttttggacacttatggaccatctgataagggccgggggaaaaattgcctccctgtgaatactcctcagtctagaattcaaaatgccgctaagcgcagtcccgctacttatggacacagccaaaagaaacataagtgtagcgtgtactactccaaacacaagacttccacggccgccgcttcgtccacatcaacaaccaccgaagaaaagcagacatctcctcttggctcctctctgcctgccgctaaggaggacatttgcaccgacgcaatgagggagaattggatctccctgcgctacgcttctggcatcaatgtgaatctccagaagaatttgaccctacctaagaacctgctcaacaaagaagagaatacacttaagaataccatcgttttcagtaacccatcatccgagtgttccatgaaggaaggaattcaaacatgtatgttccccaaggaaacagatattaagacttccgaaaacaccgccgaattcaaagagcgcgagttgtgccccctgaaaacgtccaagaagctgcccgaaaatcatttacctcgtaacagcccacaataccaccagccagacctcccagagataagtagaaaaaacaatggtaacaaccagcaggttcctgtcaaaaatgaagtagaccactgcgagaacttaaaaaaggtggatacaaaaccttcttcagagaagaaaattcacaaaactagcagagaagatatgttctccgaaaagcaggacatccctttcgtagagcaggaagacccttaccgcaagaagaagctgcaggaaaagcgtgagggcaacctacaaaacctgaattggagtaagtcccgtacctgtcgcaaaaacaagaagaggggtgtcgccccggtatcgcgacccccagagcagtcagacctgaaattagtgtgtagcgatttcgaacggtctgagttgagcagtgatatcaatgttaggtcttggtgcatccaggaatcaacgcgggaggtctgtaaagccgacgccgagattgcttcatctctaccagccgctcagcgggaagccgaggggtattatcagaaacccgaaaaaaagtgtgtagacaagttctgtagtgactccagttcagactgcggctccagttcagggtctgttcgggccagccggggaagttggggctcctggagttcgacaagcagctcggacggtgacaaaaagccaatggtggacgcacagcactttttaccagctggggacagcgtcagccagaacgatttccccagtgaagccccaatttccctgaatctgtctcataacatctgcaatcccatgactgtcaattccctgcctcagtatgccgaaccctcttgcccctctctgcctgccggcccaaccggagttgaagaagataaggggctgtactccccaggagatttatggccaacacctcctgtttgtgtgacctcctcactgaattgcactctggaaaatggcgtcccctgcgtcattcaggagtctgctccggtccacaactccttcatagattggtctgccacctgcgagggccagttctcctctgcatactgccctctggagctcaacgattacaatgccttccccgaggagaatatgaattacgcaaatgggtttccctgccccgcagatgtgcagactgacttcatcgatcacaattcccagtctacttggaacacaccacctaacatgcccgctgcttggggccatgcctctttcatttcttctcctccctatctcacttctacccgatcactcagcccaatgagcggattattcggatctatctgggcccctcagtctgatgtgtacgagaattgctgccctatcaaccctacaactgaacacagcacacatatggaaaaccaggccgtggtttgcaaagagtattatcccgggttcaatccgttccgcgcttacatgaatctggatatctggacaaccacggcaaatagaaatgcgaatttcccgctgtccagggactcaagttactgtggcaacgtgtag

SEQ ID NO: 325918 - DNA, 4765 bp, Artificial Sequence
  derived and/or modified sequence
agcgagctagcggcgagcgcggcgagcaacggagaggagcgcgagcagcagcatggcggggctccgacgcccgcagcccggctgctactgccgcaccgcggcggccgtgaacctcctgctgggcgtcttccaggtcctgctgccctgctgtcgcccgggaggggctcagggacaagcgattgagccgttgccgaacgtggtggagctgtggcaggcagaagaaggggaactcctgctgcccactcagggtgattctgaagagggtctggaggagccttctcaagaacagagcttctcggacaaactatttagtggaaaaggcttacattttcagccatcagttttagattttggaatacagttcctgggacatcctgtagcaaagattctccatgcttacaaccctagtagggacagcgaggttgtggtgaattcagtgtttgcagctgctggacatttccatgtaccgccagttccctgcagggtaattccagcaatggggaaaacttccttcagaattattttcttacctactgaagaaggaagcattgaaagttccttatttattaatacctcttcgtatggagtcctttcctatcatgtatctggaattggcactcgtagaatctctacagaagggtctgcaaagcagctaccaaatgcttattttctgcttccaaaggtccagagcattcagctgtctcaaatgcaggcagaaaccactaatactagcctcttgcaggtgcaactggaatgcagtttacataataaagtgtgtcagcaattaaagggttgttatctggaatctgatgatgttttgcgtctacaaatgagcataatggtaacaatggaaaacttttcaaaagaatttgaagaaaacacacaacatttgttagatcatctctctattgtttacgtagctacagatgaatctgagacctcagatgattcagcagtaaatatgtatatattacattcaggaaacagccttatatggatacaggatatacgccatttctcacagagagatgctctgtctctgcagtttgaaccagtactactacctacttctacaacaaactttacaaaaattgcttcttttacctgcaaagcagctacatcatgtgacagtggaattatagaagatgtgaagaaaacaacacacactccaacactaaaagcatgcctcttctcttctgtggctcaggggtattttagaatggactcttctgcaacccagtttcacatagagactcatgagaacacatcaggactttggtcaatatggtaccgcaaccattttgaccgtagtgttgtattaaatgatgtgtttctttccaaggagaccaagcacatgttaaagattctgaatttcactggccctttatttctacctccaggctgttggaatatattttctttgaaacttgctgttaaagacattgccataaatctattcaccaatgtatttttgactacaaacataggtgccatttttgcaatacctctacagatttattcagcaccaaccaaggaagggagtctgggttttgaagtgatagcacattgtggcatgcattatttcatgggaaaatcaaaagcaggaaatcctaattggaatgggagcctttctctggatcaatctacctggaatgtggattctgaacttgcaaataaattgtatgaaagatggaagaaatataaaaatggtgacgtctgcaagtttggcactgatatgcagatgattaatttcacaactggtgaattccagctcaccgaagcttgcccttacctgggtacgcattctgaggaatccaggtttggcatcctccacttacatctgcagcctttggaaatgaaaagggttggcgtagttttcacacctgctgactatggaaaagttacctcactcatactaatccggaataacttgactgttattgacatgattggcgtggaaggatttggagcaagagagttattaaaagtgggtggaagacttcctggtgcaggaggctcactccgatttaaggtgcccgagtccacgctgatggactgccgtagacaactgaaagacagtaagcaaattttatctattacaaagaactttaaagttgagaatattggacctcttcctataactgtttcgtctctgaaaattaatgggtataactgccaaggttatggattcgaggtgctggattgtcatcagttttccctggacccaaacacatcccgcgatatcagcattgtgttcactccagactttacctcctcctgggtaattcgggacctaagtcttgtaaccgcagcggacctagaatttcgcttcactctcaatgtgactctccctcatcacctgttgcccttgtgtgcagacgtggttccaggacccagctgggaggagtcattttggaggctcacggtcttctttgtcagtttgtccctgttgggtgtgattttaatagccttccaacaagcacagtacattctcatggaattcatgaaaacaagacagaggcaaaatgctagctcctcttcacagcaaaacaatggtcctatggatgtaatcagcccccattcttacaaaagcaattgcaagaactttctcgatacatatggcccctctgataaaggcagggggaagaactgccttccagtgaacactccccaaagcaggatccagaatgctgcaaagaggagcccagccacctatggtcattctcagaagaagcacaaatgctcagtgtattacagtaaacacaaaaccagcacagctgcggccagcagcaccagcacgactactgaggaaaaacagacttcacccctgggcagctcactgcctgctgctaaagaggacatttgcactgatgccatgcgtgagaactggatcagcctcagatatgcaagtggcataaatgtcaacctgcagaagaatttaacccttcccaaaaacttactgaataaagaagaaaacacactgaaaaacacaattgttttcagtaatccttcttcagaatgtagtatgaaggagggaatacagacatgtatgtttcctaaggaaactgacattaaaacttcagagaacacagccgagttcaaggaacgggagctctgtccactgaagacctccaagaaactacctgaaaaccatttaccaagaaactcacctcagtaccaccagccagacttgccagaaatttccaggaaaaataatgggaataaccagcaagtacctgtcaagaatgaagtagatcattgtgaaaatttgaagaaggtggacacaaagccttcttcagaaaagaagattcacaaaacatctagagaagacatgttttctgagaaacaggacatacctttcgtagagcaagaagatccttataggaagaaaaagcttcaggagaaaagagaaggaaatttacaaaatttaaattggagtaaaagtcgaacatgtagaaagaacaagaaaaggggtgttgctccagtctcaaggcctcctgaacagagtgatctaaagcttgtgtgcagtgactttgagaggtctgagctgagcagtgacatcaatgtaagaagctggtgtatacaggaaagcactagggaggtttgtaaagcagatgccgaaattgcaagcagtttacctgctgcccagagagaggcagaaggttactaccagaagcctgagaagaaatgtgtggacaagttctgctccgattccagctctgactgtgggagctcctctggcagcgtgcgtgccagccggggcagctgggggagctggagcagcaccagcagctccgacggggataagaagcccatggtggacgcccagcacttcctgccggccggagacagtgtttcacaaaatgattttccttctgaagctcccatctccttgaatctttctcataacatctgcaatcccatgaccgtgaatagtctcccacaatacgcagagccttcctgtcccagccttcctgccgggcccacaggtgttgaagaagataaaggtctttactcacctggagacctgtggcccactccgccagtgtgtgtgacaagcagcttaaactgcaccctggagaacggcgtgccttgtgtgattcaggagtcggccccggttcataatagtttcattgattggagtgcaacatgcgaaggccagttttccagcgcatactgtccattggaattgaacgattacaatgcctttccagaagaaaacatgaactatgccaatggcttcccctgtcctgcagatgttcagacagactttattgatcacaactctcagtctacctggaacaccccacccaacatgcctgctgcctggggacatgccagtttcatcagctctccgccctacctcacaagcacccgaagcttgtctccaatgtctggactttttggttccatctgggccccgcaaagcgatgtgtatgaaaattgctgccccatcaaccccaccacggaacattcgacccacatggaaaaccaagcggtcgtgtgcaaggaatactacccggggttcaacccgtttcgcgcctatatgaacctggacatatggactaccacagcgaataggaatgcaaatttcccactgtctagagactcgagttactgtgggaatgtgtgaaaataattggatttttaaacaatgtgaataaagaggcttgtgttttgattactagtgtaaactggttattgagatagattatgacattggtggatattttggcacttttatatgaaaataaattttttaatg

SEQ ID NO: 325919 - DNA, 4581 bp, Artificial Sequence
  derived and/or modified sequence
atggctggactgagacggcctcagcctggttgctattgtcgcaccgccgctgccgtgaatctgctgctgggggtcttccaggtgctgcttccttgttgcagaccgggaggcgctcaggggcaagcaatcgaacccctgccgaatgtcgtggagctgtggcaagccgaagaaggggagcttcttctgccgacgcagggtgactccgaagaaggactcgaagaaccatctcaggaacagagcttttctgacaagctgttcagcggcaagggcctccattttcagccatcagtgctggatttcgggatacagttcttagggcatcctgtggcaaagatcctccacgcgtacaatccctccagggattccgaggttgtggtaaactccgtgtttgctgccgctggacactttcacgtgcctcccgttccttgtagagtcatccccgcaatgggaaaaacttcctttcgcattatttttctcccaaccgaggaaggaagtatcgaaagctctctcttcattaatacaagcagttatggtgtgctttcttaccatgtatcaggcatcgggaccaggcgcataagcaccgagggctccgcaaagcagctgccaaatgcatattttttgcttcccaaagtgcaaagtatccagctctctcagatgcaggccgaaacaactaacacatcgcttctgcaggtgcaactcgagtgtagtctccacaataaagtctgtcaacagctgaaggggtgttatctggagtcagacgacgtcctgcggctgcaaatgtccataatggtgacaatggagaacttctctaaagagttcgaagagaatactcaacacttgctcgaccatctgagtatagtgtacgtggcaacagacgaatccgagactagcgatgattctgcagtgaacatgtacatccttcatagcggcaacagccttatctggatccaagacattaggcacttcagtcagagagacgcattgtcccttcagttcgaaccagtgctgctgcctacatcaacaaccaacttcacgaagatcgcttcctttacatgtaaggccgcaaccagctgtgacagcggcataatcgaggatgttaaaaaaaccacccacacgccaaccctcaaagcttgtctgttctcctccgtggcacagggctattttcgcatggactcaagtgccacccaattccacattgagacccacgagaatacaagtggcctatggagcatctggtataggaaccacttcgatcgctctgtggttttaaacgacgtgttcctgtccaaagagactaagcatatgctaaaaatcctgaatttcaccggtccactctttctcccacccggatgttggaacatcttctctctcaagctggcagtgaaggatattgccatcaatttattcacgaacgtgttcctcaccacaaacattggcgctatctttgccattccactgcagatttatagcgctcccaccaaagagggatcgcttgggttcgaagtcatcgcccactgcggcatgcactactttatgggaaagtccaaggctggaaaccctaattggaacggcagcctgtcactagatcagtccacttggaacgttgatagtgagctggctaacaaactttacgagagatggaagaagtataagaacggtgacgtttgcaagtttggcaccgacatgcagatgatcaacttcaccacgggggagtttcaactgaccgaggcctgcccataccttggcacacactccgaggagagcagatttggcattctacacctgcatctccagccattagaaatgaagagagtgggtgtcgtgttcacgcccgcagattacgggaaagtcacatccctcattctgattcgcaataatttaactgtgatagacatgatcggagtcgaagggtttggagcgagggaactgttgaaggttggcggtagactcccgggagccggaggtagtctcaggtttaaagtcccagagagtacgttgatggattgtcgcaggcagctgaaagatagcaaacagattctttcgataactaaaaactttaaggtcgagaacatcggacccctgcccatcacagtgagcagcctcaagatcaatggttataattgccagggatatggctttgaagttctggactgccatcagttctccttggacccaaatacaagccgtgacatctctatcgtgtttacgccagatttcacatcaagctgggtcattcgcgacctgtcactcgtgaccgccgcagatctggagtttaggtttactttaaacgtgacgctgcctcatcatctcttaccgctgtgtgcggacgtcgtgcctgggccatcttgggaggaatccttctggcgcttgaccgtgtttttcgtgtcgctgagcttgctgggcgtgatcctgatagcctttcagcaggcacagtacatactgatggagtttatgaaaacgagacagaggcagaacgcttccagctcctcccagcagaataatgggccaatggatgtgatcagccctcactcctataagtccaactgtaagaactttctggatacctacggccctagcgataaaggtcgagggaaaaactgcctaccagtgaataccccgcagtctagaattcagaacgcagccaaacggagtcccgcaacatacggacattcgcagaagaaacataaatgttccgtctactatagcaagcacaagacatctactgcagccgcatcctctactagcaccactacagaagaaaagcagaccagcccccttggaagctcactcccagccgcaaaggaggatatttgtaccgatgctatgagagagaattggatctcattaaggtacgcgtctggcatcaacgttaatctccagaagaatctcacactgcctaagaacctcctgaacaaggaggaaaatactttaaaaaatactattgtgttcagcaacccctcctcagaatgcagcatgaaagaagggatccaaacgtgcatgttccctaaagagacagatatcaagaccagcgagaataccgccgagtttaaggagcgcgagctttgccccctgaaaacatcgaaaaagctgccggagaaccacctgccgcgtaactcacctcagtaccatcaacccgatctgcctgagatcagcaggaaaaacaacgggaataatcagcaggttcccgtcaagaacgaggtggaccactgtgagaacctgaaaaaggtcgacaccaagccatcctctgagaaaaagatacataagacaagccgcgaagatatgttttccgagaaacaggatattccgtttgtcgagcaggaggatccctacagaaagaagaagctccaggaaaagagagaaggcaacctgcagaacctgaattggagcaaaagtcggacttgtagaaaaaacaagaagcggggagtcgctcctgtatccagacccccagaacagagcgatttgaaactcgtctgttccgattttgagcggtcagaattgtcatccgatatcaacgtgcgtagctggtgcatccaggagagtacgcgcgaggtatgcaaagctgacgccgagatagccagcagcctcccagccgctcagcgggaagccgaagggtattaccagaaaccggaaaagaaatgcgtagataagttttgtagtgattccagttccgattgtgggtccagttcaggttccgtacgggcttctagagggagttggggctcatggtccagtacctcttctagcgacggagataaaaagcccatggtagacgcccagcatttcctgcctgccggagattctgtttcccagaatgacttcccaagtgaagccccaatatctctgaatctgtcccacaacatatgtaatcctatgacagtaaatagcctcccgcaatacgcagaaccgagttgtccttctctccccgctggccctacaggtgtggaggaggataaggggctgtactctcctggcgatttgtggccaactccgccagtgtgtgtgacgtcgtcacttaactgtactcttgagaacggtgtcccatgcgtgatccaagagtcagctcctgtgcataactctttcatcgattggagcgccacttgtgaaggccaatttagctcagcgtattgccccctggagctcaatgactacaacgccttccccgaggaaaatatgaactatgcgaacgggttcccatgcccggctgatgtacagacggactttatagatcacaactcccagtcaacctggaacaccccccctaacatgcccgctgcatggggccacgctagctttatttcctctccgccatatctgaccagcacaaggtcactatcccctatgtctggtctcttcggctctatctgggccccacaaagcgatgtctacgagaattgttgtcctatcaacccgacaactgagcattctacccatatggaaaaccaagccgtcgtgtgcaaggagtattacccgggatttaacccctttagggcctatatgaatctggacatctggacaaccacggcaaacaggaatgccaatttccccctgtctcgggactcttcctactgcggaaatgtgtag

SEQ ID NO: 325920 - protein, 1351 aa, Artificial Sequence
  derived and/or modified sequence
MWPSQLLIFMMLLAPIIHGGKHSERHPALAAPLRHAERSPGGALPPRHLLQQPAAERTAAHRGQGPRGATRGVRGPGAQGAQIAAQAFSRAPIPMAVVRRELSCESYPIELRCPGTDVIMIESANYGRTDDKICDSDPAQMENIRCYLPDAYKIMSQRCNNRTQCAVVAGPDVFPDPCPGTYKYLEVQYECVPYKVEQKVFLCPGLLKGVYQSEHLFESDHQSGAWCKDPLQASDKIYYMPWTPYRTDTLTEYSSKDDFIAGRPTTTYKLPHRVDGTGFVVYDGALFFNKERTRNIVKFDLRTRIKSGEAIIANANYHDTSPYRWGGKSDIDLAVDENGLWVIYATEQNNGKIVISQLNPYTLRIEGTWDTAYDKRSASNAFMICGILYVVKSVYEDDDNEATGNKIDYIYNTDQSKDSLVDVPFPNSYQYIAAVDYNPRDNLLYVWNNYHVVKYSLDFGPLDSRSGQAHHGQVSYISPPIHLDSELERPSVKDISTTGPLGMGSTTTSTTLRTTTLSPGRSTTPSVSGRRNRSTSTPSPAVEVLDDMTTHLPSASSQIPALEESCEAVEAREIMWFKTRQGQIAKQPCPAGTIGVSTYLCLAPDGIWDPQGPDLSNCSSPWVNHITQKLKSGETAANIARELAEQTRNHLNAGDITYSVRAMDQLVGLLDVQLRNLTPGGKDSAARSLNKLQKRERSCRAYVQAMVETVNNLLQPQALNAWRDLTTSDQLRAATMLLHTVEESAFVLADNLLKTDIVRENTDNIKLEVARLSTEGNLEDLKFPENMGHGSTIQLSANTLKQNGRNGEIRVAFVLYNNLGPYLSTENASMKLGTEALSTNHSVIVNSPVITAAINKEFSNKVYLADPVVFTVKHIKQSEENFNPNCSFWSYSKRTMTGYWSTQGCRLLTTNKTHTTCSCNHLTNFAVLMAHVEVKHSDAVHDLLLDVITWVGILLSLVCLLICIFTFCFFRGLQSDRNTIHKNLCISLFVAELLFLIGINRTDQPIACAVFAALLHFFFLAAFTWMFLEGVQLYIMLVEVFESEHSRRKYFYLVGYGMPALIVAVSAAVDYRSYGTDKVCWLRLDTYFIWSFIGPATLIIMLNVIFLGIALYKMFHHTAILKPESGCLDNINYEDNRPFIKSWVIGAIALLCLLGLTWAFGLMYINESTVIMAYLFTIFNSLQGMFIFIFHCVLQKKVRKEYGKCLRTHCCSGKSTESSIGSGKTSGSRTPGRYSTGSQSRIRRMWNDTVRKQSESSFITGDINSSASLNRGAMANHLISNALLRPHGTNNPYNTLLGEPAVCNNPSVSMYNAQEPYRETSMGVKLNIAYQIGASEQCQGYKCHGYSTTEW

SEQ ID NO: 325921 - protein, 1283 aa, Artificial Sequence
  derived and/or modified sequence
MWPSQLLIFMMLLAPIIHAFSRAPIPMAVVRRELSCESYPIELRCPGTDVIMIESANYGRTDDKICDSDPAQMENIRCYLPDAYKIMSQRCNNRTQCAVVAGPDVFPDPCPGTYKYLEVQYECVPYKVEQKVFLCPGLLKGVYQSEHLFESDHQSGAWCKDPLQASDKIYYMPWTPYRTDTLTEYSSKDDFIAGRPTTTYKLPHRVDGTGFVVYDGALFFNKERTRNIVKFDLRTRIKSGEAIIANANYHDTSPYRWGGKSDIDLAVDENGLWVIYATEQNNGKIVISQLNPYTLRIEGTWDTAYDKRSASNAFMICGILYVVKSVYEDDDNEATGNKIDYIYNTDQSKDSLVDVPFPNSYQYIAAVDYNPRDNLLYVWNNYHVVKYSLDFGPLDSRSGQAHHGQVSYISPPIHLDSELERPSVKDISTTGPLGMGSTTTSTTLRTTTLSPGRSTTPSVSGRRNRSTSTPSPAVEVLDDMTTHLPSASSQIPALEESCEAVEAREIMWFKTRQGQIAKQPCPAGTIGVSTYLCLAPDGIWDPQGPDLSNCSSPWVNHITQKLKSGETAANIARELAEQTRNHLNAGDITYSVRAMDQLVGLLDVQLRNLTPGGKDSAARSLNKLQKRERSCRAYVQAMVETVNNLLQPQALNAWRDLTTSDQLRAATMLLHTVEESAFVLADNLLKTDIVRENTDNIKLEVARLSTEGNLEDLKFPENMGHGSTIQLSANTLKQNGRNGEIRVAFVLYNNLGPYLSTENASMKLGTEALSTNHSVIVNSPVITAAINKEFSNKVYLADPVVFTVKHIKQSEENFNPNCSFWSYSKRTMTGYWSTQGCRLLTTNKTHTTCSCNHLTNFAVLMAHVEVKHSDAVHDLLLDVITWVGILLSLVCLLICIFTFCFFRGLQSDRNTIHKNLCISLFVAELLFLIGINRTDQPIACAVFAALLHFFFLAAFTWMFLEGVQLYIMLVEVFESEHSRRKYFYLVGYGMPALIVAVSAAVDYRSYGTDKVCWLRLDTYFIWSFIGPATLIIMLNVIFLGIALYKMFHHTAILKPESGCLDNINYEDNRPFIKSWVIGAIALLCLLGLTWAFGLMYINESTVIMAYLFTIFNSLQGMFIFIFHCVLQKKVRKEYGKCLRTHCCSGKSTESSIGSGKTSGSRTPGRYSTGSQSRIRRMWNDTVRKQSESSFITGDINSSASLNRGAMANHLISNALLRPHGTNNPYNTLLGEPAVCNNPSVSMYNAQEPYRETSMGVKLNIAYQIGASEQCQGYKCHGYSTTEW

SEQ ID NO: 325922 - protein, 1580 aa, Artificial Sequence
  derived and/or modified sequence
MWPSQLLIFMMLLAPIIHGGKHSERHPALAAPLRHAERSPGGALPPRHLLQQPAAERTAAHRGQGPRGATRGVRGPGAQGAQIAAQAFSRAPIPMAVVRRELSCESYPIELRCPGTDVIMIESANYGRTDDKICDSDPAQMENIRCYLPDAYKIMSQRCNNRTQCAVVAGPDVFPDPCPGTYKYLEVQYECVPYKVEQKVFLCPGLLKGVYQSEHLFESDHQSGAWCKDPLQASDKIYYMPWTPYRTDTLTEYSSKDDFIAGRPTTTYKLPHRVDGTGFVVYDGALFFNKERTRNIVKFDLRTRIKSGEAIIANANYHDTSPYRWGGKSDIDLAVDENGLWVIYATEQNNGKIVISQLNPYTLRIEGTWDTAYDKRSASNAFMICGILYVVKSVYEDDDNEATGNKIDYIYNTDQSKDSLVDVPFPNSYQYIAAVDYNPRDNLLYVWNNYHVVKYSLDFGPLDSRSGQAHHGQVSYISPPIHLDSELERPSVKDISTTGPLGMGSTTTSTTLRTTTLSPGRSTTPSVSGRRNRSTSTPSPAVEVLDDMTTHLPSASSQIPALEESCEAVEAREIMWFKTRQGQIAKQPCPAGTIGVSTYLCLAPDGIWDPQGPDLSNCSSPWVNHITQKLKSGETAANIARELAEQTRNHLNAGDITYSVRAMDQLVGLLDVQLRNLTPGGKDSAARSLNKLQKRERSCRAYVQAMVETVNNLLQPQALNAWRDLTTSDQLRAATMLLHTVEESAFVLADNLLKTDIVRENTDNIKLEVARLSTEGNLEDLKFPENMGHGSTIQLSANTLKQNGRNGEIRVAFVLYNNLGPYLSTENASMKLGTEALSTNHSVIVNSPVITAAINKEFSNKVYLADPVVFTVKHIKQSEENFNPNCSFWSYSKRTMTGYWSTQGCRLLTTNKTHTTCSCNHLTNFAVLMAHVEVKHSDAVHDLLLDVITWVGILLSLVCLLICIFTFCFFRGLQSDRNTIHKNLCISLFVAELLFLIGINRTDQPIACAVFAALLHFFFLAAFTWMFLEGVQLYIMLVEVFESEHSRRKYFYLVGYGMPALIVAVSAAVDYRSYGTDKVCWLRLDTYFIWSFIGPATLIIMLNVIFLGIALYKMFHHTAILKPESGCLDNINYEDNRPFIKSWVIGAIALLCLLGLTWAFGLMYINESTVIMAYLFTIFNSLQGMFIFIFHCVLQKKVRKEYGKCLRTHCCSGKSTESSIGSGKTSGSRTPGRYSTGSQSRIRRMWNDTVRKQSESSFITGDINSSASLNRGAMANHLISNALLRPHGTNNPYNTLLGEPAVCNNPSVSMYNAQEGLLNNARDTSVMDTLPLNGNHGNSYSIASGEYLSNCVQIIDRGYNHNETALEKKILKELTSNYIPSYLNNHERSSEQNRNLMNKLVNNLGSGREDDAIVLDDATSFNHEESLGLELIHEESDAPLLPPRVYSTENHQPHHYTRRRIPQDHSESFFPLLTNEHTEDLQSPHRDSLYTSMPTLAGVAATESVTTSTQTEPPPAKCGDAEDVYYKSMPNLGSRNHVHQLHTYYQLGRGSSDGFIVPPNKDGTPPEGSSKGPAHLVTSL

SEQ ID NO: 325923 - protein, 1512 aa, Artificial Sequence
  derived and/or modified sequence
MWPSQLLIFMMLLAPIIHAFSRAPIPMAVVRRELSCESYPIELRCPGTDVIMIESANYGRTDDKICDSDPAQMENIRCYLPDAYKIMSQRCNNRTQCAVVAGPDVFPDPCPGTYKYLEVQYECVPYKVEQKVFLCPGLLKGVYQSEHLFESDHQSGAWCKDPLQASDKIYYMPWTPYRTDTLTEYSSKDDFIAGRPTTTYKLPHRVDGTGFVVYDGALFFNKERTRNIVKFDLRTRIKSGEAIIANANYHDTSPYRWGGKSDIDLAVDENGLWVIYATEQNNGKIVISQLNPYTLRIEGTWDTAYDKRSASNAFMICGILYVVKSVYEDDDNEATGNKIDYIYNTDQSKDSLVDVPFPNSYQYIAAVDYNPRDNLLYVWNNYHVVKYSLDFGPLDSRSGQAHHGQVSYISPPIHLDSELERPSVKDISTTGPLGMGSTTTSTTLRTTTLSPGRSTTPSVSGRRNRSTSTPSPAVEVLDDMTTHLPSASSQIPALEESCEAVEAREIMWFKTRQGQIAKQPCPAGTIGVSTYLCLAPDGIWDPQGPDLSNCSSPWVNHITQKLKSGETAANIARELAEQTRNHLNAGDITYSVRAMDQLVGLLDVQLRNLTPGGKDSAARSLNKLQKRERSCRAYVQAMVETVNNLLQPQALNAWRDLTTSDQLRAATMLLHTVEESAFVLADNLLKTDIVRENTDNIKLEVARLSTEGNLEDLKFPENMGHGSTIQLSANTLKQNGRNGEIRVAFVLYNNLGPYLSTENASMKLGTEALSTNHSVIVNSPVITAAINKEFSNKVYLADPVVFTVKHIKQSEENFNPNCSFWSYSKRTMTGYWSTQGCRLLTTNKTHTTCSCNHLTNFAVLMAHVEVKHSDAVHDLLLDVITWVGILLSLVCLLICIFTFCFFRGLQSDRNTIHKNLCISLFVAELLFLIGINRTDQPIACAVFAALLHFFFLAAFTWMFLEGVQLYIMLVEVFESEHSRRKYFYLVGYGMPALIVAVSAAVDYRSYGTDKVCWLRLDTYFIWSFIGPATLIIMLNVIFLGIALYKMFHHTAILKPESGCLDNINYEDNRPFIKSWVIGAIALLCLLGLTWAFGLMYINESTVIMAYLFTIFNSLQGMFIFIFHCVLQKKVRKEYGKCLRTHCCSGKSTESSIGSGKTSGSRTPGRYSTGSQSRIRRMWNDTVRKQSESSFITGDINSSASLNRGAMANHLISNALLRPHGTNNPYNTLLGEPAVCNNPSVSMYNAQEGLLNNARDTSVMDTLPLNGNHGNSYSIASGEYLSNCVQIIDRGYNHNETALEKKILKELTSNYIPSYLNNHERSSEQNRNLMNKLVNNLGSGREDDAIVLDDATSFNHEESLGLELIHEESDAPLLPPRVYSTENHQPHHYTRRRIPQDHSESFFPLLTNEHTEDLQSPHRDSLYTSMPTLAGVAATESVTTSTQTEPPPAKCGDAEDVYYKSMPNLGSRNHVHQLHTYYQLGRGSSDGFIVPPNKDGTPPEGSSKGPAHLVTSL

SEQ ID NO: 325924 - DNA, 3852 bp, Artificial Sequence
  derived and/or modified sequence
atgtggcccagccagctgctgatcttcatgatgctgctggcccccatcatccacgccttcagcagagcccccatccccatggccgtggtgagaagagagctgagctgcgagagctaccccatcgagctgagatgccccggcaccgacgtgatcatgatcgagagcgccaactacggcagaaccgacgacaagatctgcgacagcgaccccgcccagatggagaacatcagatgctacctgcccgacgcctacaagatcatgagccagagatgcaacaacagaacccagtgcgccgtggtggccggccccgacgtgttccccgacccctgccccggcacctacaagtacctggaggtgcagtacgagtgcgtgccctacaaggtggagcagaaggtgttcctgtgccccggcctgctgaagggcgtgtaccagagcgagcacctgttcgagagcgaccaccagagcggcgcctggtgcaaggaccccctgcaggccagcgacaagatctactacatgccctggaccccctacagaaccgacaccctgaccgagtacagcagcaaggacgacttcatcgccggcagacccaccaccacctacaagctgccccacagagtggacggcaccggcttcgtggtgtacgacggcgccctgttcttcaacaaggagagaaccagaaacatcgtgaagttcgacctgagaaccagaatcaagagcggcgaggccatcatcgccaacgccaactaccacgacaccagcccctacagatggggcggcaagagcgacatcgacctggccgtggacgagaacggcctgtgggtgatctacgccaccgagcagaacaacggcaagatcgtgatcagccagctgaacccctacaccctgagaatcgagggcacctgggacaccgcctacgacaagagaagcgccagcaacgccttcatgatctgcggcatcctgtacgtggtgaagagcgtgtacgaggacgacgacaacgaggccaccggcaacaagatcgactacatctacaacaccgaccagagcaaggacagcctggtggacgtgcccttccccaacagctaccagtacatcgccgccgtggactacaaccccagagacaacctgctgtacgtgtggaacaactaccacgtggtgaagtacagcctggacttcggccccctggacagcagaagcggccaggcccaccacggccaggtgagctacatcagcccccccatccacctggacagcgagctggagagacccagcgtgaaggacatcagcaccaccggccccctgggcatgggcagcaccaccaccagcaccaccctgagaaccaccaccctgagccccggcagaagcaccacccccagcgtgagcggcagaagaaacagaagcaccagcacccccagccccgccgtggaggtgctggacgacatgaccacccacctgcccagcgccagcagccagatccccgccctggaggagagctgcgaggccgtggaggccagagagatcatgtggttcaagaccagacagggccagatcgccaagcagccctgccccgccggcaccatcggcgtgagcacctacctgtgcctggcccccgacggcatctgggacccccagggccccgacctgagcaactgcagcagcccctgggtgaaccacatcacccagaagctgaagagcggcgagaccgccgccaacatcgccagagagctggccgagcagaccagaaaccacctgaacgccggcgacatcacctacagcgtgagagccatggaccagctggtgggcctgctggacgtgcagctgagaaacctgacccccggcggcaaggacagcgccgccagaagcctgaacaagctgcagaagagagagagaagctgcagagcctacgtgcaggccatggtggagaccgtgaacaacctgctgcagccccaggccctgaacgcctggagagacctgaccaccagcgaccagctgagagccgccaccatgctgctgcacaccgtggaggagagcgccttcgtgctggccgacaacctgctgaagaccgacatcgtgagagagaacaccgacaacatcaagctggaggtggccagactgagcaccgagggcaacctggaggacctgaagttccccgagaacatgggccacggcagcaccatccagctgagcgccaacaccctgaagcagaacggcagaaacggcgagatcagagtggccttcgtgctgtacaacaacctgggcccctacctgagcaccgagaacgccagcatgaagctgggcaccgaggccctgagcaccaaccacagcgtgatcgtgaacagccccgtgatcaccgccgccatcaacaaggagttcagcaacaaggtgtacctggccgaccccgtggtgttcaccgtgaagcacatcaagcagagcgaggagaacttcaaccccaactgcagcttctggagctacagcaagagaaccatgaccggctactggagcacccagggctgcagactgctgaccaccaacaagacccacaccacctgcagctgcaaccacctgaccaacttcgccgtgctgatggcccacgtggaggtgaagcacagcgacgccgtgcacgacctgctgctggacgtgatcacctgggtgggcatcctgctgagcctggtgtgcctgctgatctgcatcttcaccttctgcttcttcagaggcctgcagagcgacagaaacaccatccacaagaacctgtgcatcagcctgttcgtggccgagctgctgttcctgatcggcatcaacagaaccgaccagcccatcgcctgcgccgtgttcgccgccctgctgcacttcttcttcctggccgccttcacctggatgttcctggagggcgtgcagctgtacatcatgctggtggaggtgttcgagagcgagcacagcagaagaaagtacttctacctggtgggctacggcatgcccgccctgatcgtggccgtgagcgccgccgtggactacagaagctacggcaccgacaaggtgtgctggctgagactggacacctacttcatctggagcttcatcggccccgccaccctgatcatcatgctgaacgtgatcttcctgggcatcgccctgtacaagatgttccaccacaccgccatcctgaagcccgagagcggctgcctggacaacatcaactacgaggacaacagacccttcatcaagagctgggtgatcggcgccatcgccctgctgtgcctgctgggcctgacctgggccttcggcctgatgtacatcaacgagagcaccgtgatcatggcctacctgttcaccatcttcaacagcctgcagggcatgttcatcttcatcttccactgcgtgctgcagaagaaggtgagaaaggagtacggcaagtgcctgagaacccactgctgcagcggcaagagcaccgagagcagcatcggcagcggcaagaccagcggcagcagaacccccggcagatacagcaccggcagccagagcagaatcagaagaatgtggaacgacaccgtgagaaagcagagcgagagcagcttcatcaccggcgacatcaacagcagcgccagcctgaacagaggcgccatggccaaccacctgatcagcaacgccctgctgagaccccacggcaccaacaacccctacaacaccctgctgggcgagcccgccgtgtgcaacaaccccagcgtgagcatgtacaacgcccaggagccctacagagagaccagcatgggcgtgaagctgaacatcgcctaccagatcggcgccagcgagcagtgccagggctacaagtgccacggctacagcaccaccgagtggtag

SEQ ID NO: 325925 - DNA, 4743 bp, Artificial Sequence
  derived and/or modified sequence
atgtggcccagccagctgctgatcttcatgatgctgctggcccccatcatccacggcggcaagcacagcgagagacaccccgccctggccgcccccctgagacacgccgagagaagccccggcggcgccctgccccccagacacctgctgcagcagcccgccgccgagagaaccgccgcccacagaggccagggccccagaggcgccaccagaggcgtgagaggccccggcgcccagggcgcccagatcgccgcccaggccttcagcagagcccccatccccatggccgtggtgagaagagagctgagctgcgagagctaccccatcgagctgagatgccccggcaccgacgtgatcatgatcgagagcgccaactacggcagaaccgacgacaagatctgcgacagcgaccccgcccagatggagaacatcagatgctacctgcccgacgcctacaagatcatgagccagagatgcaacaacagaacccagtgcgccgtggtggccggccccgacgtgttccccgacccctgccccggcacctacaagtacctggaggtgcagtacgagtgcgtgccctacaaggtggagcagaaggtgttcctgtgccccggcctgctgaagggcgtgtaccagagcgagcacctgttcgagagcgaccaccagagcggcgcctggtgcaaggaccccctgcaggccagcgacaagatctactacatgccctggaccccctacagaaccgacaccctgaccgagtacagcagcaaggacgacttcatcgccggcagacccaccaccacctacaagctgccccacagagtggacggcaccggcttcgtggtgtacgacggcgccctgttcttcaacaaggagagaaccagaaacatcgtgaagttcgacctgagaaccagaatcaagagcggcgaggccatcatcgccaacgccaactaccacgacaccagcccctacagatggggcggcaagagcgacatcgacctggccgtggacgagaacggcctgtgggtgatctacgccaccgagcagaacaacggcaagatcgtgatcagccagctgaacccctacaccctgagaatcgagggcacctgggacaccgcctacgacaagagaagcgccagcaacgccttcatgatctgcggcatcctgtacgtggtgaagagcgtgtacgaggacgacgacaacgaggccaccggcaacaagatcgactacatctacaacaccgaccagagcaaggacagcctggtggacgtgcccttccccaacagctaccagtacatcgccgccgtggactacaaccccagagacaacctgctgtacgtgtggaacaactaccacgtggtgaagtacagcctggacttcggccccctggacagcagaagcggccaggcccaccacggccaggtgagctacatcagcccccccatccacctggacagcgagctggagagacccagcgtgaaggacatcagcaccaccggccccctgggcatgggcagcaccaccaccagcaccaccctgagaaccaccaccctgagccccggcagaagcaccacccccagcgtgagcggcagaagaaacagaagcaccagcacccccagccccgccgtggaggtgctggacgacatgaccacccacctgcccagcgccagcagccagatccccgccctggaggagagctgcgaggccgtggaggccagagagatcatgtggttcaagaccagacagggccagatcgccaagcagccctgccccgccggcaccatcggcgtgagcacctacctgtgcctggcccccgacggcatctgggacccccagggccccgacctgagcaactgcagcagcccctgggtgaaccacatcacccagaagctgaagagcggcgagaccgccgccaacatcgccagagagctggccgagcagaccagaaaccacctgaacgccggcgacatcacctacagcgtgagagccatggaccagctggtgggcctgctggacgtgcagctgagaaacctgacccccggcggcaaggacagcgccgccagaagcctgaacaagctgcagaagagagagagaagctgcagagcctacgtgcaggccatggtggagaccgtgaacaacctgctgcagccccaggccctgaacgcctggagagacctgaccaccagcgaccagctgagagccgccaccatgctgctgcacaccgtggaggagagcgccttcgtgctggccgacaacctgctgaagaccgacatcgtgagagagaacaccgacaacatcaagctggaggtggccagactgagcaccgagggcaacctggaggacctgaagttccccgagaacatgggccacggcagcaccatccagctgagcgccaacaccctgaagcagaacggcagaaacggcgagatcagagtggccttcgtgctgtacaacaacctgggcccctacctgagcaccgagaacgccagcatgaagctgggcaccgaggccctgagcaccaaccacagcgtgatcgtgaacagccccgtgatcaccgccgccatcaacaaggagttcagcaacaaggtgtacctggccgaccccgtggtgttcaccgtgaagcacatcaagcagagcgaggagaacttcaaccccaactgcagcttctggagctacagcaagagaaccatgaccggctactggagcacccagggctgcagactgctgaccaccaacaagacccacaccacctgcagctgcaaccacctgaccaacttcgccgtgctgatggcccacgtggaggtgaagcacagcgacgccgtgcacgacctgctgctggacgtgatcacctgggtgggcatcctgctgagcctggtgtgcctgctgatctgcatcttcaccttctgcttcttcagaggcctgcagagcgacagaaacaccatccacaagaacctgtgcatcagcctgttcgtggccgagctgctgttcctgatcggcatcaacagaaccgaccagcccatcgcctgcgccgtgttcgccgccctgctgcacttcttcttcctggccgccttcacctggatgttcctggagggcgtgcagctgtacatcatgctggtggaggtgttcgagagcgagcacagcagaagaaagtacttctacctggtgggctacggcatgcccgccctgatcgtggccgtgagcgccgccgtggactacagaagctacggcaccgacaaggtgtgctggctgagactggacacctacttcatctggagcttcatcggccccgccaccctgatcatcatgctgaacgtgatcttcctgggcatcgccctgtacaagatgttccaccacaccgccatcctgaagcccgagagcggctgcctggacaacatcaactacgaggacaacagacccttcatcaagagctgggtgatcggcgccatcgccctgctgtgcctgctgggcctgacctgggccttcggcctgatgtacatcaacgagagcaccgtgatcatggcctacctgttcaccatcttcaacagcctgcagggcatgttcatcttcatcttccactgcgtgctgcagaagaaggtgagaaaggagtacggcaagtgcctgagaacccactgctgcagcggcaagagcaccgagagcagcatcggcagcggcaagaccagcggcagcagaacccccggcagatacagcaccggcagccagagcagaatcagaagaatgtggaacgacaccgtgagaaagcagagcgagagcagcttcatcaccggcgacatcaacagcagcgccagcctgaacagaggcgccatggccaaccacctgatcagcaacgccctgctgagaccccacggcaccaacaacccctacaacaccctgctgggcgagcccgccgtgtgcaacaaccccagcgtgagcatgtacaacgcccaggagggcctgctgaacaacgccagagacaccagcgtgatggacaccctgcccctgaacggcaaccacggcaacagctacagcatcgccagcggcgagtacctgagcaactgcgtgcagatcatcgacagaggctacaaccacaacgagaccgccctggagaagaagatcctgaaggagctgaccagcaactacatccccagctacctgaacaaccacgagagaagcagcgagcagaacagaaacctgatgaacaagctggtgaacaacctgggcagcggcagagaggacgacgccatcgtgctggacgacgccaccagcttcaaccacgaggagagcctgggcctggagctgatccacgaggagagcgacgcccccctgctgccccccagagtgtacagcaccgagaaccaccagccccaccactacaccagaagaagaatcccccaggaccacagcgagagcttcttccccctgctgaccaacgagcacaccgaggacctgcagagcccccacagagacagcctgtacaccagcatgcccaccctggccggcgtggccgccaccgagagcgtgaccaccagcacccagaccgagcccccccccgccaagtgcggcgacgccgaggacgtgtactacaagagcatgcccaacctgggcagcagaaaccacgtgcaccagctgcacacctactaccagctgggcagaggcagcagcgacggcttcatcgtgccccccaacaaggacggcaccccccccgagggcagcagcaagggccccgcccacctggtgaccagcctgtag

SEQ ID NO: 325926 - DNA, 4056 bp, Artificial Sequence
  derived and/or modified sequence
atgtggcccagccagctgctgatcttcatgatgctgctggcccccatcatccacggcggcaagcacagcgagagacaccccgccctggccgcccccctgagacacgccgagagaagccccggcggcgccctgccccccagacacctgctgcagcagcccgccgccgagagaaccgccgcccacagaggccagggccccagaggcgccaccagaggcgtgagaggccccggcgcccagggcgcccagatcgccgcccaggccttcagcagagcccccatccccatggccgtggtgagaagagagctgagctgcgagagctaccccatcgagctgagatgccccggcaccgacgtgatcatgatcgagagcgccaactacggcagaaccgacgacaagatctgcgacagcgaccccgcccagatggagaacatcagatgctacctgcccgacgcctacaagatcatgagccagagatgcaacaacagaacccagtgcgccgtggtggccggccccgacgtgttccccgacccctgccccggcacctacaagtacctggaggtgcagtacgagtgcgtgccctacaaggtggagcagaaggtgttcctgtgccccggcctgctgaagggcgtgtaccagagcgagcacctgttcgagagcgaccaccagagcggcgcctggtgcaaggaccccctgcaggccagcgacaagatctactacatgccctggaccccctacagaaccgacaccctgaccgagtacagcagcaaggacgacttcatcgccggcagacccaccaccacctacaagctgccccacagagtggacggcaccggcttcgtggtgtacgacggcgccctgttcttcaacaaggagagaaccagaaacatcgtgaagttcgacctgagaaccagaatcaagagcggcgaggccatcatcgccaacgccaactaccacgacaccagcccctacagatggggcggcaagagcgacatcgacctggccgtggacgagaacggcctgtgggtgatctacgccaccgagcagaacaacggcaagatcgtgatcagccagctgaacccctacaccctgagaatcgagggcacctgggacaccgcctacgacaagagaagcgccagcaacgccttcatgatctgcggcatcctgtacgtggtgaagagcgtgtacgaggacgacgacaacgaggccaccggcaacaagatcgactacatctacaacaccgaccagagcaaggacagcctggtggacgtgcccttccccaacagctaccagtacatcgccgccgtggactacaaccccagagacaacctgctgtacgtgtggaacaactaccacgtggtgaagtacagcctggacttcggccccctggacagcagaagcggccaggcccaccacggccaggtgagctacatcagcccccccatccacctggacagcgagctggagagacccagcgtgaaggacatcagcaccaccggccccctgggcatgggcagcaccaccaccagcaccaccctgagaaccaccaccctgagccccggcagaagcaccacccccagcgtgagcggcagaagaaacagaagcaccagcacccccagccccgccgtggaggtgctggacgacatgaccacccacctgcccagcgccagcagccagatccccgccctggaggagagctgcgaggccgtggaggccagagagatcatgtggttcaagaccagacagggccagatcgccaagcagccctgccccgccggcaccatcggcgtgagcacctacctgtgcctggcccccgacggcatctgggacccccagggccccgacctgagcaactgcagcagcccctgggtgaaccacatcacccagaagctgaagagcggcgagaccgccgccaacatcgccagagagctggccgagcagaccagaaaccacctgaacgccggcgacatcacctacagcgtgagagccatggaccagctggtgggcctgctggacgtgcagctgagaaacctgacccccggcggcaaggacagcgccgccagaagcctgaacaagctgcagaagagagagagaagctgcagagcctacgtgcaggccatggtggagaccgtgaacaacctgctgcagccccaggccctgaacgcctggagagacctgaccaccagcgaccagctgagagccgccaccatgctgctgcacaccgtggaggagagcgccttcgtgctggccgacaacctgctgaagaccgacatcgtgagagagaacaccgacaacatcaagctggaggtggccagactgagcaccgagggcaacctggaggacctgaagttccccgagaacatgggccacggcagcaccatccagctgagcgccaacaccctgaagcagaacggcagaaacggcgagatcagagtggccttcgtgctgtacaacaacctgggcccctacctgagcaccgagaacgccagcatgaagctgggcaccgaggccctgagcaccaaccacagcgtgatcgtgaacagccccgtgatcaccgccgccatcaacaaggagttcagcaacaaggtgtacctggccgaccccgtggtgttcaccgtgaagcacatcaagcagagcgaggagaacttcaaccccaactgcagcttctggagctacagcaagagaaccatgaccggctactggagcacccagggctgcagactgctgaccaccaacaagacccacaccacctgcagctgcaaccacctgaccaacttcgccgtgctgatggcccacgtggaggtgaagcacagcgacgccgtgcacgacctgctgctggacgtgatcacctgggtgggcatcctgctgagcctggtgtgcctgctgatctgcatcttcaccttctgcttcttcagaggcctgcagagcgacagaaacaccatccacaagaacctgtgcatcagcctgttcgtggccgagctgctgttcctgatcggcatcaacagaaccgaccagcccatcgcctgcgccgtgttcgccgccctgctgcacttcttcttcctggccgccttcacctggatgttcctggagggcgtgcagctgtacatcatgctggtggaggtgttcgagagcgagcacagcagaagaaagtacttctacctggtgggctacggcatgcccgccctgatcgtggccgtgagcgccgccgtggactacagaagctacggcaccgacaaggtgtgctggctgagactggacacctacttcatctggagcttcatcggccccgccaccctgatcatcatgctgaacgtgatcttcctgggcatcgccctgtacaagatgttccaccacaccgccatcctgaagcccgagagcggctgcctggacaacatcaactacgaggacaacagacccttcatcaagagctgggtgatcggcgccatcgccctgctgtgcctgctgggcctgacctgggccttcggcctgatgtacatcaacgagagcaccgtgatcatggcctacctgttcaccatcttcaacagcctgcagggcatgttcatcttcatcttccactgcgtgctgcagaagaaggtgagaaaggagtacggcaagtgcctgagaacccactgctgcagcggcaagagcaccgagagcagcatcggcagcggcaagaccagcggcagcagaacccccggcagatacagcaccggcagccagagcagaatcagaagaatgtggaacgacaccgtgagaaagcagagcgagagcagcttcatcaccggcgacatcaacagcagcgccagcctgaacagaggcgccatggccaaccacctgatcagcaacgccctgctgagaccccacggcaccaacaacccctacaacaccctgctgggcgagcccgccgtgtgcaacaaccccagcgtgagcatgtacaacgcccaggagccctacagagagaccagcatgggcgtgaagctgaacatcgcctaccagatcggcgccagcgagcagtgccagggctacaagtgccacggctacagcaccaccgagtggtag

SEQ ID NO: 325927 - DNA, 4539 bp, Artificial Sequence
  derived and/or modified sequence
atgtggcccagccagctgctgatcttcatgatgctgctggcccccatcatccacgccttcagcagagcccccatccccatggccgtggtgagaagagagctgagctgcgagagctaccccatcgagctgagatgccccggcaccgacgtgatcatgatcgagagcgccaactacggcagaaccgacgacaagatctgcgacagcgaccccgcccagatggagaacatcagatgctacctgcccgacgcctacaagatcatgagccagagatgcaacaacagaacccagtgcgccgtggtggccggccccgacgtgttccccgacccctgccccggcacctacaagtacctggaggtgcagtacgagtgcgtgccctacaaggtggagcagaaggtgttcctgtgccccggcctgctgaagggcgtgtaccagagcgagcacctgttcgagagcgaccaccagagcggcgcctggtgcaaggaccccctgcaggccagcgacaagatctactacatgccctggaccccctacagaaccgacaccctgaccgagtacagcagcaaggacgacttcatcgccggcagacccaccaccacctacaagctgccccacagagtggacggcaccggcttcgtggtgtacgacggcgccctgttcttcaacaaggagagaaccagaaacatcgtgaagttcgacctgagaaccagaatcaagagcggcgaggccatcatcgccaacgccaactaccacgacaccagcccctacagatggggcggcaagagcgacatcgacctggccgtggacgagaacggcctgtgggtgatctacgccaccgagcagaacaacggcaagatcgtgatcagccagctgaacccctacaccctgagaatcgagggcacctgggacaccgcctacgacaagagaagcgccagcaacgccttcatgatctgcggcatcctgtacgtggtgaagagcgtgtacgaggacgacgacaacgaggccaccggcaacaagatcgactacatctacaacaccgaccagagcaaggacagcctggtggacgtgcccttccccaacagctaccagtacatcgccgccgtggactacaaccccagagacaacctgctgtacgtgtggaacaactaccacgtggtgaagtacagcctggacttcggccccctggacagcagaagcggccaggcccaccacggccaggtgagctacatcagcccccccatccacctggacagcgagctggagagacccagcgtgaaggacatcagcaccaccggccccctgggcatgggcagcaccaccaccagcaccaccctgagaaccaccaccctgagccccggcagaagcaccacccccagcgtgagcggcagaagaaacagaagcaccagcacccccagccccgccgtggaggtgctggacgacatgaccacccacctgcccagcgccagcagccagatccccgccctggaggagagctgcgaggccgtggaggccagagagatcatgtggttcaagaccagacagggccagatcgccaagcagccctgccccgccggcaccatcggcgtgagcacctacctgtgcctggcccccgacggcatctgggacccccagggccccgacctgagcaactgcagcagcccctgggtgaaccacatcacccagaagctgaagagcggcgagaccgccgccaacatcgccagagagctggccgagcagaccagaaaccacctgaacgccggcgacatcacctacagcgtgagagccatggaccagctggtgggcctgctggacgtgcagctgagaaacctgacccccggcggcaaggacagcgccgccagaagcctgaacaagctgcagaagagagagagaagctgcagagcctacgtgcaggccatggtggagaccgtgaacaacctgctgcagccccaggccctgaacgcctggagagacctgaccaccagcgaccagctgagagccgccaccatgctgctgcacaccgtggaggagagcgccttcgtgctggccgacaacctgctgaagaccgacatcgtgagagagaacaccgacaacatcaagctggaggtggccagactgagcaccgagggcaacctggaggacctgaagttccccgagaacatgggccacggcagcaccatccagctgagcgccaacaccctgaagcagaacggcagaaacggcgagatcagagtggccttcgtgctgtacaacaacctgggcccctacctgagcaccgagaacgccagcatgaagctgggcaccgaggccctgagcaccaaccacagcgtgatcgtgaacagccccgtgatcaccgccgccatcaacaaggagttcagcaacaaggtgtacctggccgaccccgtggtgttcaccgtgaagcacatcaagcagagcgaggagaacttcaaccccaactgcagcttctggagctacagcaagagaaccatgaccggctactggagcacccagggctgcagactgctgaccaccaacaagacccacaccacctgcagctgcaaccacctgaccaacttcgccgtgctgatggcccacgtggaggtgaagcacagcgacgccgtgcacgacctgctgctggacgtgatcacctgggtgggcatcctgctgagcctggtgtgcctgctgatctgcatcttcaccttctgcttcttcagaggcctgcagagcgacagaaacaccatccacaagaacctgtgcatcagcctgttcgtggccgagctgctgttcctgatcggcatcaacagaaccgaccagcccatcgcctgcgccgtgttcgccgccctgctgcacttcttcttcctggccgccttcacctggatgttcctggagggcgtgcagctgtacatcatgctggtggaggtgttcgagagcgagcacagcagaagaaagtacttctacctggtgggctacggcatgcccgccctgatcgtggccgtgagcgccgccgtggactacagaagctacggcaccgacaaggtgtgctggctgagactggacacctacttcatctggagcttcatcggccccgccaccctgatcatcatgctgaacgtgatcttcctgggcatcgccctgtacaagatgttccaccacaccgccatcctgaagcccgagagcggctgcctggacaacatcaactacgaggacaacagacccttcatcaagagctgggtgatcggcgccatcgccctgctgtgcctgctgggcctgacctgggccttcggcctgatgtacatcaacgagagcaccgtgatcatggcctacctgttcaccatcttcaacagcctgcagggcatgttcatcttcatcttccactgcgtgctgcagaagaaggtgagaaaggagtacggcaagtgcctgagaacccactgctgcagcggcaagagcaccgagagcagcatcggcagcggcaagaccagcggcagcagaacccccggcagatacagcaccggcagccagagcagaatcagaagaatgtggaacgacaccgtgagaaagcagagcgagagcagcttcatcaccggcgacatcaacagcagcgccagcctgaacagaggcgccatggccaaccacctgatcagcaacgccctgctgagaccccacggcaccaacaacccctacaacaccctgctgggcgagcccgccgtgtgcaacaaccccagcgtgagcatgtacaacgcccaggagggcctgctgaacaacgccagagacaccagcgtgatggacaccctgcccctgaacggcaaccacggcaacagctacagcatcgccagcggcgagtacctgagcaactgcgtgcagatcatcgacagaggctacaaccacaacgagaccgccctggagaagaagatcctgaaggagctgaccagcaactacatccccagctacctgaacaaccacgagagaagcagcgagcagaacagaaacctgatgaacaagctggtgaacaacctgggcagcggcagagaggacgacgccatcgtgctggacgacgccaccagcttcaaccacgaggagagcctgggcctggagctgatccacgaggagagcgacgcccccctgctgccccccagagtgtacagcaccgagaaccaccagccccaccactacaccagaagaagaatcccccaggaccacagcgagagcttcttccccctgctgaccaacgagcacaccgaggacctgcagagcccccacagagacagcctgtacaccagcatgcccaccctggccggcgtggccgccaccgagagcgtgaccaccagcacccagaccgagcccccccccgccaagtgcggcgacgccgaggacgtgtactacaagagcatgcccaacctgggcagcagaaaccacgtgcaccagctgcacacctactaccagctgggcagaggcagcagcgacggcttcatcgtgccccccaacaaggacggcaccccccccgagggcagcagcaagggccccgcccacctggtgaccagcctgtag

SEQ ID NO: 325928 - DNA, 3852 bp, Artificial Sequence
  derived and/or modified sequence
atgtggccctctcagctgttaatcttcatgatgctcctggcccccattattcacgccttctcgcgcgctcctatccccatggccgtcgtgaggagggaactgtcctgtgagtcttatcctatcgagctcagatgccccggaaccgacgtaatcatgatcgaatctgctaactatggaagaactgatgacaagatctgcgattccgaccctgcccaaatggaaaatatccgatgctatctccccgatgcatataaaataatgtcacagaggtgtaacaataggacgcaatgtgcagtggtggctggtcctgatgtgtttccggacccgtgcccagggacatacaagtacctagaggttcagtacgagtgcgtcccgtacaaagtggagcaaaaggttttcctgtgtcctggcctcctgaaaggggtgtaccagagcgaacacctattcgagtccgatcatcagtccggagcctggtgcaaagatccgctccaagcgtctgacaagatttattacatgccttggacaccataccgcaccgataccctgacagagtactcaagcaaggacgattttattgcaggccgtccaactacgacatacaagttgcctcaccgggtggatggaacagggtttgtggtgtatgacggagctctgtttttcaataaggaacgaacccggaacattgttaagtttgatctgaggacccggatcaaaagcggagaagccataatagctaacgctaactaccatgacacctccccttatagatggggggggaagagcgacatcgacctcgccgtcgatgagaatggcttatgggtgatctacgcaacagaacaaaacaatggtaagatcgttatcagtcagctgaacccttacaccctgcgcattgaaggcacctgggacacggcctacgacaagaggtctgcctcgaacgccttcatgatttgcggtatcctttatgtggtcaaaagcgtctacgaggatgacgacaacgaggcaaccggaaacaaaattgattatatatacaatactgaccaaagtaaggacagtcttgtggatgttccctttcctaactcttaccagtatattgctgcagttgactacaacccacgagacaatctcctgtatgtgtggaataactatcatgtggttaaatattccctggattttggaccactggacagccgctccggtcaagcccaccacggacaagtgtcttatattagtcctcccattcacctggacagtgagctggaacgcccatctgtaaaggatataagcaccacaggccccctgggcatgggtagcaccacaacttctaccacactaaggacgaccacgttgtcaccaggcaggtctactactcctagcgtgtccggacgacgcaaccgctcaactagcacgcctagtccagcagtggaggtgttggacgacatgacaactcacctgccttccgcttccagtcaaattcctgcgctggaagagtcatgcgaggctgtagaggccagagagataatgtggtttaaaacccgccagggacaaatcgccaagcagccatgtccggccggcacaataggcgtgagcacatacctctgtctggcacctgacggtatctgggacccacagggcccagacctgagtaactgctcatcaccttgggtaaaccatataacacaaaaactaaagtcaggtgaaacagccgccaatattgcaagagaactggcagaacagactcgaaatcatctaaacgccggggacattacttactcagttcgagccatggatcaactagtgggtctgctggacgtacagttacggaacctgactcctggtggcaaagacagtgcggcaaggagtttgaacaaactgcagaaaagggagaggtcatgtcgggcatatgttcaggccatggtcgagaccgtaaacaacctccttcagccacaggccctgaatgcatggcgggatctgaccacttctgatcagctaagagccgccacaatgctgctacacaccgttgaggaaagcgctttcgtgctggccgataatctgcttaagacggacatcgttcgggagaacaccgacaacattaagttagaggttgctaggctatccaccgagggaaaccttgaagacctgaagttcccggagaacatgggccacggtagcacaatccagttgagcgcaaacacccttaagcagaacggccgcaacggtgagattcgcgttgcctttgtgctctacaataacttaggaccctatctttcgactgaaaatgcgtccatgaaactggggaccgaggcactctcaaccaaccactccgtgatcgtaaatagcccagtcattacagcagcgatcaataaagaattctccaacaaggtctatctagcagaccctgtcgtcttcaccgtaaaacacataaaacagtcagaagaaaacttcaatcctaattgtagtttctggtcctactctaaacgaacgatgacggggtactggtctacacagggttgtcggcttctcacaactaacaaaactcacaccacctgctcgtgcaatcacctcacaaattttgccgtgctgatggctcatgtggaggttaagcacagtgatgctgtacacgacttgttgctcgacgtgatcacctgggtgggtatcctgctcagcctggtgtgcctcctcatttgcatttttaccttctgtttcttcagagggttgcagagcgaccggaacaccatccacaagaatttgtgtattagcctgtttgttgcagaactattgtttctgataggaattaacaggaccgatcagccgattgcatgtgcagttttcgctgccctgctccatttcttctttctggcggccttcacctggatgttcctggaaggagtccaactctatattatgctggtcgaggtcttcgagtctgaacattccagacgcaaatacttttacctggtgggctatggaatgcccgcactcattgtggccgtctctgccgccgtggattatcgctcttatgggaccgacaaagtgtgctggctaagactggacacgtactttatttggagcttcattggccccgccaccttgataattatgttgaatgtgatttttctcggaattgcgctgtacaagatgttccaccacacagctatcctgaaacctgagtctggatgtctcgacaatattaattatgaggacaaccggccttttatcaaaagttgggtcattggtgctatagcactgctgtgcctgcttggactcacatgggcttttggactcatgtacataaatgaatccacagttatcatggcttacctatttactattttcaactcactgcaggggatgttcatcttcattttccactgcgtgctgcagaagaaagttcggaaggagtacggtaaatgtctgaggacacactgctgttccggcaagagtaccgaatcctcgattggatcaggaaagacctcaggcagccggacccccggacgctactctaccggctcacagagtaggattagaaggatgtggaacgatactgtgcggaagcaaagcgagtcctcattcataacaggcgacatcaatagttctgctagcctgaaccgcggggccatggcgaaccatttaatctccaatgctctgctgaggcctcacgggaccaacaatccgtacaatacactcttgggtgaaccagccgtatgcaataacccatccgtcagcatgtacaacgcccaggagccatatcgggaaacgtccatgggggtgaagctcaacattgcctatcaaatcggggcatctgagcagtgtcaaggatataagtgccacggctattccaccaccgaatggtag

SEQ ID NO: 325929 - DNA, 4743 bp, Artificial Sequence
  derived and/or modified sequence
atgtggccctcccagctgctcatctttatgatgctgctcgctccgatcatccatggagggaaacattccgagaggcaccctgcactcgctgctccccttcggcatgccgagagaagccccggtggagcacttccacccagacacctcctgcagcagcctgccgccgaaaggaccgctgcacatcgaggacagggcccccggggggctacaagaggcgtgcgtggacccggcgctcagggtgcccagatagccgcccaggccttcagccgggcacctatcccaatggcagttgtcaggcgcgagctgagctgtgaatcctacccaattgaactccggtgtcctgggacagacgtgattatgattgaatccgcaaattatggcagaacagacgacaagatttgcgactcagacccagctcagatggagaatatacgatgttacctgccagatgcctacaaaattatgtcccagaggtgtaataatcgcacccaatgcgccgtggtggcagggccggatgtcttcccagatccatgcccaggtacttacaaatacctggaagtgcagtatgagtgtgttccgtacaaggtagagcagaaagtcttcctgtgccccgggttgttgaaaggagtctatcaatctgagcacctcttcgagtcggaccaccaatccggtgcttggtgcaaggacccactgcaggcgagcgacaagatctactatatgccttggactccatataggaccgacacactcacggagtatagctccaaggatgacttcatcgcaggtcggccgaccacgacgtacaagcttccacatcgggttgacggcaccggctttgtggtgtatgacggcgccctcttctttaataaagagcggaccaggaatattgtgaaatttgacctcaggaccaggattaagtcaggtgaagccattattgcaaatgccaactaccatgacacatccccttatcgttggggagggaagtccgacatcgatctggctgtggacgagaatggcctgtgggtcatctacgccactgagcaaaacaacggcaagatagtgatcagccaactgaacccctacactcttcgaattgaagggacttgggacactgcctatgacaaacgcagtgccagcaacgctttcatgatatgcgggatactgtacgtggtgaagtctgtgtatgaagatgatgataacgaagctacaggtaacaagatcgattatatctataatacagaccagtcaaaggatagcctggtcgatgtgcccttccccaattcctaccagtatatagccgctgtggactacaatcctcgggacaacctcctgtacgtttggaataattaccacgtagtcaaatactccctggatttcggtcctctggattctcgaagcggtcaggcccatcacggccaggtttcttacattagccccccaatccatctggactcagagttggagcgaccttcagtgaaggatatttccacaactgggccactggggatgggaagtaccaccactagcacaactttaaggactactactttatcacctggtagatcaacaacaccttcggtcagtggccggcgcaaccgctccacctccacgcctagccccgctgtcgaggtgctggacgatatgacaacgcatctgccatctgctagctctcagatcccagctctggaggaatcatgcgaagccgttgaggcccgggaaattatgtggtttaagacgagacaaggccagatcgcaaagcagccttgtcccgccgggacaataggggtctctacatacctgtgcttagctcccgacgggatctgggacccccaggggcctgatctgtcaaattgtagttccccctgggttaatcacatcacacagaaacttaagagtggggaaacggccgcaaacatcgcccgggaactcgccgagcagacaaggaatcatctcaatgccggcgatattacatacagtgtgagagctatggatcagctcgtggggcttttggatgtacagttgcggaacctgaccccgggcggcaaggacagcgccgcacggagcctgaacaagttacagaagagggagagatcttgtcgcgcttatgtccaggctatggtggaaacagtcaataatctgctccagccccaagctctgaatgcttggcgagacctaaccacgtcagaccagttacgcgccgcaacaatgctcctccatactgtggaagagagtgctttcgtcctcgccgataacctgcttaaaacagacatcgttcgagaaaatacagacaacatcaagctggaagttgcgagactgagtactgagggcaacctggaagacttgaaattcccagaaaatatggggcacggttccaccatccagctctcagctaatactttaaaacagaatggaagaaatggcgaaatcagggtggcgttcgtcttgtacaataatctgggaccctacctgtccactgaaaacgcaagtatgaagctgggaacggaagctttgtctaccaaccattctgtcattgtgaactccccggtgataaccgccgcaattaataaggagtttagcaacaaggtgtacctggccgacccagtggtttttactgtgaagcatatcaagcagagcgaagaaaactttaacccaaactgttcattctggagttacagcaaaagaacgatgaccgggtattggtccactcagggttgcaggctcttaactactaataaaacgcatacgacctgctcttgcaaccatcttaccaatttcgccgtgctaatggcccacgtggaagtaaagcactctgatgctgtgcacgacctgctcctggatgtcatcacctgggtcgggattctcctgtcactcgtatgcttgctgatttgtatctttaccttctgcttctttagaggattacagagcgaccgaaacacaatacataagaacttatgtatctctctgttcgtggccgaactgctcttcctaatcggcattaaccgcacagaccagcccattgcctgcgcagttttcgcagcgctgttacacttcttctttctggccgcgttcacatggatgttcctggagggcgtgcaactctacattatgctggtagaagtttttgaatccgaacactcccggagaaagtatttctacttagtgggatacggcatgcccgccttaattgttgctgtcagcgcggcagttgactatcgcagttacgggacagacaaggtgtgttggttgagactcgatacttactttatctggtccttcattggtcctgccaccctgatcattatgctcaatgtgattttcctgggaatcgctctgtacaagatgtttcaccatacggcaattttaaagcctgagtcaggctgcctagataatattaattatgaagacaacaggcccttcatcaagtcctgggtgattggcgccatcgcactcttatgtttattggggttaacttgggcctttggcctcatgtatattaatgagtcaacagtaattatggcctacctgtttaccattttcaactccctccagggcatgtttattttcatttttcattgcgtcctgcagaaaaaggtccgcaaggaatacggcaaatgtctcagaacccattgttgctcaggaaagtctactgagtcatccatcggctccgggaaaacttctgggagcaggactccaggaagatactccaccgggagtcagtcgaggatcaggcggatgtggaatgacactgtgcgtaagcaatccgagtcctcttttatcacgggagacatcaattcctcagcatccctcaaccgtggcgctatggcgaaccacctgatctccaatgctctgctcaggccacacggtacgaataacccgtacaacacattgttgggggagccagccgtttgtaacaaccccagtgtcagcatgtacaacgctcaggaagggctgttaaataacgccagggatacaagcgtgatggacaccctgcccctgaacggcaatcatggaaatagttattcaatcgcttcaggagaatatctttcgaattgcgtccagatcattgaccgggggtacaaccacaacgagaccgctctggaaaaaaaaattttgaaagagctgacaagcaattatattccctcatatctgaataaccatgagaggtccagtgagcagaacagaaatctcatgaataagctggtcaacaacctggggagcggccgggaggatgatgctatcgtgttggatgacgcaacgagcttcaatcatgaggagtcgttgggactcgagctgatccatgaggaaagcgacgcccccctgctccctcctcgggtttattctacagagaaccaccaacctcaccattacactcggcggcgtattccccaggatcactctgagtctttttttcctctgctgacgaatgaacatacggaagatctccagtcaccacaccgcgatagtctatacacctctatgccaacattagccggcgttgctgccaccgaaagcgtgaccacctctacgcagacggagcccccaccagcaaaatgtggggatgcagaggatgtctattataaatcgatgccgaatctaggcagccgcaaccacgttcaccagctccacacttactaccagctggggagaggttcatccgatggctttatcgtgccaccaaacaaagatggaactcctcccgagggaagcagcaaaggccctgcccatctggtgaccagcttatag

SEQ ID NO: 325930 - DNA, 4056 bp, Artificial Sequence
  derived and/or modified sequence
atgtggccgagccagttactgattttcatgatgcttctggcccccatcatccatggcgggaagcacagtgagcgccatccagccctcgcggcacccctccgacacgccgagaggagcccaggtggcgcgcttccccctcgccatttgctgcaacagccagccgctgagcgtaccgctgcacacagaggacagggccccagaggagccacaaggggcgtccgcggacccggagcccaaggcgcacaaatagcggcccaggcattctcgcgcgcgccgattcccatggcagtggtcagacgggagttatcctgcgagagctatcctattgagcttaggtgccccgggacagacgtgataatgattgagtctgccaactacggccggaccgacgacaagatctgcgatagcgatccagcccaaatggagaatatcaggtgttacctccctgatgcatataagatcatgagtcagagatgtaataatcgcacacaatgcgccgtggtggctggaccagatgtcttcccagacccctgtccaggcacttataaatatttagaggtccagtacgaatgtgtcccttataaagtcgagcagaaggtgtttctttgtcctggtctgctgaagggagtgtaccagtcagagcacttatttgagagtgaccatcagagcggagcttggtgcaaggatcctctccaggcaagcgacaagatttactatatgccttggacaccatacagaacagacaccttgaccgaatactcatccaaggacgacttcattgctggcaggcctacaacgacatataagctgccacaccgtgtggacggaacaggattcgtagtatacgacggcgccctatttttcaacaaggagaggacccgcaacattgtcaagtttgacctgagaacccgcattaaatctggggaagcaattattgcgaatgcgaactatcatgacacctccccttaccggtggggggggaagtccgatattgatctggctgtggatgagaacggcttatgggtgatctatgccaccgagcagaacaacggcaaaatagtgatttcccagcttaacccatacaccctacgtattgaaggaacgtgggatacagcttatgacaagaggagtgcctctaacgcctttatgatctgcgggattctgtatgttgttaagagtgtctacgaggacgatgacaatgaagccactgggaataagatagattacatctacaacacggatcagagcaaggacagtctggtagacgttcccttcccaaactcttatcaatacatcgccgctgtggattacaacccccgcgacaatctgttgtatgtgtggaataattatcatgtagtgaagtactccctagacttcggtccactagactcaagaagtggtcaagcccaccatggacaggtttcttatatttccccacctatccatttggattccgagcttgaacgacccagcgtgaaggacatctccacgaccggacccctgggaatggggtcaactacaacatcgacgaccttgcgaacaactaccctttcaccaggccgctccactacaccaagcgtctcaggtcgacggaaccggtcaacttcaactccttcaccggccgtagaggtccttgatgatatgaccacacatttacccagtgcatcatctcagatccctgccctggaggaaagttgtgaggctgtcgaagcccgggagataatgtggttcaaaacccgacaaggacaaatagccaagcagccctgtcctgctgggacgatcggggtgagcacttatttatgtctggcccctgatggcatctgggacccccaggggccggacctctccaattgttcctctccatgggtgaaccacattacccaaaagctgaagtctggtgagacagccgccaacatcgcaagagagctggctgaacagaccagaaaccacctaaacgccggggacataacgtattccgtccgcgccatggatcagcttgtgggcttacttgatgttcagttgcgtaatttaacaccgggaggcaaggactcagccgcacgctcactgaataagctgcagaagcgggaacggagttgtagggcctacgttcaggccatggtcgaaacagtgaacaacctgttgcagcctcaggctctgaatgcctggagggaccttaccacctctgaccagctgcgcgccgccactatgcttctgcacacagtcgaggaaagtgcctttgtgctggccgacaacctgttaaagacagatatcgttagggagaacacagacaacattaagctcgaagtcgcccgtctaagcaccgaggggaacctggaagacctgaaatttcctgagaatatgggtcatggctccacaatccagctcagtgcaaacacactcaagcagaacggccgcaacggagaaattagagtagccttcgttctctacaataatcttgggccctatttatccacggaaaacgcaagcatgaaactaggcacagaggctctgagtaccaaccattcggtgatcgtgaatagccctgtgatcacagctgccattaacaaagagtttagtaacaaggtctacctggcagacccagtggtattcacagtcaaacatattaaacagtctgaggagaatttcaaccccaattgctctttctggagctattctaaacggaccatgacaggatactggtcgacgcagggttgtaggctgcttactaccaataaaacccacacaacttgcagttgcaaccacctgacaaactttgctgtactaatggctcacgttgaagttaagcactccgacgccgtccatgacctgctcctcgacgttataacttgggtcgggatcctgttgtcccttgtgtgtctgttgatctgcattttcacattctgcttttttcgaggtctgcagtccgatcgaaacacaattcacaaaaatctctgcatcagcctgttcgtggccgaactgctgtttttaataggtattaaccggaccgatcagcccatcgcgtgcgcggtgtttgccgcattgctccacttcttctttctggccgccttcacatggatgttcctcgagggtgttcagctgtatattatgctggttgaggtttttgagtcagagcattcccggcgaaagtatttctacctggtgggatacggaatgcccgctttgattgtggcggtttcagctgcggtagattaccgtagctacggcacagataaagtatgttggctgaggctcgatacctacttcatctggtccttcatcggccccgctaccctcataattatgttgaacgtaatctttttggggattgcactatataaaatgtttcaccacacagccatactgaagccggagagtgggtgtttggacaatatcaactacgaggataaccggcccttcataaaaagctgggtcatcggtgccatagcccttttgtgcctgttgggcctgacatgggcctttggccttatgtacattaatgagagtacagtgattatggcttacctttttactatttttaacagccttcagggaatgtttattttcatatttcattgcgtgctccagaaaaaggtgcgcaaagagtatggaaaatgtttgcgaacccattgctgctccggcaagtctacagagtccagcattggcagcggcaaaacctccgggagtcgcacacccggtcgctacagcacgggcagtcagtctagaattcgccggatgtggaatgacacagtcaggaagcagtctgaatcatccttcattaccggtgatattaattcctccgcctcgctaaaccggggagctatggctaaccatctcatcagtaatgctctgttacggccacacggcactaacaatccctacaataccctgctgggagagcctgccgtgtgcaacaacccgagcgtgagtatgtacaacgcgcaagagccgtatcgtgagacaagcatgggcgtcaagttgaacattgcctatcagatcggcgcctcggagcagtgccaaggatataagtgccacggttactctacaacggagtggtag

SEQ ID NO: 325931 - DNA, 4539 bp, Artificial Sequence
  derived and/or modified sequence
atgtggccaagtcagctgctcatcttcatgatgcttttagctcccattatacacgcctttagcagagctccaatccctatggctgtagtccgccgcgagctgtcatgcgagtcttacccaattgaactgcgctgccctggcactgacgtcatcatgatcgagagtgctaattatggtcggactgatgacaaaatctgcgacagcgatcctgcgcaaatggaaaacattcgttgctaccttccagatgcttataagattatgagccagaggtgtaacaataggactcagtgtgctgtggtggccggacctgatgtgtttccggatccatgccctggtacctataaatacttggaggttcagtacgagtgtgtgccctataaggtagagcaaaaggtgtttctgtgccctgggctgcttaagggagtgtatcaatcagagcacctgttcgagagtgaccaccagtccggggcttggtgcaaggatccactccaggcctccgataagatctactatatgccctggaccccgtatcgcacagataccctcactgagtacagttccaaggatgattttattgctggacggcccacgaccacatataaactacctcatagagtggatgggacaggtttcgtcgtgtacgatggagctcttttttttaataaggagcgtaccagaaatattgttaaatttgacctccgcaccagaataaagagcggcgaagccatcatagctaatgccaattaccatgatacatctccataccgatggggcgggaagtcggacatcgacctcgccgttgacgagaacggcctatgggtgatatacgccacagagcaaaacaatggaaagatcgtgatttcacagctgaacccatatactctgcggatcgagggcacttgggataccgcatacgataagcgatctgcgtccaacgcctttatgatttgtggaatattgtacgtagtgaaatctgtgtatgaggatgatgataacgaggcaactggcaataaaattgactacatctacaatacagatcagagtaaggactcacttgtggatgtgccctttcctaacagctatcaatacatcgcggcggtcgattataaccccagggataatctactctacgtttggaacaattatcacgtcgtgaagtacagcctggactttggccccctggattctcggagtgggcaagctcatcacggccaagtaagttatatcagtccacccatacacctggacagcgaactggaaaggccatctgtaaaagacatcagcactaccggtccactgggaatggggagtacaaccacgagtacaacccttcgaacaactactctgagcccaggccggagtacaacccccagcgtctctggcaggcgcaacaggagcacgagcacaccctcacccgcggtggaagtacttgacgacatgacgactcacctgccatctgcctcttcacagatacccgctttggaagagtcttgcgaggcagtcgaggcaagagagatcatgtggtttaaaaccagacaggggcaaatcgccaaacagccatgtccggccggcacaatcggagtatccacatatctgtgcctggcacccgatggaatatgggatccacagggccctgacctgtcaaattgcagcagcccatgggtcaatcacatcacacaaaagctcaaaagtggtgagactgccgctaacattgcgcgagagctggccgaacaaactcgcaaccacctgaacgccggcgacattacatattcagtgagagccatggatcagctagttgggctgcttgacgtacagcttcgtaatttgacgcctgggggaaaagatagcgcggcccgatcccttaacaagctgcagaagcgggagagatcgtgtagagcctatgtgcaggctatggttgagaccgttaacaatttactgcagccacaagctctgaatgcatggcgcgatttgacaacctccgatcaactccgggctgccacaatgctgctccataccgtcgaggaatctgcgttcgtcctggcagacaacctgctcaaaaccgacatagtgcgggaaaacacggataacataaagctcgaggtcgcgcgactgtcaacagagggcaatctagaagatctgaagtttccagagaacatgggccatgggagcacgattcagcttagtgcgaataccttaaaacagaatgggcgcaatggcgaaatacgggtcgcgttcgtgctgtacaacaaccttggtccttatttgtctacggagaacgcttctatgaagctcggaacagaggcgctgtctactaaccatagcgttatagtgaattcaccagtgatcaccgctgcaatcaacaaagagttttctaataaggtgtacttagctgatccagttgttttcacagtgaaacatataaagcagtctgaagaaaacttcaatcccaactgtagcttttggtcatattctaagaggacgatgaccggctattggtcaacacagggctgtcggctacttacgactaataaaactcatactacctgctcatgtaatcacctgaccaattttgcagtactcatggcacacgtggaggttaagcacagcgatgctgtgcacgatctactgcttgatgtcataacttgggtgggtatcctgctatctttggtttgtctgttgatctgtatcttcactttctgcttcttcagaggccttcagtctgatcggaatacaatccacaagaacctttgcatcagtctattcgttgccgaacttctcttcctcatcggcatcaacaggacggatcaaccaattgcgtgcgccgtctttgctgctcttctccactttttctttctggcagccttcacatggatgttccttgagggcgttcagctttacatcatgctggttgaagtgttcgagtctgagcactcacgtcgcaaatatttttatctggttggttatggcatgccagcgctgattgtggccgtcagcgctgccgtggactacaggagctacggcactgacaaggtctgctggctacgtttagacacttacttcatctggagctttattggccccgcaacattgatcattatgctgaatgtcatcttcctggggattgctctttacaagatgtttcaccacacagcaatactgaaacccgagtctgggtgtctggataatatcaactatgaggacaaccgaccctttatcaaatcttgggttataggagccatcgccctgctttgtctcctcggccttacatgggcttttggcctcatgtatatcaatgaaagcacagtaattatggcttatctgttcaccatcttcaatagccttcagggtatgttcatctttatcttccactgcgtcctccagaagaaagtgcgcaaggagtacggtaagtgcttaagaacccattgttgttccggaaagtctacggaatccagcatcggtagcggaaaaacttcaggatctcgaacgccgggacgctattcaaccggtagccagagtagaattagacggatgtggaacgatactgtgagaaagcagtccgagtcctccttcatcacaggagatattaattccagtgccagtctgaacagaggcgccatggcaaaccacctcattagtaacgcacttcttcgcccacacggcacaaacaatccgtacaacacgctgcttggcgaacctgcggtgtgcaacaacccaagcgttagcatgtataacgcacaggaaggcctcttgaacaatgcacgagataccagcgtcatggacacactgcctttgaacgggaatcacggaaacagctattctattgcttcaggcgagtacctatctaattgtgtgcagataattgaccggggctacaatcacaacgaaactgcactggagaaaaagatcctgaaagagctcaccagtaattacatcccatcatacttgaataatcacgagcgaagctccgagcaaaacaggaatctcatgaacaaacttgtaaataacctgggatccggtcgggaggatgatgcaattgtgcttgacgatgccacttcattcaaccatgaagaaagcctaggactcgaacttatccatgaggagtcagacgcacctctgctgccaccgcgcgtttattctactgagaaccaccagccacatcattatactagacgcaggattcctcaagatcactccgagagtttctttcccctgctgactaacgagcatactgaggatctgcagagcccacaccgagatagcctctacacgtcaatgccaacgctcgcaggtgtggccgccacagaatcagttactacatccacccagacggagccacctcccgctaaatgtggggatgccgaggacgtgtattacaaaagcatgccaaatctcggaagccgaaaccatgttcaccagctgcacacctactaccagctggggcgcggatcttcagacggatttatcgtgccaccaaacaaggatggcactccccccgaaggcagctccaagggacccgctcaccttgtgacctccctgtag

SEQ ID NO: 325932 - DNA, 4816 bp, Artificial Sequence
  derived and/or modified sequence
tcttggaatacagaagagaaactagaaatatacgtattttgtttcacatttgaacagtcattcttgaggaatactccatacctgagtagacagccatgtggccatcgcagctactaattttcatgatgctcttagctccaataattcatgctttcagccgtgccccaattccaatggctgtggtccgcagagagctatcctgtgagagctatcctatagagcttcgctgtccaggaacagacgtcatcatgatagaaagtgccaactatggcaggactgatgacaaaatttgtgactctgaccctgctcagatggagaatatccgatgttatctgccagatgcctataagattatgtctcaaagatgcaataacagaacccagtgtgcagtggtggcaggtcctgatgtttttccagacccgtgtccaggaacctataaataccttgaagtgcagtatgaatgtgtcccttacaaagtggaacaaaaagtttttctttgtcctggactactaaaaggagtataccagagtgaacatttgtttgagtccgaccaccaatctggggcgtggtgcaaagaccctctgcaggcatctgacaagatttattatatgccctggactccctacagaactgataccctgactgagtattcatccaaggatgacttcattgctggaagaccaactacaacctacaagctccctcacagggtggatggcacaggatttgtagtgtatgatggagctttgttcttcaacaaagagcgcaccaggaacatagtaaagtttgatttgcggactaggataaagagtggagaggctatcatagcaaatgccaattaccatgatacctccccttaccgatggggaggcaaatctgacatagacctggcagtagatgagaatgggctatgggtaatctatgcaacagaacaaaacaatggtaaaattgtcattagtcaattgaacccttacaccctacggatcgaaggaacatgggatactgcatatgataaaaggtcagcttccaatgcctttatgatttgtggaattctgtatgtggtcaaatctgtatatgaggatgatgacaatgaggctactggaaataagattgactacatttacaacactgaccaaagcaaggatagtttggtggatgtaccctttcctaattcataccagtacattgcagctgtggattacaaccccagggacaacctactttatgtatggaataactatcacgtcgtgaaatattctttggattttggacctctggatagtagatcagggcaggcacatcatggacaagtttcatacatttctccgccaattcaccttgactctgagctagaaagaccctctgttaaagatatctctaccacaggacctcttggcatgggaagcactaccaccagtaccacccttcggaccacaactttgagcccaggaaggagtaccaccccgtcagtgtcaggaagaagaaaccggagtactagtaccccatctccagctgtcgaggtacttgatgacatgaccacacaccttccatcagcatcgtcccaaatcccagctctcgaagagagctgtgaggctgtggaagcccgagaaatcatgtggtttaagactcgtcaaggacagatagcaaagcagccatgccctgcaggaactataggtgtatcaacttatctatgccttgctcctgatggaatttgggatccccaaggtccagatctcagcaactgttcttctccttgggtcaatcatataacacagaagttgaaatctggtgaaacagctgccaacattgctagagagctggctgaacagacaagaaatcacttgaatgctggggacatcacctactctgtccgggccatggaccagctggtaggcctcctagatgtacagcttcggaacttgaccccaggtggaaaagatagtgctgcccggagtttgaacaagcttcagaaaagagagcgctcttgcagagcctatgtccaggcaatggtcgagacagttaacaacctccttcagccacaagctttgaatgcatggagagacctgactacgagtgatcagctgcgtgcggccaccatgttgcttcatactgtggaggaaagtgcttttgtgctggctgataaccttttgaagactgacattgtcagggagaatacagacaatattaaattggaagttgcaagactgagcacagaaggaaacttagaagacctaaaatttccagaaaacatgggccatggaagcactatccagctgtctgcaaataccttaaagcaaaatggccgaaatggagagatcagagtggcctttgtcctgtataacaacttgggtccttatttatccacggagaatgccagtatgaagttgggaacggaagctttgtccacaaatcattctgttattgtcaattcccctgttattacggcagcaataaacaaagagttcagtaacaaggtttatttggctgatcctgtggtatttactgttaaacatatcaagcagtcagaggaaaatttcaaccctaactgttcattttggagctactccaagcgtacaatgacaggttattggtcaacacaaggctgtcggctcctgacaacaaataagacacatactacatgctcttgtaaccacctaacaaattttgcagtactgatggcacatgtggaagttaagcacagtgatgcggtccatgacctccttctggatgtgatcacgtgggttggaattttgctgtcccttgtttgtctcctgatttgcatcttcacattttgctttttccgggggctccagagtgaccgtaacaccatccacaagaacctctgcatcagtctctttgtagcagagctgctcttcctgattgggatcaaccgaactgaccaaccaattgcctgtgctgttttcgctgccctgttacatttcttcttcttggctgccttcacctggatgttcctggagggggtgcagctttatatcatgctggtggaggtttttgagagtgaacattcacgtaggaaatacttttatctggtcggctatgggatgcctgcactcattgtggctgtgtcagctgcagtagactacaggagttatggaacagataaagtatgttggctccgacttgacacctacttcatttggagttttataggaccagcaactttgataattatgcttaatgtaatcttccttgggattgctttatataaaatgtttcatcatactgctatactgaaacctgaatcaggctgtcttgataacatcaactatgaggataacagacccttcatcaagtcatgggttataggtgcaatagctcttctctgcctattaggattgacctgggcctttggactcatgtatattaatgaaagcacagtcatcatggcctatctcttcaccattttcaattctctacagggaatgtttatatttattttccattgtgtcctacagaagaaggtacgaaaagagtatgggaaatgcctgcgaacacattgctgtagtggcaaaagtacagagagttccattggttcagggaaaacatctggttctcgaactcctggacgctactccacaggctcacagagccgaatccgtagaatgtggaatgacacggttcgaaagcagtcagagtcttcctttattactggagacataaacagttcagcgtcactcaacagaggagccatggctaatcatcttataagcaatgctctgcttcgtccgcatggtactaacaatccctataatacattgcttggggaaccggcggtctgtaacaacccttctgtcagcatgtacaacgcacaagagccctacagagagacaagtatgggagtaaagctaaacattgcatatcaaataggggcttctgaacaatgccagggatacaagtgtcatggatactctaccactgaatggtaaccatggcaatagttacagcattgccagcggcgaatacctgagcaactgtgtgcaaatcatagaccgtggctataaccataacgagaccgccctagagaaaaagattctgaaggaactcacttccaactatatcccttcttacctgaacaaccatgagcgctccagtgaacagaacaggaatctgatgaacaagctggtgaataaccttggcagtggaagggaagatgatgccattgtcctggatgatgccacctcgtttaaccacgaggagagtttgggcctggaactcattcatgaggaatctgatgctcctttgctgcccccaagagtatactccaccgagaaccaccagccacaccattataccagaaggcggatcccccaagaccacagtgagagctttttccctttgctaaccaacgagcacacagaagatctccagtcaccccatagagactctctctataccagcatgccgacactggctggtgtggccgccacagagagtgttaccaccagcacccagaccgaacccccaccggccaaatgtggtgatgccgaagatgtttactacaaaagcatgccaaacctaggctccagaaaccacgtccatcagctgcatacttactaccagctaggtcgcggcagcagtgatggatttatagttcctccaaacaaagatgggacccctcccgagggaagttcaaaaggaccggctcatttggtcactagtctatagaagatgacacagaaattggaaccaacaaaactgctaacaccttgttgactgttctgagttgatataagcagtggtaataatgtgtgtactcctaaatctttatgctgtcctctaaagacaaacacaaact

SEQ ID NO: 325933 - DNA, 4962 bp, Artificial Sequence
  derived and/or modified sequence
atgtggccatcgcagctactaattttcatgatgctcttagctccaataattcatggtggcaagcacagtgaacgacatcctgcccttgctgctccattgcgacacgctgagcgcagcccaggaggcgctcttccacccagacatctgcttcagcagccagctgcagagcgcaccgctgctcatcgtggacaagggccccgtggagctaccagaggagttcgcggtccaggtgcccaaggagcacagattgcagcgcaagctttcagccgtgccccaattccaatggctgtggtccgcagagagctatcctgtgagagctatcctatagagcttcgctgtccaggaacagacgtcatcatgatagaaagtgccaactatggcaggactgatgacaaaatttgtgactctgaccctgctcagatggagaatatccgatgttatctgccagatgcctataagattatgtctcaaagatgcaataacagaacccagtgtgcagtggtggcaggtcctgatgtttttccagacccgtgtccaggaacctataaataccttgaagtgcagtatgaatgtgtcccttacaaagtggaacaaaaagtttttctttgtcctggactactaaaaggagtataccagagtgaacatttgtttgagtccgaccaccaatctggggcgtggtgcaaagaccctctgcaggcatctgacaagatttattatatgccctggactccctacagaactgataccctgactgagtattcatccaaggatgacttcattgctggaagaccaactacaacctacaagctccctcacagggtggatggcacaggatttgtagtgtatgatggagctttgttcttcaacaaagagcgcaccaggaacatagtaaagtttgatttgcggactaggataaagagtggagaggctatcatagcaaatgccaattaccatgatacctccccttaccgatggggaggcaaatctgacatagacctggcagtagatgagaatgggctatgggtaatctatgcaacagaacaaaacaatggtaaaattgtcattagtcaattgaacccttacaccctacggatcgaaggaacatgggatactgcatatgataaaaggtcagcttccaatgcctttatgatttgtggaattctgtatgtggtcaaatctgtatatgaggatgatgacaatgaggctactggaaataagattgactacatttacaacactgaccaaagcaaggatagtttggtggatgtaccctttcctaattcataccagtacattgcagctgtggattacaaccccagggacaacctactttatgtatggaataactatcacgtcgtgaaatattctttggattttggacctctggatagtagatcagggcaggcacatcatggacaagtttcatacatttctccgccaattcaccttgactctgagctagaaagaccctctgttaaagatatctctaccacaggacctcttggcatgggaagcactaccaccagtaccacccttcggaccacaactttgagcccaggaaggagtaccaccccgtcagtgtcaggaagaagaaaccggagtactagtaccccatctccagctgtcgaggtacttgatgacatgaccacacaccttccatcagcatcgtcccaaatcccagctctcgaagagagctgtgaggctgtggaagcccgagaaatcatgtggtttaagactcgtcaaggacagatagcaaagcagccatgccctgcaggaactataggtgtatcaacttatctatgccttgctcctgatggaatttgggatccccaaggtccagatctcagcaactgttcttctccttgggtcaatcatataacacagaagttgaaatctggtgaaacagctgccaacattgctagagagctggctgaacagacaagaaatcacttgaatgctggggacatcacctactctgtccgggccatggaccagctggtaggcctcctagatgtacagcttcggaacttgaccccaggtggaaaagatagtgctgcccggagtttgaacaagcttcagaaaagagagcgctcttgcagagcctatgtccaggcaatggtcgagacagttaacaacctccttcagccacaagctttgaatgcatggagagacctgactacgagtgatcagctgcgtgcggccaccatgttgcttcatactgtggaggaaagtgcttttgtgctggctgataaccttttgaagactgacattgtcagggagaatacagacaatattaaattggaagttgcaagactgagcacagaaggaaacttagaagacctaaaatttccagaaaacatgggccatggaagcactatccagctgtctgcaaataccttaaagcaaaatggccgaaatggagagatcagagtggcctttgtcctgtataacaacttgggtccttatttatccacggagaatgccagtatgaagttgggaacggaagctttgtccacaaatcattctgttattgtcaattcccctgttattacggcagcaataaacaaagagttcagtaacaaggtttatttggctgatcctgtggtatttactgttaaacatatcaagcagtcagaggaaaatttcaaccctaactgttcattttggagctactccaagcgtacaatgacaggttattggtcaacacaaggctgtcggctcctgacaacaaataagacacatactacatgctcttgtaaccacctaacaaattttgcagtactgatggcacatgtggaagttaagcacagtgatgcggtccatgacctccttctggatgtgatcacgtgggttggaattttgctgtcccttgtttgtctcctgatttgcatcttcacattttgctttttccgggggctccagagtgaccgtaacaccatccacaagaacctctgcatcagtctctttgtagcagagctgctcttcctgattgggatcaaccgaactgaccaaccaattgcctgtgctgttttcgctgccctgttacatttcttcttcttggctgccttcacctggatgttcctggagggggtgcagctttatatcatgctggtggaggtttttgagagtgaacattcacgtaggaaatacttttatctggtcggctatgggatgcctgcactcattgtggctgtgtcagctgcagtagactacaggagttatggaacagataaagtatgttggctccgacttgacacctacttcatttggagttttataggaccagcaactttgataattatgcttaatgtaatcttccttgggattgctttatataaaatgtttcatcatactgctatactgaaacctgaatcaggctgtcttgataacatcaactatgaggataacagacccttcatcaagtcatgggttataggtgcaatagctcttctctgcctattaggattgacctgggcctttggactcatgtatattaatgaaagcacagtcatcatggcctatctcttcaccattttcaattctctacagggaatgtttatatttattttccattgtgtcctacagaagaaggtacgaaaagagtatgggaaatgcctgcgaacacattgctgtagtggcaaaagtacagagagttccattggttcagggaaaacatctggttctcgaactcctggacgctactccacaggctcacagagccgaatccgtagaatgtggaatgacacggttcgaaagcagtcagagtcttcctttattactggagacataaacagttcagcgtcactcaacagaggagccatggctaatcatcttataagcaatgctctgcttcgtccgcatggtactaacaatccctataatacattgcttggggaaccggcggtctgtaacaacccttctgtcagcatgtacaacgcacaagaggggcttctgaacaatgccagggatacaagtgtcatggatactctaccactgaatggtaaccatggcaatagttacagcattgccagcggcgaatacctgagcaactgtgtgcaaatcatagaccgtggctataaccataacgagaccgccctagagaaaaagattctgaaggaactcacttccaactatatcccttcttacctgaacaaccatgagcgctccagtgaacagaacaggaatctgatgaacaagctggtgaataaccttggcagtggaagggaagatgatgccattgtcctggatgatgccacctcgtttaaccacgaggagagtttgggcctggaactcattcatgaggaatctgatgctcctttgctgcccccaagagtatactccaccgagaaccaccagccacaccattataccagaaggcggatcccccaagaccacagtgagagctttttccctttgctaaccaacgagcacacagaagatctccagtcaccccatagagactctctctataccagcatgccgacactggctggtgtggccgccacagagagtgttaccaccagcacccagaccgaacccccaccggccaaatgtggtgatgccgaagatgtttactacaaaagcatgccaaacctaggctccagaaaccacgtccatcagctgcatacttactaccagctaggtcgcggcagcagtgatggatttatagttcctccaaacaaagatgggacccctcccgagggaagttcaaaaggaccggctcatttggtcactagtctatagaagatgacacagaaattggaaccaacaaaactgctaacaccttgttgactgttctgagttgatataagcagtggtaataatgtgtgtactcctaaatctttatgctgtcctctaaagacaaacacaaactctcagacttttttttttttaatgggatttttaggtcagcccaggggagaaagataactgctaaaattcccctgtaccccatcctttctt

SEQ ID NO: 325934 - DNA, 5009 bp, Artificial Sequence
  derived and/or modified sequence
tctttttctttttaatttgaagaaaaatcatcagtcttggaatacagaagagaaactagaaatatacgtattttgtttcacatttgaacagtcattcttgaggaatactccatacctgagtagacagccatgtggccatcgcagctactaattttcatgatgctcttagctccaataattcatggtggcaagcacagtgaacgacatcctgcccttgctgctccattgcgacacgctgagcgcagcccaggaggcgctcttccacccagacatctgcttcagcagccagctgcagagcgcaccgctgctcatcgtggacaagggccccgtggagctaccagaggagttcgcggtccaggtgcccaaggagcacagattgcagcgcaagctttcagccgtgccccaattccaatggctgtggtccgcagagagctatcctgtgagagctatcctatagagcttcgctgtccaggaacagacgtcatcatgatagaaagtgccaactatggcaggactgatgacaaaatttgtgactctgaccctgctcagatggagaatatccgatgttatctgccagatgcctataagattatgtctcaaagatgcaataacagaacccagtgtgcagtggtggcaggtcctgatgtttttccagacccgtgtccaggaacctataaataccttgaagtgcagtatgaatgtgtcccttacaaagtggaacaaaaagtttttctttgtcctggactactaaaaggagtataccagagtgaacatttgtttgagtccgaccaccaatctggggcgtggtgcaaagaccctctgcaggcatctgacaagatttattatatgccctggactccctacagaactgataccctgactgagtattcatccaaggatgacttcattgctggaagaccaactacaacctacaagctccctcacagggtggatggcacaggatttgtagtgtatgatggagctttgttcttcaacaaagagcgcaccaggaacatagtaaagtttgatttgcggactaggataaagagtggagaggctatcatagcaaatgccaattaccatgatacctccccttaccgatggggaggcaaatctgacatagacctggcagtagatgagaatgggctatgggtaatctatgcaacagaacaaaacaatggtaaaattgtcattagtcaattgaacccttacaccctacggatcgaaggaacatgggatactgcatatgataaaaggtcagcttccaatgcctttatgatttgtggaattctgtatgtggtcaaatctgtatatgaggatgatgacaatgaggctactggaaataagattgactacatttacaacactgaccaaagcaaggatagtttggtggatgtaccctttcctaattcataccagtacattgcagctgtggattacaaccccagggacaacctactttatgtatggaataactatcacgtcgtgaaatattctttggattttggacctctggatagtagatcagggcaggcacatcatggacaagtttcatacatttctccgccaattcaccttgactctgagctagaaagaccctctgttaaagatatctctaccacaggacctcttggcatgggaagcactaccaccagtaccacccttcggaccacaactttgagcccaggaaggagtaccaccccgtcagtgtcaggaagaagaaaccggagtactagtaccccatctccagctgtcgaggtacttgatgacatgaccacacaccttccatcagcatcgtcccaaatcccagctctcgaagagagctgtgaggctgtggaagcccgagaaatcatgtggtttaagactcgtcaaggacagatagcaaagcagccatgccctgcaggaactataggtgtatcaacttatctatgccttgctcctgatggaatttgggatccccaaggtccagatctcagcaactgttcttctccttgggtcaatcatataacacagaagttgaaatctggtgaaacagctgccaacattgctagagagctggctgaacagacaagaaatcacttgaatgctggggacatcacctactctgtccgggccatggaccagctggtaggcctcctagatgtacagcttcggaacttgaccccaggtggaaaagatagtgctgcccggagtttgaacaagcttcagaaaagagagcgctcttgcagagcctatgtccaggcaatggtcgagacagttaacaacctccttcagccacaagctttgaatgcatggagagacctgactacgagtgatcagctgcgtgcggccaccatgttgcttcatactgtggaggaaagtgcttttgtgctggctgataaccttttgaagactgacattgtcagggagaatacagacaatattaaattggaagttgcaagactgagcacagaaggaaacttagaagacctaaaatttccagaaaacatgggccatggaagcactatccagctgtctgcaaataccttaaagcaaaatggccgaaatggagagatcagagtggcctttgtcctgtataacaacttgggtccttatttatccacggagaatgccagtatgaagttgggaacggaagctttgtccacaaatcattctgttattgtcaattcccctgttattacggcagcaataaacaaagagttcagtaacaaggtttatttggctgatcctgtggtatttactgttaaacatatcaagcagtcagaggaaaatttcaaccctaactgttcattttggagctactccaagcgtacaatgacaggttattggtcaacacaaggctgtcggctcctgacaacaaataagacacatactacatgctcttgtaaccacctaacaaattttgcagtactgatggcacatgtggaagttaagcacagtgatgcggtccatgacctccttctggatgtgatcacgtgggttggaattttgctgtcccttgtttgtctcctgatttgcatcttcacattttgctttttccgggggctccagagtgaccgtaacaccatccacaagaacctctgcatcagtctctttgtagcagagctgctcttcctgattgggatcaaccgaactgaccaaccaattgcctgtgctgttttcgctgccctgttacatttcttcttcttggctgccttcacctggatgttcctggagggggtgcagctttatatcatgctggtggaggtttttgagagtgaacattcacgtaggaaatacttttatctggtcggctatgggatgcctgcactcattgtggctgtgtcagctgcagtagactacaggagttatggaacagataaagtatgttggctccgacttgacacctacttcatttggagttttataggaccagcaactttgataattatgcttaatgtaatcttccttgggattgctttatataaaatgtttcatcatactgctatactgaaacctgaatcaggctgtcttgataacatcaactatgaggataacagacccttcatcaagtcatgggttataggtgcaatagctcttctctgcctattaggattgacctgggcctttggactcatgtatattaatgaaagcacagtcatcatggcctatctcttcaccattttcaattctctacagggaatgtttatatttattttccattgtgtcctacagaagaaggtacgaaaagagtatgggaaatgcctgcgaacacattgctgtagtggcaaaagtacagagagttccattggttcagggaaaacatctggttctcgaactcctggacgctactccacaggctcacagagccgaatccgtagaatgtggaatgacacggttcgaaagcagtcagagtcttcctttattactggagacataaacagttcagcgtcactcaacagaggagccatggctaatcatcttataagcaatgctctgcttcgtccgcatggtactaacaatccctataatacattgcttggggaaccggcggtctgtaacaacccttctgtcagcatgtacaacgcacaagagccctacagagagacaagtatgggagtaaagctaaacattgcatatcaaataggggcttctgaacaatgccagggatacaagtgtcatggatactctaccactgaatggtaaccatggcaatagttacagcattgccagcggcgaatacctgagcaactgtgtgcaaatcatagaccgtggctataaccataacgagaccgccctagagaaaaagattctgaaggaactcacttccaactatatcccttcttacctgaacaaccatgagcgctccagtgaacagaacaggaatctgatgaacaagctggtgaataaccttggcagtggaagggaagatgatgccattgtcctggatgatgccacctcgtttaaccacgaggagagtttgggcctggaactcattcatgaggaatctgatgctcctttgctgcccccaagagtatactccaccgagaaccaccagccacaccattataccagaaggcggatcccccaagaccacagtgagagctttttccctttgctaaccaacgagcacacagaagatctccagtcaccccatagagactctctctataccagcatgccgacactggctggtgtggccgccacagagagtgttaccaccagcacccagaccgaacccccaccggccaaatgtggtgatgccgaagatgtttactacaaaagcatgccaaacctaggctccagaaaccacgtccatcagctgcatacttactaccagctaggtcgcggcagcagtgatggatttatagttcctccaaacaaagatgggacccctcccgagggaagttcaaaaggaccggctcatttggtcactagtctatagaagatgacacagaaattggaaccaacaaaactgctaacaccttgttgactgttctgagttgatataagcagtggtaataatgtgt

SEQ ID NO: 325935 - DNA, 4758 bp, Artificial Sequence
  derived and/or modified sequence
atgtggccatcgcagctactaattttcatgatgctcttagctccaataattcatgctttcagccgtgccccaattccaatggctgtggtccgcagagagctatcctgtgagagctatcctatagagcttcgctgtccaggaacagacgtcatcatgatagaaagtgccaactatggcaggactgatgacaaaatttgtgactctgaccctgctcagatggagaatatccgatgttatctgccagatgcctataagattatgtctcaaagatgcaataacagaacccagtgtgcagtggtggcaggtcctgatgtttttccagacccgtgtccaggaacctataaataccttgaagtgcagtatgaatgtgtcccttacaaagtggaacaaaaagtttttctttgtcctggactactaaaaggagtataccagagtgaacatttgtttgagtccgaccaccaatctggggcgtggtgcaaagaccctctgcaggcatctgacaagatttattatatgccctggactccctacagaactgataccctgactgagtattcatccaaggatgacttcattgctggaagaccaactacaacctacaagctccctcacagggtggatggcacaggatttgtagtgtatgatggagctttgttcttcaacaaagagcgcaccaggaacatagtaaagtttgatttgcggactaggataaagagtggagaggctatcatagcaaatgccaattaccatgatacctccccttaccgatggggaggcaaatctgacatagacctggcagtagatgagaatgggctatgggtaatctatgcaacagaacaaaacaatggtaaaattgtcattagtcaattgaacccttacaccctacggatcgaaggaacatgggatactgcatatgataaaaggtcagcttccaatgcctttatgatttgtggaattctgtatgtggtcaaatctgtatatgaggatgatgacaatgaggctactggaaataagattgactacatttacaacactgaccaaagcaaggatagtttggtggatgtaccctttcctaattcataccagtacattgcagctgtggattacaaccccagggacaacctactttatgtatggaataactatcacgtcgtgaaatattctttggattttggacctctggatagtagatcagggcaggcacatcatggacaagtttcatacatttctccgccaattcaccttgactctgagctagaaagaccctctgttaaagatatctctaccacaggacctcttggcatgggaagcactaccaccagtaccacccttcggaccacaactttgagcccaggaaggagtaccaccccgtcagtgtcaggaagaagaaaccggagtactagtaccccatctccagctgtcgaggtacttgatgacatgaccacacaccttccatcagcatcgtcccaaatcccagctctcgaagagagctgtgaggctgtggaagcccgagaaatcatgtggtttaagactcgtcaaggacagatagcaaagcagccatgccctgcaggaactataggtgtatcaacttatctatgccttgctcctgatggaatttgggatccccaaggtccagatctcagcaactgttcttctccttgggtcaatcatataacacagaagttgaaatctggtgaaacagctgccaacattgctagagagctggctgaacagacaagaaatcacttgaatgctggggacatcacctactctgtccgggccatggaccagctggtaggcctcctagatgtacagcttcggaacttgaccccaggtggaaaagatagtgctgcccggagtttgaacaagcttcagaaaagagagcgctcttgcagagcctatgtccaggcaatggtcgagacagttaacaacctccttcagccacaagctttgaatgcatggagagacctgactacgagtgatcagctgcgtgcggccaccatgttgcttcatactgtggaggaaagtgcttttgtgctggctgataaccttttgaagactgacattgtcagggagaatacagacaatattaaattggaagttgcaagactgagcacagaaggaaacttagaagacctaaaatttccagaaaacatgggccatggaagcactatccagctgtctgcaaataccttaaagcaaaatggccgaaatggagagatcagagtggcctttgtcctgtataacaacttgggtccttatttatccacggagaatgccagtatgaagttgggaacggaagctttgtccacaaatcattctgttattgtcaattcccctgttattacggcagcaataaacaaagagttcagtaacaaggtttatttggctgatcctgtggtatttactgttaaacatatcaagcagtcagaggaaaatttcaaccctaactgttcattttggagctactccaagcgtacaatgacaggttattggtcaacacaaggctgtcggctcctgacaacaaataagacacatactacatgctcttgtaaccacctaacaaattttgcagtactgatggcacatgtggaagttaagcacagtgatgcggtccatgacctccttctggatgtgatcacgtgggttggaattttgctgtcccttgtttgtctcctgatttgcatcttcacattttgctttttccgggggctccagagtgaccgtaacaccatccacaagaacctctgcatcagtctctttgtagcagagctgctcttcctgattgggatcaaccgaactgaccaaccaattgcctgtgctgttttcgctgccctgttacatttcttcttcttggctgccttcacctggatgttcctggagggggtgcagctttatatcatgctggtggaggtttttgagagtgaacattcacgtaggaaatacttttatctggtcggctatgggatgcctgcactcattgtggctgtgtcagctgcagtagactacaggagttatggaacagataaagtatgttggctccgacttgacacctacttcatttggagttttataggaccagcaactttgataattatgcttaatgtaatcttccttgggattgctttatataaaatgtttcatcatactgctatactgaaacctgaatcaggctgtcttgataacatcaactatgaggataacagacccttcatcaagtcatgggttataggtgcaatagctcttctctgcctattaggattgacctgggcctttggactcatgtatattaatgaaagcacagtcatcatggcctatctcttcaccattttcaattctctacagggaatgtttatatttattttccattgtgtcctacagaagaaggtacgaaaagagtatgggaaatgcctgcgaacacattgctgtagtggcaaaagtacagagagttccattggttcagggaaaacatctggttctcgaactcctggacgctactccacaggctcacagagccgaatccgtagaatgtggaatgacacggttcgaaagcagtcagagtcttcctttattactggagacataaacagttcagcgtcactcaacagaggagccatggctaatcatcttataagcaatgctctgcttcgtccgcatggtactaacaatccctataatacattgcttggggaaccggcggtctgtaacaacccttctgtcagcatgtacaacgcacaagaggggcttctgaacaatgccagggatacaagtgtcatggatactctaccactgaatggtaaccatggcaatagttacagcattgccagcggcgaatacctgagcaactgtgtgcaaatcatagaccgtggctataaccataacgagaccgccctagagaaaaagattctgaaggaactcacttccaactatatcccttcttacctgaacaaccatgagcgctccagtgaacagaacaggaatctgatgaacaagctggtgaataaccttggcagtggaagggaagatgatgccattgtcctggatgatgccacctcgtttaaccacgaggagagtttgggcctggaactcattcatgaggaatctgatgctcctttgctgcccccaagagtatactccaccgagaaccaccagccacaccattataccagaaggcggatcccccaagaccacagtgagagctttttccctttgctaaccaacgagcacacagaagatctccagtcaccccatagagactctctctataccagcatgccgacactggctggtgtggccgccacagagagtgttaccaccagcacccagaccgaacccccaccggccaaatgtggtgatgccgaagatgtttactacaaaagcatgccaaacctaggctccagaaaccacgtccatcagctgcatacttactaccagctaggtcgcggcagcagtgatggatttatagttcctccaaacaaagatgggacccctcccgagggaagttcaaaaggaccggctcatttggtcactagtctatagaagatgacacagaaattggaaccaacaaaactgctaacaccttgttgactgttctgagttgatataagcagtggtaataatgtgtgtactcctaaatctttatgctgtcctctaaagacaaacacaaactctcagacttttttttttttaatgggatttttaggtcagcccaggggagaaagataactgctaaaattcccctgtaccccatcctttctt

SEQ ID NO: 325936 - DNA, 3852 bp, Artificial Sequence
  derived and/or modified sequence
atgtggcccagccagctgctgatcttcatgatgctgctggcccccatcatccacgccttcagccgggcccccatccccatggctgtggtgagaagagagctgagctgtgagagctaccccatcgagctgcgctgccccggcacagatgtgatcatgattgaaagtgccaactacggccgcacagatgacaagatctgtgacagcgaccctgcccagatggagaacatccgctgctacctgcctgatgcctacaagatcatgagccagcgctgcaacaacagaacccagtgtgctgtggtggccggcccagatgtgtttcctgacccctgccccggcacctacaagtacctggaggtgcagtatgaatgtgtgccctacaaggtggagcagaaggtgttcctgtgccccggcctgctgaagggcgtgtaccagagcgagcacctgtttgaaagtgaccaccagagcggggcctggtgcaaggaccccctgcaggccagtgacaagatctactacatgccctggaccccctacagaacagacaccctgacagagtacagcagcaaggatgacttcatcgccggccggcccaccaccacctacaagctgccccaccgggtggatggcactggatttgtggtgtatgatggagccctcttcttcaacaaggagaggaccaggaacatcgtgaagtttgacctgcggacccgcatcaagtctggagaggccatcatcgccaatgccaactaccatgacaccagcccctaccgctggggcggcaagagtgacatcgacctggccgtggatgaaaatggcctgtgggtgatctatgccacagagcagaacaacgggaagatcgtcatcagccagctgaacccctacaccctgagaattgagggcacctgggacacagcctatgacaagaggtctgccagcaatgccttcatgatctgtggcatcctgtatgtggtgaagtctgtgtatgaagatgatgacaatgaggccactggaaacaagattgactacatctacaacacagaccagagcaaggacagcctggtggatgtgcccttccccaacagctaccagtacatcgctgctgtggactacaacccccgggacaacctgctgtatgtgtggaacaactaccacgtggtgaagtacagcctggactttggccccctggacagccgcagcggccaggcccaccacggccaggtgtcctacatcagcccccccatccacctggacagcgagctggagcggcccagcgtgaaggacatcagcaccaccggccccctgggcatgggcagcaccaccaccagcaccaccctgcggaccaccaccctgagccctggccgcagcaccacccccagcgtgtctggaagaagaaacagaagcaccagcacccccagccctgctgtggaggtgctggatgacatgaccacccacctgcccagcgccagcagccagatcccagccctggaggagagctgtgaggccgtggaggcccgggagatcatgtggttcaagacccggcagggccagatcgccaagcagccctgcccagctggcaccatcggcgtgtccacctacctgtgcctggccccagatggcatctgggacccccagggccctgacctgagcaactgcagcagcccctgggtgaaccacatcacccagaagctgaagagcggggagacagctgccaacatcgcccgggagctggccgagcagaccaggaaccacctgaatgctggggacatcacctacagcgtgcgggccatggaccagctggtgggcctgctggatgtgcagctgaggaacctgaccccaggcggcaaggacagcgctgcccggagcctgaacaagctgcagaagcgggagaggagctgccgggcctacgtgcaggccatggtggagaccgtgaacaacctgctgcagccccaggccctgaatgcctggagggacctgaccaccagtgaccagctgcgggccgccaccatgctgctgcacacagtggaggagagcgcctttgtgctggccgacaacctgctgaagacagacatcgtgcgggagaacacagacaacatcaagctggaggtggcccggctgagcacagagggcaacctggaggacctgaagtttcctgagaacatgggccacggcagcaccatccagctgagcgccaacaccctgaagcagaatggaagaaatggagagatccgggtggcctttgtgctgtacaacaacctgggcccctacctgagcacagaaaatgcctccatgaagctgggcacagaggccctgagcaccaaccacagcgtcatcgtgaacagccctgtgatcacagctgccatcaacaaggagttcagcaacaaggtgtacctggccgaccctgtggtgttcaccgtgaagcacatcaagcagagcgaggagaacttcaaccccaactgcagcttctggagctacagcaagaggaccatgacaggctactggagcacccagggctgccgcctgctgaccaccaacaagacccacaccacctgcagctgcaaccacctgaccaactttgctgtgctgatggcccacgtggaggtgaagcacagtgatgctgtgcatgacctgctgctggatgtgatcacctgggtgggcatcctgctgagcctggtgtgcctgctgatctgcatcttcaccttctgcttcttccggggcctgcagagcgacaggaacaccatccacaagaacctgtgcatcagcctgtttgtggccgagctgctcttcctgattggcatcaacagaacagaccagcccatcgcctgtgctgtgtttgctgccctgctgcacttcttcttcctggccgccttcacctggatgttcctggagggcgtgcagctgtacatcatgctggtggaggtgtttgaaagtgagcacagcaggaggaagtacttctacctggtgggctacggcatgcctgccctgattgtggccgtgtctgctgctgtggactaccgctcctatggaacagacaaggtgtgctggctgcggctggacacctacttcatctggagcttcatcggccctgccaccctcatcatcatgctgaatgtcatcttcctgggcatcgccctgtacaagatgttccaccacacagccatcctgaagccagagagcggctgcctggacaacatcaactatgaggacaaccggcccttcatcaagtcctgggtgattggagccatcgccctgctgtgcctgctgggcctgacctgggccttcggcctgatgtacatcaatgaaagcaccgtcatcatggcctacctgttcaccatcttcaacagcctgcagggcatgttcatcttcatcttccactgtgtgctgcagaagaaggtgaggaaggagtatggcaagtgcctgcggacccactgctgcagcggcaagagcacagagagcagcatcggcagcggcaagaccagcggcagcaggaccccaggccgctacagcacaggcagccagagccgcatccggaggatgtggaatgacacagtgaggaagcagagcgagagcagcttcatcaccggggacatcaacagcagcgccagcctgaacagaggagccatggccaaccacctgatcagcaatgccctgctgcggccccacggcaccaacaacccctacaacaccctgctgggggagcctgctgtgtgcaacaaccccagcgtgtccatgtacaatgcccaggagccctaccgggagacctccatgggcgtgaagctgaacatcgcctaccagatcggggccagcgagcagtgccagggctacaagtgccacggctacagcaccacagagtggtag

SEQ ID NO: 325937 - DNA, 4743 bp, Artificial Sequence
  derived and/or modified sequence
atgtggcccagccagctgctgatcttcatgatgctgctggcccccatcatccacggcggcaagcacagcgagcggcacccagccctggccgcccccctgcggcatgctgagaggagccctgggggcgccctgcccccaagacacctgctgcagcagcctgctgctgagaggacagctgcccaccggggccagggccccaggggggccacccggggcgtgcggggccctggggcccagggcgcccagattgctgcccaggccttcagccgggcccccatccccatggctgtggtgagaagagagctgagctgtgagagctaccccatcgagctgcgctgccccggcacagatgtgatcatgattgaaagtgccaactacggccgcacagatgacaagatctgtgacagcgaccctgcccagatggagaacatccgctgctacctgcctgatgcctacaagatcatgagccagcgctgcaacaacagaacccagtgtgctgtggtggccggcccagatgtgtttcctgacccctgccccggcacctacaagtacctggaggtgcagtatgaatgtgtgccctacaaggtggagcagaaggtgttcctgtgccccggcctgctgaagggcgtgtaccagagcgagcacctgtttgaaagtgaccaccagagcggggcctggtgcaaggaccccctgcaggccagtgacaagatctactacatgccctggaccccctacagaacagacaccctgacagagtacagcagcaaggatgacttcatcgccggccggcccaccaccacctacaagctgccccaccgggtggatggcactggatttgtggtgtatgatggagccctcttcttcaacaaggagaggaccaggaacatcgtgaagtttgacctgcggacccgcatcaagtctggagaggccatcatcgccaatgccaactaccatgacaccagcccctaccgctggggcggcaagagtgacatcgacctggccgtggatgaaaatggcctgtgggtgatctatgccacagagcagaacaacgggaagatcgtcatcagccagctgaacccctacaccctgagaattgagggcacctgggacacagcctatgacaagaggtctgccagcaatgccttcatgatctgtggcatcctgtatgtggtgaagtctgtgtatgaagatgatgacaatgaggccactggaaacaagattgactacatctacaacacagaccagagcaaggacagcctggtggatgtgcccttccccaacagctaccagtacatcgctgctgtggactacaacccccgggacaacctgctgtatgtgtggaacaactaccacgtggtgaagtacagcctggactttggccccctggacagccgcagcggccaggcccaccacggccaggtgtcctacatcagcccccccatccacctggacagcgagctggagcggcccagcgtgaaggacatcagcaccaccggccccctgggcatgggcagcaccaccaccagcaccaccctgcggaccaccaccctgagccctggccgcagcaccacccccagcgtgtctggaagaagaaacagaagcaccagcacccccagccctgctgtggaggtgctggatgacatgaccacccacctgcccagcgccagcagccagatcccagccctggaggagagctgtgaggccgtggaggcccgggagatcatgtggttcaagacccggcagggccagatcgccaagcagccctgcccagctggcaccatcggcgtgtccacctacctgtgcctggccccagatggcatctgggacccccagggccctgacctgagcaactgcagcagcccctgggtgaaccacatcacccagaagctgaagagcggggagacagctgccaacatcgcccgggagctggccgagcagaccaggaaccacctgaatgctggggacatcacctacagcgtgcgggccatggaccagctggtgggcctgctggatgtgcagctgaggaacctgaccccaggcggcaaggacagcgctgcccggagcctgaacaagctgcagaagcgggagaggagctgccgggcctacgtgcaggccatggtggagaccgtgaacaacctgctgcagccccaggccctgaatgcctggagggacctgaccaccagtgaccagctgcgggccgccaccatgctgctgcacacagtggaggagagcgcctttgtgctggccgacaacctgctgaagacagacatcgtgcgggagaacacagacaacatcaagctggaggtggcccggctgagcacagagggcaacctggaggacctgaagtttcctgagaacatgggccacggcagcaccatccagctgagcgccaacaccctgaagcagaatggaagaaatggagagatccgggtggcctttgtgctgtacaacaacctgggcccctacctgagcacagaaaatgcctccatgaagctgggcacagaggccctgagcaccaaccacagcgtcatcgtgaacagccctgtgatcacagctgccatcaacaaggagttcagcaacaaggtgtacctggccgaccctgtggtgttcaccgtgaagcacatcaagcagagcgaggagaacttcaaccccaactgcagcttctggagctacagcaagaggaccatgacaggctactggagcacccagggctgccgcctgctgaccaccaacaagacccacaccacctgcagctgcaaccacctgaccaactttgctgtgctgatggcccacgtggaggtgaagcacagtgatgctgtgcatgacctgctgctggatgtgatcacctgggtgggcatcctgctgagcctggtgtgcctgctgatctgcatcttcaccttctgcttcttccggggcctgcagagcgacaggaacaccatccacaagaacctgtgcatcagcctgtttgtggccgagctgctcttcctgattggcatcaacagaacagaccagcccatcgcctgtgctgtgtttgctgccctgctgcacttcttcttcctggccgccttcacctggatgttcctggagggcgtgcagctgtacatcatgctggtggaggtgtttgaaagtgagcacagcaggaggaagtacttctacctggtgggctacggcatgcctgccctgattgtggccgtgtctgctgctgtggactaccgctcctatggaacagacaaggtgtgctggctgcggctggacacctacttcatctggagcttcatcggccctgccaccctcatcatcatgctgaatgtcatcttcctgggcatcgccctgtacaagatgttccaccacacagccatcctgaagccagagagcggctgcctggacaacatcaactatgaggacaaccggcccttcatcaagtcctgggtgattggagccatcgccctgctgtgcctgctgggcctgacctgggccttcggcctgatgtacatcaatgaaagcaccgtcatcatggcctacctgttcaccatcttcaacagcctgcagggcatgttcatcttcatcttccactgtgtgctgcagaagaaggtgaggaaggagtatggcaagtgcctgcggacccactgctgcagcggcaagagcacagagagcagcatcggcagcggcaagaccagcggcagcaggaccccaggccgctacagcacaggcagccagagccgcatccggaggatgtggaatgacacagtgaggaagcagagcgagagcagcttcatcaccggggacatcaacagcagcgccagcctgaacagaggagccatggccaaccacctgatcagcaatgccctgctgcggccccacggcaccaacaacccctacaacaccctgctgggggagcctgctgtgtgcaacaaccccagcgtgtccatgtacaatgcccaggagggcctgctgaacaatgcccgggacacctctgtgatggacaccctgcccctgaatggaaaccacggcaacagctacagcatcgccagcggggagtacctgagcaactgtgtgcagatcatcgaccggggctacaaccacaatgaaacagccctggagaagaagatcctgaaggagctgaccagcaactacatccccagctacctgaacaaccacgagaggagcagcgagcagaacagaaacctgatgaacaagctggtgaacaacctgggcagcggcagagaagatgatgccatcgtgctggatgatgccaccagcttcaaccacgaggagagcctgggcctggagctgattcatgaggagagtgatgcccccctgctgcccccccgggtgtacagcacagagaaccaccagccccaccactacacccggcggcgcatcccccaggaccacagcgagagcttcttccccctgctgaccaatgagcacacagaggacctgcagagcccccaccgggacagcctgtacacctccatgcccaccctggccggcgtggccgccacagagagcgtgaccaccagcacccagacagagcccccaccagccaagtgtggagatgctgaagatgtgtactacaagtccatgcccaacctgggcagcagaaatcatgtgcaccagctgcacacctactaccagctgggccggggcagcagtgatggcttcatcgtgccccccaacaaggatggcaccccacctgagggcagcagcaaaggacctgcccacctggtgaccagcctgtag

SEQ ID NO: 325938 - DNA, 4056 bp, Artificial Sequence
  derived and/or modified sequence
atgtggcccagccagctgctgatcttcatgatgctgctggcccccatcatccacggcggcaagcacagcgagcggcacccagccctggccgcccccctgcggcatgctgagaggagccctgggggcgccctgcccccaagacacctgctgcagcagcctgctgctgagaggacagctgcccaccggggccagggccccaggggggccacccggggcgtgcggggccctggggcccagggcgcccagattgctgcccaggccttcagccgggcccccatccccatggctgtggtgagaagagagctgagctgtgagagctaccccatcgagctgcgctgccccggcacagatgtgatcatgattgaaagtgccaactacggccgcacagatgacaagatctgtgacagcgaccctgcccagatggagaacatccgctgctacctgcctgatgcctacaagatcatgagccagcgctgcaacaacagaacccagtgtgctgtggtggccggcccagatgtgtttcctgacccctgccccggcacctacaagtacctggaggtgcagtatgaatgtgtgccctacaaggtggagcagaaggtgttcctgtgccccggcctgctgaagggcgtgtaccagagcgagcacctgtttgaaagtgaccaccagagcggggcctggtgcaaggaccccctgcaggccagtgacaagatctactacatgccctggaccccctacagaacagacaccctgacagagtacagcagcaaggatgacttcatcgccggccggcccaccaccacctacaagctgccccaccgggtggatggcactggatttgtggtgtatgatggagccctcttcttcaacaaggagaggaccaggaacatcgtgaagtttgacctgcggacccgcatcaagtctggagaggccatcatcgccaatgccaactaccatgacaccagcccctaccgctggggcggcaagagtgacatcgacctggccgtggatgaaaatggcctgtgggtgatctatgccacagagcagaacaacgggaagatcgtcatcagccagctgaacccctacaccctgagaattgagggcacctgggacacagcctatgacaagaggtctgccagcaatgccttcatgatctgtggcatcctgtatgtggtgaagtctgtgtatgaagatgatgacaatgaggccactggaaacaagattgactacatctacaacacagaccagagcaaggacagcctggtggatgtgcccttccccaacagctaccagtacatcgctgctgtggactacaacccccgggacaacctgctgtatgtgtggaacaactaccacgtggtgaagtacagcctggactttggccccctggacagccgcagcggccaggcccaccacggccaggtgtcctacatcagcccccccatccacctggacagcgagctggagcggcccagcgtgaaggacatcagcaccaccggccccctgggcatgggcagcaccaccaccagcaccaccctgcggaccaccaccctgagccctggccgcagcaccacccccagcgtgtctggaagaagaaacagaagcaccagcacccccagccctgctgtggaggtgctggatgacatgaccacccacctgcccagcgccagcagccagatcccagccctggaggagagctgtgaggccgtggaggcccgggagatcatgtggttcaagacccggcagggccagatcgccaagcagccctgcccagctggcaccatcggcgtgtccacctacctgtgcctggccccagatggcatctgggacccccagggccctgacctgagcaactgcagcagcccctgggtgaaccacatcacccagaagctgaagagcggggagacagctgccaacatcgcccgggagctggccgagcagaccaggaaccacctgaatgctggggacatcacctacagcgtgcgggccatggaccagctggtgggcctgctggatgtgcagctgaggaacctgaccccaggcggcaaggacagcgctgcccggagcctgaacaagctgcagaagcgggagaggagctgccgggcctacgtgcaggccatggtggagaccgtgaacaacctgctgcagccccaggccctgaatgcctggagggacctgaccaccagtgaccagctgcgggccgccaccatgctgctgcacacagtggaggagagcgcctttgtgctggccgacaacctgctgaagacagacatcgtgcgggagaacacagacaacatcaagctggaggtggcccggctgagcacagagggcaacctggaggacctgaagtttcctgagaacatgggccacggcagcaccatccagctgagcgccaacaccctgaagcagaatggaagaaatggagagatccgggtggcctttgtgctgtacaacaacctgggcccctacctgagcacagaaaatgcctccatgaagctgggcacagaggccctgagcaccaaccacagcgtcatcgtgaacagccctgtgatcacagctgccatcaacaaggagttcagcaacaaggtgtacctggccgaccctgtggtgttcaccgtgaagcacatcaagcagagcgaggagaacttcaaccccaactgcagcttctggagctacagcaagaggaccatgacaggctactggagcacccagggctgccgcctgctgaccaccaacaagacccacaccacctgcagctgcaaccacctgaccaactttgctgtgctgatggcccacgtggaggtgaagcacagtgatgctgtgcatgacctgctgctggatgtgatcacctgggtgggcatcctgctgagcctggtgtgcctgctgatctgcatcttcaccttctgcttcttccggggcctgcagagcgacaggaacaccatccacaagaacctgtgcatcagcctgtttgtggccgagctgctcttcctgattggcatcaacagaacagaccagcccatcgcctgtgctgtgtttgctgccctgctgcacttcttcttcctggccgccttcacctggatgttcctggagggcgtgcagctgtacatcatgctggtggaggtgtttgaaagtgagcacagcaggaggaagtacttctacctggtgggctacggcatgcctgccctgattgtggccgtgtctgctgctgtggactaccgctcctatggaacagacaaggtgtgctggctgcggctggacacctacttcatctggagcttcatcggccctgccaccctcatcatcatgctgaatgtcatcttcctgggcatcgccctgtacaagatgttccaccacacagccatcctgaagccagagagcggctgcctggacaacatcaactatgaggacaaccggcccttcatcaagtcctgggtgattggagccatcgccctgctgtgcctgctgggcctgacctgggccttcggcctgatgtacatcaatgaaagcaccgtcatcatggcctacctgttcaccatcttcaacagcctgcagggcatgttcatcttcatcttccactgtgtgctgcagaagaaggtgaggaaggagtatggcaagtgcctgcggacccactgctgcagcggcaagagcacagagagcagcatcggcagcggcaagaccagcggcagcaggaccccaggccgctacagcacaggcagccagagccgcatccggaggatgtggaatgacacagtgaggaagcagagcgagagcagcttcatcaccggggacatcaacagcagcgccagcctgaacagaggagccatggccaaccacctgatcagcaatgccctgctgcggccccacggcaccaacaacccctacaacaccctgctgggggagcctgctgtgtgcaacaaccccagcgtgtccatgtacaatgcccaggagccctaccgggagacctccatgggcgtgaagctgaacatcgcctaccagatcggggccagcgagcagtgccagggctacaagtgccacggctacagcaccacagagtggtag

SEQ ID NO: 325939 - DNA, 4539 bp, Artificial Sequence
  derived and/or modified sequence
atgtggcccagccagctgctgatcttcatgatgctgctggcccccatcatccacgccttcagccgggcccccatccccatggctgtggtgagaagagagctgagctgtgagagctaccccatcgagctgcgctgccccggcacagatgtgatcatgattgaaagtgccaactacggccgcacagatgacaagatctgtgacagcgaccctgcccagatggagaacatccgctgctacctgcctgatgcctacaagatcatgagccagcgctgcaacaacagaacccagtgtgctgtggtggccggcccagatgtgtttcctgacccctgccccggcacctacaagtacctggaggtgcagtatgaatgtgtgccctacaaggtggagcagaaggtgttcctgtgccccggcctgctgaagggcgtgtaccagagcgagcacctgtttgaaagtgaccaccagagcggggcctggtgcaaggaccccctgcaggccagtgacaagatctactacatgccctggaccccctacagaacagacaccctgacagagtacagcagcaaggatgacttcatcgccggccggcccaccaccacctacaagctgccccaccgggtggatggcactggatttgtggtgtatgatggagccctcttcttcaacaaggagaggaccaggaacatcgtgaagtttgacctgcggacccgcatcaagtctggagaggccatcatcgccaatgccaactaccatgacaccagcccctaccgctggggcggcaagagtgacatcgacctggccgtggatgaaaatggcctgtgggtgatctatgccacagagcagaacaacgggaagatcgtcatcagccagctgaacccctacaccctgagaattgagggcacctgggacacagcctatgacaagaggtctgccagcaatgccttcatgatctgtggcatcctgtatgtggtgaagtctgtgtatgaagatgatgacaatgaggccactggaaacaagattgactacatctacaacacagaccagagcaaggacagcctggtggatgtgcccttccccaacagctaccagtacatcgctgctgtggactacaacccccgggacaacctgctgtatgtgtggaacaactaccacgtggtgaagtacagcctggactttggccccctggacagccgcagcggccaggcccaccacggccaggtgtcctacatcagcccccccatccacctggacagcgagctggagcggcccagcgtgaaggacatcagcaccaccggccccctgggcatgggcagcaccaccaccagcaccaccctgcggaccaccaccctgagccctggccgcagcaccacccccagcgtgtctggaagaagaaacagaagcaccagcacccccagccctgctgtggaggtgctggatgacatgaccacccacctgcccagcgccagcagccagatcccagccctggaggagagctgtgaggccgtggaggcccgggagatcatgtggttcaagacccggcagggccagatcgccaagcagccctgcccagctggcaccatcggcgtgtccacctacctgtgcctggccccagatggcatctgggacccccagggccctgacctgagcaactgcagcagcccctgggtgaaccacatcacccagaagctgaagagcggggagacagctgccaacatcgcccgggagctggccgagcagaccaggaaccacctgaatgctggggacatcacctacagcgtgcgggccatggaccagctggtgggcctgctggatgtgcagctgaggaacctgaccccaggcggcaaggacagcgctgcccggagcctgaacaagctgcagaagcgggagaggagctgccgggcctacgtgcaggccatggtggagaccgtgaacaacctgctgcagccccaggccctgaatgcctggagggacctgaccaccagtgaccagctgcgggccgccaccatgctgctgcacacagtggaggagagcgcctttgtgctggccgacaacctgctgaagacagacatcgtgcgggagaacacagacaacatcaagctggaggtggcccggctgagcacagagggcaacctggaggacctgaagtttcctgagaacatgggccacggcagcaccatccagctgagcgccaacaccctgaagcagaatggaagaaatggagagatccgggtggcctttgtgctgtacaacaacctgggcccctacctgagcacagaaaatgcctccatgaagctgggcacagaggccctgagcaccaaccacagcgtcatcgtgaacagccctgtgatcacagctgccatcaacaaggagttcagcaacaaggtgtacctggccgaccctgtggtgttcaccgtgaagcacatcaagcagagcgaggagaacttcaaccccaactgcagcttctggagctacagcaagaggaccatgacaggctactggagcacccagggctgccgcctgctgaccaccaacaagacccacaccacctgcagctgcaaccacctgaccaactttgctgtgctgatggcccacgtggaggtgaagcacagtgatgctgtgcatgacctgctgctggatgtgatcacctgggtgggcatcctgctgagcctggtgtgcctgctgatctgcatcttcaccttctgcttcttccggggcctgcagagcgacaggaacaccatccacaagaacctgtgcatcagcctgtttgtggccgagctgctcttcctgattggcatcaacagaacagaccagcccatcgcctgtgctgtgtttgctgccctgctgcacttcttcttcctggccgccttcacctggatgttcctggagggcgtgcagctgtacatcatgctggtggaggtgtttgaaagtgagcacagcaggaggaagtacttctacctggtgggctacggcatgcctgccctgattgtggccgtgtctgctgctgtggactaccgctcctatggaacagacaaggtgtgctggctgcggctggacacctacttcatctggagcttcatcggccctgccaccctcatcatcatgctgaatgtcatcttcctgggcatcgccctgtacaagatgttccaccacacagccatcctgaagccagagagcggctgcctggacaacatcaactatgaggacaaccggcccttcatcaagtcctgggtgattggagccatcgccctgctgtgcctgctgggcctgacctgggccttcggcctgatgtacatcaatgaaagcaccgtcatcatggcctacctgttcaccatcttcaacagcctgcagggcatgttcatcttcatcttccactgtgtgctgcagaagaaggtgaggaaggagtatggcaagtgcctgcggacccactgctgcagcggcaagagcacagagagcagcatcggcagcggcaagaccagcggcagcaggaccccaggccgctacagcacaggcagccagagccgcatccggaggatgtggaatgacacagtgaggaagcagagcgagagcagcttcatcaccggggacatcaacagcagcgccagcctgaacagaggagccatggccaaccacctgatcagcaatgccctgctgcggccccacggcaccaacaacccctacaacaccctgctgggggagcctgctgtgtgcaacaaccccagcgtgtccatgtacaatgcccaggagggcctgctgaacaatgcccgggacacctctgtgatggacaccctgcccctgaatggaaaccacggcaacagctacagcatcgccagcggggagtacctgagcaactgtgtgcagatcatcgaccggggctacaaccacaatgaaacagccctggagaagaagatcctgaaggagctgaccagcaactacatccccagctacctgaacaaccacgagaggagcagcgagcagaacagaaacctgatgaacaagctggtgaacaacctgggcagcggcagagaagatgatgccatcgtgctggatgatgccaccagcttcaaccacgaggagagcctgggcctggagctgattcatgaggagagtgatgcccccctgctgcccccccgggtgtacagcacagagaaccaccagccccaccactacacccggcggcgcatcccccaggaccacagcgagagcttcttccccctgctgaccaatgagcacacagaggacctgcagagcccccaccgggacagcctgtacacctccatgcccaccctggccggcgtggccgccacagagagcgtgaccaccagcacccagacagagcccccaccagccaagtgtggagatgctgaagatgtgtactacaagtccatgcccaacctgggcagcagaaatcatgtgcaccagctgcacacctactaccagctgggccggggcagcagtgatggcttcatcgtgccccccaacaaggatggcaccccacctgagggcagcagcaaaggacctgcccacctggtgaccagcctgtag

SEQ ID NO: 325940 - DNA, 3852 bp, Artificial Sequence
  derived and/or modified sequence
atgtggcccagccagctgctgatcttcatgatgctgctggcccccatcatccatgccttcagtagagcaccaatccctatggccgtggtgcggcgcgaattaagttgtgaatcctaccccattgaactcagatgtccaggaaccgatgtcatcatgatcgaatcagccaactatggccgcaccgacgacaagatttgtgatagcgatcctgctcagatggaaaacatccgctgttatctgccagatgcctataaaatcatgtcgcaacggtgcaacaatcgcacccagtgtgccgtggtggcggggcccgacgtcttccccgatccatgcccaggaacgtacaaatacttagaggtgcagtacgagtgcgtgccctacaaggtggagcagaaggtgtttctgtgccctgggcttctgaaaggcgtgtatcagagcgaacatctctttgaatcagaccaccagtctggagcctggtgtaaagatcctcttcaggcctctgataagatctattacatgccctggacaccctacaggacggatacactgaccgagtacagttccaaagacgacttcatcgccggaaggcccaccacaacatacaagctccctcatagggtggacggcacaggctttgtggtgtacgacggcgctctgttcttcaataaggagcggactcgcaacattgtaaagtttgatttgagaaccagaatcaaatcaggggaagccataatcgcgaatgcgaattaccacgacacctcaccgtacaggtgggggggcaaatcagacatcgacctggccgtggacgagaacgggttgtgggtgatctatgcaaccgaacaaaacaacgggaaaatcgtcatcagccagctgaatccttatacgctgagaattgaggggacttgggataccgcctatgataagaggtcagcaagcaatgcattcatgatttgtggcatactgtacgtggtgaagtctgtgtacgaggatgacgacaatgaggcaaccggtaacaagattgactacatctacaacacagaccagtcaaaagattccctggtcgatgtcccattcccaaatagctaccaatacatcgctgccgtagactataatccaagggataatcttttgtatgtgtggaataattaccacgttgttaaatacagcctggactttggaccgcttgattctaggtccgggcaggcacatcacggccaggttagttacatcagcccaccaattcaccttgatagtgagctggaacggccctcggtgaaggatatctccaccacaggcccacttggcatgggctcaactaccaccagtactacactccggacaaccaccctgagcccaggccggagcaccacaccaagtgtctctggacgtcgcaatcgtagcaccagtacgccctcccctgcagtggaagtactggatgatatgactactcaccttccgtctgccagtagtcagattcccgctctggaggagagctgtgaggccgtggaggcaagagaaatcatgtggttcaaaaccagacaagggcagattgccaaacagccatgtcccgcgggtacaattggtgtatctacttatctatgcttggcccctgatgggatctgggacccgcaaggccccgacttatccaattgttcttccccttgggttaaccacattacacagaaactcaaatcaggagaaactgctgctaacatcgccagagagctggccgaacagacgcggaatcacctgaatgccggggatatcacatatagcgtccgggcaatggaccagcttgttggtttactggatgtccagttgcggaacttgacccctggcgggaaggactcagcagcaaggtctctgaacaaactccagaagcgggaacgaagttgccgtgcctacgtgcaagcgatggtggaaaccgtgaacaacctcctacaaccccaggcccttaacgcatggagggacctgaccacgagcgaccagctcagagctgcgactatgcttctgcataccgtagaggagtccgccttcgtgcttgcagataaccttttaaaaaccgacattgttagggaaaacaccgacaatatcaaactcgaggttgctaggctgtccaccgaggggaacctagaggatctaaaattccccgaaaatatgggccatggcagtactatccagctctctgccaatactcttaaacaaaatggcaggaacggcgagattagagttgcgtttgtgctgtataataatctcgggccttacctgagcaccgaaaacgcaagtatgaaactggggacagaagctctgtctacaaaccacagtgtgatcgtgaatagcccagttatcacagccgcaatcaacaaggagttcagcaacaaggtgtacctggctgatccagtggtcttcactgttaagcacattaagcagtctgaggagaacttcaatcccaactgtagcttttggagttatagtaaaaggaccatgacagggtattggtcaacacagggctgcagacttctgacaactaataagacccataccacatgctcttgcaaccacctgaccaattttgctgtgctcatggcccacgtcgaggtgaaacacagcgatgccgtgcatgatctgcttttggacgtaatcacgtgggtcggaatattgctgtcacttgtgtgtcttctgatctgtatcttcaccttctgcttcttccggggactccaatctgaccggaacaccatacacaaaaatttgtgtatctccctgttcgtggccgaactcttattcctaattggcatcaaccgtacagatcagcccattgcctgtgctgtgttcgctgccttgctgcacttcttcttccttgctgcattcacatggatgtttctggagggagtgcagctgtacatcatgctagtcgaggtcttcgaatctgagcactcacggcggaaatatttctaccttgtgggatatggaatgcccgcactcatcgtggcagtgagtgccgccgtcgattacaggagctatggaactgataaggtctgctggctgcgcctcgatacgtatttcatatggtcctttatcggacctgccactctgatcattatgctgaatgtgatatttctcggtattgctctctataagatgttccatcataccgccatcctcaagccggagtcaggatgcctggacaatatcaactacgaagacaatcgccccttcatcaagagttgggttatcggcgccatagctttgctctgtctgctcggacttacctgggcgttcggcctgatgtacatcaacgaaagcacggtcatcatggcttacctgtttaccatttttaactcacttcaaggcatgttcatctttatcttccattgtgtcctgcaaaagaaggtcaggaaagagtatggaaagtgtctcagaactcactgttgcagcggaaaaagtactgaatctagcattggatctgggaagacatctgggagcaggacgccggggaggtattcaacaggctcccagagcaggatccgccgaatgtggaacgacaccgtgagaaagcagagcgagtcctccttcatcacgggtgatatcaatagttcagcttcactgaataggggagccatggcaaatcatctgatcagcaacgcactgcttcgtccacacggtacaaacaatccatacaacactttattaggggaacccgcagtctgcaataacccgtcggtgtcaatgtataatgcacaagagccctacagggagacctccatgggcgtgaaactgaatatagcctaccagatcggagccagtgagcaatgtcagggatataagtgtcatggctacagtactactgaatggtag

SEQ ID NO: 325941 - DNA, 4743 bp, Artificial Sequence
  derived and/or modified sequence
atgtggcccagccagctgctgatcttcatgatgctgctggcccccatcattcatgggggaaaacactctgaacgacaccccgctctcgctgctccactgagacacgcagagcgttcacccggcggcgccctcccacctagacacttgctgcagcaacctgctgcggaaaggacagccgcgcatcgtgggcagggcccacggggagcaacacgcggagtgcgcggtccgggggcccagggagcccagatcgcggctcaggccttttccagggcccctatccctatggccgtggtccgaagagagctctcgtgcgaatcatatcccattgagctgcggtgccctggcacggacgtgattatgatcgaatccgctaattatgggcgcaccgatgataaaatctgtgattccgaccccgcccagatggaaaacatacgatgctatcttcccgacgcgtacaagataatgtcacagcgttgtaacaatcgcacccagtgcgccgtggtcgccggcccagatgttttccccgatccctgccccggaacatacaaataccttgaggtgcagtatgagtgtgttccttacaaagtcgagcagaaagtgtttctgtgtccaggcctgctgaaaggtgtgtaccagagtgagcacttgttcgagagcgaccatcagtcaggagcctggtgtaaggatcccctgcaggcttccgataagatttattatatgccctggaccccctacagaactgacaccttgacagaatactcaagtaaggatgatttcatcgctggcaggcctacaaccacctacaagctgccgcatcgcgtggatgggactgggttcgtggtgtatgacggcgccctctttttcaataaagaacgcacccggaatatcgttaaattcgacttgcggacacgtatcaaaagtggagaggcgatcatcgccaacgccaactatcatgatacatcaccctaccgttgggggggcaagtccgatatcgacttggcggtggatgagaacggcctgtgggttatctacgcgacggaacaaaataatgggaagatcgtaattagccagctgaatccctatactttgcgtatcgagggcacatgggatacagcatatgataaacgttcagcctctaatgcgttcatgatctgcggaattttatacgtcgtgaaatctgtgtacgaggacgatgataacgaggctactgggaataagatcgactacatttacaacaccgaccaatcgaaggatagccttgttgatgttccgttcccgaattcttaccagtatatcgctgccgtggattataacccgcgcgataacctgctgtacgtgtggaataattaccacgtcgtcaagtactccctcgactttgggccacttgacagccgctcaggccaggcccatcacggacaggttagttacatcagtccaccgatccatctcgactcagagctggagcgcccctccgttaaggacatctccacaacggggccacttgggatgggctctactactacctcgaccactttgcggacaaccaccttaagccccggtagatcaacgactccatccgtgtccggccggcgcaatcggtccacctctaccccgtccccagctgtggaagtactggatgatatgacaactcatctgccatctgcttcatctcagatcccggcattagaggagtcatgtgaggccgtggaggcacgggaaattatgtggttcaaaacccggcagggacagatcgccaagcagccgtgcccagcaggcactattggggtctcgacctatctttgtctggcgcccgacggaatttgggaccctcaggggccagatctgtctaactgttcatccccctgggttaaccacatcacacaaaaactgaagagcggagagacagctgcaaatatcgcgagagagctggcggaacagacaaggaatcacttgaacgcaggagatatcacttattctgtgcgtgcaatggaccagctagtcgggctgcttgacgtgcaattgcgcaacctgacacccggagggaaagatagtgccgcacggtcacttaacaagctccagaaacgcgagcgctcttgtagggcctatgtgcaggccatggtggagaccgtcaataaccttctacagcctcaggctctgaacgcgtggagagacctgactacctcagaccagttgagagccgccaccatgcttctgcacaccgtggaagagtcagccttcgtgttggctgacaaccttctgaaaaccgacatcgtaagggagaacacagacaacataaagctggaggtggccagactcagcactgagggcaatctcgaggatttaaaattcccggaaaacatgggacacggcagtacgattcaactgagcgcaaacaccttgaagcagaacggccggaatggcgagatcagggtcgcattcgttctgtacaataacctcggcccttacctgtctaccgaaaacgccagcatgaaactgggcactgaggcattgagcactaatcatagcgtcatcgtcaattcaccggtcattacagccgccatcaataaggaattttccaacaaagtctacctggctgatcctgtggtgtttacagtcaagcacatcaagcagagcgaggagaatttcaaccccaactgttccttttggtcctactccaagaggaccatgacagggtactggtcaactcaaggctgcaggctcctgacaactaataagacacatacaacctgtagctgcaaccatcttacaaacttcgcagtgctgatggcacacgtggaggtcaaacactccgatgctgttcacgatctacttctcgatgtcataacttgggtggggatcctgctttccttagtgtgcctgctaatttgtatattcaccttctgtttcttccgaggcctccagtcagatcgcaatacaatacacaagaatctctgtatctcactttttgtggctgaattgttgtttctcattggaattaataggaccgatcaacctatcgcttgtgcggtttttgcagccttgctccacttcttttttttggcagcatttacatggatgttcctagaaggggtccagttatacattatgctggtagaggttttcgagagcgagcatagcagaaggaagtacttctatttggtgggttatgggatgccagctcttattgtcgctgtaagcgccgctgtggactaccggtcttacggtacagataaggtgtgctggcttagactggacacctatttcatctggagcttcatcggcccagccacactaatcattatgctaaatgttatcttcttagggatagcattatataaaatgttccatcatacggccatcttgaagccagaatcaggatgcctggataatatcaattacgaagacaatagacctttcataaagtcatgggttatcggagccatagccctcctttgtctgctggggctcacttgggcctttgggctaatgtatatcaatgagagcacggtgataatggcatatttgtttacaatcttcaacagtctgcaggggatgttcatcttcatttttcattgcgtgctccagaagaaagtaaggaaggagtatgggaaatgcctgagaacacattgttgttccgggaagagcactgaatcctccatcgggtccgggaagactagtggtagtaggacccctggccgttatagtactgggtcccagagccggataaggcgaatgtggaatgacacagtcagaaagcagtccgagagcagcttcatcacaggtgatatcaattcaagtgctagtctcaatcgcggggctatggcaaatcaccttatttccaatgctctgttgcgccctcacggcaccaataatccatataataccctgctaggtgagccagcagtgtgtaacaacccatctgtgagcatgtataacgcccaagagggccttctgaacaatgccagggacaccagtgtgatggataccctgccgttgaatggcaaccatggaaatagttactcgatcgcgtccggagaatacctgtcgaactgtgtgcagattattgatcgggggtataaccataatgagaccgccttggagaagaaaatattaaaagagctgacctcaaattatatcccaagctacttaaacaaccatgaaaggtcttcagagcagaatcgaaatttaatgaacaagctcgtcaacaatctcggctctggacgtgaggatgacgccatcgttctcgatgacgctacctccttcaatcatgaagagagcctcggtctggagctgattcatgaagaatccgatgcacctctcctgccaccgcgggtgtattccacagagaatcatcagccccatcactacacacgtcgtagaattccccaggaccacagcgaatctttctttccattgttgacaaatgaacacaccgaggacctccagtcgcctcatcgcgacagtctttacacaagcatgcctacccttgctggggtcgcagctactgagagtgtgaccacctcaacacaaaccgagccacctccggcaaaatgtggtgacgccgaagacgtgtactataagtcaatgcccaatctggggagccggaatcacgtccatcagctgcatacctattatcagctcggaaggggatcctccgacggctttatcgtcccccctaataaagatggaaccccacctgaggggtctagcaaggggcctgcccatctggtgacgagtctttag

SEQ ID NO: 325942 - DNA, 4056 bp, Artificial Sequence
  derived and/or modified sequence
atgtggcccagccagctgctgatcttcatgatgctgctggcccccattatccatggaggaaaacactccgagagacatcccgcactcgctgccccgttaaggcacgccgagcgatctccgggaggggctctccctccaaggcacctgctccagcaacctgccgcagagcggacggcagctcaccggggacaagggcctcgaggggcgactagaggagtgcgcggccctggggcgcagggcgcccagattgcagcccaggcgtttagtcgcgctccaatacccatggccgtcgtacggcgggagttatcctgtgagtcttatcctatcgagttgaggtgccccggaacagatgtgatcatgatagaatccgccaattacggccgcaccgatgataagatctgcgactccgatcccgctcagatggaaaatatccgttgttatctgcctgatgcatacaagattatgtcacagcggtgcaacaatcggacccagtgtgcagttgtggctggacctgacgtctttccagacccatgccctggaacatataagtatctggaagtccagtacgaatgtgtgccctataaagtggagcaaaaagtgttcctgtgtcctgggttactgaagggggtttaccaatcagagcatctctttgagtccgaccatcagtctggtgcttggtgcaaggatcccctgcaagcatccgacaagatctattacatgccttggactccatacaggaccgacacattgacggagtactcttcaaaggacgacttcattgccgggcggccaacaacaacctacaaacttcctcacagagtagatggaacaggcttcgtggtgtatgacggcgcgttgtttttcaacaaggagcgcactaggaacatcgtcaagttcgacctccggactaggatcaagagcggtgaagccattattgccaacgcgaattaccacgatacatcaccatacaggtggggcggcaagtccgacattgacctggccgtcgatgaaaacggactgtgggtgatatacgccacagaacaaaacaatgggaaaatagttatcagccagctgaacccctacactctcaggatcgagggtacctgggacactgcttacgataaacgttccgccagtaacgctttcatgatatgtgggatcttgtatgtggtaaagtctgtatacgaagacgatgacaatgaggccacaggcaacaaaattgactatatatacaacaccgatcaatcgaaggattccctcgtggatgtgccttttccaaacagctaccagtacatcgcagcggtggattacaacccgagagacaatctactttacgtatggaacaactatcatgtggtgaaatacagtctagactttgggcccctcgattctcggagcggacaggctcaccacggtcaagttagctacataagcccccccatccatcttgatagtgagttagaacggccatctgtgaaagacatttctactactggacctctgggcatggggtcaacgacaaccagcacaactctacgcaccacaacactgtcgccgggccgttccacaaccccttctgtatccggccgacgcaataggagcacttctacaccttctccagcggtggaggttttggacgatatgacaacccatctaccttctgcatcttcccagatccctgcactggaggagagttgtgaggccgtggaggcccgtgagataatgtggttcaaaaccagacaggggcagatagcaaaacaaccctgcccagccgggaccatcggggtgtccacctacctgtgcctcgcacccgatggcatctgggatcctcagggacctgacctgtccaattgcagcagcccttgggtgaatcatattacacagaaactcaagtctggggagacagcagccaatattgcgcgcgagctagcggagcaaacccgcaaccatctgaacgcaggcgacattacttactccgtccgagccatggatcagctggttggtctcctggacgtgcagctcaggaatcttacccctggcggcaaggacagcgcagcaagaagtctgaacaaattacagaaacgcgaacggtcttgcagggcctatgtccaggccatggtggagaccgtcaataacctgctgcaaccacaggcgctgaacgcatggagagatctcaccacttcagaccagttgcgggcagctacgatgttgctacacactgtggaggagtccgctttcgtgctcgccgacaacctgctgaaaacagatattgtccgcgaaaacacagataacattaagttggaagtggcacggctgtccacggaagggaatttagaggacctgaaatttcctgagaacatgggccacggaagtacgattcagctgtccgcgaacacattgaagcagaatggacgtaacggggagataagggtggcgttcgttctgtataacaacctggggccttacctttccaccgagaatgcttcaatgaagcttggcaccgaggccttaagcacaaaccatagcgtcatcgtaaattctccggttattaccgcagccatcaataaggagttctccaacaaggtgtacctcgccgatcctgtcgtgttcacagtcaagcatatcaagcagtctgaagaaaatttcaatcctaactgctcgttttggtcttattcaaagcggaccatgacaggctactggagtacccaaggttgtagactgctgaccacaaataagacacacacaacgtgctcctgtaaccacctcacaaactttgctgtcttaatggctcacgtggaagtgaaacactccgacgctgtccacgatctgctcctcgatgtgattacttgggtcgggatacttttgagtcttgtttgcctgctcatatgcatttttaccttttgctttttcagaggtctccaatccgacaggaatacaattcacaaaaatctgtgtatctccctgtttgtggcggaactgctcttcctcattggtatcaaccgtaccgatcagcctatcgcctgcgccgttttcgccgccttactccattttttcttcctggcagccttcacttggatgttcttagagggtgttcagttgtacatcatgctagtggaagtgtttgagagcgagcactctcgtcggaagtatttttatctagtgggctacggcatgccagctctgattgtggctgtgagcgcagcagtcgattatcgctcttatggtaccgacaaggtttgctggctgcgcctcgatacttattttatttggtcctttatcgggcccgcaacactcatcattatgctgaacgtcatcttcttgggtatcgctctttacaaaatgttccaccatacagctatactaaaaccagaatccggatgcctcgacaatatcaattatgaagacaaccggccgttcatcaagtcttgggtcattggtgcaatcgcactcctgtgtctgctcggccttacatgggccttcggactgatgtatattaatgaatctaccgttatcatggcctatcttttcactattttcaactcccttcagggcatgtttatatttatattccactgtgtgctgcaaaagaaggtgcgcaaggaatacggtaagtgtctcagaactcattgttgttccgggaagagcaccgagagctcgatagggtccggcaagacaagcggcagtcgcacgcccggaagatattctactggctcccagagtaggattaggcggatgtggaatgacacggtgagaaaacagagtgagtcatcattcatcactggggatataaactcttccgcatcacttaatcgtggggctatggccaaccaccttatctctaatgcgctgctgaggcctcacggtacgaacaacccatacaacaccctcctgggggagcctgctgtctgtaacaatcccagcgtttcgatgtacaacgcccaggagccctaccgcgaaaccagcatgggagtcaagctgaacattgcataccagattggcgccagtgaacagtgccagggctataaatgtcacggatattcaacaaccgaatggtag

SEQ ID NO: 325943 - DNA, 4539 bp, Artificial Sequence
  derived and/or modified sequence
atgtggcccagccagctgctgatcttcatgatgctgctggcccccatcatacacgcgttctcaagggctcctatccctatggcagtcgttcggcgcgagttatcttgcgagagttacccaatcgaactaaggtgtcccgggacggacgtcattatgatcgaatctgctaactacggtcgtaccgacgacaagatatgcgactctgatcccgcacagatggaaaacattcgttgctacctcccagatgcatacaagattatgtctcagcgctgtaacaatcggacccagtgtgctgtggtggcagggccggacgtgttccccgatccctgccctgggacgtataaatatctggaagtacaatatgaatgcgtgccctacaaggttgaacagaaagtcttcttgtgtcctggcctcctcaaaggcgtttatcagtccgagcatttatttgagtccgaccaccagagtggtgcctggtgcaaggacccactccaagccagtgacaaaatttattacatgccctggacaccctaccggacggatactcttactgaatactctagcaaggatgactttatcgcaggacggccaaccactacctataagctgccgcaccgtgtggatggcactggcttcgtagtgtacgacggagccctcttcttcaacaaggaacgcacacggaacatcgtcaagtttgacctgcgtacccggatcaagtcgggtgaggcgatcattgcaaatgccaattaccatgacacaagcccctataggtgggggggtaagtctgacattgatctcgccgtggatgaaaacggcctttgggtcatttacgctaccgagcagaataacggcaagattgtcataagccagctgaacccttatacattgagaatcgaggggacttgggacaccgcttatgacaagagaagcgctagcaacgcctttatgatctgcggcatcttatacgtagttaaatcagtctacgaagacgatgacaatgaagccaccgggaataaaattgactacatttataacaccgatcagtcgaaggactctctggttgatgtcccgttccccaacagctaccagtatattgctgcagtcgactataatcccagggataacctgctatacgtgtggaataactaccacgtcgtaaaatactccctggattttggccctctagacagccggagcgggcaggctcaccacggccaggtttcctacatatccccccccattcacttagactccgaactggaacgcccatccgtgaaagacatttccaccactggaccccttggaatgggttccactactacatccactaccctgaggaccacgacgctgagcccagggaggtccaccacaccaagtgtatcaggtcggcggaaccggtccacttcaaccccgtccccagccgttgaggtgctcgacgacatgaccacacatctgccttccgccagcagtcagatacccgcattggaggagtcatgcgaagctgtagaggcccgcgagatcatgtggttcaagacccggcaggggcaaatcgctaaacaaccctgtccagccggcactatcggagtgtctacctatttatgcctggcacctgatgggatatgggaccctcaaggccccgatctgtctaactgttcctcaccctgggtcaaccacatcacgcaaaagctgaaatccggagaaaccgccgccaatatcgcccgagaacttgctgaacagacacgtaaccatctaaacgcaggcgacattacatactcagtgcgtgccatggaccagttagttggactattggatgttcaattacgcaatctgacccctggtggcaaggattcagccgccaggagcctcaataaattgcagaagcgcgagaggtcctgtcgcgcatacgtccaggcaatggtggaaaccgtgaataacctgcttcaaccacaggccctgaacgcctggcgcgacctcacaacgagtgaccagttgcgagcggccaccatgctgctgcacaccgtcgaggagagcgctttcgtcctggcggataaccttctcaagaccgacattgtgcgggaaaacaccgataacattaaactcgaggtagctcgtctgagtaccgaagggaatctggaggacctgaaattccccgagaatatggggcacggctcaaccattcagctctccgcaaataccctgaaacagaacggacggaacggcgagatcagggtggccttcgtgctttataataatctggggccttatttgtcaacagaaaacgcctccatgaagcttggcactgaggcactcagtactaatcactccgtgattgtgaattctcccgtcattactgccgccattaataaggagtttagtaacaaagtgtacctggctgatcccgtggtgtttaccgtgaagcacatcaaacagagcgaggaaaattttaatccgaactgcagtttttggtcctacagtaaaaggacgatgacaggttattggtccacccagggctgtcgcctcttgaccacaaataaaacccataccacgtgtagttgcaatcacctaaccaatttcgccgtgcttatggcccatgtcgaggttaaacattcagacgccgtgcatgatctgctgctggatgtgattacgtgggtagggatattgctttccctcgtttgccttctaatatgtatcttcacattttgcttcttccgaggtttacaaagtgatcgcaacacgatccacaagaatttgtgcatctccctgtttgtagcagagctactcttcctgataggcattaacagaactgaccaacccatcgcatgcgccgtgtttgccgcacttttacacttcttttttttggctgcttttacatggatgtttctcgaaggtgttcagttgtatatcatgctagtggaggtattcgagtccgagcactcccggcggaaatacttttatcttgtggggtacggcatgcctgcactgatagttgccgtgtcagctgcagttgactaccgctcctacgggacggataaggtttgttggttgcggttagacacatatttcatatggtcctttataggaccggcgacgctgataattatgctgaacgttatatttctcggtatcgcactgtacaaaatgtttcaccacaccgccatcctgaaacccgagtcagggtgtctcgataacataaattacgaggacaaccgccccttcatcaagtcgtgggtcataggagcaattgctctgctgtgcctactcggcctcacctgggcgtttggcctgatgtatatcaacgagtcaacagttattatggcatacctctttacgatattcaactccttgcaaggcatgttcatttttatattccactgcgtgctgcagaagaaggtgagaaaggagtacggaaagtgcctccgaacccactgttgctcgggcaaatctaccgagtcatctatagggtccggaaagacaagcggaagtagaacacctggccgctatagcacgggctctcagtccaggatccgtaggatgtggaatgataccgtacgcaaacaatccgagtccagctttatcactggggacattaattctagtgcctcccttaatcggggtgccatggcaaaccatctaatctccaatgcactcctccggccacatgggactaataacccgtacaacacattactgggggaacctgctgtttgcaacaacccctcggttagcatgtacaacgcacaagaagggcttctgaacaatgcacgggacacatctgtaatggacacattgcctctcaacgggaatcatggcaactcgtattctatcgcgagcggcgaatacctttcaaattgtgtccagattatcgatcggggatataaccataacgagactgccctggagaagaaaattctgaaggagctcacaagcaattatattccctcctacctcaacaatcacgagagatcttccgaacagaacagaaatcttatgaataaacttgtgaacaatttgggttctggcagagaggacgacgccatcgtgctcgatgatgcaacatccttcaatcacgaggagtccctgggactcgagctgatccatgaagaatccgatgccccattattgcctcccagagtctactccactgagaaccaccagccgcaccactacacgagaagaaggattccgcaggaccattctgagagtttctttcctctcctcaccaacgaacacacagaggatctccagtccccccacagggattccctgtatacgtccatgcctacactggccggggtggccgccaccgagtcggtgaccactagcactcagactgaaccgcctcccgccaagtgtggggatgccgaggatgtctattacaaatcaatgcccaacctcggctcaagaaatcacgtccaccagctacacacctattaccagttgggaaggggtagctccgatggctttattgtacctcccaataaggacggtacacctcccgagggctcatctaagggtcccgctcatttagttacctctctgtag

SEQ ID NO: 325944 - DNA, 3852 bp, Artificial Sequence
  derived and/or modified sequence
atgtggccaagccaattgctaatctttatgatgttgttggcacctatcattcatgccttttcccgggctccaattccaatggcagtggttcgcagggagctctcatgtgaatcttatccaatcgaactgagatgccccggaacagatgttataatgattgagtcagctaactacggcagaacggatgataaaatatgcgattccgatcctgcccagatggagaatataaggtgctatctgccagacgcttataagattatgtcccagcgatgcaataacaggactcaatgtgcagtggtcgcagggcctgacgtgtttccagacccatgcccaggaacttacaaatacctcgaagtgcagtatgagtgcgtcccttacaaggtagaacagaaagtgtttctttgtcccggactcctgaagggcgtttaccagtccgagcacctcttcgaatctgatcaccaatcgggagcctggtgtaaagacccattgcaggctagcgacaaaatatattacatgccgtggaccccataccgcacagacaccctgactgagtattccagtaaagacgacttcattgcgggaaggcctactactacgtataaattgcctcacagagtggatggaactggcttcgtcgtgtacgatggggctcttttttttaataaagagagaacacgcaatattgttaagtttgaccttcgtacacggataaaatctggagaagcaatcatcgctaatgccaactaccatgatacaagtccttacagatggggaggaaagagtgatatcgacctggctgtggatgagaacggcctgtgggtaatttatgctaccgaacagaataacggcaagatagtgatctctcagcttaacccatacaccctgcgcattgaaggaacctgggacacggcctatgataaacggtctgccagtaatgcattcatgatatgcggaatcttatacgtggtcaagagtgtctatgaagatgacgacaacgaggccacgggcaataaaatcgattacatttataatactgaccagtcaaaagacagtctggtggatgtcccgttccccaattcttaccagtatattgccgcagtagattacaacccacgggataacctgctttacgtgtggaacaattaccacgtggttaaatattcactggatttcggtccccttgattcaaggtccggacaagcccaccacggccaggtgagctatatcagtcccccaatccacctggacagtgagctggaaaggccaagtgttaaggatataagtacaacgggcccattaggcatggggagcaccactacaagcactaccctgaggaccaccaccctgagccctgggcgtagcaccacccctagcgtctccggccgaaggaataggtccacatcaaccccttcgcccgctgtggaagtgctcgacgacatgactacccacttgcccagcgcaagctcccagatccccgctttagaggagagctgtgaggccgtggaggccagagaaataatgtggttcaagacacgtcaaggacagatagcgaaacagccatgtcccgctgggaccattggcgtaagcacttatctgtgtttggccccagatggcatatgggaccctcaggggcctgacttgtcaaattgctcctccccatgggttaatcatattacccagaaactgaagtccggtgagacagccgctaacattgcccgagagctagcggaacagactagaaatcacctgaatgccggagatattacatattccgtgcgggctatggaccagcttgttgggttactcgatgtacaactccgcaacctgactcctgggggtaaggattccgccgctagaagcctgaacaaactgcagaaaagggagcggtcttgtcgtgcctacgtccaagccatggttgaaactgtcaataacctcctccagccacaggccttgaatgcttggcgcgatttgaccacaagtgatcagctgcgagctgccacaatgctgctccacaccgtagaggaatctgcctttgtgctagccgacaacttgttgaaaactgatatcgtaagagagaataccgacaacattaagttggaggtggctcgactgagcacagagggaaacctggaggatctgaagttcccggaaaacatgggacacggatcaacgatccagctgtccgccaacacattaaagcagaacggacgtaatggagagattagagtcgctttcgtgctttataataacctaggaccatacctgagtaccgagaacgcaagcatgaaactcggcactgaggctctgagtaccaatcatagcgttatcgtcaatagccccgtgatcacggccgcaatcaacaaggaattctccaataaggtatacctagccgaccctgttgtgttcaccgttaagcatatcaaacaatccgaagagaactttaatccaaattgctcattctggtcatattctaaacggacaatgacaggctattggtccacacaaggatgtagactgctgacaaccaacaaaacacataccacatgttcatgcaaccatctcactaactttgctgtgctgatggctcacgtagaagtgaagcattccgacgcagtgcacgatttgcttctggacgtgatcacatgggtcgggattctgctttccctggtttgtctacttatatgcatatttacgttttgctttttccgcggactgcagtctgatagaaacactatccacaagaatctttgtatatcccttttcgtggccgaactcctcttcctcatcggcattaaccgcacagaccaaccaatagcttgtgctgtgttcgcagcactgctacattttttttttctcgccgcattcacttggatgttcctggaaggcgtgcagctgtatattatgcttgtggaggtctttgagagcgaacatagtcgccgtaaatacttctatctcgtggggtacggcatgcctgccttaattgtggccgtgtcggctgcagtggattaccggtcctatggtaccgacaaggtctgctggctgaggctggacacatattttatttggtcatttattggtccagcaactctgataataatgctcaatgtgatcttcttaggcatcgcactctataaaatgttccatcacactgctattttgaaacctgaaagcggctgccttgacaacatcaactacgaggataacaggccattcatcaagagctgggtgattggcgctatcgctcttctgtgtctgctcgggctgacatgggcctttggcttgatgtatataaacgaatccaccgtgatcatggcctacctgtttactatctttaactcactccaggggatgttcatttttatttttcattgcgttctccagaagaaagtccgcaaagagtatgggaaatgtttacgcacacattgttgttcggggaagtctacagagagctctattggcagcggcaagacatcaggcagcagaactccagggcgttactccactgggtcacaatctaggatcaggcgcatgtggaacgatacagtcaggaagcagagcgaaagtagctttataacgggggatataaatagttcggcctcacttaatcgaggggcaatggctaaccacctcataagcaatgccctcctccgtccccacggtactaacaacccatacaatactctgctaggggagccagccgtgtgcaataatcccagcgtgagtatgtacaacgcacaagagccctatagggaaacttccatgggtgtaaaacttaatattgcttatcagatcggcgcttcggagcagtgccagggatataaatgtcacgggtactccactactgaatggtag

SEQ ID NO: 325945 - DNA, 4743 bp, Artificial Sequence
  derived and/or modified sequence
atgtggcccagccagttactgatttttatgatgctcctggctcctatcatccacgggggtaagcattctgaacggcacccagctttggcagcacctctgaggcatgccgaaagatcacccggaggagcactgcctcccagacatcttctccagcaacccgcagccgagcgtacagcggcacacagaggtcagggacccagaggcgctactcgtggggtgaggggacctggagctcagggcgctcagattgccgctcaggcattctctcgcgcaccgatcccaatggctgtggtgagaagggagctctcttgtgaatcttatcccatagaactgcgatgtcctggaacggacgtcatcatgatcgagagtgctaactacggtcgtactgacgataaaatatgcgactctgacccagcacagatggaaaacataaggtgctatctgcccgatgcctacaagattatgagtcaaaggtgtaataatcgcacgcagtgtgctgtggtggcgggacctgatgtgttccccgatccgtgccccggaacatacaaataccttgaggttcaatacgaatgtgttccatataaggtggagcagaaggtcttcctgtgccctggcctgctgaaaggtgtttaccaatctgagcacctgtttgagtccgaccatcaaagcggcgcatggtgcaaagacccactgcaggccagtgacaaaatctattacatgccgtggacaccataccgaacagacaccctgaccgagtattcatccaaagacgatttcatagctggcagaccaactactacatacaagctgcctcatcgtgtagatggcactggattcgtggtgtacgatggagccctgttctttaacaaggagcggactcgcaatattgtaaaattcgacctacgcacacgaattaagtcaggagaggctatcattgctaacgcaaattaccacgacaccagtccctaccggtgggggggaaaatctgacatcgatcttgctgtggacgagaatgggctctgggtgatatatgccaccgaacagaacaatggcaagatcgtcatttcacaacttaatccatacacactgcggatcgaaggcacctgggacaccgcatacgataaaagatctgcaagcaatgccttcatgatttgtggaattctgtacgttgtgaaatcagtgtacgaagacgatgacaatgaagctaccggaaataaaatcgactatatttacaatacagaccaatccaaggactccctcgtcgacgtcccttttcccaacagctatcagtatatcgcggctgttgattacaatcccagagacaatctgctgtacgtctggaacaactaccacgttgtcaagtatagcctggatttcggtcccttggactcacggagtgggcaggcccatcacggacaggtctcatatatatcccctcccattcacctggactcagaattggagcggccatctgtaaaggacatttctactaccggcccattaggtatgggctccaccaccacctccacaacccttcgcactacaaccctctctccaggtcgctctaccaccccatccgtatctgggaggcggaacaggtccacctccacgcccagtcccgcagtggaggtgttggatgatatgacaacccacctaccaagcgccagcagtcagatacctgcactagaagagagctgtgaagcagtggaggccagggagattatgtggttcaagacgagacagggtcagatagcgaagcagccatgccccgcaggaacaattggggtcagcacttatctgtgtttagcccctgacgggatctgggaccctcaggggcctgatttgtcgaactgtagttcaccttgggtgaaccacattacccaaaagctcaagtccggggaaaccgcggcaaacattgcacgagaattggctgagcagaccagaaatcacttgaacgctggtgacatcacctatagcgttcgcgctatggaccagcttgtagggttactggatgttcagttgcgtaacctgactcccggaggaaaagacagcgccgcacgtagcctgaataagctccagaagcgcgaacggtcctgtagagcttacgtgcaagcgatggtcgaaactgtcaacaatctcctgcaaccacaggcactcaacgcctggagagatctcacaacctctgaccagttacgcgcagccacaatgttgctgcatacagtggaggagtctgcgttcgtgctggccgataacctgctgaagaccgacatcgtgcgtgaaaacacagacaacattaaactagaggtggcacggctgtcgacagaaggcaacctggaggatctcaagtttcctgagaacatgggacacggatcaactatccagttatctgctaatacactgaaacaaaacggtaggaacggggaaattagggtggccttcgtcctctataacaatctcggtccgtacctgagcactgagaatgcatcaatgaagctgggtactgaggctcttagcacgaaccatagcgtaattgtgaattctcccgtgatcactgccgctatcaataaggagttttcaaacaaagtttacttggccgaccccgtggtattcaccgtgaaacacatcaagcagagcgaagagaattttaaccctaattgctccttctggagctactcgaaaagaactatgacaggctattggagcacccaggggtgccggctgctgaccaccaataagacacacacaacttgttcgtgcaatcatctcactaatttcgctgtgctgatggcccacgtggaggtaaagcactccgatgctgttcatgaccttctcctagacgtcatcacttgggttgggattctattatcgcttgtgtgcctcctgatttgtatatttaccttctgcttcttcaggggcctgcagtccgaccgaaatacaatccataagaacctgtgtataagtctttttgtggccgagctcctgtttctgattggaatcaacagaactgatcagccaatcgcctgcgctgtctttgctgcattgctacatttttttttcctggccgcatttacgtggatgttcctggagggcgtgcagctgtatatcatgctcgttgaggtgtttgaatctgagcacagccgaaggaagtacttttacctggtcgggtatgggatgccggctttgatcgtggcagttagtgcagctgttgattaccggagctacggaactgacaaggtgtgttggcttagattggacacttatttcatttggagctttattggtcctgcaacgctcatcattatgctgaatgtcatattcctcggcatcgccctctacaagatgtttcatcatacagccatcttaaaacctgagagcggctgtctggataacataaattatgaggacaatcggccttttataaaatcttgggtgatcggggcaattgcactgctgtgtttgctgggcttaacctgggctttcggtctgatgtatataaacgagagcacagtaattatggcctatctctttacgatcttcaacagtctgcaaggtatgtttatctttatcttccactgcgtcctccaaaagaaagtgcgcaaggagtatggcaaatgcctaagaacgcactgctgctcgggtaagtctaccgagagcagcataggatcaggtaaaacctcaggatctaggacccctgggagatatagtacaggatcccagtcgcggattcgccgaatgtggaacgacaccgtccgtaagcagtcagagagcagctttatcacaggcgatataaactcttccgcatctctcaaccgcggtgctatggccaaccacttgatatcaaatgcactgctcagaccccacggaacgaataatccttataacaccctccttggggagcctgctgtgtgcaataacccaagcgtctcaatgtacaacgcccaggaaggactactcaataacgctagggacaccagtgtgatggatacgctacctttgaatggcaaccacggaaattcttatagcattgcatccggcgagtacctttctaactgcgtccaaatcatagacaggggctataatcataatgagactgccttggagaagaaaattctcaaggagctgacaagcaattacattccctcatatctgaacaaccatgagaggtctagtgagcaaaacagaaatcttatgaacaagctcgttaacaacctcggttctggccgtgaggacgatgcaatcgtgctcgacgacgctacgtcatttaaccacgaggagtcactgggtctggaactgatccatgaagaatcagatgcgcctttactgccaccgcgagtgtacagtaccgagaaccatcagcctcatcactatacccgcagaaggattcctcaggaccactcagagtctttctttcctttgctgacaaacgagcatacagaggatcttcaatcgccacaccgggactccttgtatacaagcatgcccacactagccggagtcgcggcaacagagtctgtgaccacctctacccagactgaacccccacccgctaaatgtggggatgccgaagacgtgtactacaaatccatgcccaacttgggcagtaggaaccatgtccatcagctgcatacttattatcagttaggcagaggctcgtcagacgggttcatcgtgccacctaataaagacggaaccccgccagagggtagctcaaagggacccgctcacttggtgacctcactttag

SEQ ID NO: 325946 - DNA, 4056 bp, Artificial Sequence
  derived and/or modified sequence
atgtggcccagccaactgctcattttcatgatgttgctggcaccaattatacacggcggaaagcattctgaacgccaccctgcccttgcagcgccactcagacacgccgaacgctcccctgggggagctttgcctccacgccacctgcttcagcagccggctgccgaaaggaccgcagcacacagaggccaagggcctaggggggcaacacgcggagtcagggggcctggcgcacaaggagctcagattgcggctcaggcattttctcgggctccgattcctatggccgtagtcaggcgtgaactctcttgcgagtcataccctattgaactgaggtgccccggaactgacgtgataatgattgagtctgccaattacggacgcaccgatgacaaaatatgcgattccgacccagcccaaatggagaatatccgatgttatctgcctgatgcatataaaatcatgagtcagaggtgcaacaaccgaacacagtgcgcggtggtggccggtccagacgtgttccctgacccctgcccaggcacctacaagtacctggaggtacagtatgaatgcgtcccctacaaagttgaacagaaggttttcctgtgtccaggtctacttaaaggggtataccagtctgagcatctgtttgaaagtgatcatcaatccggagcctggtgtaaggatccattacaggccagtgacaagatctactacatgccctggactccttataggaccgacaccctgacagagtactcttcgaaggacgacttcatcgccggtcgccctactacaacatataaattaccacatcgggtggacgggacaggctttgtggtgtacgacggcgctctgttcttcaacaaggaacgaacgcggaacatcgtaaaatttgatctgagaacaagaatcaaatctggagaagcaattattgccaatgcaaattatcatgacacaagcccctatcgctggggaggaaagtctgacattgatctcgctgttgatgagaacggattatgggtaatatacgcaaccgaacaaaataacggcaagattgtgatctcacagttgaatccttatacacttcgtatagaaggtacttgggacacagcatacgacaagcgctccgcctccaacgcatttatgatctgtggaatcctttacgtggtgaagtccgtgtacgaggacgacgataacgaggcgacgggcaacaaaatagactacatctacaatacggaccagtcaaaggactccctcgtggacgttccattcccaaatagctaccagtatattgcagcggtcgattacaatcccagagacaatttgctctacgtgtggaataactaccatgtggtgaaatattctctcgatttcgggccactagattcccggtccggccaggcgcatcatgggcaagtgtcatatatttcccccccaatccatttggattctgagctggagagaccatcggtgaaggatatctccaccaccggccctctgggcatgggatcaactactacgagcacaaccctccggacaaccacgctgagtcctgggaggtctacaactcctagcgtcagcggcagaaggaataggtcaacctcgacgccttccccagccgtcgaggtgctcgacgacatgactacgcatttgccatccgcctcgagccagatacccgctctcgaagaatcatgtgaggccgtggaagctagggaaatcatgtggtttaaaacacggcaaggacagattgccaagcagccatgtcctgctggaaccattggcgtatctacttatctttgtctagcaccagatggaatatgggatccacaaggacccgacctgtccaactgctcttccccttgggtgaatcatataacccagaagctcaagtcaggcgagacagccgcaaatatagccagggagctggctgaacagactagaaatcacctcaacgctggggatattacatattccgtgagagccatggaccaactagtggggttgcttgacgtgcagctgaggaatttgactcccggaggcaaagactctgctgccaggagccttaataagttgcagaagcgggagcgctcgtgcagagcttatgtgcaggctatggtcgagactgtgaacaacctactacagccccaggccctgaatgcctggcgtgacctcacaacctccgaccaattgagagctgctaccatgttacttcacacggtggaggagtcagcctttgtgctggccgataacctgctcaagacagatatcgttagagaaaatacagacaatattaagcttgaggtggccagattgtccaccgaagggaacctcgaggatttgaagttcccagaaaatatgggccatgggtcaacaatccagttatccgctaatactcttaagcaaaacggcagaaatggcgagattcgagtggccttcgtcctctataataaccttggcccatatcttagtaccgagaacgccagcatgaaactcggaacagaggctctctcaaccaatcatagcgtgatcgtcaatagtcctgtgataacagccgcaatcaataaggaattttccaataaagtgtacctcgctgatcctgtggtgtttaccgtgaaacacattaaacagagtgaggagaatttcaaccccaattgttccttttggtcttactccaagcggaccatgacgggatattggtctacacagggctgcaggctcctcacaacaaacaagacacacactacttgctcatgtaaccatctcaccaactttgcggtgctcatggcacacgtagaagtcaaacacagtgacgctgtccacgacctgttgttggacgtgatcacatgggtggggatcttgctctcactcgtatgtctgctgatctgtatatttaccttctgttttttcagggggctacaatccgataggaacaccatccataagaacttatgcataagtttgttcgtcgctgagctgctttttctaattggcatcaatcgcacagaccagcctatcgcttgcgcagtgttcgctgccctactgcacttctttttcctagccgcattcacttggatgtttctcgaaggagtgcagttgtacatcatgttggtagaggtgttcgaatccgaacacagcagacgcaagtatttctacctggtgggatatggcatgcctgccctgatagtcgcggtgtctgctgcagtagactacaggagttacggcaccgataaggtctgctggctccggcttgacacctactttatttggagctttattggccctgccacactaattattatgttgaacgtgatttttctcggtatcgccctatataaaatgtttcatcatactgctatcctgaaaccagaatccgggtgcctcgataacatcaactacgaggataatcgtccttttattaagtcttgggtaatcggggcaatagccctgctgtgtttgttaggcctcacttgggcatttggccttatgtacattaacgagagcactgtgatcatggcctacctgttcaccatctttaattcgctccaaggtatgtttatctttatatttcattgcgtcctacagaagaaggtaaggaaggaatacggaaaatgcctacggacccactgctgtagcggtaaaagtactgagtcatctattggcagcgggaagacctctggaagtaggactcctggtcgctactccacaggatcccaatcacgcatcagaaggatgtggaatgacactgttcggaaacagtccgagagttcgttcatcacgggagacatcaatagctccgcttcacttaaccgaggagccatggccaatcatttgatttcaaacgccctgctgcgtccacatggaactaataatccttacaacactcttctcggagagcctgctgtctgcaacaatccatctgtctctatgtacaatgcacaggagccatatagggaaacatctatgggagtcaaactgaatattgcctaccagataggcgcaagtgagcagtgtcagggctataagtgtcacggttattccacaactgaatggtag

SEQ ID NO: 325947 - DNA, 4539 bp, Artificial Sequence
  derived and/or modified sequence
atgtggccctctcagctgttgatcttcatgatgttactcgctcccattattcatgcatttagccgggcacctatccctatggcagttgtgagacgagaacttagttgcgagtcgtaccccattgagttgaggtgtcctggcactgacgtaatcatgatagaaagcgcaaactacggccgtacagatgataaaatatgcgattcagatcccgcacagatggagaacattcgatgctatctccccgacgcatacaagataatgagccagcgatgtaataatcggacgcagtgtgccgtggttgctggacccgacgtcttcccagatccgtgtcctgggacctataagtatctagaggtgcaatacgaatgcgtaccctacaaagttgagcagaaagtgtttttgtgccctggactacttaaaggagtgtaccagtccgagcacctctttgaaagtgaccatcagagcggggcttggtgcaaagatcctctgcaggcaagcgacaaaatttactacatgccatggacaccttatcgcaccgacacccttactgaatactccagcaaagatgattttatcgcgggtaggcctactactacgtataagcttccccatcgagtggatggcacaggattcgttgtgtatgatggtgcattgtttttcaacaaggaaaggaccaggaatatagtgaaatttgacctacgaactagaataaagtctggcgaagccattatagctaacgcaaactaccatgacacaagcccataccgctgggggggaaagagtgatatagatcttgccgttgacgaaaacggcttgtgggtgatctacgccactgagcaaaataatggcaaaatcgtgatcagtcagttaaatccatacacactgcggatcgagggtacctgggacactgcatacgataagagatcagccagcaacgcctttatgatttgcggaatactgtatgtcgtgaagtccgtttatgaggatgacgataatgaggccaccggtaataagattgactacatttacaataccgatcagagtaaggatagtctagtggatgtacctttccctaattcttaccaatacatcgccgcagttgactacaatccacgtgacaatttgctctatgtctggaataattatcatgtggtcaaatacagtcttgattttggaccgcttgacagtaggagtgggcaggcccaccacggtcaggtgagctacatatctccgccaattcacttggacagcgaactggagaggccatcggtcaaggacatctccacaacaggccctctggggatgggctccactacaaccagcactacgttgaggaccacgacgttgtcaccgggaagatctaccaccccaagtgtcagtggacggagaaacaggagtacaagtacgccatcccctgctgtggaagtccttgacgacatgacgacacaccttccttccgctagtagtcaaattccagctttggaagagtcctgcgaggctgtagaggcgagggaaattatgtggtttaaaacccgtcaggggcaaattgccaaacagccatgcccggctggaaccattggcgtcagcacctacctatgcctcgcccctgacgggatctgggatccccagggtccggatttgtccaactgcagctctccatgggtgaatcacataacccagaaactgaaatccggggagacagccgcaaacatcgcacgagaattggctgagcagactaggaaccatctcaatgccggtgacataacttattctgtgcgtgcaatggatcagctggtgggtctgctggatgtccagcttcggaacttaacacctggtggtaaagacagtgccgcacggagcctgaacaagctccagaaacgcgagcgcagctgtcgtgcttacgttcaagcgatggtggaaactgtgaacaacttactgcagcctcaggctttgaacgcttggagagatcttacaacatcagatcagctgcgggcagcaaccatgctgctgcacacagttgaggaaagtgctttcgtgttggcagacaacctgctgaaaaccgatatcgtgcgagaaaacactgataacattaaactggaggttgctaggctgagtacagaaggtaatcttgaagacttgaagtttccagaaaacatgggtcacgggtcaacgatccagttgagtgctaatacactgaagcagaatggcagaaacggggagatccgtgtcgcgtttgtcctgtacaacaacttgggtccctacctcagtacggagaatgccagtatgaaactcggcactgaagcattgagcaccaaccatagtgtgattgtgaactctcccgtcatcactgcagctatcaataaggagtttagcaataaggtctatttagcagaccctgtcgtgttcacagtcaaacatataaaacagtcagaggaaaactttaaccccaattgctcgttctggagctattcaaaacgcacgatgaccggctactggagcacccagggttgtaggctgttaacaacaaataagacgcacactacatgctcgtgcaaccacctcactaacttcgccgtgctaatggcacatgtggaggtgaagcacagtgatgccgtgcatgatctgctattggacgtgattacctgggttggtattttactgtccttagtgtgcctgctgatctgcatattcacattctgcttcttccgaggactccagtctgatagaaataccatccacaagaacctatgcatctccctgttcgtcgccgaattactgttcctgatcggcataaaccgaaccgaccaacccatagcatgcgcagtattcgccgctttgcttcattttttctttctggccgcattcacttggatgtttctggaaggagtccagctgtatatcatgttggtggaagtgtttgaatctgagcatagccgacgtaagtacttctatctggtcggatatggcatgcctgccctcatcgtggcagttagtgccgcagtagactacagatcatacgggaccgataaggtgtgctggctgaggttggatacctacttcatctggtcatttatcggtcctgctaccctcattattatgctgaatgtaatttttctaggcatcgctttgtataaaatgttccaccatacagccatccttaagccagagtccggctgtctggacaatatcaattatgaagataatcgaccattcatcaagagctgggtgatcggcgctatagccctgctgtgtctgctgggccttacctgggcctttggcctgatgtacatcaacgagtctacagtgattatggcatatttattcacgatttttaattctctccagggaatgttcattttcatcttccactgcgtcctgcagaagaaggtccgtaaagagtatggtaaatgtcttagaacacactgttgctcgggtaagtcaacagaatccagtatcggatcagggaagacttccgggtctcggacccccggacgctactccacaggcagccagtctaggatacgcagaatgtggaacgacacagtcaggaaacagtccgaatcgagcttcattacgggcgatatcaactcttccgccagccttaacagaggagcaatggcaaatcacttgatcagcaatgccctgttgcggccacacggtacaaacaacccatacaatacgctcttgggcgaaccagccgtgtgtaataacccgtccgtgagtatgtataatgcacaggagggccttcttaacaatgcacgtgacacttccgtcatggacactctgccactgaacgggaatcacggcaactcatactctatcgcgagcggtgagtacctctccaactgcgtgcagatcatcgatagaggatacaaccacaacgaaacggcactagagaagaaaattctaaaggagctgacttctaactatattcccagctatcttaataatcatgagcgtagctccgagcaaaatcgcaatctgatgaataaactggtcaacaacctggggtcaggcagggaggacgacgccatcgtcctcgacgatgcgacctccttcaaccacgaagagtccttaggtttggaactgattcatgaggagagtgacgcgccactcctcccccctcgcgtctacagtactgagaatcaccaacctcatcattacacaaggcgcaggataccccaggaccactcggagtcattctttccattgctcactaacgagcacactgaagatcttcagtccccccatcgcgacagcctctatacatccatgccaactctcgccggagtcgccgcaacagaatctgttacgacctcaactcagacggagcctcccccagcaaagtgcggggacgcggaggacgtctattacaaatctatgcctaatctgggaagtaggaatcatgtgcatcagctccatacgtactatcagctggggcgagggtcctccgacggatttatcgtgccgccaaacaaagacgggacccctcctgagggaagttccaaaggaccagcccatcttgtgactagcctgtag

SEQ ID NO: 325948 - protein, 1571 aa, Artificial Sequence
  derived and/or modified sequence
MWPSQLLIFMMLLAPIIHGGKHSERHPALAAPLRHAERSPGGALPPRHLLQQPAAERTAAHRGQGPRGATRGVRGPGAQGAQIAAQAFSRAPIPMAVVRRELSCESYPIELRCPGTDVIMIESANYGRTDDKICDSDPAQMENIRCYLPDAYKIMSQRCNNRTQCAVVAGPDVFPDPCPGTYKYLEVQYECVPYKVEQKVFLCPGLLKGVYQSEHLFESDHQSGAWCKDPLQASDKIYYMPWTPYRTDTLTEYSSKDDFIAGRPTTTYKLPHRVDGTGFVVYDGALFFNKERTRNIVKFDLRTRIKSGEAIIANANYHDTSPYRWGGKSDIDLAVDENGLWVIYATEQNNGKIVISQLNPYTLRIEGTWDTAYDKRSASNAFMICGILYVVKSVYEDDDNEATGNKIDYIYNTDQSKDSLVDVPFPNSYQYIAAVDYNPRDNLLYVWNNYHVVKYSLDFGPLDSRSGQAHHGQVSYISPPIHLDSELERPSVKDISTTGPLGMGSTTTSTTLRTTTLSPGRSTTPSVSGRRNRSTSTPSPAVEVLDDMTTHLPSASSQIPALEESCEAVEAREIMWFKTRQGQIAKQPCPAGTIGVSTYLCLAPDGIWDPQGPDLSNCSSPWVNHITQKLKSGETAANIARELAEQTRNHLNAGDITYSVRAMDQLVGLLDVQLRNLTPGGKDSAARSLNKLQKRERSCRAYVQAMVETVNNLLQPQALNAWRDLTTSDQLRAATMLLHTVEESAFVLADNLLKTDIVRENTDNIKLEVARLSTEGNLEDLKFPENMGHGSTIQLSANTLKQNGRNGEIRVAFVLYNNLGPYLSTENASMKLGTEALSTNHSVIVNSPVITAAINKEFSNKVYLADPVVFTVKHIKQSEENFNPNCSFWSYSKRTMTGYWSTQGCRLLTTNKTHTTCSCNHLTNFAVLMAHVEVKHSDAVHDLLLDVITWVGILLSLVCLLICIFTFCFFRGLQSDRNTIHKNLCISLFVAELLFLIGINRTDQPIACAVFAALLHFFFLAAFTWMFLEGVQLYIMLVEVFESEHSRRKYFYLVGYGMPALIVAVSAAVDYRSYGTDKVCWLRLDTYFIWSFIGPATLIIMLNVIFLGIALYKMFHHTAILKPESGCLDNIKSWVIGAIALLCLLGLTWAFGLMYINESTVIMAYLFTIFNSLQGMFIFIFHCVLQKKVRKEYGKCLRTHCCSGKSTESSIGSGKTSGSRTPGRYSTGSQSRIRRMWNDTVRKQSESSFITGDINSSASLNRGAMANHLISNALLRPHGTNNPYNTLLGEPAVCNNPSVSMYNAQEGLLNNARDTSVMDTLPLNGNHGNSYSIASGEYLSNCVQIIDRGYNHNETALEKKILKELTSNYIPSYLNNHERSSEQNRNLMNKLVNNLGSGREDDAIVLDDATSFNHEESLGLELIHEESDAPLLPPRVYSTENHQPHHYTRRRIPQDHSESFFPLLTNEHTEDLQSPHRDSLYTSMPTLAGVAATESVTTSTQTEPPPAKCGDAEDVYYKSMPNLGSRNHVHQLHTYYQLGRGSSDGFIVPPNKDGTPPEGSSKGPAHLVTSL

SEQ ID NO: 325949 - protein, 1342 aa, Artificial Sequence
  derived and/or modified sequence
MWPSQLLIFMMLLAPIIHGGKHSERHPALAAPLRHAERSPGGALPPRHLLQQPAAERTAAHRGQGPRGATRGVRGPGAQGAQIAAQAFSRAPIPMAVVRRELSCESYPIELRCPGTDVIMIESANYGRTDDKICDSDPAQMENIRCYLPDAYKIMSQRCNNRTQCAVVAGPDVFPDPCPGTYKYLEVQYECVPYKVEQKVFLCPGLLKGVYQSEHLFESDHQSGAWCKDPLQASDKIYYMPWTPYRTDTLTEYSSKDDFIAGRPTTTYKLPHRVDGTGFVVYDGALFFNKERTRNIVKFDLRTRIKSGEAIIANANYHDTSPYRWGGKSDIDLAVDENGLWVIYATEQNNGKIVISQLNPYTLRIEGTWDTAYDKRSASNAFMICGILYVVKSVYEDDDNEATGNKIDYIYNTDQSKDSLVDVPFPNSYQYIAAVDYNPRDNLLYVWNNYHVVKYSLDFGPLDSRSGQAHHGQVSYISPPIHLDSELERPSVKDISTTGPLGMGSTTTSTTLRTTTLSPGRSTTPSVSGRRNRSTSTPSPAVEVLDDMTTHLPSASSQIPALEESCEAVEAREIMWFKTRQGQIAKQPCPAGTIGVSTYLCLAPDGIWDPQGPDLSNCSSPWVNHITQKLKSGETAANIARELAEQTRNHLNAGDITYSVRAMDQLVGLLDVQLRNLTPGGKDSAARSLNKLQKRERSCRAYVQAMVETVNNLLQPQALNAWRDLTTSDQLRAATMLLHTVEESAFVLADNLLKTDIVRENTDNIKLEVARLSTEGNLEDLKFPENMGHGSTIQLSANTLKQNGRNGEIRVAFVLYNNLGPYLSTENASMKLGTEALSTNHSVIVNSPVITAAINKEFSNKVYLADPVVFTVKHIKQSEENFNPNCSFWSYSKRTMTGYWSTQGCRLLTTNKTHTTCSCNHLTNFAVLMAHVEVKHSDAVHDLLLDVITWVGILLSLVCLLICIFTFCFFRGLQSDRNTIHKNLCISLFVAELLFLIGINRTDQPIACAVFAALLHFFFLAAFTWMFLEGVQLYIMLVEVFESEHSRRKYFYLVGYGMPALIVAVSAAVDYRSYGTDKVCWLRLDTYFIWSFIGPATLIIMLNVIFLGIALYKMFHHTAILKPESGCLDNIKSWVIGAIALLCLLGLTWAFGLMYINESTVIMAYLFTIFNSLQGMFIFIFHCVLQKKVRKEYGKCLRTHCCSGKSTESSIGSGKTSGSRTPGRYSTGSQSRIRRMWNDTVRKQSESSFITGDINSSASLNRGAMANHLISNALLRPHGTNNPYNTLLGEPAVCNNPSVSMYNAQEPYRETSMGVKLNIAYQIGASEQCQGYKCHGYSTTEW

SEQ ID NO: 325950 - protein, 1274 aa, Artificial Sequence
  derived and/or modified sequence
MWPSQLLIFMMLLAPIIHAFSRAPIPMAVVRRELSCESYPIELRCPGTDVIMIESANYGRTDDKICDSDPAQMENIRCYLPDAYKIMSQRCNNRTQCAVVAGPDVFPDPCPGTYKYLEVQYECVPYKVEQKVFLCPGLLKGVYQSEHLFESDHQSGAWCKDPLQASDKIYYMPWTPYRTDTLTEYSSKDDFIAGRPTTTYKLPHRVDGTGFVVYDGALFFNKERTRNIVKFDLRTRIKSGEAIIANANYHDTSPYRWGGKSDIDLAVDENGLWVIYATEQNNGKIVISQLNPYTLRIEGTWDTAYDKRSASNAFMICGILYVVKSVYEDDDNEATGNKIDYIYNTDQSKDSLVDVPFPNSYQYIAAVDYNPRDNLLYVWNNYHVVKYSLDFGPLDSRSGQAHHGQVSYISPPIHLDSELERPSVKDISTTGPLGMGSTTTSTTLRTTTLSPGRSTTPSVSGRRNRSTSTPSPAVEVLDDMTTHLPSASSQIPALEESCEAVEAREIMWFKTRQGQIAKQPCPAGTIGVSTYLCLAPDGIWDPQGPDLSNCSSPWVNHITQKLKSGETAANIARELAEQTRNHLNAGDITYSVRAMDQLVGLLDVQLRNLTPGGKDSAARSLNKLQKRERSCRAYVQAMVETVNNLLQPQALNAWRDLTTSDQLRAATMLLHTVEESAFVLADNLLKTDIVRENTDNIKLEVARLSTEGNLEDLKFPENMGHGSTIQLSANTLKQNGRNGEIRVAFVLYNNLGPYLSTENASMKLGTEALSTNHSVIVNSPVITAAINKEFSNKVYLADPVVFTVKHIKQSEENFNPNCSFWSYSKRTMTGYWSTQGCRLLTTNKTHTTCSCNHLTNFAVLMAHVEVKHSDAVHDLLLDVITWVGILLSLVCLLICIFTFCFFRGLQSDRNTIHKNLCISLFVAELLFLIGINRTDQPIACAVFAALLHFFFLAAFTWMFLEGVQLYIMLVEVFESEHSRRKYFYLVGYGMPALIVAVSAAVDYRSYGTDKVCWLRLDTYFIWSFIGPATLIIMLNVIFLGIALYKMFHHTAILKPESGCLDNIKSWVIGAIALLCLLGLTWAFGLMYINESTVIMAYLFTIFNSLQGMFIFIFHCVLQKKVRKEYGKCLRTHCCSGKSTESSIGSGKTSGSRTPGRYSTGSQSRIRRMWNDTVRKQSESSFITGDINSSASLNRGAMANHLISNALLRPHGTNNPYNTLLGEPAVCNNPSVSMYNAQEPYRETSMGVKLNIAYQIGASEQCQGYKCHGYSTTEW

SEQ ID NO: 325951 - protein, 1503 aa, Artificial Sequence
  derived and/or modified sequence
MWPSQLLIFMMLLAPIIHAFSRAPIPMAVVRRELSCESYPIELRCPGTDVIMIESANYGRTDDKICDSDPAQMENIRCYLPDAYKIMSQRCNNRTQCAVVAGPDVFPDPCPGTYKYLEVQYECVPYKVEQKVFLCPGLLKGVYQSEHLFESDHQSGAWCKDPLQASDKIYYMPWTPYRTDTLTEYSSKDDFIAGRPTTTYKLPHRVDGTGFVVYDGALFFNKERTRNIVKFDLRTRIKSGEAIIANANYHDTSPYRWGGKSDIDLAVDENGLWVIYATEQNNGKIVISQLNPYTLRIEGTWDTAYDKRSASNAFMICGILYVVKSVYEDDDNEATGNKIDYIYNTDQSKDSLVDVPFPNSYQYIAAVDYNPRDNLLYVWNNYHVVKYSLDFGPLDSRSGQAHHGQVSYISPPIHLDSELERPSVKDISTTGPLGMGSTTTSTTLRTTTLSPGRSTTPSVSGRRNRSTSTPSPAVEVLDDMTTHLPSASSQIPALEESCEAVEAREIMWFKTRQGQIAKQPCPAGTIGVSTYLCLAPDGIWDPQGPDLSNCSSPWVNHITQKLKSGETAANIARELAEQTRNHLNAGDITYSVRAMDQLVGLLDVQLRNLTPGGKDSAARSLNKLQKRERSCRAYVQAMVETVNNLLQPQALNAWRDLTTSDQLRAATMLLHTVEESAFVLADNLLKTDIVRENTDNIKLEVARLSTEGNLEDLKFPENMGHGSTIQLSANTLKQNGRNGEIRVAFVLYNNLGPYLSTENASMKLGTEALSTNHSVIVNSPVITAAINKEFSNKVYLADPVVFTVKHIKQSEENFNPNCSFWSYSKRTMTGYWSTQGCRLLTTNKTHTTCSCNHLTNFAVLMAHVEVKHSDAVHDLLLDVITWVGILLSLVCLLICIFTFCFFRGLQSDRNTIHKNLCISLFVAELLFLIGINRTDQPIACAVFAALLHFFFLAAFTWMFLEGVQLYIMLVEVFESEHSRRKYFYLVGYGMPALIVAVSAAVDYRSYGTDKVCWLRLDTYFIWSFIGPATLIIMLNVIFLGIALYKMFHHTAILKPESGCLDNIKSWVIGAIALLCLLGLTWAFGLMYINESTVIMAYLFTIFNSLQGMFIFIFHCVLQKKVRKEYGKCLRTHCCSGKSTESSIGSGKTSGSRTPGRYSTGSQSRIRRMWNDTVRKQSESSFITGDINSSASLNRGAMANHLISNALLRPHGTNNPYNTLLGEPAVCNNPSVSMYNAQEGLLNNARDTSVMDTLPLNGNHGNSYSIASGEYLSNCVQIIDRGYNHNETALEKKILKELTSNYIPSYLNNHERSSEQNRNLMNKLVNNLGSGREDDAIVLDDATSFNHEESLGLELIHEESDAPLLPPRVYSTENHQPHHYTRRRIPQDHSESFFPLLTNEHTEDLQSPHRDSLYTSMPTLAGVAATESVTTSTQTEPPPAKCGDAEDVYYKSMPNLGSRNHVHQLHTYYQLGRGSSDGFIVPPNKDGTPPEGSSKGPAHLVTSL

SEQ ID NO: 325952 - DNA, 4716 bp, Artificial Sequence
  derived and/or modified sequence
atgtggcccagccagctgctgatcttcatgatgctgctggcccccatcatccacggcggcaagcacagcgagagacaccccgccctggccgcccccctgagacacgccgagagaagccccggcggcgccctgccccccagacacctgctgcagcagcccgccgccgagagaaccgccgcccacagaggccagggccccagaggcgccaccagaggcgtgagaggccccggcgcccagggcgcccagatcgccgcccaggccttcagcagagcccccatccccatggccgtggtgagaagagagctgagctgcgagagctaccccatcgagctgagatgccccggcaccgacgtgatcatgatcgagagcgccaactacggcagaaccgacgacaagatctgcgacagcgaccccgcccagatggagaacatcagatgctacctgcccgacgcctacaagatcatgagccagagatgcaacaacagaacccagtgcgccgtggtggccggccccgacgtgttccccgacccctgccccggcacctacaagtacctggaggtgcagtacgagtgcgtgccctacaaggtggagcagaaggtgttcctgtgccccggcctgctgaagggcgtgtaccagagcgagcacctgttcgagagcgaccaccagagcggcgcctggtgcaaggaccccctgcaggccagcgacaagatctactacatgccctggaccccctacagaaccgacaccctgaccgagtacagcagcaaggacgacttcatcgccggcagacccaccaccacctacaagctgccccacagagtggacggcaccggcttcgtggtgtacgacggcgccctgttcttcaacaaggagagaaccagaaacatcgtgaagttcgacctgagaaccagaatcaagagcggcgaggccatcatcgccaacgccaactaccacgacaccagcccctacagatggggcggcaagagcgacatcgacctggccgtggacgagaacggcctgtgggtgatctacgccaccgagcagaacaacggcaagatcgtgatcagccagctgaacccctacaccctgagaatcgagggcacctgggacaccgcctacgacaagagaagcgccagcaacgccttcatgatctgcggcatcctgtacgtggtgaagagcgtgtacgaggacgacgacaacgaggccaccggcaacaagatcgactacatctacaacaccgaccagagcaaggacagcctggtggacgtgcccttccccaacagctaccagtacatcgccgccgtggactacaaccccagagacaacctgctgtacgtgtggaacaactaccacgtggtgaagtacagcctggacttcggccccctggacagcagaagcggccaggcccaccacggccaggtgagctacatcagcccccccatccacctggacagcgagctggagagacccagcgtgaaggacatcagcaccaccggccccctgggcatgggcagcaccaccaccagcaccaccctgagaaccaccaccctgagccccggcagaagcaccacccccagcgtgagcggcagaagaaacagaagcaccagcacccccagccccgccgtggaggtgctggacgacatgaccacccacctgcccagcgccagcagccagatccccgccctggaggagagctgcgaggccgtggaggccagagagatcatgtggttcaagaccagacagggccagatcgccaagcagccctgccccgccggcaccatcggcgtgagcacctacctgtgcctggcccccgacggcatctgggacccccagggccccgacctgagcaactgcagcagcccctgggtgaaccacatcacccagaagctgaagagcggcgagaccgccgccaacatcgccagagagctggccgagcagaccagaaaccacctgaacgccggcgacatcacctacagcgtgagagccatggaccagctggtgggcctgctggacgtgcagctgagaaacctgacccccggcggcaaggacagcgccgccagaagcctgaacaagctgcagaagagagagagaagctgcagagcctacgtgcaggccatggtggagaccgtgaacaacctgctgcagccccaggccctgaacgcctggagagacctgaccaccagcgaccagctgagagccgccaccatgctgctgcacaccgtggaggagagcgccttcgtgctggccgacaacctgctgaagaccgacatcgtgagagagaacaccgacaacatcaagctggaggtggccagactgagcaccgagggcaacctggaggacctgaagttccccgagaacatgggccacggcagcaccatccagctgagcgccaacaccctgaagcagaacggcagaaacggcgagatcagagtggccttcgtgctgtacaacaacctgggcccctacctgagcaccgagaacgccagcatgaagctgggcaccgaggccctgagcaccaaccacagcgtgatcgtgaacagccccgtgatcaccgccgccatcaacaaggagttcagcaacaaggtgtacctggccgaccccgtggtgttcaccgtgaagcacatcaagcagagcgaggagaacttcaaccccaactgcagcttctggagctacagcaagagaaccatgaccggctactggagcacccagggctgcagactgctgaccaccaacaagacccacaccacctgcagctgcaaccacctgaccaacttcgccgtgctgatggcccacgtggaggtgaagcacagcgacgccgtgcacgacctgctgctggacgtgatcacctgggtgggcatcctgctgagcctggtgtgcctgctgatctgcatcttcaccttctgcttcttcagaggcctgcagagcgacagaaacaccatccacaagaacctgtgcatcagcctgttcgtggccgagctgctgttcctgatcggcatcaacagaaccgaccagcccatcgcctgcgccgtgttcgccgccctgctgcacttcttcttcctggccgccttcacctggatgttcctggagggcgtgcagctgtacatcatgctggtggaggtgttcgagagcgagcacagcagaagaaagtacttctacctggtgggctacggcatgcccgccctgatcgtggccgtgagcgccgccgtggactacagaagctacggcaccgacaaggtgtgctggctgagactggacacctacttcatctggagcttcatcggccccgccaccctgatcatcatgctgaacgtgatcttcctgggcatcgccctgtacaagatgttccaccacaccgccatcctgaagcccgagagcggctgcctggacaacatcaagagctgggtgatcggcgccatcgccctgctgtgcctgctgggcctgacctgggccttcggcctgatgtacatcaacgagagcaccgtgatcatggcctacctgttcaccatcttcaacagcctgcagggcatgttcatcttcatcttccactgcgtgctgcagaagaaggtgagaaaggagtacggcaagtgcctgagaacccactgctgcagcggcaagagcaccgagagcagcatcggcagcggcaagaccagcggcagcagaacccccggcagatacagcaccggcagccagagcagaatcagaagaatgtggaacgacaccgtgagaaagcagagcgagagcagcttcatcaccggcgacatcaacagcagcgccagcctgaacagaggcgccatggccaaccacctgatcagcaacgccctgctgagaccccacggcaccaacaacccctacaacaccctgctgggcgagcccgccgtgtgcaacaaccccagcgtgagcatgtacaacgcccaggagggcctgctgaacaacgccagagacaccagcgtgatggacaccctgcccctgaacggcaaccacggcaacagctacagcatcgccagcggcgagtacctgagcaactgcgtgcagatcatcgacagaggctacaaccacaacgagaccgccctggagaagaagatcctgaaggagctgaccagcaactacatccccagctacctgaacaaccacgagagaagcagcgagcagaacagaaacctgatgaacaagctggtgaacaacctgggcagcggcagagaggacgacgccatcgtgctggacgacgccaccagcttcaaccacgaggagagcctgggcctggagctgatccacgaggagagcgacgcccccctgctgccccccagagtgtacagcaccgagaaccaccagccccaccactacaccagaagaagaatcccccaggaccacagcgagagcttcttccccctgctgaccaacgagcacaccgaggacctgcagagcccccacagagacagcctgtacaccagcatgcccaccctggccggcgtggccgccaccgagagcgtgaccaccagcacccagaccgagcccccccccgccaagtgcggcgacgccgaggacgtgtactacaagagcatgcccaacctgggcagcagaaaccacgtgcaccagctgcacacctactaccagctgggcagaggcagcagcgacggcttcatcgtgccccccaacaaggacggcaccccccccgagggcagcagcaagggccccgcccacctggtgaccagcctgtag

SEQ ID NO: 325953 - DNA, 4029 bp, Artificial Sequence
  derived and/or modified sequence
atgtggcccagccagctgctgatcttcatgatgctgctggcccccatcatccacggcggcaagcacagcgagagacaccccgccctggccgcccccctgagacacgccgagagaagccccggcggcgccctgccccccagacacctgctgcagcagcccgccgccgagagaaccgccgcccacagaggccagggccccagaggcgccaccagaggcgtgagaggccccggcgcccagggcgcccagatcgccgcccaggccttcagcagagcccccatccccatggccgtggtgagaagagagctgagctgcgagagctaccccatcgagctgagatgccccggcaccgacgtgatcatgatcgagagcgccaactacggcagaaccgacgacaagatctgcgacagcgaccccgcccagatggagaacatcagatgctacctgcccgacgcctacaagatcatgagccagagatgcaacaacagaacccagtgcgccgtggtggccggccccgacgtgttccccgacccctgccccggcacctacaagtacctggaggtgcagtacgagtgcgtgccctacaaggtggagcagaaggtgttcctgtgccccggcctgctgaagggcgtgtaccagagcgagcacctgttcgagagcgaccaccagagcggcgcctggtgcaaggaccccctgcaggccagcgacaagatctactacatgccctggaccccctacagaaccgacaccctgaccgagtacagcagcaaggacgacttcatcgccggcagacccaccaccacctacaagctgccccacagagtggacggcaccggcttcgtggtgtacgacggcgccctgttcttcaacaaggagagaaccagaaacatcgtgaagttcgacctgagaaccagaatcaagagcggcgaggccatcatcgccaacgccaactaccacgacaccagcccctacagatggggcggcaagagcgacatcgacctggccgtggacgagaacggcctgtgggtgatctacgccaccgagcagaacaacggcaagatcgtgatcagccagctgaacccctacaccctgagaatcgagggcacctgggacaccgcctacgacaagagaagcgccagcaacgccttcatgatctgcggcatcctgtacgtggtgaagagcgtgtacgaggacgacgacaacgaggccaccggcaacaagatcgactacatctacaacaccgaccagagcaaggacagcctggtggacgtgcccttccccaacagctaccagtacatcgccgccgtggactacaaccccagagacaacctgctgtacgtgtggaacaactaccacgtggtgaagtacagcctggacttcggccccctggacagcagaagcggccaggcccaccacggccaggtgagctacatcagcccccccatccacctggacagcgagctggagagacccagcgtgaaggacatcagcaccaccggccccctgggcatgggcagcaccaccaccagcaccaccctgagaaccaccaccctgagccccggcagaagcaccacccccagcgtgagcggcagaagaaacagaagcaccagcacccccagccccgccgtggaggtgctggacgacatgaccacccacctgcccagcgccagcagccagatccccgccctggaggagagctgcgaggccgtggaggccagagagatcatgtggttcaagaccagacagggccagatcgccaagcagccctgccccgccggcaccatcggcgtgagcacctacctgtgcctggcccccgacggcatctgggacccccagggccccgacctgagcaactgcagcagcccctgggtgaaccacatcacccagaagctgaagagcggcgagaccgccgccaacatcgccagagagctggccgagcagaccagaaaccacctgaacgccggcgacatcacctacagcgtgagagccatggaccagctggtgggcctgctggacgtgcagctgagaaacctgacccccggcggcaaggacagcgccgccagaagcctgaacaagctgcagaagagagagagaagctgcagagcctacgtgcaggccatggtggagaccgtgaacaacctgctgcagccccaggccctgaacgcctggagagacctgaccaccagcgaccagctgagagccgccaccatgctgctgcacaccgtggaggagagcgccttcgtgctggccgacaacctgctgaagaccgacatcgtgagagagaacaccgacaacatcaagctggaggtggccagactgagcaccgagggcaacctggaggacctgaagttccccgagaacatgggccacggcagcaccatccagctgagcgccaacaccctgaagcagaacggcagaaacggcgagatcagagtggccttcgtgctgtacaacaacctgggcccctacctgagcaccgagaacgccagcatgaagctgggcaccgaggccctgagcaccaaccacagcgtgatcgtgaacagccccgtgatcaccgccgccatcaacaaggagttcagcaacaaggtgtacctggccgaccccgtggtgttcaccgtgaagcacatcaagcagagcgaggagaacttcaaccccaactgcagcttctggagctacagcaagagaaccatgaccggctactggagcacccagggctgcagactgctgaccaccaacaagacccacaccacctgcagctgcaaccacctgaccaacttcgccgtgctgatggcccacgtggaggtgaagcacagcgacgccgtgcacgacctgctgctggacgtgatcacctgggtgggcatcctgctgagcctggtgtgcctgctgatctgcatcttcaccttctgcttcttcagaggcctgcagagcgacagaaacaccatccacaagaacctgtgcatcagcctgttcgtggccgagctgctgttcctgatcggcatcaacagaaccgaccagcccatcgcctgcgccgtgttcgccgccctgctgcacttcttcttcctggccgccttcacctggatgttcctggagggcgtgcagctgtacatcatgctggtggaggtgttcgagagcgagcacagcagaagaaagtacttctacctggtgggctacggcatgcccgccctgatcgtggccgtgagcgccgccgtggactacagaagctacggcaccgacaaggtgtgctggctgagactggacacctacttcatctggagcttcatcggccccgccaccctgatcatcatgctgaacgtgatcttcctgggcatcgccctgtacaagatgttccaccacaccgccatcctgaagcccgagagcggctgcctggacaacatcaagagctgggtgatcggcgccatcgccctgctgtgcctgctgggcctgacctgggccttcggcctgatgtacatcaacgagagcaccgtgatcatggcctacctgttcaccatcttcaacagcctgcagggcatgttcatcttcatcttccactgcgtgctgcagaagaaggtgagaaaggagtacggcaagtgcctgagaacccactgctgcagcggcaagagcaccgagagcagcatcggcagcggcaagaccagcggcagcagaacccccggcagatacagcaccggcagccagagcagaatcagaagaatgtggaacgacaccgtgagaaagcagagcgagagcagcttcatcaccggcgacatcaacagcagcgccagcctgaacagaggcgccatggccaaccacctgatcagcaacgccctgctgagaccccacggcaccaacaacccctacaacaccctgctgggcgagcccgccgtgtgcaacaaccccagcgtgagcatgtacaacgcccaggagccctacagagagaccagcatgggcgtgaagctgaacatcgcctaccagatcggcgccagcgagcagtgccagggctacaagtgccacggctacagcaccaccgagtggtag

SEQ ID NO: 325954 - DNA, 3825 bp, Artificial Sequence
  derived and/or modified sequence
atgtggcccagccagctgctgatcttcatgatgctgctggcccccatcatccacgccttcagcagagcccccatccccatggccgtggtgagaagagagctgagctgcgagagctaccccatcgagctgagatgccccggcaccgacgtgatcatgatcgagagcgccaactacggcagaaccgacgacaagatctgcgacagcgaccccgcccagatggagaacatcagatgctacctgcccgacgcctacaagatcatgagccagagatgcaacaacagaacccagtgcgccgtggtggccggccccgacgtgttccccgacccctgccccggcacctacaagtacctggaggtgcagtacgagtgcgtgccctacaaggtggagcagaaggtgttcctgtgccccggcctgctgaagggcgtgtaccagagcgagcacctgttcgagagcgaccaccagagcggcgcctggtgcaaggaccccctgcaggccagcgacaagatctactacatgccctggaccccctacagaaccgacaccctgaccgagtacagcagcaaggacgacttcatcgccggcagacccaccaccacctacaagctgccccacagagtggacggcaccggcttcgtggtgtacgacggcgccctgttcttcaacaaggagagaaccagaaacatcgtgaagttcgacctgagaaccagaatcaagagcggcgaggccatcatcgccaacgccaactaccacgacaccagcccctacagatggggcggcaagagcgacatcgacctggccgtggacgagaacggcctgtgggtgatctacgccaccgagcagaacaacggcaagatcgtgatcagccagctgaacccctacaccctgagaatcgagggcacctgggacaccgcctacgacaagagaagcgccagcaacgccttcatgatctgcggcatcctgtacgtggtgaagagcgtgtacgaggacgacgacaacgaggccaccggcaacaagatcgactacatctacaacaccgaccagagcaaggacagcctggtggacgtgcccttccccaacagctaccagtacatcgccgccgtggactacaaccccagagacaacctgctgtacgtgtggaacaactaccacgtggtgaagtacagcctggacttcggccccctggacagcagaagcggccaggcccaccacggccaggtgagctacatcagcccccccatccacctggacagcgagctggagagacccagcgtgaaggacatcagcaccaccggccccctgggcatgggcagcaccaccaccagcaccaccctgagaaccaccaccctgagccccggcagaagcaccacccccagcgtgagcggcagaagaaacagaagcaccagcacccccagccccgccgtggaggtgctggacgacatgaccacccacctgcccagcgccagcagccagatccccgccctggaggagagctgcgaggccgtggaggccagagagatcatgtggttcaagaccagacagggccagatcgccaagcagccctgccccgccggcaccatcggcgtgagcacctacctgtgcctggcccccgacggcatctgggacccccagggccccgacctgagcaactgcagcagcccctgggtgaaccacatcacccagaagctgaagagcggcgagaccgccgccaacatcgccagagagctggccgagcagaccagaaaccacctgaacgccggcgacatcacctacagcgtgagagccatggaccagctggtgggcctgctggacgtgcagctgagaaacctgacccccggcggcaaggacagcgccgccagaagcctgaacaagctgcagaagagagagagaagctgcagagcctacgtgcaggccatggtggagaccgtgaacaacctgctgcagccccaggccctgaacgcctggagagacctgaccaccagcgaccagctgagagccgccaccatgctgctgcacaccgtggaggagagcgccttcgtgctggccgacaacctgctgaagaccgacatcgtgagagagaacaccgacaacatcaagctggaggtggccagactgagcaccgagggcaacctggaggacctgaagttccccgagaacatgggccacggcagcaccatccagctgagcgccaacaccctgaagcagaacggcagaaacggcgagatcagagtggccttcgtgctgtacaacaacctgggcccctacctgagcaccgagaacgccagcatgaagctgggcaccgaggccctgagcaccaaccacagcgtgatcgtgaacagccccgtgatcaccgccgccatcaacaaggagttcagcaacaaggtgtacctggccgaccccgtggtgttcaccgtgaagcacatcaagcagagcgaggagaacttcaaccccaactgcagcttctggagctacagcaagagaaccatgaccggctactggagcacccagggctgcagactgctgaccaccaacaagacccacaccacctgcagctgcaaccacctgaccaacttcgccgtgctgatggcccacgtggaggtgaagcacagcgacgccgtgcacgacctgctgctggacgtgatcacctgggtgggcatcctgctgagcctggtgtgcctgctgatctgcatcttcaccttctgcttcttcagaggcctgcagagcgacagaaacaccatccacaagaacctgtgcatcagcctgttcgtggccgagctgctgttcctgatcggcatcaacagaaccgaccagcccatcgcctgcgccgtgttcgccgccctgctgcacttcttcttcctggccgccttcacctggatgttcctggagggcgtgcagctgtacatcatgctggtggaggtgttcgagagcgagcacagcagaagaaagtacttctacctggtgggctacggcatgcccgccctgatcgtggccgtgagcgccgccgtggactacagaagctacggcaccgacaaggtgtgctggctgagactggacacctacttcatctggagcttcatcggccccgccaccctgatcatcatgctgaacgtgatcttcctgggcatcgccctgtacaagatgttccaccacaccgccatcctgaagcccgagagcggctgcctggacaacatcaagagctgggtgatcggcgccatcgccctgctgtgcctgctgggcctgacctgggccttcggcctgatgtacatcaacgagagcaccgtgatcatggcctacctgttcaccatcttcaacagcctgcagggcatgttcatcttcatcttccactgcgtgctgcagaagaaggtgagaaaggagtacggcaagtgcctgagaacccactgctgcagcggcaagagcaccgagagcagcatcggcagcggcaagaccagcggcagcagaacccccggcagatacagcaccggcagccagagcagaatcagaagaatgtggaacgacaccgtgagaaagcagagcgagagcagcttcatcaccggcgacatcaacagcagcgccagcctgaacagaggcgccatggccaaccacctgatcagcaacgccctgctgagaccccacggcaccaacaacccctacaacaccctgctgggcgagcccgccgtgtgcaacaaccccagcgtgagcatgtacaacgcccaggagccctacagagagaccagcatgggcgtgaagctgaacatcgcctaccagatcggcgccagcgagcagtgccagggctacaagtgccacggctacagcaccaccgagtggtag

SEQ ID NO: 325955 - DNA, 4512 bp, Artificial Sequence
  derived and/or modified sequence
atgtggcccagccagctgctgatcttcatgatgctgctggcccccatcatccacgccttcagcagagcccccatccccatggccgtggtgagaagagagctgagctgcgagagctaccccatcgagctgagatgccccggcaccgacgtgatcatgatcgagagcgccaactacggcagaaccgacgacaagatctgcgacagcgaccccgcccagatggagaacatcagatgctacctgcccgacgcctacaagatcatgagccagagatgcaacaacagaacccagtgcgccgtggtggccggccccgacgtgttccccgacccctgccccggcacctacaagtacctggaggtgcagtacgagtgcgtgccctacaaggtggagcagaaggtgttcctgtgccccggcctgctgaagggcgtgtaccagagcgagcacctgttcgagagcgaccaccagagcggcgcctggtgcaaggaccccctgcaggccagcgacaagatctactacatgccctggaccccctacagaaccgacaccctgaccgagtacagcagcaaggacgacttcatcgccggcagacccaccaccacctacaagctgccccacagagtggacggcaccggcttcgtggtgtacgacggcgccctgttcttcaacaaggagagaaccagaaacatcgtgaagttcgacctgagaaccagaatcaagagcggcgaggccatcatcgccaacgccaactaccacgacaccagcccctacagatggggcggcaagagcgacatcgacctggccgtggacgagaacggcctgtgggtgatctacgccaccgagcagaacaacggcaagatcgtgatcagccagctgaacccctacaccctgagaatcgagggcacctgggacaccgcctacgacaagagaagcgccagcaacgccttcatgatctgcggcatcctgtacgtggtgaagagcgtgtacgaggacgacgacaacgaggccaccggcaacaagatcgactacatctacaacaccgaccagagcaaggacagcctggtggacgtgcccttccccaacagctaccagtacatcgccgccgtggactacaaccccagagacaacctgctgtacgtgtggaacaactaccacgtggtgaagtacagcctggacttcggccccctggacagcagaagcggccaggcccaccacggccaggtgagctacatcagcccccccatccacctggacagcgagctggagagacccagcgtgaaggacatcagcaccaccggccccctgggcatgggcagcaccaccaccagcaccaccctgagaaccaccaccctgagccccggcagaagcaccacccccagcgtgagcggcagaagaaacagaagcaccagcacccccagccccgccgtggaggtgctggacgacatgaccacccacctgcccagcgccagcagccagatccccgccctggaggagagctgcgaggccgtggaggccagagagatcatgtggttcaagaccagacagggccagatcgccaagcagccctgccccgccggcaccatcggcgtgagcacctacctgtgcctggcccccgacggcatctgggacccccagggccccgacctgagcaactgcagcagcccctgggtgaaccacatcacccagaagctgaagagcggcgagaccgccgccaacatcgccagagagctggccgagcagaccagaaaccacctgaacgccggcgacatcacctacagcgtgagagccatggaccagctggtgggcctgctggacgtgcagctgagaaacctgacccccggcggcaaggacagcgccgccagaagcctgaacaagctgcagaagagagagagaagctgcagagcctacgtgcaggccatggtggagaccgtgaacaacctgctgcagccccaggccctgaacgcctggagagacctgaccaccagcgaccagctgagagccgccaccatgctgctgcacaccgtggaggagagcgccttcgtgctggccgacaacctgctgaagaccgacatcgtgagagagaacaccgacaacatcaagctggaggtggccagactgagcaccgagggcaacctggaggacctgaagttccccgagaacatgggccacggcagcaccatccagctgagcgccaacaccctgaagcagaacggcagaaacggcgagatcagagtggccttcgtgctgtacaacaacctgggcccctacctgagcaccgagaacgccagcatgaagctgggcaccgaggccctgagcaccaaccacagcgtgatcgtgaacagccccgtgatcaccgccgccatcaacaaggagttcagcaacaaggtgtacctggccgaccccgtggtgttcaccgtgaagcacatcaagcagagcgaggagaacttcaaccccaactgcagcttctggagctacagcaagagaaccatgaccggctactggagcacccagggctgcagactgctgaccaccaacaagacccacaccacctgcagctgcaaccacctgaccaacttcgccgtgctgatggcccacgtggaggtgaagcacagcgacgccgtgcacgacctgctgctggacgtgatcacctgggtgggcatcctgctgagcctggtgtgcctgctgatctgcatcttcaccttctgcttcttcagaggcctgcagagcgacagaaacaccatccacaagaacctgtgcatcagcctgttcgtggccgagctgctgttcctgatcggcatcaacagaaccgaccagcccatcgcctgcgccgtgttcgccgccctgctgcacttcttcttcctggccgccttcacctggatgttcctggagggcgtgcagctgtacatcatgctggtggaggtgttcgagagcgagcacagcagaagaaagtacttctacctggtgggctacggcatgcccgccctgatcgtggccgtgagcgccgccgtggactacagaagctacggcaccgacaaggtgtgctggctgagactggacacctacttcatctggagcttcatcggccccgccaccctgatcatcatgctgaacgtgatcttcctgggcatcgccctgtacaagatgttccaccacaccgccatcctgaagcccgagagcggctgcctggacaacatcaagagctgggtgatcggcgccatcgccctgctgtgcctgctgggcctgacctgggccttcggcctgatgtacatcaacgagagcaccgtgatcatggcctacctgttcaccatcttcaacagcctgcagggcatgttcatcttcatcttccactgcgtgctgcagaagaaggtgagaaaggagtacggcaagtgcctgagaacccactgctgcagcggcaagagcaccgagagcagcatcggcagcggcaagaccagcggcagcagaacccccggcagatacagcaccggcagccagagcagaatcagaagaatgtggaacgacaccgtgagaaagcagagcgagagcagcttcatcaccggcgacatcaacagcagcgccagcctgaacagaggcgccatggccaaccacctgatcagcaacgccctgctgagaccccacggcaccaacaacccctacaacaccctgctgggcgagcccgccgtgtgcaacaaccccagcgtgagcatgtacaacgcccaggagggcctgctgaacaacgccagagacaccagcgtgatggacaccctgcccctgaacggcaaccacggcaacagctacagcatcgccagcggcgagtacctgagcaactgcgtgcagatcatcgacagaggctacaaccacaacgagaccgccctggagaagaagatcctgaaggagctgaccagcaactacatccccagctacctgaacaaccacgagagaagcagcgagcagaacagaaacctgatgaacaagctggtgaacaacctgggcagcggcagagaggacgacgccatcgtgctggacgacgccaccagcttcaaccacgaggagagcctgggcctggagctgatccacgaggagagcgacgcccccctgctgccccccagagtgtacagcaccgagaaccaccagccccaccactacaccagaagaagaatcccccaggaccacagcgagagcttcttccccctgctgaccaacgagcacaccgaggacctgcagagcccccacagagacagcctgtacaccagcatgcccaccctggccggcgtggccgccaccgagagcgtgaccaccagcacccagaccgagcccccccccgccaagtgcggcgacgccgaggacgtgtactacaagagcatgcccaacctgggcagcagaaaccacgtgcaccagctgcacacctactaccagctgggcagaggcagcagcgacggcttcatcgtgccccccaacaaggacggcaccccccccgagggcagcagcaagggccccgcccacctggtgaccagcctgtag

SEQ ID NO: 325956 - DNA, 4716 bp, Artificial Sequence
  derived and/or modified sequence
atgtggccctctcaattgttgatctttatgatgctgctggctcctattattcacgggggcaaacacagtgagcggcatcccgccctggcagcgcctctgcgccacgccgagcgcagccctgggggcgccctgcctccacgccatctcctgcagcagcccgccgctgaacggacagccgcccacagagggcaaggaccaaggggtgctacacgaggtgtgagagggcctggggcacagggggcccagatcgctgcccaggctttcagcagagcccctattccaatggccgtcgtgcggcgcgaattgtcatgtgaatcttatccaattgagcttcggtgccctggtaccgacgtgatcatgatcgagtcggctaattacggcagaacggatgataaaatttgcgactctgaccccgcacagatggagaatatcaggtgctacctgcccgacgcctataagattatgagccaacgctgcaacaatagaacccagtgtgccgttgttgcggggccggatgtttttcccgatccttgtcccggcacatacaagtacctggaggtgcagtacgagtgtgtaccctataaggtcgaacagaaggtattcttatgcccaggactcctgaaaggggtataccagagcgagcacttattcgagtcagatcatcagagcggagcctggtgcaaagatccgctccaggcctctgacaaaatatattatatgccctggactccctatcgaacagacaccttgaccgagtactcttctaaagacgacttcattgctggtagaccaacaacaacatacaaacttcctcatcgggtcgacggaaccgggttcgtagtttatgacggtgccttgttttttaataaggagaggacacgcaatatcgtcaaattcgatctccgaactagaattaaaagcggcgaggccataatagcaaacgcgaattatcacgacaccagcccatacaggtggggaggaaaaagcgatatcgatctggccgtagatgaaaacggcctgtgggtaatctatgcgactgaacagaacaatggaaagatcgtgattagccagctgaatccgtacacattaagaatagaggggacctgggatacggcatacgacaagcggagcgctagcaacgctttcatgatttgtgggatcctctacgtggtcaaatccgtgtacgaagacgacgataatgaggccaccggaaataagattgattacatttacaacactgaccaaagcaaggatagcctcgttgatgtcccttttccaaattcataccagtatattgcggccgtggactataacccacgcgacaacttactgtatgtttggaacaactaccacgtggtaaagtactccctggatttcgggcccctcgattccaggtctgggcaggcccaccatggccaggtctcctacatcagccctcccattcacctggactctgagctggaacgcccttctgttaaggatatttcaactacaggaccactgggaatgggaagtacaacaacaagcacgactctcaggacaactacactgtctcctggtagatcgaccacgccttctgtttcgggcaggagaaatcggagtaccagcacgccgtctccagccgtcgaggttctggatgatatgaccacccatctgccttctgcttcttcacagatacccgccttagaggagtcctgcgaggccgtggaggcaagggaaataatgtggtttaaaactaggcaggggcagatcgccaagcaaccttgcccggctgggaccatcggtgtgagcacctatctgtgcttagcacccgacggaatctgggatccccagggcccggatttgagcaattgctcgagcccatgggtgaaccatattacacaaaagttgaaaagcggagagactgccgcgaatattgcccgggagttagcagagcaaactagaaatcacttaaatgctggcgatatcacttattccgtacgggcgatggaccagttagtgggtctcttagacgtgcaactgagaaatttgaccccggggggcaaggactccgccgcaaggagcctgaataaattgcagaagcgggagaggagctgtagagcttatgttcaggctatggtggaaaccgtgaataaccttctgcagcctcaggccctgaacgcttggcgggacctgacaaccagcgatcagctgcgggctgctacaatgctcctccacacagtggaggagagcgcgtttgtgctggccgacaatttgctcaagaccgacattgttagggaaaataccgacaacattaagctagaagttgctcggctcagtaccgaagggaacttggaggacttgaagttccctgagaatatgggtcacggcagcaccatccagctatccgccaataccctaaaacagaacggtaggaacggagagatccgagtggcattcgtcctttataataacctcggcccatatctgtcaactgagaacgcaagcatgaagcttggtaccgaagctctgagcacaaatcactcagttatcgtgaatagcccggtcattactgcggccattaacaaggagttttctaataaggtttaccttgctgatcctgtggtgtttaccgtaaaacacattaagcagtcagaggagaacttcaaccctaattgcagcttttggagctattccaaaagaactatgacaggctactggtccacacagggatgtcgcctcctgactaccaataaaacacatacaacatgtagctgcaatcatctcactaactttgccgtgctgatggctcatgtggaagtgaagcacagcgatgccgtgcatgatttgttgctggatgtcattacttgggtcgggattctactcagtctggtctgtctcttaatctgcatttttactttctgtttctttcgaggtctccagtccgacaggaatacaattcacaagaatctgtgtatctctttatttgtagctgagcttttattcttgattggaattaacagaacagatcagcccatagcatgcgccgtgtttgctgcgttgctacacttttttttcctcgcagcttttacctggatgttcctcgagggtgttcagctgtatatcatgctggtggaagtattcgaatccgagcattccagaaggaagtatttttatctggtcggatatggcatgcccgccctcattgtcgccgttagcgcagcggtcgactatagaagctacgggacagacaaagtgtgctggctcagactcgacacttactttatttggtcttttatcggtcccgctacattgattatcatgttgaatgtaatcttcctgggcattgccctctacaaaatgtttcaccacacggctatcttgaaacccgaaagcgggtgtctggacaacatcaagagttgggtcataggcgctattgccctgctctgcctgcttggcttaacatgggcatttgggctcatgtatattaacgaaagcactgtgatcatggcctacctttttaccatcttcaatagtctgcaaggcatgtttatcttcatattccactgcgttttgcagaagaaggtgagaaaggagtatgggaagtgccttcgcacgcactgttgctcaggtaaatcaaccgagagttccataggatcaggcaaaacatcaggcagccgaacgcctgggcgctattctaccggcagtcaatcccggatccggaggatgtggaacgataccgtaaggaagcagtccgagtcatctttcatcacaggcgatataaactcttcagcctccttaaacagaggtgccatggccaaccatctgatctcaaatgctcttctccgtccgcatggaacaaacaacccttacaacactttgctgggggagccggccgtttgtaacaacccttctgtgtctatgtacaatgcccaggagggcctgctcaacaatgccagagatactagcgtgatggacactctcccactgaacggtaaccacggtaactcatactccatagcctccggggaatatctcagcaactgtgttcaaatcattgaccggggttataaccataatgagacagctctggagaaaaagatactgaaagagttgacatccaattacattccctcctacctgaacaaccacgaacggtcctccgaacagaatcggaatcttatgaacaagttggtaaataatctgggttctgggagggaggatgacgctattgtgctggacgacgctacctctttcaatcatgaagaatccctcggcttagaactgattcacgaagaaagcgacgcacccttactgccgcccagggtgtattcaaccgaaaatcaccagccccaccattacacccgacgacgaatcccccaggaccacagcgaatcctttttccctctgctgacgaatgaacacacagaggacctgcagagcccccatagggatagtctctatacatctatgcctactctggccggcgtggccgccaccgagagtgtgaccacttctacccagactgagccaccgcccgccaaatgcggcgatgctgaggacgtctactacaagtccatgcccaatctgggaagcaggaaccatgttcaccagctgcatacttattatcagctcggacggggctcttcggatgggttcattgtgcctcccaataaagatggcacccccccagagggctcgagtaagggacccgcccatctggttacctctctatag

SEQ ID NO: 325957 - DNA, 4029 bp, Artificial Sequence
  derived and/or modified sequence
atgtggccgagccagctgctgattttcatgatgttattagcccctatcatacatggcggtaaacatagtgaaaggcaccctgcacttgcggctcctcttagacatgctgaaaggtcgcctggcggagccttacctccacgtcacctcctgcagcagcccgccgccgagcgaacagccgctcatcgcggacagggcccacggggagcaactaggggtgtgaggggccccggagctcagggtgcgcagatcgccgcgcaagctttctctcgggcccctatcccaatggctgtggtgagacgtgaactgtcctgtgaaagctatcccatcgaactgcgatgtccgggaacagatgttataatgattgagtcagccaattatggccgcaccgacgataaaatttgcgattccgatcccgcgcagatggaaaatatcaggtgctacttgccagatgcttacaaaatcatgtctcagcggtgcaataataggacacagtgcgccgttgttgcggggcctgatgttttccccgatccatgcccgggcacatataagtatctggaggtccagtatgagtgtgtcccttacaaggtggagcagaaggtctttttgtgccccggattactgaaaggcgtataccagtcagagcatctgttcgaaagcgaccaccagtcaggggcttggtgcaaggatcctctgcaagcttcagataagatctattacatgccctggaccccttatcgaaccgacaccctgacagaatacagcagtaaggatgactttattgctggccgccctactacaacctacaaattaccccatagagtggatggcacagggttcgtggtatatgacggcgccctgttcttcaataaagagcggactcggaatattgtcaaattcgacctgaggactcggatcaaatccggggaagcaatcatcgccaatgccaattatcacgatacctccccctaccgttggggtggcaagtcagacatcgacctagccgtggatgaaaacggcttgtgggtgatatacgcaaccgagcagaacaacgggaagatagtgatctcacagttgaatccatatacactcagaatagaaggaacatgggacacagcgtacgataagcgctccgcatctaacgcctttatgatttgcggaattctgtatgtcgtaaaatcagtctatgaggacgacgacaacgaggcaacaggcaataaaatagactacatctacaatactgatcagtcgaaagattctctagtcgacgttcctttccctaactcttaccagtacattgctgccgtcgattacaatccaagagataatttgctgtacgtgtggaataactatcatgtcgtgaaatatagccttgacttcggtccacttgacagtcgttctggccaggcacaccatggccaggtgagttatatatctcctcccatccacctcgactccgagcttgagcggccgagtgtgaaggacatctcaactaccgggcctctcgggatggggagcactaccacttcaacaactctccgtaccacaacactcagtccaggccgatctactacgcccagtgttagcggaaggaggaatcgctccacttccacaccgagtcctgccgttgaagtcctggacgatatgactactcaccttccatccgcctcctcccaaatcccagccttagaggagagctgcgaagcagtggaggcacgagaaattatgtggttcaaaacacggcagggacagatcgccaagcagccgtgtcccgccggtacgataggggttagtacttatctatgcctggccccggatggtatttgggatccccagggcccagatctgtcaaattgctcttcaccgtgggtcaaccatattacccagaagttgaagagtggagagacggccgccaacatcgcacgcgagctggccgaacagaccaggaatcacctcaatgccggcgatatcacgtatagtgtaagggctatggaccagttggtgggcttactcgacgtacagctccgtaatctgacccccggcgggaaagatagcgctgcacggtcgctgaacaagttgcaaaaaagggagcgtagctgccgggcttatgtgcaggcgatggttgaaaccgtgaacaatctactgcagcctcaggcgctgaatgcatggagggacctcaccacctctgaccagttgagagcagctactatgttgctccatacagtcgaggagtctgcttttgtgctcgccgacaacctcctgaaaacagacatcgtgagggagaataccgataacatcaaactcgaagtcgcccggctgtcaaccgaaggaaatttagaagatctgaaattccccgagaatatgggacacggcagcactatccagctctccgcaaacaccctgaagcaaaatggtcgcaatggagaaataagagtcgcctttgtgttgtacaacaatctgggaccatacctgtccaccgagaacgcaagcatgaagctggggactgaggccttgtctaccaaccattctgtaatcgtcaattctcccgtaatcactgccgcaataaacaaggaattttccaataaggtctacctggccgaccccgtagtctttaccgttaaacacattaagcagtctgaggaaaacttcaatccaaactgctcattttggtcctattctaaaaggacaatgacaggatattggagcacccagggctgccggctccttactaccaacaagactcacaccacatgctcatgtaaccatttgacaaacttcgctgtcctgatggcacatgtggaggtaaaacactctgacgctgttcatgaccttttgctggacgtgatcacatgggtgggaattttgctctctctcgtatgtctgttaatttgcatcttcacattctgcttttttagaggcctacagagtgaccggaacaccatccacaaaaatctttgtatcagtctcttcgtggctgagctgctgtttctcattggcatcaatcgcaccgatcagcccatcgcatgtgctgtgtttgcggctctgcttcatttctttttcctcgctgcattcacctggatgttcttggagggggttcagctttacattatgctcgtggaagtcttcgagagcgagcactcaaggaggaaatacttctacctggtcgggtatgggatgccggccctcatcgtggcagtttcagctgccgtggactacagatcctatggaacagataaagtttgttggctgagattagacacatactttatctggtcatttatcgggccagccacacttatcatcatgctgaatgtcattttcctgggcattgctctttataaaatgtttcaccacacagctatcctgaagccagaatccgggtgcctagacaatatcaagagttgggtgattggcgcgatcgcattactctgtctgctggggctcacatgggcctttggtttgatgtacattaacgaaagcaccgttattatggcataccttttcaccatctttaactcactgcaagggatgttcatattcatatttcattgcgtattacagaagaaagtgcgcaaagagtacggaaagtgcctaagaacacattgttgtagtggaaagagtaccgaaagctctatcggctccggcaaaacaagcggctcccggacccctgggcgctactctacaggatcacaatctcgcatcaggcgtatgtggaacgacacggtgagaaagcagagcgaatccagcttcatcaccggcgacattaactcatctgcatcccttaaccgcggcgccatggccaatcacctgatcagcaatgccttacttcgcccccacggcactaataacccctacaacacgctgctcggagaacctgcagtttgcaataatcccagcgtctccatgtacaacgcccaggagccttaccgcgaaactagtatgggagtgaaactgaacattgcataccagatcggggcgtccgaacagtgccagggttataaatgccatggctactcaaccacagagtggtag

SEQ ID NO: 325958 - DNA, 3825 bp, Artificial Sequence
  derived and/or modified sequence
atgtggcccagccagttactgatctttatgatgctactggcccctattatccacgcgtttagtcgcgccccaatcccaatggctgtggtcagacgcgaactgtcctgtgagtcttaccccattgagctgcgatgccccggcactgacgtgataatgatagaaagcgccaactatgggaggaccgatgataagatatgcgactcagaccccgcccagatggagaatatcaggtgctatctgccggacgcctacaagatcatgagtcaacggtgcaacaaccggacccagtgtgctgtggtggcaggccccgatgtattcccagatccttgccccgggacgtacaagtacttagaagtgcagtacgaatgtgtcccttacaaggtcgaacaaaaggtctttctgtgccccggacttcttaagggagtctaccaaagcgagcatttgttcgagtctgaccaccaatcaggcgcctggtgcaaggacccacttcaggcttccgataaaatctactacatgccgtggactccctaccggaccgacacactgacagagtatagcagcaaggacgattttatcgcaggtagacccaccactacctacaagttaccccaccgcgtggatggcacaggatttgtggtgtacgacggcgcattattctttaataaagagcggactcgaaatattgtcaagtttgacctgcgtactcgaatcaagtcaggggaagctatcattgccaacgccaattatcatgacacaagtccataccggtggggaggaaaaagtgacatcgatcttgcggtagacgagaatggtctgtgggtgatttatgctacggaacagaataacggaaaaatagtcatctctcagctgaacccatatactctgcgcattgaggggacctgggacacagcttatgataaacgtagcgcaagtaatgcatttatgatctgtggcatcctgtacgtagtcaagtccgtgtatgaagatgacgataatgaggctaccggtaacaagatcgactatatatacaacacagaccagtccaaagattccctggtggatgttccattccctaatagttaccaatatatcgccgccgttgattataatccacgggacaacctgctgtatgtgtggaacaattaccacgtcgtaaagtactcactcgacttcggacctctggactcgaggtctggacaggctcatcacggacaagtgagttacattagtccccctattcacctggatagcgaactggagagaccttcagtgaaggacatctccactactggccccttgggcatgggatctacaactacttccacgacgttacgcaccactacgctgtcacctggtcggtcaacaacacccagcgtaagcggccgcagaaacaggagcacctctactccttctcctgccgtagaggtcctagatgacatgactactcacctccctagcgcttcatcccagatcccagcactcgaggagtcttgcgaggccgtcgaagcaagggagataatgtggtttaagaccaggcaaggacagatcgctaaacagccttgccctgctggcacaatcggtgtgagcacctacttgtgcttggctccggatggaatatgggacccacagggacctgacctgtcgaactgctcctctccatgggtgaaccatatcacccaaaagctgaaaagcggtgaaaccgccgccaatattgctcgcgaactcgccgaacagaccaggaaccatcttaacgccggagatatcacctactccgtacgtgccatggaccagcttgtcggacttcttgacgtgcagctaaggaatttgactccagggggcaaggacagcgccgccagaagcttgaataaactacaaaaacgagaacgttcctgcagggcatacgtacaggcgatggtcgaaacagtaaataatctgttgcaaccacaggctctgaacgcatggcgagacctcaccacctccgaccagctgagagctgctaccatgctgttgcatacggtggaggagtccgcgtttgtgctggccgacaatctgctgaagactgatatcgtgcgcgaaaacactgataatatcaaattggaggtcgcgagactcagtacggagggcaatctagaggatctgaaattccctgaaaacatgggccacggatccacaatccagctgagcgctaacactctcaaacaaaacgggagaaatggcgaaatcagagtcgcctttgttctctacaataacctgggaccctatctgtccactgaaaatgcttcaatgaagctggggactgaagctctctccaccaatcattctgttatcgttaattcccctgtgatcaccgccgccatcaataaagaattctctaacaaggtctacttagccgatcccgtggtgttcaccgtcaagcacataaagcagagtgaggagaacttcaatcccaattgctctttttggagctattctaaaaggacaatgactggatattggtctactcagggctgtcgactgctgacaaccaacaagacccacactacatgctcttgtaatcatttaaccaactttgccgttctcatggcacatgtggaggtcaagcactccgacgcggtgcacgacttgcttctagacgtgatcacctgggtaggcatcttattatccctcgtgtgcctattgatctgtattttcaccttctgttttttcagggggcttcagagcgaccgcaacaccatccataagaatctatgcataagtctttttgttgcggaactgctgttcctgatcggaatcaacagaacagaccaacctattgcatgcgccgtatttgcagcgctgttgcacttttttttccttgctgccttcacctggatgtttttggagggagtccagctgtacattatgctggtggaggtgttcgagagcgaacattcacgccgcaaatacttttacctggtgggatacggtatgcccgctctaatcgttgccgtaagcgctgccgttgactatagatcctacggaacagataaagtgtgctggttacgcctggatacttacttcatttggagcttcattgggcctgctactcttattatcatgctcaatgtgattttcttaggcatcgctctctacaagatgtttcatcataccgcaattctgaaacctgaaagcgggtgtttagacaacataaaaagctgggtgatcggtgccattgctctgctgtgtctgctgggtctgacttgggcgttcgggcttatgtatattaacgaatccactgtcataatggcgtacctctttacgatcttcaattccctccagggcatgttcatctttatttttcactgcgtattacaaaaaaaagtacgcaaggaatatggcaagtgtcttaggactcactgctgctctgggaagtccaccgaaagtagcattggtagtggaaaaacatctggaagtcgtacccctggcagatatagtacaggtagtcagagtcggatcaggcggatgtggaacgacaccgtccgtaagcagtctgaaagttctttcataaccggagatattaactcttccgcgagtctgaaccggggcgccatggctaatcacctcattagcaacgcgttgctcagaccccacgggacgaacaatccttacaacactttgctgggagagccagccgtctgcaataacccttccgtctctatgtacaacgcccaagaaccttatcgggagacatcaatgggcgtcaagctcaacattgcctatcagatcggcgccagcgaacaatgtcagggctataaatgccatggttacagcaccacagagtggtag

SEQ ID NO: 325959 - DNA, 4512 bp, Artificial Sequence
  derived and/or modified sequence
atgtggccttctcagctgctgatctttatgatgcttttggcccctatcattcacgcttttagtagggcccccataccgatggccgtggtacgtagggaactctcttgtgagagctatccaatcgagctcagatgtccgggcaccgacgtgataatgatagagtccgcaaactatggccgcaccgacgataagatctgcgacagtgatcctgcccaaatggagaatatccggtgctacctgccagatgcttataagatcatgagccaacgttgcaataataggacccagtgcgctgtagtcgctggacctgatgtgtttcccgacccatgtcccggaacatataaatacctggaggtccaatatgagtgtgtgccatacaaggtcgaacagaaagtgtttttgtgccctggcctgcttaagggggtctaccagtctgaacatcttttcgagtctgatcatcaaagtggggcctggtgtaaagatcctcttcaggcatcggacaagatttattacatgccatggacaccttatcggacagacacccttacggagtactcttcaaaggacgacttcattgcagggcgccccaccactacttacaagctcccacaccgcgtggacgggaccggtttcgtggtgtacgatggggctctctttttcaataaggagcgcaccaggaatatcgtcaaatttgaccttcggacacgcatcaaatctggggaggccattattgccaatgcaaattatcacgacacctctccttaccgctggggtggcaagagcgatattgatttggccgttgacgagaacggactgtgggtcatttacgctacagaacaaaacaacgggaagattgtgattagccagctgaatccctacacgttgagaatagagggtacctgggatacagcttatgataaacgctctgcaagcaacgcatttatgatctgcgggatcctgtatgtggtgaaaagtgtgtacgaggatgatgacaatgaggcaaccggaaataagattgactacatttacaatactgatcagtctaaggactccttggtagacgtgcccttccccaattcctaccaatatatcgccgccgtggattacaaccctcgcgacaacttgttgtatgtctggaataattatcatgtcgtgaaatattcgctggacttcggacctctggatagtaggagcggacaggcacatcatgggcaggtgtcctatatatcaccgcccatccatttggactccgaactggagaggccatctgttaaagacatcagcaccactgggccactgggaatggggtccacgacaacttctaccacccttagaacaacgactctgagtcccggtcgcagcacgactccgtccgtatcgggtcgcagaaaccggtccacaagcaccccctccccagccgtggaggtgcttgatgatatgacaactcacctgccgtctgcttctagccagattccagctctggaggagtcctgtgaagctgtggaagcacgtgaaataatgtggtttaagacccgccagggccagattgcaaaacaaccttgtcccgcgggtactatcggcgtaagtacttacttgtgcctagctcctgacggcatctgggacccgcaggggccagatctgtccaactgttcaagcccctgggtgaatcatatcacccagaagctcaagtcaggtgaaacagccgccaacatcgcccgggaacttgccgagcaaactaggaaccacctgaatgcaggagacatcacctatagcgtgagagccatggatcagttggtgggcctgctggacgtacaattacgaaatcttactccaggcggtaaagactcggcggcgcgaagtctgaacaagcttcagaagagagaacgatcctgtagggcatacgtacaggccatggttgagacagtgaataatctattgcagccccaggctctgaatgcttggcgagacctgacgacatccgaccagttaagagctgctaccatgttgctccacaccgtggaagagtccgccttcgtcctggccgataaccttcttaagacagatatcgttagagagaacacggataatataaagctggaagtggcccgactgtccacagaaggcaatcttgaggatctaaagttccccgagaatatgggacatggaagcaccattcagcttagtgccaatactttaaagcagaacggccggaacggggaaatccgggtggcattcgtgctgtataataacctcggcccctatctctcaacggagaatgccagcatgaaattgggaacagaagccctcagtactaaccacagtgtgattgtaaactctccagtcatcacggctgctataaataaggaattttcaaataaggtatatctcgctgaccctgtagtctttacggtcaagcatattaagcaatcggaggaaaacttcaatccgaactgcagcttttggtcctacagtaagaggaccatgaccggctactggtctacacaggggtgcagattgctcaccactaataagacccacacgacttgtagctgtaaccacctgacaaacttcgctgtgctgatggctcatgtggaggtcaaacatagtgatgcagtgcacgaccttcttctagatgtcataacatgggtagggattctgttgtcattagtgtgtctcctaatttgtatattcactttttgcttcttcagagggctgcagtccgaccggaacacaatacacaagaatttgtgcattagcctgtttgtggcggaactgttatttttgatcggaatcaacagaaccgaccagcccatcgcttgcgccgtgttcgcagccttactgcatttcttttttcttgccgcattcacctggatgttcttagaaggggtccagttgtatattatgctcgttgaggtgtttgaatcagaacatagccgccggaagtatttctacctagtgggatatgggatgcctgcgttaatagtagccgtgtccgccgccgtcgattaccgttcatacggtaccgacaaggtttgttggctgagacttgacacatacttcatttggtccttcattgggcccgccacactgattataatgctcaatgtcattttcctgggcatcgctctctataagatgtttcaccatactgccatcctgaagcctgaatcagggtgtctcgacaacatcaaaagctgggtcattggtgccattgccctcttatgcctgctagggttaacatgggcctttgggctgatgtacatcaacgaatccaccgtcatcatggcttaccttttcacaatctttaacagtttgcagggcatgttcatcttcattttccactgcgtccttcagaaaaaagtccggaaagagtatggcaagtgcctgaggacacactgttgcagtgggaaatctacagaaagttctatcggctcagggaaaacttcgggttctagaacccccggcaggtacagcaccgggtcgcaatcacgcatcagaagaatgtggaatgacacagttcgcaaacagtcggagtccagctttatcacaggagacatcaacagctccgcctccctcaacaggggtgcaatggccaaccatctcatatccaatgccctgctccgtcctcatggcactaataacccatataataccctattaggcgagccagcagtctgtaacaatccctctgtgtcaatgtacaatgctcaggagggcctgctgaacaacgcaagagacacatccgtaatggatacactccctctgaacggcaatcatgggaactcctatagcattgcttctggagagtatctgtctaattgtgtccagatcatcgatcggggctacaaccataatgaaaccgcccttgagaaaaaaatccttaaagagctgacatcaaattatatcccgtcatacctgaacaaccacgagaggtccagtgaacagaatcggaacttgatgaataaactcgtgaacaatctgggatccggtcgagaagatgatgcaatcgtgctagacgacgcgaccagctttaatcatgaagagtccctggggctcgagctgattcacgaagagagcgacgcacccctgcttcctcccagagtgtactccaccgagaatcaccaaccccatcattacacccggaggcgtataccgcaagaccactcggagtcattcttcccactgttgacaaatgaacatactgaagaccttcagagcccccacagagactctctgtatacatccatgcccacgctggcaggggtggctgcaacggaatctgtgaccaccagtacccagaccgagccccctcccgctaaatgtggggacgcggaggatgtctactacaagagcatgcctaatctcggaagcagaaaccacgtccaccaactgcatacgtactaccaactggggagaggaagctctgatggcttcatagttccaccaaataaggacggaacgcctcctgagggaagtagtaagggccccgcgcacctcgtgacttccctttag

SEQ ID NO: 325960 - DNA, 4935 bp, Artificial Sequence
  derived and/or modified sequence
atgtggccatcgcagctactaattttcatgatgctcttagctccaataattcatggtggcaagcacagtgaacgacatcctgcccttgctgctccattgcgacacgctgagcgcagcccaggaggcgctcttccacccagacatctgcttcagcagccagctgcagagcgcaccgctgctcatcgtggacaagggccccgtggagctaccagaggagttcgcggtccaggtgcccaaggagcacagattgcagcgcaagctttcagccgtgccccaattccaatggctgtggtccgcagagagctatcctgtgagagctatcctatagagcttcgctgtccaggaacagacgtcatcatgatagaaagtgccaactatggcaggactgatgacaaaatttgtgactctgaccctgctcagatggagaatatccgatgttatctgccagatgcctataagattatgtctcaaagatgcaataacagaacccagtgtgcagtggtggcaggtcctgatgtttttccagacccgtgtccaggaacctataaataccttgaagtgcagtatgaatgtgtcccttacaaagtggaacaaaaagtttttctttgtcctggactactaaaaggagtataccagagtgaacatttgtttgagtccgaccaccaatctggggcgtggtgcaaagaccctctgcaggcatctgacaagatttattatatgccctggactccctacagaactgataccctgactgagtattcatccaaggatgacttcattgctggaagaccaactacaacctacaagctccctcacagggtggatggcacaggatttgtagtgtatgatggagctttgttcttcaacaaagagcgcaccaggaacatagtaaagtttgatttgcggactaggataaagagtggagaggctatcatagcaaatgccaattaccatgatacctccccttaccgatggggaggcaaatctgacatagacctggcagtagatgagaatgggctatgggtaatctatgcaacagaacaaaacaatggtaaaattgtcattagtcaattgaacccttacaccctacggatcgaaggaacatgggatactgcatatgataaaaggtcagcttccaatgcctttatgatttgtggaattctgtatgtggtcaaatctgtatatgaggatgatgacaatgaggctactggaaataagattgactacatttacaacactgaccaaagcaaggatagtttggtggatgtaccctttcctaattcataccagtacattgcagctgtggattacaaccccagggacaacctactttatgtatggaataactatcacgtcgtgaaatattctttggattttggacctctggatagtagatcagggcaggcacatcatggacaagtttcatacatttctccgccaattcaccttgactctgagctagaaagaccctctgttaaagatatctctaccacaggacctcttggcatgggaagcactaccaccagtaccacccttcggaccacaactttgagcccaggaaggagtaccaccccgtcagtgtcaggaagaagaaaccggagtactagtaccccatctccagctgtcgaggtacttgatgacatgaccacacaccttccatcagcatcgtcccaaatcccagctctcgaagagagctgtgaggctgtggaagcccgagaaatcatgtggtttaagactcgtcaaggacagatagcaaagcagccatgccctgcaggaactataggtgtatcaacttatctatgccttgctcctgatggaatttgggatccccaaggtccagatctcagcaactgttcttctccttgggtcaatcatataacacagaagttgaaatctggtgaaacagctgccaacattgctagagagctggctgaacagacaagaaatcacttgaatgctggggacatcacctactctgtccgggccatggaccagctggtaggcctcctagatgtacagcttcggaacttgaccccaggtggaaaagatagtgctgcccggagtttgaacaagcttcagaaaagagagcgctcttgcagagcctatgtccaggcaatggtcgagacagttaacaacctccttcagccacaagctttgaatgcatggagagacctgactacgagtgatcagctgcgtgcggccaccatgttgcttcatactgtggaggaaagtgcttttgtgctggctgataaccttttgaagactgacattgtcagggagaatacagacaatattaaattggaagttgcaagactgagcacagaaggaaacttagaagacctaaaatttccagaaaacatgggccatggaagcactatccagctgtctgcaaataccttaaagcaaaatggccgaaatggagagatcagagtggcctttgtcctgtataacaacttgggtccttatttatccacggagaatgccagtatgaagttgggaacggaagctttgtccacaaatcattctgttattgtcaattcccctgttattacggcagcaataaacaaagagttcagtaacaaggtttatttggctgatcctgtggtatttactgttaaacatatcaagcagtcagaggaaaatttcaaccctaactgttcattttggagctactccaagcgtacaatgacaggttattggtcaacacaaggctgtcggctcctgacaacaaataagacacatactacatgctcttgtaaccacctaacaaattttgcagtactgatggcacatgtggaagttaagcacagtgatgcggtccatgacctccttctggatgtgatcacgtgggttggaattttgctgtcccttgtttgtctcctgatttgcatcttcacattttgctttttccgggggctccagagtgaccgtaacaccatccacaagaacctctgcatcagtctctttgtagcagagctgctcttcctgattgggatcaaccgaactgaccaaccaattgcctgtgctgttttcgctgccctgttacatttcttcttcttggctgccttcacctggatgttcctggagggggtgcagctttatatcatgctggtggaggtttttgagagtgaacattcacgtaggaaatacttttatctggtcggctatgggatgcctgcactcattgtggctgtgtcagctgcagtagactacaggagttatggaacagataaagtatgttggctccgacttgacacctacttcatttggagttttataggaccagcaactttgataattatgcttaatgtaatcttccttgggattgctttatataaaatgtttcatcatactgctatactgaaacctgaatcaggctgtcttgataacatcaagtcatgggttataggtgcaatagctcttctctgcctattaggattgacctgggcctttggactcatgtatattaatgaaagcacagtcatcatggcctatctcttcaccattttcaattctctacagggaatgtttatatttattttccattgtgtcctacagaagaaggtacgaaaagagtatgggaaatgcctgcgaacacattgctgtagtggcaaaagtacagagagttccattggttcagggaaaacatctggttctcgaactcctggacgctactccacaggctcacagagccgaatccgtagaatgtggaatgacacggttcgaaagcagtcagagtcttcctttattactggagacataaacagttcagcgtcactcaacagaggagccatggctaatcatcttataagcaatgctctgcttcgtccgcatggtactaacaatccctataatacattgcttggggaaccggcggtctgtaacaacccttctgtcagcatgtacaacgcacaagaggggcttctgaacaatgccagggatacaagtgtcatggatactctaccactgaatggtaaccatggcaatagttacagcattgccagcggcgaatacctgagcaactgtgtgcaaatcatagaccgtggctataaccataacgagaccgccctagagaaaaagattctgaaggaactcacttccaactatatcccttcttacctgaacaaccatgagcgctccagtgaacagaacaggaatctgatgaacaagctggtgaataaccttggcagtggaagggaagatgatgccattgtcctggatgatgccacctcgtttaaccacgaggagagtttgggcctggaactcattcatgaggaatctgatgctcctttgctgcccccaagagtatactccaccgagaaccaccagccacaccattataccagaaggcggatcccccaagaccacagtgagagctttttccctttgctaaccaacgagcacacagaagatctccagtcaccccatagagactctctctataccagcatgccgacactggctggtgtggccgccacagagagtgttaccaccagcacccagaccgaacccccaccggccaaatgtggtgatgccgaagatgtttactacaaaagcatgccaaacctaggctccagaaaccacgtccatcagctgcatacttactaccagctaggtcgcggcagcagtgatggatttatagttcctccaaacaaagatgggacccctcccgagggaagttcaaaaggaccggctcatttggtcactagtctatagaagatgacacagaaattggaaccaacaaaactgctaacaccttgttgactgttctgagttgatataagcagtggtaataatgtgtgtactcctaaatctttatgctgtcctctaaagacaaacacaaactctcagacttttttttttttaatgggatttttaggtcagcccaggggagaaagataactgctaaaattcccctgtaccccatcctttctt

SEQ ID NO: 325961 - DNA, 4982 bp, Artificial Sequence
  derived and/or modified sequence
tctttttctttttaatttgaagaaaaatcatcagtcttggaatacagaagagaaactagaaatatacgtattttgtttcacatttgaacagtcattcttgaggaatactccatacctgagtagacagccatgtggccatcgcagctactaattttcatgatgctcttagctccaataattcatggtggcaagcacagtgaacgacatcctgcccttgctgctccattgcgacacgctgagcgcagcccaggaggcgctcttccacccagacatctgcttcagcagccagctgcagagcgcaccgctgctcatcgtggacaagggccccgtggagctaccagaggagttcgcggtccaggtgcccaaggagcacagattgcagcgcaagctttcagccgtgccccaattccaatggctgtggtccgcagagagctatcctgtgagagctatcctatagagcttcgctgtccaggaacagacgtcatcatgatagaaagtgccaactatggcaggactgatgacaaaatttgtgactctgaccctgctcagatggagaatatccgatgttatctgccagatgcctataagattatgtctcaaagatgcaataacagaacccagtgtgcagtggtggcaggtcctgatgtttttccagacccgtgtccaggaacctataaataccttgaagtgcagtatgaatgtgtcccttacaaagtggaacaaaaagtttttctttgtcctggactactaaaaggagtataccagagtgaacatttgtttgagtccgaccaccaatctggggcgtggtgcaaagaccctctgcaggcatctgacaagatttattatatgccctggactccctacagaactgataccctgactgagtattcatccaaggatgacttcattgctggaagaccaactacaacctacaagctccctcacagggtggatggcacaggatttgtagtgtatgatggagctttgttcttcaacaaagagcgcaccaggaacatagtaaagtttgatttgcggactaggataaagagtggagaggctatcatagcaaatgccaattaccatgatacctccccttaccgatggggaggcaaatctgacatagacctggcagtagatgagaatgggctatgggtaatctatgcaacagaacaaaacaatggtaaaattgtcattagtcaattgaacccttacaccctacggatcgaaggaacatgggatactgcatatgataaaaggtcagcttccaatgcctttatgatttgtggaattctgtatgtggtcaaatctgtatatgaggatgatgacaatgaggctactggaaataagattgactacatttacaacactgaccaaagcaaggatagtttggtggatgtaccctttcctaattcataccagtacattgcagctgtggattacaaccccagggacaacctactttatgtatggaataactatcacgtcgtgaaatattctttggattttggacctctggatagtagatcagggcaggcacatcatggacaagtttcatacatttctccgccaattcaccttgactctgagctagaaagaccctctgttaaagatatctctaccacaggacctcttggcatgggaagcactaccaccagtaccacccttcggaccacaactttgagcccaggaaggagtaccaccccgtcagtgtcaggaagaagaaaccggagtactagtaccccatctccagctgtcgaggtacttgatgacatgaccacacaccttccatcagcatcgtcccaaatcccagctctcgaagagagctgtgaggctgtggaagcccgagaaatcatgtggtttaagactcgtcaaggacagatagcaaagcagccatgccctgcaggaactataggtgtatcaacttatctatgccttgctcctgatggaatttgggatccccaaggtccagatctcagcaactgttcttctccttgggtcaatcatataacacagaagttgaaatctggtgaaacagctgccaacattgctagagagctggctgaacagacaagaaatcacttgaatgctggggacatcacctactctgtccgggccatggaccagctggtaggcctcctagatgtacagcttcggaacttgaccccaggtggaaaagatagtgctgcccggagtttgaacaagcttcagaaaagagagcgctcttgcagagcctatgtccaggcaatggtcgagacagttaacaacctccttcagccacaagctttgaatgcatggagagacctgactacgagtgatcagctgcgtgcggccaccatgttgcttcatactgtggaggaaagtgcttttgtgctggctgataaccttttgaagactgacattgtcagggagaatacagacaatattaaattggaagttgcaagactgagcacagaaggaaacttagaagacctaaaatttccagaaaacatgggccatggaagcactatccagctgtctgcaaataccttaaagcaaaatggccgaaatggagagatcagagtggcctttgtcctgtataacaacttgggtccttatttatccacggagaatgccagtatgaagttgggaacggaagctttgtccacaaatcattctgttattgtcaattcccctgttattacggcagcaataaacaaagagttcagtaacaaggtttatttggctgatcctgtggtatttactgttaaacatatcaagcagtcagaggaaaatttcaaccctaactgttcattttggagctactccaagcgtacaatgacaggttattggtcaacacaaggctgtcggctcctgacaacaaataagacacatactacatgctcttgtaaccacctaacaaattttgcagtactgatggcacatgtggaagttaagcacagtgatgcggtccatgacctccttctggatgtgatcacgtgggttggaattttgctgtcccttgtttgtctcctgatttgcatcttcacattttgctttttccgggggctccagagtgaccgtaacaccatccacaagaacctctgcatcagtctctttgtagcagagctgctcttcctgattgggatcaaccgaactgaccaaccaattgcctgtgctgttttcgctgccctgttacatttcttcttcttggctgccttcacctggatgttcctggagggggtgcagctttatatcatgctggtggaggtttttgagagtgaacattcacgtaggaaatacttttatctggtcggctatgggatgcctgcactcattgtggctgtgtcagctgcagtagactacaggagttatggaacagataaagtatgttggctccgacttgacacctacttcatttggagttttataggaccagcaactttgataattatgcttaatgtaatcttccttgggattgctttatataaaatgtttcatcatactgctatactgaaacctgaatcaggctgtcttgataacatcaagtcatgggttataggtgcaatagctcttctctgcctattaggattgacctgggcctttggactcatgtatattaatgaaagcacagtcatcatggcctatctcttcaccattttcaattctctacagggaatgtttatatttattttccattgtgtcctacagaagaaggtacgaaaagagtatgggaaatgcctgcgaacacattgctgtagtggcaaaagtacagagagttccattggttcagggaaaacatctggttctcgaactcctggacgctactccacaggctcacagagccgaatccgtagaatgtggaatgacacggttcgaaagcagtcagagtcttcctttattactggagacataaacagttcagcgtcactcaacagaggagccatggctaatcatcttataagcaatgctctgcttcgtccgcatggtactaacaatccctataatacattgcttggggaaccggcggtctgtaacaacccttctgtcagcatgtacaacgcacaagagccctacagagagacaagtatgggagtaaagctaaacattgcatatcaaataggggcttctgaacaatgccagggatacaagtgtcatggatactctaccactgaatggtaaccatggcaatagttacagcattgccagcggcgaatacctgagcaactgtgtgcaaatcatagaccgtggctataaccataacgagaccgccctagagaaaaagattctgaaggaactcacttccaactatatcccttcttacctgaacaaccatgagcgctccagtgaacagaacaggaatctgatgaacaagctggtgaataaccttggcagtggaagggaagatgatgccattgtcctggatgatgccacctcgtttaaccacgaggagagtttgggcctggaactcattcatgaggaatctgatgctcctttgctgcccccaagagtatactccaccgagaaccaccagccacaccattataccagaaggcggatcccccaagaccacagtgagagctttttccctttgctaaccaacgagcacacagaagatctccagtcaccccatagagactctctctataccagcatgccgacactggctggtgtggccgccacagagagtgttaccaccagcacccagaccgaacccccaccggccaaatgtggtgatgccgaagatgtttactacaaaagcatgccaaacctaggctccagaaaccacgtccatcagctgcatacttactaccagctaggtcgcggcagcagtgatggatttatagttcctccaaacaaagatgggacccctcccgagggaagttcaaaaggaccggctcatttggtcactagtctatagaagatgacacagaaattggaaccaacaaaactgctaacaccttgttgactgttctgagttgatataagcagtggtaataatgtgt

SEQ ID NO: 325962 - DNA, 4789 bp, Artificial Sequence
  derived and/or modified sequence
tcttggaatacagaagagaaactagaaatatacgtattttgtttcacatttgaacagtcattcttgaggaatactccatacctgagtagacagccatgtggccatcgcagctactaattttcatgatgctcttagctccaataattcatgctttcagccgtgccccaattccaatggctgtggtccgcagagagctatcctgtgagagctatcctatagagcttcgctgtccaggaacagacgtcatcatgatagaaagtgccaactatggcaggactgatgacaaaatttgtgactctgaccctgctcagatggagaatatccgatgttatctgccagatgcctataagattatgtctcaaagatgcaataacagaacccagtgtgcagtggtggcaggtcctgatgtttttccagacccgtgtccaggaacctataaataccttgaagtgcagtatgaatgtgtcccttacaaagtggaacaaaaagtttttctttgtcctggactactaaaaggagtataccagagtgaacatttgtttgagtccgaccaccaatctggggcgtggtgcaaagaccctctgcaggcatctgacaagatttattatatgccctggactccctacagaactgataccctgactgagtattcatccaaggatgacttcattgctggaagaccaactacaacctacaagctccctcacagggtggatggcacaggatttgtagtgtatgatggagctttgttcttcaacaaagagcgcaccaggaacatagtaaagtttgatttgcggactaggataaagagtggagaggctatcatagcaaatgccaattaccatgatacctccccttaccgatggggaggcaaatctgacatagacctggcagtagatgagaatgggctatgggtaatctatgcaacagaacaaaacaatggtaaaattgtcattagtcaattgaacccttacaccctacggatcgaaggaacatgggatactgcatatgataaaaggtcagcttccaatgcctttatgatttgtggaattctgtatgtggtcaaatctgtatatgaggatgatgacaatgaggctactggaaataagattgactacatttacaacactgaccaaagcaaggatagtttggtggatgtaccctttcctaattcataccagtacattgcagctgtggattacaaccccagggacaacctactttatgtatggaataactatcacgtcgtgaaatattctttggattttggacctctggatagtagatcagggcaggcacatcatggacaagtttcatacatttctccgccaattcaccttgactctgagctagaaagaccctctgttaaagatatctctaccacaggacctcttggcatgggaagcactaccaccagtaccacccttcggaccacaactttgagcccaggaaggagtaccaccccgtcagtgtcaggaagaagaaaccggagtactagtaccccatctccagctgtcgaggtacttgatgacatgaccacacaccttccatcagcatcgtcccaaatcccagctctcgaagagagctgtgaggctgtggaagcccgagaaatcatgtggtttaagactcgtcaaggacagatagcaaagcagccatgccctgcaggaactataggtgtatcaacttatctatgccttgctcctgatggaatttgggatccccaaggtccagatctcagcaactgttcttctccttgggtcaatcatataacacagaagttgaaatctggtgaaacagctgccaacattgctagagagctggctgaacagacaagaaatcacttgaatgctggggacatcacctactctgtccgggccatggaccagctggtaggcctcctagatgtacagcttcggaacttgaccccaggtggaaaagatagtgctgcccggagtttgaacaagcttcagaaaagagagcgctcttgcagagcctatgtccaggcaatggtcgagacagttaacaacctccttcagccacaagctttgaatgcatggagagacctgactacgagtgatcagctgcgtgcggccaccatgttgcttcatactgtggaggaaagtgcttttgtgctggctgataaccttttgaagactgacattgtcagggagaatacagacaatattaaattggaagttgcaagactgagcacagaaggaaacttagaagacctaaaatttccagaaaacatgggccatggaagcactatccagctgtctgcaaataccttaaagcaaaatggccgaaatggagagatcagagtggcctttgtcctgtataacaacttgggtccttatttatccacggagaatgccagtatgaagttgggaacggaagctttgtccacaaatcattctgttattgtcaattcccctgttattacggcagcaataaacaaagagttcagtaacaaggtttatttggctgatcctgtggtatttactgttaaacatatcaagcagtcagaggaaaatttcaaccctaactgttcattttggagctactccaagcgtacaatgacaggttattggtcaacacaaggctgtcggctcctgacaacaaataagacacatactacatgctcttgtaaccacctaacaaattttgcagtactgatggcacatgtggaagttaagcacagtgatgcggtccatgacctccttctggatgtgatcacgtgggttggaattttgctgtcccttgtttgtctcctgatttgcatcttcacattttgctttttccgggggctccagagtgaccgtaacaccatccacaagaacctctgcatcagtctctttgtagcagagctgctcttcctgattgggatcaaccgaactgaccaaccaattgcctgtgctgttttcgctgccctgttacatttcttcttcttggctgccttcacctggatgttcctggagggggtgcagctttatatcatgctggtggaggtttttgagagtgaacattcacgtaggaaatacttttatctggtcggctatgggatgcctgcactcattgtggctgtgtcagctgcagtagactacaggagttatggaacagataaagtatgttggctccgacttgacacctacttcatttggagttttataggaccagcaactttgataattatgcttaatgtaatcttccttgggattgctttatataaaatgtttcatcatactgctatactgaaacctgaatcaggctgtcttgataacatcaagtcatgggttataggtgcaatagctcttctctgcctattaggattgacctgggcctttggactcatgtatattaatgaaagcacagtcatcatggcctatctcttcaccattttcaattctctacagggaatgtttatatttattttccattgtgtcctacagaagaaggtacgaaaagagtatgggaaatgcctgcgaacacattgctgtagtggcaaaagtacagagagttccattggttcagggaaaacatctggttctcgaactcctggacgctactccacaggctcacagagccgaatccgtagaatgtggaatgacacggttcgaaagcagtcagagtcttcctttattactggagacataaacagttcagcgtcactcaacagaggagccatggctaatcatcttataagcaatgctctgcttcgtccgcatggtactaacaatccctataatacattgcttggggaaccggcggtctgtaacaacccttctgtcagcatgtacaacgcacaagagccctacagagagacaagtatgggagtaaagctaaacattgcatatcaaataggggcttctgaacaatgccagggatacaagtgtcatggatactctaccactgaatggtaaccatggcaatagttacagcattgccagcggcgaatacctgagcaactgtgtgcaaatcatagaccgtggctataaccataacgagaccgccctagagaaaaagattctgaaggaactcacttccaactatatcccttcttacctgaacaaccatgagcgctccagtgaacagaacaggaatctgatgaacaagctggtgaataaccttggcagtggaagggaagatgatgccattgtcctggatgatgccacctcgtttaaccacgaggagagtttgggcctggaactcattcatgaggaatctgatgctcctttgctgcccccaagagtatactccaccgagaaccaccagccacaccattataccagaaggcggatcccccaagaccacagtgagagctttttccctttgctaaccaacgagcacacagaagatctccagtcaccccatagagactctctctataccagcatgccgacactggctggtgtggccgccacagagagtgttaccaccagcacccagaccgaacccccaccggccaaatgtggtgatgccgaagatgtttactacaaaagcatgccaaacctaggctccagaaaccacgtccatcagctgcatacttactaccagctaggtcgcggcagcagtgatggatttatagttcctccaaacaaagatgggacccctcccgagggaagttcaaaaggaccggctcatttggtcactagtctatagaagatgacacagaaattggaaccaacaaaactgctaacaccttgttgactgttctgagttgatataagcagtggtaataatgtgtgtactcctaaatctttatgctgtcctctaaagacaaacacaaact

SEQ ID NO: 325963 - DNA, 4731 bp, Artificial Sequence
  derived and/or modified sequence
atgtggccatcgcagctactaattttcatgatgctcttagctccaataattcatgctttcagccgtgccccaattccaatggctgtggtccgcagagagctatcctgtgagagctatcctatagagcttcgctgtccaggaacagacgtcatcatgatagaaagtgccaactatggcaggactgatgacaaaatttgtgactctgaccctgctcagatggagaatatccgatgttatctgccagatgcctataagattatgtctcaaagatgcaataacagaacccagtgtgcagtggtggcaggtcctgatgtttttccagacccgtgtccaggaacctataaataccttgaagtgcagtatgaatgtgtcccttacaaagtggaacaaaaagtttttctttgtcctggactactaaaaggagtataccagagtgaacatttgtttgagtccgaccaccaatctggggcgtggtgcaaagaccctctgcaggcatctgacaagatttattatatgccctggactccctacagaactgataccctgactgagtattcatccaaggatgacttcattgctggaagaccaactacaacctacaagctccctcacagggtggatggcacaggatttgtagtgtatgatggagctttgttcttcaacaaagagcgcaccaggaacatagtaaagtttgatttgcggactaggataaagagtggagaggctatcatagcaaatgccaattaccatgatacctccccttaccgatggggaggcaaatctgacatagacctggcagtagatgagaatgggctatgggtaatctatgcaacagaacaaaacaatggtaaaattgtcattagtcaattgaacccttacaccctacggatcgaaggaacatgggatactgcatatgataaaaggtcagcttccaatgcctttatgatttgtggaattctgtatgtggtcaaatctgtatatgaggatgatgacaatgaggctactggaaataagattgactacatttacaacactgaccaaagcaaggatagtttggtggatgtaccctttcctaattcataccagtacattgcagctgtggattacaaccccagggacaacctactttatgtatggaataactatcacgtcgtgaaatattctttggattttggacctctggatagtagatcagggcaggcacatcatggacaagtttcatacatttctccgccaattcaccttgactctgagctagaaagaccctctgttaaagatatctctaccacaggacctcttggcatgggaagcactaccaccagtaccacccttcggaccacaactttgagcccaggaaggagtaccaccccgtcagtgtcaggaagaagaaaccggagtactagtaccccatctccagctgtcgaggtacttgatgacatgaccacacaccttccatcagcatcgtcccaaatcccagctctcgaagagagctgtgaggctgtggaagcccgagaaatcatgtggtttaagactcgtcaaggacagatagcaaagcagccatgccctgcaggaactataggtgtatcaacttatctatgccttgctcctgatggaatttgggatccccaaggtccagatctcagcaactgttcttctccttgggtcaatcatataacacagaagttgaaatctggtgaaacagctgccaacattgctagagagctggctgaacagacaagaaatcacttgaatgctggggacatcacctactctgtccgggccatggaccagctggtaggcctcctagatgtacagcttcggaacttgaccccaggtggaaaagatagtgctgcccggagtttgaacaagcttcagaaaagagagcgctcttgcagagcctatgtccaggcaatggtcgagacagttaacaacctccttcagccacaagctttgaatgcatggagagacctgactacgagtgatcagctgcgtgcggccaccatgttgcttcatactgtggaggaaagtgcttttgtgctggctgataaccttttgaagactgacattgtcagggagaatacagacaatattaaattggaagttgcaagactgagcacagaaggaaacttagaagacctaaaatttccagaaaacatgggccatggaagcactatccagctgtctgcaaataccttaaagcaaaatggccgaaatggagagatcagagtggcctttgtcctgtataacaacttgggtccttatttatccacggagaatgccagtatgaagttgggaacggaagctttgtccacaaatcattctgttattgtcaattcccctgttattacggcagcaataaacaaagagttcagtaacaaggtttatttggctgatcctgtggtatttactgttaaacatatcaagcagtcagaggaaaatttcaaccctaactgttcattttggagctactccaagcgtacaatgacaggttattggtcaacacaaggctgtcggctcctgacaacaaataagacacatactacatgctcttgtaaccacctaacaaattttgcagtactgatggcacatgtggaagttaagcacagtgatgcggtccatgacctccttctggatgtgatcacgtgggttggaattttgctgtcccttgtttgtctcctgatttgcatcttcacattttgctttttccgggggctccagagtgaccgtaacaccatccacaagaacctctgcatcagtctctttgtagcagagctgctcttcctgattgggatcaaccgaactgaccaaccaattgcctgtgctgttttcgctgccctgttacatttcttcttcttggctgccttcacctggatgttcctggagggggtgcagctttatatcatgctggtggaggtttttgagagtgaacattcacgtaggaaatacttttatctggtcggctatgggatgcctgcactcattgtggctgtgtcagctgcagtagactacaggagttatggaacagataaagtatgttggctccgacttgacacctacttcatttggagttttataggaccagcaactttgataattatgcttaatgtaatcttccttgggattgctttatataaaatgtttcatcatactgctatactgaaacctgaatcaggctgtcttgataacatcaagtcatgggttataggtgcaatagctcttctctgcctattaggattgacctgggcctttggactcatgtatattaatgaaagcacagtcatcatggcctatctcttcaccattttcaattctctacagggaatgtttatatttattttccattgtgtcctacagaagaaggtacgaaaagagtatgggaaatgcctgcgaacacattgctgtagtggcaaaagtacagagagttccattggttcagggaaaacatctggttctcgaactcctggacgctactccacaggctcacagagccgaatccgtagaatgtggaatgacacggttcgaaagcagtcagagtcttcctttattactggagacataaacagttcagcgtcactcaacagaggagccatggctaatcatcttataagcaatgctctgcttcgtccgcatggtactaacaatccctataatacattgcttggggaaccggcggtctgtaacaacccttctgtcagcatgtacaacgcacaagaggggcttctgaacaatgccagggatacaagtgtcatggatactctaccactgaatggtaaccatggcaatagttacagcattgccagcggcgaatacctgagcaactgtgtgcaaatcatagaccgtggctataaccataacgagaccgccctagagaaaaagattctgaaggaactcacttccaactatatcccttcttacctgaacaaccatgagcgctccagtgaacagaacaggaatctgatgaacaagctggtgaataaccttggcagtggaagggaagatgatgccattgtcctggatgatgccacctcgtttaaccacgaggagagtttgggcctggaactcattcatgaggaatctgatgctcctttgctgcccccaagagtatactccaccgagaaccaccagccacaccattataccagaaggcggatcccccaagaccacagtgagagctttttccctttgctaaccaacgagcacacagaagatctccagtcaccccatagagactctctctataccagcatgccgacactggctggtgtggccgccacagagagtgttaccaccagcacccagaccgaacccccaccggccaaatgtggtgatgccgaagatgtttactacaaaagcatgccaaacctaggctccagaaaccacgtccatcagctgcatacttactaccagctaggtcgcggcagcagtgatggatttatagttcctccaaacaaagatgggacccctcccgagggaagttcaaaaggaccggctcatttggtcactagtctatagaagatgacacagaaattggaaccaacaaaactgctaacaccttgttgactgttctgagttgatataagcagtggtaataatgtgtgtactcctaaatctttatgctgtcctctaaagacaaacacaaactctcagacttttttttttttaatgggatttttaggtcagcccaggggagaaagataactgctaaaattcccctgtaccccatcctttctt

SEQ ID NO: 325964 - DNA, 4716 bp, Artificial Sequence
  derived and/or modified sequence
atgtggcccagccagctgctgatcttcatgatgctgctggcccccatcatccacggcggcaagcacagcgagcggcacccagccctggccgcccccctgcggcatgctgagaggagccctgggggcgccctgcccccaagacacctgctgcagcagcctgctgctgagaggacagctgcccaccggggccagggccccaggggggccacccggggcgtgcggggccctggggcccagggcgcccagattgctgcccaggccttcagccgggcccccatccccatggctgtggtgagaagagagctgagctgtgagagctaccccatcgagctgcgctgccccggcacagatgtgatcatgattgaaagtgccaactacggccgcacagatgacaagatctgtgacagcgaccctgcccagatggagaacatccgctgctacctgcctgatgcctacaagatcatgagccagcgctgcaacaacagaacccagtgtgctgtggtggccggcccagatgtgtttcctgacccctgccccggcacctacaagtacctggaggtgcagtatgaatgtgtgccctacaaggtggagcagaaggtgttcctgtgccccggcctgctgaagggcgtgtaccagagcgagcacctgtttgaaagtgaccaccagagcggggcctggtgcaaggaccccctgcaggccagtgacaagatctactacatgccctggaccccctacagaacagacaccctgacagagtacagcagcaaggatgacttcatcgccggccggcccaccaccacctacaagctgccccaccgggtggatggcactggatttgtggtgtatgatggagccctcttcttcaacaaggagaggaccaggaacatcgtgaagtttgacctgcggacccgcatcaagtctggagaggccatcatcgccaatgccaactaccatgacaccagcccctaccgctggggcggcaagagtgacatcgacctggccgtggatgaaaatggcctgtgggtgatctatgccacagagcagaacaacgggaagatcgtcatcagccagctgaacccctacaccctgagaattgagggcacctgggacacagcctatgacaagaggtctgccagcaatgccttcatgatctgtggcatcctgtatgtggtgaagtctgtgtatgaagatgatgacaatgaggccactggaaacaagattgactacatctacaacacagaccagagcaaggacagcctggtggatgtgcccttccccaacagctaccagtacatcgctgctgtggactacaacccccgggacaacctgctgtatgtgtggaacaactaccacgtggtgaagtacagcctggactttggccccctggacagccgcagcggccaggcccaccacggccaggtgtcctacatcagcccccccatccacctggacagcgagctggagcggcccagcgtgaaggacatcagcaccaccggccccctgggcatgggcagcaccaccaccagcaccaccctgcggaccaccaccctgagccctggccgcagcaccacccccagcgtgtctggaagaagaaacagaagcaccagcacccccagccctgctgtggaggtgctggatgacatgaccacccacctgcccagcgccagcagccagatcccagccctggaggagagctgtgaggccgtggaggcccgggagatcatgtggttcaagacccggcagggccagatcgccaagcagccctgcccagctggcaccatcggcgtgtccacctacctgtgcctggccccagatggcatctgggacccccagggccctgacctgagcaactgcagcagcccctgggtgaaccacatcacccagaagctgaagagcggggagacagctgccaacatcgcccgggagctggccgagcagaccaggaaccacctgaatgctggggacatcacctacagcgtgcgggccatggaccagctggtgggcctgctggatgtgcagctgaggaacctgaccccaggcggcaaggacagcgctgcccggagcctgaacaagctgcagaagcgggagaggagctgccgggcctacgtgcaggccatggtggagaccgtgaacaacctgctgcagccccaggccctgaatgcctggagggacctgaccaccagtgaccagctgcgggccgccaccatgctgctgcacacagtggaggagagcgcctttgtgctggccgacaacctgctgaagacagacatcgtgcgggagaacacagacaacatcaagctggaggtggcccggctgagcacagagggcaacctggaggacctgaagtttcctgagaacatgggccacggcagcaccatccagctgagcgccaacaccctgaagcagaatggaagaaatggagagatccgggtggcctttgtgctgtacaacaacctgggcccctacctgagcacagaaaatgcctccatgaagctgggcacagaggccctgagcaccaaccacagcgtcatcgtgaacagccctgtgatcacagctgccatcaacaaggagttcagcaacaaggtgtacctggccgaccctgtggtgttcaccgtgaagcacatcaagcagagcgaggagaacttcaaccccaactgcagcttctggagctacagcaagaggaccatgacaggctactggagcacccagggctgccgcctgctgaccaccaacaagacccacaccacctgcagctgcaaccacctgaccaactttgctgtgctgatggcccacgtggaggtgaagcacagtgatgctgtgcatgacctgctgctggatgtgatcacctgggtgggcatcctgctgagcctggtgtgcctgctgatctgcatcttcaccttctgcttcttccggggcctgcagagcgacaggaacaccatccacaagaacctgtgcatcagcctgtttgtggccgagctgctcttcctgattggcatcaacagaacagaccagcccatcgcctgtgctgtgtttgctgccctgctgcacttcttcttcctggccgccttcacctggatgttcctggagggcgtgcagctgtacatcatgctggtggaggtgtttgaaagtgagcacagcaggaggaagtacttctacctggtgggctacggcatgcctgccctgattgtggccgtgtctgctgctgtggactaccgctcctatggaacagacaaggtgtgctggctgcggctggacacctacttcatctggagcttcatcggccctgccaccctcatcatcatgctgaatgtcatcttcctgggcatcgccctgtacaagatgttccaccacacagccatcctgaagccagagagcggctgcctggacaacatcaagtcctgggtgattggagccatcgccctgctgtgcctgctgggcctgacctgggccttcggcctgatgtacatcaatgaaagcaccgtcatcatggcctacctgttcaccatcttcaacagcctgcagggcatgttcatcttcatcttccactgtgtgctgcagaagaaggtgaggaaggagtatggcaagtgcctgcggacccactgctgcagcggcaagagcacagagagcagcatcggcagcggcaagaccagcggcagcaggaccccaggccgctacagcacaggcagccagagccgcatccggaggatgtggaatgacacagtgaggaagcagagcgagagcagcttcatcactggagacatcaacagcagcgccagcctgaacagaggagccatggccaaccacctgatcagcaatgccctgctgcggccccacggcaccaacaacccctacaacaccctgctgggggagcctgctgtgtgcaacaaccccagcgtgtccatgtacaatgcccaggagggcctgctgaacaatgcccgggacacctctgtgatggacaccctgcccctgaatggaaatcatggcaacagctacagcatcgccagcggggagtacctgagcaactgtgtgcagatcatcgaccggggctacaaccacaatgaaacagccctggagaagaagatcctgaaggagctgaccagcaactacatccccagctacctgaacaaccacgagaggagcagcgagcagaacagaaacctgatgaacaagctggtgaacaacctgggcagcggccgggaggatgatgccatcgtgctggatgatgccaccagcttcaaccacgaggagagcctgggcctggagctgatccacgaggagagtgatgcccccctgctgcccccccgggtgtacagcacagagaaccaccagccccaccactacacccggcggcgcatcccccaggaccacagcgagagcttcttccccctgctgaccaatgagcacacagaggacctgcagagcccccaccgggacagcctgtacacctccatgcccaccctggccggcgtggccgccacagaatctgtgaccaccagcacccagacagagcccccaccagccaagtgtggagatgctgaagatgtgtactacaagtccatgcccaacctgggcagcaggaaccacgtgcaccagctgcacacctactaccagctgggccggggcagcagtgatggcttcatcgtgccccccaacaaggatggcaccccacctgagggcagcagcaagggccctgcccacctggtgaccagcctgtag

SEQ ID NO: 325965 - DNA, 4029 bp, Artificial Sequence
  derived and/or modified sequence
atgtggcccagccagctgctgatcttcatgatgctgctggcccccatcatccacggcggcaagcacagcgagcggcacccagccctggccgcccccctgcggcatgctgagaggagccctgggggcgccctgcccccaagacacctgctgcagcagcctgctgctgagaggacagctgcccaccggggccagggccccaggggggccacccggggcgtgcggggccctggggcccagggcgcccagattgctgcccaggccttcagccgggcccccatccccatggctgtggtgagaagagagctgagctgtgagagctaccccatcgagctgcgctgccccggcacagatgtgatcatgattgaaagtgccaactacggccgcacagatgacaagatctgtgacagcgaccctgcccagatggagaacatccgctgctacctgcctgatgcctacaagatcatgagccagcgctgcaacaacagaacccagtgtgctgtggtggccggcccagatgtgtttcctgacccctgccccggcacctacaagtacctggaggtgcagtatgaatgtgtgccctacaaggtggagcagaaggtgttcctgtgccccggcctgctgaagggcgtgtaccagagcgagcacctgtttgaaagtgaccaccagagcggggcctggtgcaaggaccccctgcaggccagtgacaagatctactacatgccctggaccccctacagaacagacaccctgacagagtacagcagcaaggatgacttcatcgccggccggcccaccaccacctacaagctgccccaccgggtggatggcactggatttgtggtgtatgatggagccctcttcttcaacaaggagaggaccaggaacatcgtgaagtttgacctgcggacccgcatcaagtctggagaggccatcatcgccaatgccaactaccatgacaccagcccctaccgctggggcggcaagagtgacatcgacctggccgtggatgaaaatggcctgtgggtgatctatgccacagagcagaacaacgggaagatcgtcatcagccagctgaacccctacaccctgagaattgagggcacctgggacacagcctatgacaagaggtctgccagcaatgccttcatgatctgtggcatcctgtatgtggtgaagtctgtgtatgaagatgatgacaatgaggccactggaaacaagattgactacatctacaacacagaccagagcaaggacagcctggtggatgtgcccttccccaacagctaccagtacatcgctgctgtggactacaacccccgggacaacctgctgtatgtgtggaacaactaccacgtggtgaagtacagcctggactttggccccctggacagccgcagcggccaggcccaccacggccaggtgtcctacatcagcccccccatccacctggacagcgagctggagcggcccagcgtgaaggacatcagcaccaccggccccctgggcatgggcagcaccaccaccagcaccaccctgcggaccaccaccctgagccctggccgcagcaccacccccagcgtgtctggaagaagaaacagaagcaccagcacccccagccctgctgtggaggtgctggatgacatgaccacccacctgcccagcgccagcagccagatcccagccctggaggagagctgtgaggccgtggaggcccgggagatcatgtggttcaagacccggcagggccagatcgccaagcagccctgcccagctggcaccatcggcgtgtccacctacctgtgcctggccccagatggcatctgggacccccagggccctgacctgagcaactgcagcagcccctgggtgaaccacatcacccagaagctgaagagcggggagacagctgccaacatcgcccgggagctggccgagcagaccaggaaccacctgaatgctggggacatcacctacagcgtgcgggccatggaccagctggtgggcctgctggatgtgcagctgaggaacctgaccccaggcggcaaggacagcgctgcccggagcctgaacaagctgcagaagcgggagaggagctgccgggcctacgtgcaggccatggtggagaccgtgaacaacctgctgcagccccaggccctgaatgcctggagggacctgaccaccagtgaccagctgcgggccgccaccatgctgctgcacacagtggaggagagcgcctttgtgctggccgacaacctgctgaagacagacatcgtgcgggagaacacagacaacatcaagctggaggtggcccggctgagcacagagggcaacctggaggacctgaagtttcctgagaacatgggccacggcagcaccatccagctgagcgccaacaccctgaagcagaatggaagaaatggagagatccgggtggcctttgtgctgtacaacaacctgggcccctacctgagcacagaaaatgcctccatgaagctgggcacagaggccctgagcaccaaccacagcgtcatcgtgaacagccctgtgatcacagctgccatcaacaaggagttcagcaacaaggtgtacctggccgaccctgtggtgttcaccgtgaagcacatcaagcagagcgaggagaacttcaaccccaactgcagcttctggagctacagcaagaggaccatgacaggctactggagcacccagggctgccgcctgctgaccaccaacaagacccacaccacctgcagctgcaaccacctgaccaactttgctgtgctgatggcccacgtggaggtgaagcacagtgatgctgtgcatgacctgctgctggatgtgatcacctgggtgggcatcctgctgagcctggtgtgcctgctgatctgcatcttcaccttctgcttcttccggggcctgcagagcgacaggaacaccatccacaagaacctgtgcatcagcctgtttgtggccgagctgctcttcctgattggcatcaacagaacagaccagcccatcgcctgtgctgtgtttgctgccctgctgcacttcttcttcctggccgccttcacctggatgttcctggagggcgtgcagctgtacatcatgctggtggaggtgtttgaaagtgagcacagcaggaggaagtacttctacctggtgggctacggcatgcctgccctgattgtggccgtgtctgctgctgtggactaccgctcctatggaacagacaaggtgtgctggctgcggctggacacctacttcatctggagcttcatcggccctgccaccctcatcatcatgctgaatgtcatcttcctgggcatcgccctgtacaagatgttccaccacacagccatcctgaagccagagagcggctgcctggacaacatcaagtcctgggtgattggagccatcgccctgctgtgcctgctgggcctgacctgggccttcggcctgatgtacatcaatgaaagcaccgtcatcatggcctacctgttcaccatcttcaacagcctgcagggcatgttcatcttcatcttccactgtgtgctgcagaagaaggtgaggaaggagtatggcaagtgcctgcggacccactgctgcagcggcaagagcacagagagcagcatcggcagcggcaagaccagcggcagcaggaccccaggccgctacagcacaggcagccagagccgcatccggaggatgtggaatgacacagtgaggaagcagagcgagagcagcttcatcactggagacatcaacagcagcgccagcctgaacagaggagccatggccaaccacctgatcagcaatgccctgctgcggccccacggcaccaacaacccctacaacaccctgctgggggagcctgctgtgtgcaacaaccccagcgtgtccatgtacaatgcccaggagccctaccgggagacctccatgggcgtgaagctgaacatcgcctaccagattggagccagcgagcagtgccagggctacaagtgccacggctacagcaccacagagtggtag

SEQ ID NO: 325966 - DNA, 3825 bp, Artificial Sequence
  derived and/or modified sequence
atgtggcccagccagctgctgatcttcatgatgctgctggcccccatcatccacgccttcagccgggcccccatccccatggctgtggtgagaagagagctgagctgtgagagctaccccatcgagctgcgctgccccggcacagatgtgatcatgattgaaagtgccaactacggccgcacagatgacaagatctgtgacagcgaccctgcccagatggagaacatccgctgctacctgcctgatgcctacaagatcatgagccagcgctgcaacaacagaacccagtgtgctgtggtggccggcccagatgtgtttcctgacccctgccccggcacctacaagtacctggaggtgcagtatgaatgtgtgccctacaaggtggagcagaaggtgttcctgtgccccggcctgctgaagggcgtgtaccagagcgagcacctgtttgaaagtgaccaccagagcggggcctggtgcaaggaccccctgcaggccagtgacaagatctactacatgccctggaccccctacagaacagacaccctgacagagtacagcagcaaggatgacttcatcgccggccggcccaccaccacctacaagctgccccaccgggtggatggcactggatttgtggtgtatgatggagccctcttcttcaacaaggagaggaccaggaacatcgtgaagtttgacctgcggacccgcatcaagtctggagaggccatcatcgccaatgccaactaccatgacaccagcccctaccgctggggcggcaagagtgacatcgacctggccgtggatgaaaatggcctgtgggtgatctatgccacagagcagaacaacgggaagatcgtcatcagccagctgaacccctacaccctgagaattgagggcacctgggacacagcctatgacaagaggtctgccagcaatgccttcatgatctgtggcatcctgtatgtggtgaagtctgtgtatgaagatgatgacaatgaggccactggaaacaagattgactacatctacaacacagaccagagcaaggacagcctggtggatgtgcccttccccaacagctaccagtacatcgctgctgtggactacaacccccgggacaacctgctgtatgtgtggaacaactaccacgtggtgaagtacagcctggactttggccccctggacagccgcagcggccaggcccaccacggccaggtgtcctacatcagcccccccatccacctggacagcgagctggagcggcccagcgtgaaggacatcagcaccaccggccccctgggcatgggcagcaccaccaccagcaccaccctgcggaccaccaccctgagccctggccgcagcaccacccccagcgtgtctggaagaagaaacagaagcaccagcacccccagccctgctgtggaggtgctggatgacatgaccacccacctgcccagcgccagcagccagatcccagccctggaggagagctgtgaggccgtggaggcccgggagatcatgtggttcaagacccggcagggccagatcgccaagcagccctgcccagctggcaccatcggcgtgtccacctacctgtgcctggccccagatggcatctgggacccccagggccctgacctgagcaactgcagcagcccctgggtgaaccacatcacccagaagctgaagagcggggagacagctgccaacatcgcccgggagctggccgagcagaccaggaaccacctgaatgctggggacatcacctacagcgtgcgggccatggaccagctggtgggcctgctggatgtgcagctgaggaacctgaccccaggcggcaaggacagcgctgcccggagcctgaacaagctgcagaagcgggagaggagctgccgggcctacgtgcaggccatggtggagaccgtgaacaacctgctgcagccccaggccctgaatgcctggagggacctgaccaccagtgaccagctgcgggccgccaccatgctgctgcacacagtggaggagagcgcctttgtgctggccgacaacctgctgaagacagacatcgtgcgggagaacacagacaacatcaagctggaggtggcccggctgagcacagagggcaacctggaggacctgaagtttcctgagaacatgggccacggcagcaccatccagctgagcgccaacaccctgaagcagaatggaagaaatggagagatccgggtggcctttgtgctgtacaacaacctgggcccctacctgagcacagaaaatgcctccatgaagctgggcacagaggccctgagcaccaaccacagcgtcatcgtgaacagccctgtgatcacagctgccatcaacaaggagttcagcaacaaggtgtacctggccgaccctgtggtgttcaccgtgaagcacatcaagcagagcgaggagaacttcaaccccaactgcagcttctggagctacagcaagaggaccatgacaggctactggagcacccagggctgccgcctgctgaccaccaacaagacccacaccacctgcagctgcaaccacctgaccaactttgctgtgctgatggcccacgtggaggtgaagcacagtgatgctgtgcatgacctgctgctggatgtgatcacctgggtgggcatcctgctgagcctggtgtgcctgctgatctgcatcttcaccttctgcttcttccggggcctgcagagcgacaggaacaccatccacaagaacctgtgcatcagcctgtttgtggccgagctgctcttcctgattggcatcaacagaacagaccagcccatcgcctgtgctgtgtttgctgccctgctgcacttcttcttcctggccgccttcacctggatgttcctggagggcgtgcagctgtacatcatgctggtggaggtgtttgaaagtgagcacagcaggaggaagtacttctacctggtgggctacggcatgcctgccctgattgtggccgtgtctgctgctgtggactaccgctcctatggaacagacaaggtgtgctggctgcggctggacacctacttcatctggagcttcatcggccctgccaccctcatcatcatgctgaatgtcatcttcctgggcatcgccctgtacaagatgttccaccacacagccatcctgaagccagagagcggctgcctggacaacatcaagtcctgggtgattggagccatcgccctgctgtgcctgctgggcctgacctgggccttcggcctgatgtacatcaatgaaagcaccgtcatcatggcctacctgttcaccatcttcaacagcctgcagggcatgttcatcttcatcttccactgtgtgctgcagaagaaggtgaggaaggagtatggcaagtgcctgcggacccactgctgcagcggcaagagcacagagagcagcatcggcagcggcaagaccagcggcagcaggaccccaggccgctacagcacaggcagccagagccgcatccggaggatgtggaatgacacagtgaggaagcagagcgagagcagcttcatcactggagacatcaacagcagcgccagcctgaacagaggagccatggccaaccacctgatcagcaatgccctgctgcggccccacggcaccaacaacccctacaacaccctgctgggggagcctgctgtgtgcaacaaccccagcgtgtccatgtacaatgcccaggagccctaccgggagacctccatgggcgtgaagctgaacatcgcctaccagattggagccagcgagcagtgccagggctacaagtgccacggctacagcaccacagagtggtag

SEQ ID NO: 325967 - DNA, 4512 bp, Artificial Sequence
  derived and/or modified sequence
atgtggcccagccagctgctgatcttcatgatgctgctggcccccatcatccacgccttcagccgggcccccatccccatggctgtggtgagaagagagctgagctgtgagagctaccccatcgagctgcgctgccccggcacagatgtgatcatgattgaaagtgccaactacggccgcacagatgacaagatctgtgacagcgaccctgcccagatggagaacatccgctgctacctgcctgatgcctacaagatcatgagccagcgctgcaacaacagaacccagtgtgctgtggtggccggcccagatgtgtttcctgacccctgccccggcacctacaagtacctggaggtgcagtatgaatgtgtgccctacaaggtggagcagaaggtgttcctgtgccccggcctgctgaagggcgtgtaccagagcgagcacctgtttgaaagtgaccaccagagcggggcctggtgcaaggaccccctgcaggccagtgacaagatctactacatgccctggaccccctacagaacagacaccctgacagagtacagcagcaaggatgacttcatcgccggccggcccaccaccacctacaagctgccccaccgggtggatggcactggatttgtggtgtatgatggagccctcttcttcaacaaggagaggaccaggaacatcgtgaagtttgacctgcggacccgcatcaagtctggagaggccatcatcgccaatgccaactaccatgacaccagcccctaccgctggggcggcaagagtgacatcgacctggccgtggatgaaaatggcctgtgggtgatctatgccacagagcagaacaacgggaagatcgtcatcagccagctgaacccctacaccctgagaattgagggcacctgggacacagcctatgacaagaggtctgccagcaatgccttcatgatctgtggcatcctgtatgtggtgaagtctgtgtatgaagatgatgacaatgaggccactggaaacaagattgactacatctacaacacagaccagagcaaggacagcctggtggatgtgcccttccccaacagctaccagtacatcgctgctgtggactacaacccccgggacaacctgctgtatgtgtggaacaactaccacgtggtgaagtacagcctggactttggccccctggacagccgcagcggccaggcccaccacggccaggtgtcctacatcagcccccccatccacctggacagcgagctggagcggcccagcgtgaaggacatcagcaccaccggccccctgggcatgggcagcaccaccaccagcaccaccctgcggaccaccaccctgagccctggccgcagcaccacccccagcgtgtctggaagaagaaacagaagcaccagcacccccagccctgctgtggaggtgctggatgacatgaccacccacctgcccagcgccagcagccagatcccagccctggaggagagctgtgaggccgtggaggcccgggagatcatgtggttcaagacccggcagggccagatcgccaagcagccctgcccagctggcaccatcggcgtgtccacctacctgtgcctggccccagatggcatctgggacccccagggccctgacctgagcaactgcagcagcccctgggtgaaccacatcacccagaagctgaagagcggggagacagctgccaacatcgcccgggagctggccgagcagaccaggaaccacctgaatgctggggacatcacctacagcgtgcgggccatggaccagctggtgggcctgctggatgtgcagctgaggaacctgaccccaggcggcaaggacagcgctgcccggagcctgaacaagctgcagaagcgggagaggagctgccgggcctacgtgcaggccatggtggagaccgtgaacaacctgctgcagccccaggccctgaatgcctggagggacctgaccaccagtgaccagctgcgggccgccaccatgctgctgcacacagtggaggagagcgcctttgtgctggccgacaacctgctgaagacagacatcgtgcgggagaacacagacaacatcaagctggaggtggcccggctgagcacagagggcaacctggaggacctgaagtttcctgagaacatgggccacggcagcaccatccagctgagcgccaacaccctgaagcagaatggaagaaatggagagatccgggtggcctttgtgctgtacaacaacctgggcccctacctgagcacagaaaatgcctccatgaagctgggcacagaggccctgagcaccaaccacagcgtcatcgtgaacagccctgtgatcacagctgccatcaacaaggagttcagcaacaaggtgtacctggccgaccctgtggtgttcaccgtgaagcacatcaagcagagcgaggagaacttcaaccccaactgcagcttctggagctacagcaagaggaccatgacaggctactggagcacccagggctgccgcctgctgaccaccaacaagacccacaccacctgcagctgcaaccacctgaccaactttgctgtgctgatggcccacgtggaggtgaagcacagtgatgctgtgcatgacctgctgctggatgtgatcacctgggtgggcatcctgctgagcctggtgtgcctgctgatctgcatcttcaccttctgcttcttccggggcctgcagagcgacaggaacaccatccacaagaacctgtgcatcagcctgtttgtggccgagctgctcttcctgattggcatcaacagaacagaccagcccatcgcctgtgctgtgtttgctgccctgctgcacttcttcttcctggccgccttcacctggatgttcctggagggcgtgcagctgtacatcatgctggtggaggtgtttgaaagtgagcacagcaggaggaagtacttctacctggtgggctacggcatgcctgccctgattgtggccgtgtctgctgctgtggactaccgctcctatggaacagacaaggtgtgctggctgcggctggacacctacttcatctggagcttcatcggccctgccaccctcatcatcatgctgaatgtcatcttcctgggcatcgccctgtacaagatgttccaccacacagccatcctgaagccagagagcggctgcctggacaacatcaagtcctgggtgattggagccatcgccctgctgtgcctgctgggcctgacctgggccttcggcctgatgtacatcaatgaaagcaccgtcatcatggcctacctgttcaccatcttcaacagcctgcagggcatgttcatcttcatcttccactgtgtgctgcagaagaaggtgaggaaggagtatggcaagtgcctgcggacccactgctgcagcggcaagagcacagagagcagcatcggcagcggcaagaccagcggcagcaggaccccaggccgctacagcacaggcagccagagccgcatccggaggatgtggaatgacacagtgaggaagcagagcgagagcagcttcatcactggagacatcaacagcagcgccagcctgaacagaggagccatggccaaccacctgatcagcaatgccctgctgcggccccacggcaccaacaacccctacaacaccctgctgggggagcctgctgtgtgcaacaaccccagcgtgtccatgtacaatgcccaggagggcctgctgaacaatgcccgggacacctctgtgatggacaccctgcccctgaatggaaatcatggcaacagctacagcatcgccagcggggagtacctgagcaactgtgtgcagatcatcgaccggggctacaaccacaatgaaacagccctggagaagaagatcctgaaggagctgaccagcaactacatccccagctacctgaacaaccacgagaggagcagcgagcagaacagaaacctgatgaacaagctggtgaacaacctgggcagcggccgggaggatgatgccatcgtgctggatgatgccaccagcttcaaccacgaggagagcctgggcctggagctgatccacgaggagagtgatgcccccctgctgcccccccgggtgtacagcacagagaaccaccagccccaccactacacccggcggcgcatcccccaggaccacagcgagagcttcttccccctgctgaccaatgagcacacagaggacctgcagagcccccaccgggacagcctgtacacctccatgcccaccctggccggcgtggccgccacagaatctgtgaccaccagcacccagacagagcccccaccagccaagtgtggagatgctgaagatgtgtactacaagtccatgcccaacctgggcagcaggaaccacgtgcaccagctgcacacctactaccagctgggccggggcagcagtgatggcttcatcgtgccccccaacaaggatggcaccccacctgagggcagcagcaagggccctgcccacctggtgaccagcctgtag

SEQ ID NO: 325968 - DNA, 4716 bp, Artificial Sequence
  derived and/or modified sequence
atgtggcccagccagctgctgatcttcatgatgctgctggcccccatcatccacggtgggaaacactcagaaaggcaccccgctctggctgccccgttgcggcatgccgagcggtctcccggtggggccctccccccaaggcacctcctccagcagccagcagccgagcgcaccgcagctcaccgtggccagggacctcgcggagccactcgcggcgtgcggggacctggagcccagggcgcccagatcgccgcgcaggctttctcccgagcccccattcccatggctgttgtgcgtcgggagctgtcttgtgaatcgtaccctattgaattgaggtgccctggcacagatgttattatgattgaatcagcgaattacgggcgaactgatgataagatttgtgatagcgaccctgctcagatggagaacattaggtgttatcttccagatgcttataagattatgtcccaacggtgcaacaataggacacagtgtgcagtggtggccggtccagacgtctttccggatccatgtcccggtacctacaaatacctggaagtgcagtatgaatgcgtgccatacaaggttgagcagaaggtgtttctttgtccagggttgctcaagggcgtataccagtccgagcacctattcgagagcgaccaccagtccggagcatggtgtaaagaccccctgcaagcctcggataagatttattatatgccctggaccccctaccgcactgacaccctgactgagtacagttcgaaggatgacttcattgccgggcgaccaaccacaacatataaactccctcatcgcgtcgacgggactggctttgtggtatatgacggggcacttttctttaataaagagcggactagaaatatcgtgaagttcgacctgagaaccaggatcaagtccggcgaggctatcatcgccaacgccaattaccatgacaccagtccgtacaggtggggaggaaagtcagatattgacctggccgtagatgagaacggtctgtgggtgatctacgcgaccgagcaaaacaacggcaagattgtaatctctcagcttaacccctacactctgcgtattgaggggacatgggacaccgcgtacgataaaaggtctgcctcgaatgcctttatgatttgcggaatcctgtatgttgtgaagtccgtctacgaagacgatgacaatgaagccacagggaataagatcgattatatttataatactgaccaatccaaggactctctggtggacgtgccctttccaaactcttatcaatatatagccgcggtggactataacccacgggacaatctgctttatgtgtggaacaactaccatgtcgtgaagtactccctcgactttggcccactggactcacgctccggtcaagcacaccatggccaggtgtcctatatctcccctcccattcacttggatagcgaactagaacgtccctctgtgaaagacatcagcacgacagggcccctggggatgggctcaaccactactagtacgacactgcgaactaccactctgagtcccgggcggagtactactccttcagtcagtggacggagaaacagatcgacctcaactccatcaccagccgttgaggttctggacgacatgaccacgcatttaccctctgctagctctcaaatccccgctctggaagagtcctgcgaagcagtggaagcacgcgagataatgtggtttaaaacacggcaggggcaaatcgccaaacagccatgccccgccggtaccatcggggtgtccacttatttatgtctcgcccccgatggcatctgggatccacaaggccctgatttgagcaattgctcatccccctgggtgaaccatatcacccagaaactaaaaagtggagaaacggcggcaaacatcgctcgggagctggctgagcagacacgaaatcatttgaatgccggagacatcacatactccgttcgcgccatggatcagctggttggattactggatgtgcaattgaggaatctgacccctggaggaaaagactctgctgcacggagcctcaacaagctccagaagagggagagaagttgccgcgcttacgtgcaagccatggtggaaacagtgaataatttgctgcagccccaggctctaaacgcctggcgggatctgactacctcggaccagctgcgcgccgcaactatgcttctccacacagtagaagaaagcgcatttgtattagccgataatttgctgaaaaccgacatcgtgagggaaaacaccgacaatatcaaactggaggtggctaggttaagcactgagggtaatctagaggatctcaagtttcccgaaaacatggggcatgggtccacaattcagctcagcgctaatacgctgaaacagaatggacggaacggcgaaatcagagttgccttcgtgctgtacaataacctgggcccttacctgtccactgagaacgcatcaatgaaactgggcacagaggccctgtccaccaaccacagtgtgatcgtcaacagtccggtcatcacagctgctatcaacaaagagttttccaacaaggtctacctggctgacccagtggttttcaccgtcaaacatattaagcagagtgaagagaactttaatcctaactgttctttctggagttacagcaaaaggacaatgacaggttactggtcaacacagggttgcagactcctgactacaaataagacccacacaacctgcagttgcaaccatctgacaaacttcgcagttttaatggctcatgtggaagttaaacacagcgatgccgttcatgaccttctcctggatgtgattacctgggtagggattttgctgtccctggtgtgtcttctaatctgcattttcactttctgcttcttccgcggcctacagtcagacaggaacacgatacataaaaacctctgtatcagtctgttcgtagctgaactgctgtttttaattgggataaaccgtacagatcagcccatcgcatgtgctgtgtttgctgcgttgctgcactttttctttctcgccgcctttacatggatgtttctggagggagtgcagctctacatcatgttagtcgaagtttttgagagtgagcattcccgtcgcaaatatttctatcttgtgggatatggaatgcctgctctcatcgtcgcggtatccgccgccgttgattatcgaagctatgggacagacaaggtgtgctggctcaggttagacacctacttcatctggtcatttattggccctgctacattaatcatcatgctcaacgtgatatttttggggatcgctttgtacaagatgttccatcacacggcaatcttgaagccagagtccgggtgcctggataatataaagagttgggtaatcggggctattgcccttttatgccttttgggcctcacctgggcgttcggacttatgtatattaacgaaagcaccgttatcatggcttatttgtttacaattttcaattcgcttcaagggatgtttatctttattttccactgcgtgctgcaaaagaaggttcgtaaggagtatggcaagtgtctgcgaactcattgttgttccggtaaatctacggagtcgagtattggatccggcaagacatctggatcccgaacacctggacgttactccaccggttcccagtcacggatccggcgtatgtggaatgacactgtgcggaagcagtccgaatcctctttcatcacaggagatattaatagctctgcttctctgaatcggggggccatggctaaccacctcatctccaatgcattattaagacctcacggaaccaataatccctataacactcttctgggagagcctgcagtgtgcaacaaccctagcgtctctatgtacaatgctcaggagggcttattaaacaacgcacgcgacacctccgtgatggataccttgcccctgaacgggaaccatgggaattcttattccattgcctctggtgaatatctgtcaaactgcgtccagatcattgatcgaggatacaatcacaacgagacggctctcgaaaagaaaattctgaaggagttgacttcaaactatatccctagctatcttaataaccatgagcgcagctctgagcagaacaggaatctgatgaacaagctcgtgaataatcttgggagtggcagggaggacgatgccattgtgttagatgatgcaacttctttcaaccatgaggaatcacttgggcttgagctaattcatgaagagtcagatgcccccctactaccccccagggtctattccactgaaaatcaccagccccatcactacacaagaagacgaattcctcaggaccactccgagtctttcttcccgctactcacaaacgaacataccgaagatcttcagagcccccaccgggactctctttatacctccatgcctaccctggcaggcgtcgccgcaacagaatctgtcactacctccacccagaccgaacctccacccgctaagtgtggggacgccgaggacgtttactacaaatccatgccgaatctcggatcacggaaccacgtgcaccaacttcacacctactaccagctggggcggggcagctccgatgggtttatcgtgccgccgaacaaagatggtacccctccagagggaagctccaaggggccagcccatttggtcacttctctttag

SEQ ID NO: 325969 - DNA, 4029 bp, Artificial Sequence
  derived and/or modified sequence
atgtggcccagccagctgctgatcttcatgatgctgctggcccccatcatccacggcggaaagcatagtgaacggcaccctgctctggctgccccactacggcacgccgagcggtcgcctgggggagctctgccccccaggcatctccttcagcaaccagcagcggagcgcacggctgcacacagaggccaaggccctcggggagctactagaggagtcagagggcctggagcccagggagcccaaatcgctgctcaagctttcagccgggcccccattcccatggccgttgtccggcgcgaattatcatgcgagagttatcccatagaactccgatgtccaggaaccgatgttattatgattgagagtgccaattatggtagaacagacgacaagatctgcgacagtgacccagctcagatggagaatatccggtgctatctgcctgatgcctataagattatgtctcagcgctgtaataaccggactcagtgcgctgtcgtggccgggcctgatgtgttccctgatccctgcccaggtacttataagtacctcgaggtccagtacgaatgtgtaccatacaaggtggagcagaaagtttttctctgtcccggactcttgaaaggggtataccagagcgagcacttgttcgaatctgaccaccagagcggggcctggtgcaaagatcctctgcaggcttctgacaagatttattatatgccttggacaccctacagaaccgatactttaactgagtacagtagcaaagatgacttcatcgccggacggcctacaacaacctacaagcttccccaccgggttgatggcaccggttttgtcgtctacgacggcgcactctttttcaacaaggaaagaactcggaatattgttaaattcgacctaagaacgcgaataaagtccggagaggccattatcgcaaacgccaactaccacgacacgagtccctatcgatggggcggcaagtctgatatcgacctggctgtagacgaaaatggcctttgggtgatctatgctactgaacagaacaacggcaagattgtgatcagtcagttgaatccatatacccttagaatcgaagggacatgggatactgcctatgacaagagatctgcctcaaatgcgttcatgatctgtgggattctatacgtggtgaagtccgtgtacgaggatgatgacaacgaggcgaccgggaataaaattgactacatctacaataccgatcaatccaaggacagtctcgtagacgtgccgtttcccaacagttatcaatatatagccgccgtcgactacaaccccagagataatcttctttacgtatggaacaactaccatgtcgtgaaatatagcctggattttggtcctttagattcaagatcagggcaggctcaccatggccaggtctcttacatcagtccccctattcatctggactctgaactggagaggccctccgtgaaggacatatcaacaactgggcctctcggtatgggttcaaccaccacctccacaaccctgcgcactaccacactcagtcccggtcggtctaccacaccaagcgttagcggaagaaggaacagaagtacgtctacccccagccctgctgtggaggtccttgacgacatgaccactcatctgccctctgcatctagccagatccctgctcttgaggaatcatgcgaagccgtagaggccagagagattatgtggtttaagacacggcaggggcaaatcgcaaagcagccttgcccggctgggacaatcggcgtgagtacatacctttgtctggcccccgacggcatctgggatccccaggggcccgatctgtccaattgttcttccccgtgggtgaaccacattacccaaaagcttaaatccggagaaacggcggcaaatatcgcacgggaactcgcagaacagactagaaaccatctcaatgctggagacatcacctactctgtccgcgctatggaccagctggtgggtctgcttgacgtgcagctgcggaacctgacccccgggggtaaggattccgccgccagatcattaaataagctgcaaaaacgagagcgctcatgtcgcgcgtacgtgcaagctatggtcgagacagtgaataatctgctccaaccccaggccttaaacgcttggcgggatttgactacatctgatcaacttcgcgccgctacgatgctacttcacactgtggaggagtcggccttcgtgcttgctgacaatctccttaagaccgatatagtgcgtgagaatactgataatatcaagctggaagttgccaggctgtcgacggaggggaacctagaagatctcaagtttcccgaaaacatggggcacggcagcacaatccaactcagtgctaacacattgaagcagaatgggcggaacggcgagatacgggtagcctttgttctgtacaataatttgggtccttacctgagcacagaaaatgcatctatgaaactggggaccgaggcgcttagcacaaaccactcagtgatcgtaaacagcccagttatcacagctgccataaataaggaattctccaataaggtctacctggctgatcctgtggtgtttaccgtgaagcacattaaacaaagcgaagagaactttaatcccaattgctcattctggagctacagtaaacgcaccatgactggctactggtccacccagggttgtcgactcttaactacgaataagacacacaccacctgttcatgcaaccacctgactaacttcgccgtgctcatggcccatgtggaagttaagcatagcgatgccgtccacgacttactgttggacgttatcacatgggtggggatattattatccctcgtgtgcctcctgatctgcatctttacattttgtttttttaggggacttcagtcagatagaaacaccatccacaagaatctttgcatttctctattcgtggccgagctcctctttctcatcgggatcaataggactgatcagcccatcgcttgcgcagtgtttgctgcactgctgcatttcttttttttagctgcattcacctggatgttcctagaaggcgtccagctttacattatgctcgtggaggtgttcgaaagcgaacactcccgtagaaagtacttctacttggtgggctacgggatgccggctttgatcgttgctgtgtctgcagcagtcgattatcgcagttacggtaccgacaaggtctgctggctccgactagatacttatttcatttggtcatttattggcccagccaccctgatcataatgctaaacgtgattttcttaggcatcgcgctgtataaaatgtttcaccacacagccattttaaaacccgaaagcggatgtttggataacatcaagagttgggtcattggtgctattgctctgctctgtttgctgggattgacctgggcttttggcctgatgtacattaacgaatcgacagtgatcatggcctacttgttcactatttttaattcattacagggtatgttcattttcatctttcattgtgtgctgcagaagaaagtgcggaaagaatacggcaagtgtttgcgcactcactgttgtagcggcaagtccactgaatctagcataggctctggcaagactagtggaagccggacgcctggcaggtatagtaccggatctcagtctcggatccggagaatgtggaacgacaccgtgcgcaagcagtccgaaagctcatttataaccggagatataaattcctctgcaagcctgaataggggggctatggccaatcaccttatcagcaacgcccttttgcggccacacgggactaacaacccctataataccctcctgggcgagcctgctgtgtgtaataacccctccgtgagtatgtacaatgcacaagaaccgtacagggaaacctctatgggggtaaagctcaacattgcttatcagatcggagcctctgaacagtgccaggggtacaaatgccatggctactccactactgaatggtag

SEQ ID NO: 325970 - DNA, 3825 bp, Artificial Sequence
  derived and/or modified sequence
atgtggcccagccagctgctgatcttcatgatgctgctggcccccatcatccatgcgttctccagggcccctatccccatggccgttgttaggcgtgagctttcatgtgaatcgtatccaattgaacttcgatgtcctggaacagatgtcatcatgatcgaaagcgccaactacggaaggacagatgacaagatttgcgactctgaccccgcgcaaatggaaaatattcgctgctacctccctgacgcctataagatcatgtcccagcggtgcaataatcggacccaatgtgccgtcgtcgcgggacccgacgtttttcccgatccatgccccgggacatataaatacctagaggtgcagtatgagtgtgttccatataaggtagagcagaaagttttcctttgtccgggcctcttgaaaggcgtttatcagtcagaacacctgtttgagtccgatcaccagtccggggcttggtgtaaggaccctttacaggcatcagataaaatttattacatgccttggactccctatcggacagacacacttactgagtattcctccaaggatgacttcattgcaggccgccctacgacaacctacaaattaccccatcgagtcgatggaacaggcttcgtcgtttatgacggggccctgtttttcaacaaggagaggacccgcaatatcgtgaagttcgatcttagaaccaggattaaatcaggagaggcaatcatcgcaaacgcaaactaccacgacacgagcccttaccgatggggcggcaagtcagacatcgacctcgccgtggacgaaaacggtctgtgggtgatctatgctactgagcaaaacaacggcaaaattgtgatctcccagctgaatccctacacactgcgcattgaaggcacatgggacacagcctacgataaaagaagtgcgtccaatgccttcatgatctgtggcattctatatgtggtaaaatctgtgtacgaggatgatgataatgaagcgactggcaacaagatcgactacatttataatacagatcaatctaaagatagtctggtggacgtgccattccctaactcttaccagtacatcgctgcagttgactacaaccctcgagacaatctgttgtatgtctggaataactatcatgtcgtcaagtacagcctcgatttcggcccccttgattcacgtagtggacaggcccatcatggccaggtgagctatatcagcccccctatccatctcgattctgagctggagagaccctcagtaaaagatataagtacaacaggtccacttgggatgggctcgactacaacaagcacaactcttcgcaccacaacactcagtcccggcagaagtacaacaccctctgtgtccggcaggcggaataggtctacatctacacccagcccagctgttgaggtgctggatgatatgaccacccacctcccctccgcatcatcccaaattcccgccctggaagagtcatgcgaggcagtggaggccagagagattatgtggttcaaaactaggcaggggcagatcgccaaacagccctgtccagccggaacaattggggtgtccacatacttgtgtttggcacccgacgggatatgggaccctcagggccccgatctgtcaaactgttcgagtccatgggtgaatcacatcacgcaaaagttaaaatctggggaaactgcagctaacatcgcaagagagctggctgagcagacaagaaaccatctcaacgccggcgacatcacttatagtgtccgggctatggatcagttagtgggcctgctggatgtccagctccggaacctcactccggggggcaaagacagcgctgcgaggtcactcaacaagttgcagaaacgtgaacgatcttgccgcgcatacgtgcaagctatggtcgaaactgtcaacaacttgctccagcctcaagccttgaatgcatggagggaccttaccacttcagaccaattgcgcgccgctaccatgctgctccataccgtggaggagagcgcctttgtgctcgctgataacctgctgaagactgacattgtgcgggaaaatacagataacattaaactggaggttgccagactatcgacagaaggaaatctcgaggacctgaaatttcctgagaatatggggcacggctccaccattcagctttccgccaacactcttaagcagaatggaaggaacggtgagataagggttgcgttcgtgttgtacaacaatctgggcccatatctttcgacggagaacgcttcaatgaaactcgggacagaggccctgagtactaatcactccgtgattgtcaacagtcccgtgatcactgctgcaatcaataaggaattttccaataaagtgtacttggcggatcccgtggtgtttactgtaaagcacattaagcaaagtgaagaaaacttcaatccaaattgttctttctggtcctacagtaagcgcacgatgaccggatactggagtacgcagggctgtaggctgctcaccacaaataaaactcatacgacatgtagctgtaaccacctgacgaactttgcagtattaatggctcacgtagaagtaaagcatagcgacgcggtgcacgacctcctgttagatgtcatcacatgggtcgggatcctcctctctctggtatgtctcttgatctgtatatttactttctgtttttttcgcggcctgcagtccgatcggaatacgattcataagaatttatgtataagtctctttgtggccgaactgctgttcttaatcggtataaataggaccgatcagccaatcgcctgcgccgtgtttgccgctctcttgcatttttttttcctggccgctttcacttggatgttcctggaaggagtccaactttacatcatgctggtcgaagtgtttgagagcgaacatagcagaagaaagtacttctatctggtagggtatggcatgccagccctaattgtggccgtgtctgccgcagtagactatcgttcctacgggactgacaaagtgtgttggcttaggctagacacctactttatttggtctttcataggacccgcaacactcatcataatgctcaatgtcatctttttagggatagcgctatataagatgtttcatcacaccgcaatccttaagcccgagtcagggtgtcttgataatatcaaaagttgggttataggagccatcgcgttgctctgcttattaggcctgacatgggccttcggcctgatgtacatcaacgaatccactgtgatcatggcctacctgtttacaatctttaatagtctccaggggatgtttatcttcatattccactgtgtcctccaaaaaaaggtgcgcaaggagtacggcaagtgtctacggactcattgctgttccggtaagagcacggaatcatccataggaagcgggaagacaagtgggagtaggactcctggcaggtattctaccgggagccagtccaggatccgccgcatgtggaacgatactgtgagaaaacagtccgaaagttcgttcattactggggacataaacagcagcgccagcctgaatcgaggagctatggctaaccatctgattagcaacgccctgctgaggcctcacggcacaaataatccctacaacacactgctgggcgaaccagccgtgtgcaacaacccttctgtgagtatgtataacgcacaagagccatatcgcgagactagtatgggtgtcaaactgaatattgcttaccaaattggggcatcagaacaatgccaagggtacaagtgccatggatactcaactaccgaatggtag

SEQ ID NO: 325971 - DNA, 4512 bp, Artificial Sequence
  derived and/or modified sequence
atgtggcccagccagctgctgatcttcatgatgctgctggcccccatcatccacgctttctcccgcgcacccatccctatggccgtggtgagaagagagctgtcttgtgagagttacccaatcgaactgcgatgtcctggaaccgatgtcatcatgatcgagtcagccaactacggacgcaccgacgacaagatctgtgattccgatcccgctcagatggagaacatccggtgctacctgcctgacgcttataaaattatgagccagaggtgcaataataggacacaatgcgccgtcgtggctggccccgacgtgttcccggacccctgtcctggcacctataagtatcttgaggtgcaatatgaatgcgtgccatacaaggtcgaacagaaggtgtttctgtgccctggcctgctcaaaggtgtctatcagtctgaacacctgtttgaaagcgatcaccagtccggggcttggtgtaaggatcccctgcaggcgtcggataaaatttattatatgccatggactccataccggacggacacactgactgagtatagcagcaaagacgacttcatagctggccgccctacaaccacatacaagctgcctcatagggtggatgggacagggttcgtggtgtatgatggggctttattttttaataaggagcggacacgcaatatcgtgaaatttgacctcaggactagaattaagtccggggaagctattatcgcaaatgctaattatcatgatacctccccctacaggtggggcggaaagtcagacatcgatctcgctgtggatgaaaatggcctctgggtcatttatgctacagaacagaacaacgggaaaatcgtgatttctcagctcaatccctacactctgcgaatagagggcacatgggacaccgcatatgacaagaggtccgcttccaacgctttcatgatctgcggaatcctctacgtggttaagtccgtctacgaggatgacgataacgaagctaccggaaataagatagactacatttacaacaccgaccagtccaaagatagtctcgtcgacgtcccttttccgaattcttaccaatatatagcagccgtggactacaatccaagggacaatcttctttacgtgtggaacaattaccacgtagtgaagtactctctggattttggacccttggattcacggtctggacaggcacaccacgggcaggtcagttatatctctccaccgatccatttggactcagagctggaacggccgagcgttaaggatatctctacaacaggccctttaggaatggggtctacaactacgtcaactaccctccggacgactaccttgagccccggacgctcaaccacacctagcgtgtccgggcggcgcaacagatctacctcgacacccagccccgcagtcgaggtcctcgatgatatgacaacgcacctgccctctgcgagctctcaaattcctgccctggaggagtcctgtgaggctgtggaagctagagaaatcatgtggttcaagacacgtcagggacagattgccaagcagccctgcccagcgggtacgatcggcgtgtctacctacctgtgtctcgcccctgatggcatctgggatccgcagggccccgacctctccaattgttcctccccctgggtgaaccatattactcagaaactgaagagtggggagacggccgcaaacattgcccgcgagctggcggaacagacccgtaatcatctaaatgcaggagacatcacctacagtgtgagagccatggatcaacttgtcggtctcttggacgtccagctacgcaatctaacccccgggggtaaggactcggccgcacggagccttaacaaactacaaaaacgggagcggtcgtgtagagcatacgtccaagccatggtggagacagtgaacaacctactccagcctcaggctttaaatgcttggagggacttgacaactagcgatcaattaagagctgcgacaatgctcctgcacacagtggaagagtctgctttcgttctggcggataacttactgaagacagacattgtgcgcgaaaacacggacaatatcaagctggaggtggccaggctgtctactgagggtaatcttgaagatctgaagtttcccgagaacatgggtcatggatccaccatacagttaagcgccaacacactgaaacaaaacgggagaaatggcgagatccgggtggcctttgtattgtacaacaacttgggcccctatctgtcaacagagaacgcatctatgaagttggggactgaagccctgagtacaaatcatagtgtcatagtcaattctcccgtgatcacagctgcaattaacaaagaattcagtaacaaagtgtacctggcagatcccgttgtttttacggtcaagcacatcaagcagagcgaagaaaactttaacccaaattgttcattttggtcgtactctaaacgcactatgactgggtactggagcacacaaggctgccgtctcctcactacaaacaaaacacacaccacttgctcgtgtaatcaccttacgaactttgctgtgcttatggcccacgtggaggtgaaacattcagatgcagtccacgatctgcttctcgacgtgattacctgggtgggaatcctgttgtctttagtttgcctgctaatttgcatatttaccttttgtttctttagaggcctgcagtctgacagaaataccattcataagaacctgtgcatttcattgttcgtggccgaactgctgtttctgatcggaatcaatcggaccgaccaaccaatcgcctgtgctgtgttcgcagccttgctgcactttttcttcctggccgcctttacctggatgttccttgagggggtccagctgtatatcatgctggtggaagtgtttgagagcgaacacagcagacgcaagtacttttacctcgttgggtacggaatgccggcactgattgtggctgtgtcagccgctgttgattataggtcatatggcacggacaaggtgtgctggctgcggttggacacctacttcatatggagctttattggccctgccacactgattataatgctcaatgtgatatttttgggcatagctctgtacaagatgtttcaccatactgccattctgaagccagaaagcggctgtctggataacatcaagtcctgggtgatcggcgccattgctttactttgccttctgggtctgacttgggcttttggcctaatgtacattaacgagtccaccgttatcatggcgtacctcttcacaatcttcaatagtctgcagggtatgttcattttcatattccactgcgtgttacagaagaaagttcgaaaggagtatgggaagtgcttgaggacgcactgctgcagcgggaagtctactgagtcaagcataggtagtggtaagaccagtgggagtcgcacacctggcaggtattctaccgggagccagagcagaatcagacggatgtggaacgacaccgtgagaaagcagagcgagtcctcttttattactggggatattaattctagtgccagtctgaaccggggcgccatggccaaccatctcatcagcaatgcacttctgcgcccacatggcactaacaatccttacaacactctgttgggagagcccgccgtgtgcaacaatccctcagtttccatgtacaacgctcaggagggattgctaaacaacgctagggacacatcagtgatggacacactgcctctgaacgggaaccatgggaattcctactccattgcaagtggagagtatttgtccaattgcgtgcagattattgatcggggatacaaccataacgagactgccctcgaaaagaagattctcaaagagttgacttccaactacatcccatcctacctgaacaaccacgaaagatcttccgagcagaatagaaatctgatgaacaagctggtcaacaatcttgggagcggacgcgaggatgatgcgatcgttctcgacgatgcaactagctttaatcatgaggaatctctcggcctcgagcttattcatgaggagtccgatgcaccattgctcccaccaagggtgtattccacagaaaaccaccagccccatcactacacccggcgtcgcatacctcaggatcacagtgagagcttttttcctcttttgacaaatgaacacactgaagatctacagagtcctcatcgcgattctctgtacacttctatgcctaccctcgccggcgtggctgcaaccgaatcagtgaccacaagcacacagaccgaacctcctccagctaaatgcggtgacgctgaggacgtgtattacaagagcatgccaaatctaggcagtcgaaaccatgttcaccagctgcacacatattatcaactgggacgtggatcctccgatggatttatcgtgccccctaataaagacggcaccccccccgagggatcttctaaaggccctgcccacctggtgacatccctgtag

SEQ ID NO: 325972 - DNA, 4716 bp, Artificial Sequence
  derived and/or modified sequence
atgtggcccagccagctgctgatcttcatgatgctcctcgcacccattattcacggcggaaagcattcagaaaggcaccctgcattagcggctccgcttagacacgcagagcggtcacctggcggagccctgcccccaagacaccttctgcaacagccagccgcagagcgaacagccgcacaccggggacaggggcctagaggagctacccggggagtccgaggcccaggggcacagggagcacagatcgccgctcaggcatttagcagggcccctatcccaatggctgttgttcggagggagctgtcctgtgagtcgtaccccattgagctcagatgccccggaacagatgtgattatgattgaaagcgctaactatggcagaacagacgacaaaatctgtgacagtgacccagcacagatggaaaacataaggtgctatctcccggacgcttacaagatcatgtcccagcgctgcaataaccgtacgcagtgtgccgtggtcgccggtcccgacgtgttcccagacccttgtcccggtacttacaagtatctagaagtgcagtacgagtgcgtgccttacaaggtcgagcagaaagttttcctgtgccccggactcctaaaaggagtgtaccagtctgagcatcttttcgaaagtgaccatcagagtggggcatggtgcaaagaccccctacaggcatcagacaaaatatactatatgccgtggactccttaccggaccgacactctgactgagtatagtagtaaggacgacttcatcgccggacgccctactaccacatacaaactcccgcaccgagtggacggcacagggttcgtggtttacgacggagccttattcttcaataaggaacggacccggaatatcgtgaagtttgatttgaggacaaggattaagagcggagaggctattatagcgaatgctaattatcacgatacctcaccttatcggtggggcggtaaatctgacattgatctagctgtggatgagaatggcctctgggttatctacgcgaccgagcaaaataacggcaaaatcgtcatctcccagctgaatccctataccctcaggatcgagggaacttgggacacagcgtacgataagcgtagcgcttcaaatgcgttcatgatctgcggtattctttacgtggtgaagagcgtctacgaggacgacgacaatgaggctactggcaataagatcgattatatctacaacactgatcagtcaaaggattctctggtggacgtgccattccctaattcttaccagtacatagcagcagtggactacaacccacgtgataaccttttgtatgtgtggaacaattatcacgtcgtaaaatactcacttgattttggaccactagacagccgctcgggccaagcccatcacggtcaagtatcctatatatccccacctattcacctcgatagcgagctcgaacggccaagcgtaaaggacataagtacaacgggtcctctcgggatggggtcaactactacatctacgacactgcgaactaccaccttgtcaccgggaaggagtactacaccctccgtatcaggacgcaggaaccgcagtacaagcacgcctagtccggctgtggaagtcctagacgatatgactacccatctgccttctgcgtcctctcagatccccgctctcgaagagagctgtgaggccgtagaggcccgagaaattatgtggtttaaaaccaggcaagggcagattgccaaacagccttgccctgcgggaactatcggcgtgagcacctacttgtgcttggctccagacggtatttgggacccacaaggcccagatctctcgaattgttcttcaccatgggtcaatcacattacgcagaagctgaaaagtggcgaaacggccgcaaacattgccagggagctagctgagcagacccggaaccacctcaacgccggagacattacatatagcgtgcgggctatggatcaactggtcggactgcttgatgtccagctcagaaatttaacacctgggggtaaggacagcgctgctagatctttgaacaaattgcagaagcgtgaaaggtcttgtcgagcttacgtgcaggcaatggtagagactgttaataatttactgcagcctcaagccctgaacgcctggagggatcttacgacgagtgatcagctccgggcagccacaatgcttttacacacagtggaggaaagtgcatttgtgcttgccgacaacttactgaaaactgacatcgtgcgcgaaaataccgacaatatcaagctggaggtcgcacgcctgtccacagaggggaacctggaggatcttaagttcccggagaacatgggacatggatcaactatacagctgtcagccaacaccctcaagcagaacgggaggaatggagagatcagagtcgcattcgtcctctacaataatctcggaccttatctatccactgaaaatgcaagcatgaagttaggcacagaagccctgtccaccaaccacagcgtgatcgtgaacagcccggttataaccgcagctatcaacaaagagttctccaataaagtgtacttggctgatcccgtggtgtttacggttaagcatattaagcagtctgaagagaatttcaatcctaattgcagtttttggtcatactctaaacggacgatgactggctattggtcaacccagggatgtagactgctcactaccaataagacacacaccacgtgctcctgtaaccatctcacgaacttcgccgtgctcatggcccatgtcgaagtcaaacactctgacgcagttcacgacctgcttttagacgtgattacctgggtgggcatcctgctgtccttggtctgcctcctgatttgtatttttacgttttgcttctttagagggttgcagagtgaccggaacaccatccacaagaacctgtgtattagcttgttcgttgctgagctgctttttctaataggcatcaacaggacagatcagccaatagcctgtgcagtgttcgcggctttactgcattttttctttctggccgcttttacatggatgtttttagagggtgtgcaactgtacatcatgctggtggaggtttttgaaagcgagcattctcggaggaagtacttctacctggttggttatggaatgcccgctctcattgttgccgtttcagcagccgtagactacaggagttatggtaccgataaagtatgctggctgcgcctcgatacatactttatttggtcgttcatcggcccagccactctgattattatgttgaatgtgatttttttgggaatcgcattatataagatgtttcatcacaccgcaatcctgaaaccagaaagcggttgtctggataatattaaatcctgggttattggagcaatcgccctgttatgcttgctcggacttacctgggcttttgggttgatgtacatcaacgaatcaaccgtgatcatggcttacttgttcactattttcaacagtcttcaaggcatgtttatctttatcttccactgcgtgctccaaaagaaagtgcgcaaggaatatgggaagtgccttcgcacacattgttgtagtggcaagtccacagaaagttcgatcggctccggcaagacctcagggtcacgaacacctgggaggtatagtaccggttcccagtccaggattcgacgcatgtggaatgacacggtccggaagcaatctgagagctccttcattactggggatatcaactcaagtgcctccctcaaccggggagctatggccaatcatctcatcagcaacgccctgttgaggccacacggtaccaataatccctataatactctgcttggggagcctgccgtctgcaacaacccgtcagtgagcatgtacaatgctcaggaagggttgctaaataatgcacgggataccagcgttatggacacgctccccttaaacggaaaccatggtaattcgtattccatcgcctcaggggagtacctctctaactgcgtgcagatcattgatagaggctacaatcacaatgagacagcacttgagaaaaaaatactgaaagagctaactagcaactacatcccaagttacttgaataaccacgaaagatcttcagaacagaacaggaatctgatgaataaactggtgaataatctgggtagtggacgcgaggatgacgcaatagtgttagatgacgccacaagcttcaatcacgaagagtcactggggctggaactgattcacgaggaatcagatgcgccactgctcccacccagggtctactccacagaaaaccaccagccacatcactacaccaggaggcgtatcccacaggaccatagcgagagcttcttcccactgctgactaacgagcacacagaggacctgcagtccccacaccgcgacagtctctatacctcaatgcccacgctcgccggtgtggcggcaaccgaatctgtgacaacaagcactcagactgagccaccgcctgccaagtgcggggatgcagaggacgtgtactataaatccatgccaaacctgggaagccgtaaccatgtgcatcagcttcacacatactaccaactcgggagaggttcttcggatggcttcatagtgcctcctaataaagatggcactccacctgagggaagcagcaaaggaccggctcatctggttacctcgctctag

SEQ ID NO: 325973 - DNA, 4029 bp, Artificial Sequence
  derived and/or modified sequence
atgtggccatcccagcttctgatattcatgatgctgctggcccctatcattcacggtggcaagcattccgagaggcacccagcacttgccgcacccctgaggcatgccgaacggagcccaggcggtgccctgccgccacgccacttattgcagcagccagcagctgagcgcactgccgcacatcggggacagggcccacggggtgctactcgcggagtccggggtcccggagcgcagggcgctcaaatcgctgctcaggctttttcaagggccccaatccctatggctgtagtgcgtagggagctctcttgcgagtcatatccgatagaactcaggtgccccggtaccgacgtcataatgatcgagtccgccaattacggcaggaccgatgacaaaatttgcgactcagatcctgcacagatggagaacatccgttgctacctgcccgacgcctacaagattatgagccagaggtgtaacaaccgaacacagtgtgccgtcgtcgctgggccagacgtatttcccgacccctgccccggtacctacaagtacctggaggtgcaatatgaatgcgtgccttataaggtggagcagaaggtgttcctgtgtccaggactacttaagggtgtgtaccagagtgagcatctttttgaaagtgatcaccaatcaggagcgtggtgcaaagatcctctgcaggctagcgacaagatctattacatgccctggaccccttatcgaactgacacattgaccgagtatagctccaaagacgactttatcgcagggaggccaacaaccacttacaaactgcctcaccgtgtggatggtaccgggtttgttgtctacgatggtgcactgtttttcaataaggaacgcacccggaatattgtgaagttcgatctgcgaacacggatcaagtcaggagaggcgatcattgccaacgccaattatcacgacacctccccatatagatgggggggaaaaagtgacatagacctcgctgtggacgagaacggactctgggtaatttacgctactgagcagaacaacggtaagatagtgatttcccagctgaatccgtatacactgcgaatcgagggcacttgggacacagcctacgacaagagaagcgcctccaacgctttcatgatttgtggaatcctgtatgtagtgaagagcgtatatgaggacgatgacaacgaggcgaccggcaataaaatcgactatatttacaatacagaccagtccaaagatagcttagtggatgtgccctttcccaattcctaccagtacatcgcagccgtggattacaatcctcgagataacctcttgtatgtgtggaataactaccacgtagtgaaatattccctcgacttcggcccactcgatagtcgatcaggacaggctcatcacggtcaggtctcttacatctcacctccaattcatctcgattctgaactcgagagaccatcagtgaaagatatttccacgaccggaccacttggcatgggttccacgacaaccagtaccacactgagaactacgacactgagtccaggacggagcaccacaccctctgtttctggtaggcgaaaccgctccaccagcaccccgtcccctgccgtggaagtgctcgatgacatgacaacccacttgccatccgctagcagtcaaatccccgctctggaggagtcatgcgaagcagtggaggctcgcgagatcatgtggtttaagactcgccagggccagatcgctaagcagccgtgccctgccggaaccattggagtgtccacctatctgtgtctggcgcctgacggcatttgggatccccaaggacccgacttgagtaactgcagctccccttgggtaaaccacattactcagaaactgaagagcggtgaaaccgccgcaaatattgctagggagctggccgaacagactagaaatcatcttaacgccggtgacatcacttactcggtgcgggcaatggaccagttggtgggcctgctcgacgtgcagcttaggaacctgaccccgggtggcaaagactcagccgctcggtccctgaataagttgcagaaacgggaaagatcctgccgtgcctacgtgcaagccatggtcgagaccgttaataatcttctgcagccccaagccctgaatgcgtggagggacttgaccactagcgatcagttaagagcagccactatgctcttgcatacagtggaggagagcgctttcgttctagcagataacttgctaaagaccgatatagtgcgggagaatactgacaacatcaagcttgaagttgcgaggctgtctaccgagggtaacttggaggacctgaaattccctgaaaacatgggtcatgggagcacgatccaacttagcgcaaacacacttaagcaaaacggcagaaacggggagattagagtggcctttgtcctttacaacaatttaggtccctatttgagtaccgaaaacgcctctatgaaactggggacagaagctcttagtacaaaccatagcgtgatcgtaaatagcccggtgattacggccgctataaataaggagtttagtaacaaggtctatctcgccgatccagtagtctttactgtaaaacacatcaagcaatcagaagaaaattttaatccaaactgctcgttttggagctacagcaagcggacaatgactggctactggtctactcagggctgtcgacttctgacaactaataagacccacactacctgctcctgtaaccacctgacaaatttcgctgtcctgatggcccacgtggaggtgaagcattcagatgcagtccatgatttattgctggacgtgatcacctgggttgggattttgctctccctggtgtgtcttctgatttgtatcttcaccttctgcttcttcagaggtctgcaatcagataggaatactatccacaagaacctgtgcatcagcctgtttgtagccgagttgcttttcttaattggcatcaacaggacggaccaaccaatcgcttgtgccgtgttcgctgcactcctgcacttcttctttctcgctgctttcacctggatgtttcttgagggcgttcagctgtacatcatgctcgttgaagttttcgaatccgagcacagccgacgcaagtacttttacctggtaggatatggcatgccagccctcatcgtggctgtgtctgcagctgtcgattataggagctacggaactgataaggtttgctggttgcgcttagacacatatttcatttggtcgttcataggccctgctaccctgatcatcatgctgaacgtgattttcctgggaatagccctctataaaatgtttcatcatactgcaattctgaaaccagaatccgggtgtctcgataacatcaaatcatgggtcattggcgctattgcacttctctgtctcctgggtctcacatgggccttcgggctcatgtatattaacgagagtactgtcatcatggcatatctgttcacaatttttaattccctacaggggatgtttatcttcattttccattgtgtgttgcagaaaaaagtgaggaaggagtatggtaagtgtctgagaacgcattgttgttccggcaagtcgacggaatcttcaattggatccggaaagacttctggaagtcgtacccccggaagatatagcacaggaagccagagtcgaattcggagaatgtggaacgacaccgtgcggaagcagtccgaatcctcctttataacaggtgacataaatagttccgcctctttgaaccgtggcgcaatggccaatcacctaatctccaatgcccttctacgtcctcatgggacaaataacccttataacaccctgctgggtgaaccagcagtttgcaacaacccatccgtctctatgtataatgcgcaagaaccttaccgggagacctccatgggcgtgaagcttaacatcgcgtaccagattggagcgagtgaacagtgtcaaggctataagtgccatggctacagcactaccgaatggtag

SEQ ID NO: 325974 - DNA, 3825 bp, Artificial Sequence
  derived and/or modified sequence
atgtggccgtcccagcttcttatctttatgatgctcctggccccaatcatccacgcgtttagcagggctccgattccaatggctgtagtgaggagagagctctcctgcgaaagttatccgatcgaactccgctgtcccggaaccgatgtgatcatgatcgaatctgccaattatggtagaaccgacgataagatttgtgatagcgacccagcccaaatggaaaatatccggtgctatctccccgatgcctataaaatcatgagtcagcgctgcaacaacaggacacaatgcgccgtggtggcagggcctgatgtatttcccgacccctgtccaggaacttacaagtatctcgaggttcagtatgaatgtgtcccttacaaagtggagcagaaagtcttcttgtgtcctgggctcttaaagggagtctaccagtccgagcacttgttcgaatccgatcaccagagcggtgcctggtgtaaagacccgctgcaagcatccgacaaaatttactatatgccctggactccatatcggacagataccctgacggagtatagttcaaaagatgattttatcgccggacgacctaccactacctacaagctgccccatcgggtggacggtacaggcttcgttgtgtacgacggtgccctcttttttaacaaagagcgtacccgaaatatagttaagttcgatttgaggactaggattaagtctggggaagccataatcgccaacgcaaactaccacgatacaagtccctatcgttggggtggaaagtccgatatcgacctggcagtagacgagaatggactctgggtgatctacgccaccgagcaaaacaatggcaaaattgtcatctcacagttaaatccctacactctgcgtattgaaggtacgtgggacaccgcttatgataagaggtctgctagcaacgcattcatgatttgtggcatattgtatgtcgttaagagtgtctatgaagatgatgataacgaggcaactggtaacaagatagattatatctacaacactgatcagtccaaggattccctggtggacgtgccattcccgaacagttatcagtatatcgcagcggtggactacaacccaagagacaatcttttatatgtgtggaataactaccatgtcgtgaaatatagcctggacttcggtccgctcgacagtcgcagtgggcaagcacaccatggacaagttagctatattagtcctccaatccatttagacagtgaactggagagaccatctgttaaggacatatctaccactgggcctttgggtatgggctctaccacaaccagcaccacactgagaacaacgacgctcagccccggtaggagcacgactccttccgtcagcggcaggagaaaccgtagcacatcgaccccttccccagccgtggaggttttagacgacatgaccactcaccttcccagcgcttccagccagatccctgccttggaagaaagctgtgaggccgtggaagcgagggagatcatgtggtttaagacccgccagggccagatcgcaaaacagccctgtccggctggtactattggcgtcagtacctatctctgtctcgcacccgacgggatctgggatccccagggtcctgacctgagcaactgctcatccccatgggtaaaccatattactcaaaaactgaagtccggtgaaacggctgccaacattgctcgcgaattggctgagcagactcggaatcatctcaatgcaggcgatatcacatactcagttagggccatggaccaattagtgggcctactcgatgtccagctgaggaacttgacgcccggtggcaaggacagtgccgcaaggagcctgaacaaattacagaaacgggagcggtcctgcagagcctatgtccaggcaatggtggaaaccgtgaacaatctgctgcagccacaggctctaaatgcttggagggatctcaccacctccgatcagcttagggccgcaacaatgctcttgcacaccgtggaagaatccgcatttgtgctggctgataacctccttaaaacagacatcgtgcgcgaaaataccgataatataaagctggaagtcgctaggctctctacagagggcaatctggaagacctaaagtttcctgaaaatatgggccacggaagtactatacagctcagcgcaaataccttaaagcagaatggcagaaatggcgagatacgtgtcgcattcgtgctgtacaataatctaggcccttacctctccaccgagaatgcatccatgaagctgggcactgaagctctcagtaccaaccactcggtgattgtcaattccccagtgattaccgccgctattaataaggagttcagcaataaagtgtacctcgctgaccctgtggtcttcaccgtgaagcatattaaacagagcgaggagaattttaacccaaactgtagtttttggtcctacagcaaacggacgatgaccgggtattggagcacacagggctgtcgactgctcacaacaaacaagacacatacaacttgcagttgtaaccacctcaccaactttgcagttttaatggcccacgtggaggtcaaacatagtgacgccgtgcacgacctgctacttgacgtgattacgtgggtgggcatcctgctttccctcgtctgtctgctgatatgcattttcacattttgcttttttcgaggtctccagagcgatcggaacaccattcacaagaacctgtgtatctcgctgtttgtggccgagctgttgtttctgattggtataaataggacggatcaaccaatcgcatgtgccgtgtttgctgctttacttcatttcttcttcctcgcggcttttacctggatgtttctggagggcgtacaactgtacattatgttggtggaagtgtttgaatcagaacactctcgcagaaaatacttctacttagttggctatgggatgccggctctgattgtggccgtcagcgccgctgtagactacaggtcatacggtactgacaaggtatgttggctgcgactggatacgtactttatatggagcttcattggtccggctactcttatcatcatgttgaatgtcatatttctggggatagctttatacaagatgttccaccacacggctatacttaaacccgaatccggatgtctggacaacatcaagtcctgggtaatcggcgctattgccctgctttgtctgctgggcttgacatgggctttcgggctgatgtatatcaacgagtcgaccgtgatcatggcatacctgttcaccattttcaactctttgcaaggtatgttcattttcatttttcactgcgttttgcagaagaaagtgaggaaggagtacggcaagtgcctgcgcacccattgctgtagtggtaagagtactgaatcctctatcgggtctggaaagacctccggttctaggaccccaggtaggtactccaccgggagtcagtcgcggatcaggagaatgtggaacgacacagtgcggaaacagtctgagagttcttttattaccggagacattaacagttctgcgtctctaaatagaggagccatggcaaaccacttaatcagcaatgctctgttaagaccccatggcacaaacaacccttataacacacttctcggggaacccgctgtgtgcaataatccttctgtcagtatgtacaatgctcaggagccttacagggaaacctctatgggcgtgaagcttaacattgcgtatcagatcggagcctcagagcagtgccaggggtacaaatgtcacgggtactctaccaccgaatggtag

SEQ ID NO: 325975 - DNA, 4512 bp, Artificial Sequence
  derived and/or modified sequence
atgtggccatcccagctgctaatttttatgatgctgctcgcccctatcattcacgccttcagtagggcgcctattcccatggccgtcgtacgcagagagctgtcctgtgagtcttaccctatagagctgcgatgccccggaacagatgtgatcatgattgaatctgccaactatggaagaacggatgacaaaatttgtgattcagatccagcacagatggaaaatattagatgctacctccctgacgcatacaagatcatgagccagcgctgcaacaatcggacccagtgcgctgtggttgctggcccagacgtatttccggatccctgtcctggcacctacaagtacctagaggtgcaatacgaatgtgtcccttataaagttgagcaaaaggttttcttatgcccaggcctgctgaagggagtttaccagtcggagcacctcttcgagtcagatcaccagtcaggggcttggtgcaaggatcccctgcaggcctccgataagatctactatatgccgtggacaccttatagaaccgacaccctgactgaatattcgtccaaagatgatttcatcgccggacgacctaccaccacttataagcttccgcaccgtgttgatggcaccggctttgtcgtatacgatggggctctgtttttcaataaggagcggacccgtaacattgtgaaattcgatctccgtactcgtattaagagtggcgaggctattatcgccaacgcaaactaccatgacacaagtccatatcgctggggtggaaagagtgacatcgatcttgctgttgacgaaaatgggctgtgggttatatacgcaactgaacagaataacggcaaaatcgtgatatctcagcttaacccctacaccctgcgaattgaagggacatgggacaccgcttatgataaacgctccgcctcaaacgccttcatgatatgtggtattctctacgttgttaaaagcgtgtacgaggatgacgataacgaggcaacggggaacaaaatcgactatatttataataccgatcagagcaaggactcgttggtcgacgtccctttccccaactcataccagtatattgcagccgtcgactataatccgcgagacaatctgctgtatgtgtggaataactatcacgttgttaagtacagcctagattttggccctctcgatagtagaagtggccaggcgcaccatggtcaggtttcctacattagccccccaattcatctagacagcgagctcgaacggccatccgttaaggatatttcaacaactggaccactgggaatgggatccactacaacaagcactaccctgagaaccactaccctcagtcccggacggtccaccactccctctgtgagcggcaggagaaatagatctacaagtactcccagcccggctgttgaagtcctggatgacatgaccacccatctgccctcggcatcttcgcagattcccgctctggaagaaagctgcgaggcggtagaagcccgagagataatgtggttcaaaacacgccaaggacagatagctaaacagccgtgtccagccggaacgattggggtatcaacctacttgtgcttggcccctgatggcatttgggaccctcaggggcctgacttgagtaattgctcctccccttgggtcaatcacatcacgcagaagctcaagtcaggcgaaaccgcagccaatatcgcacgggaactcgcggagcaaacacgcaatcacctgaatgccggtgatatcacttactctgtgagggccatggaccaattggttggcttacttgacgttcagctcagaaatctgactcctggaggaaaggactcagcagccagaagcctgaacaaactgcaaaaacgggagcgttcgtgccgggcatatgttcaggccatggtagaaacagtaaataaccttctgcagcctcaggccttgaacgcttggagagacctcaccactagtgaccagcttagggcagctactatgcttctccacactgtcgaggaaagcgcatttgttctggccgacaacctgctcaagacggacattgtgcgggagaataccgataacatcaagctggaggtggctcgcctgagtacagagggtaatttggaagaccttaagttccccgaaaatatgggacatggctccaccatacagttgagcgccaataccctgaaacagaacggcaggaatggagaaattcgcgtggctttcgtcttgtacaacaatctgggtccttacctgagtacggagaacgcctctatgaagcttggtaccgaagcactgtccactaatcattcagtgattgtgaactcgcctgttattactgcagccattaataaagaattttctaataaggtctacctggcagacccagtagtctttaccgttaagcacatcaagcagagtgaagagaacttcaatccaaactgctcgttctggagttattcaaagcggacaatgacgggctactggagtacccagggctgtaggcttttgaccactaataaaacgcatacaacttgcagttgcaaccacctaacaaacttcgcggtgctgatggcccacgtggaggtcaaacacagtgatgctgtgcacgacctgctgctcgacgtgatcacatgggttgggatccttctctctctggtgtgcctgcttatttgcattttcacgttttgtttctttaggggcttgcagtctgaccggaatacaatccacaagaatttgtgcatctccctgttcgtggccgaactgctgtttctcattggcatcaaccgaaccgaccagcccatcgcttgcgcggtgtttgccgctttactgcattttttttttctggccgcattcacctggatgtttctggagggcgtgcagctttatatcatgctggttgaggtgttcgaaagcgagcacagccgccgaaaatatttttacttggtcggctatgggatgcccgcactcattgtcgcagtgagcgccgctgtggattaccgaagctacggcactgataaagtgtgttggttgcgactggatacatactttatttggagttttatcggcccagcgacactcattattatgctgaacgtcattttcctgggcatcgctctctacaagatgtttcatcacactgcaatcttgaagccagagtccggctgcctggacaatattaagtcgtgggtgatcggcgcaatcgccctgctctgtttactcggactgacttgggcattcggtctgatgtacattaacgagagcacagtaattatggcttaccttttcactatattcaactcattgcaaggcatgtttattttcatatttcactgtgttctgcaaaaaaaagttagaaaggagtacggcaagtgccttcgcacccactgctgtagtggaaaatccacagagagctctataggctctggcaagactagtgggagccgcacccccggacgatactccaccggcagccagagcagaattagacggatgtggaatgataccgtgcgaaagcagtcagaatcctctttcataaccggcgatattaactcttccgcaagtctgaacaggggcgctatggccaaccacctcatatccaacgcgttacttcgaccacatggaactaataacccctacaataccctgctgggagaacccgctgtatgcaacaacccgtcagtatccatgtataacgctcaagaaggacttcttaacaacgcccgtgacacttcggtaatggacacattgcctctcaacgggaatcatgggaactcttactctatcgctagtggggagtacttgtccaattgtgtccagattattgatcgtggctacaaccataatgaaaccgccctcgagaaaaagatcctgaaggagctcacttccaactatattcctagctatctgaacaatcatgaaagaagctccgagcagaaccgcaaccttatgaataagttggtcaataacctggggagtgggcgagaggacgatgctatagttctcgacgacgctacgtcttttaaccacgaagagagcttgggcctggaattgattcacgaagagagtgacgcaccacttctgcctccacgggtgtactccactgaaaaccaccagcctcatcactataccaggagacgcattcctcaggatcattccgagtcttttttcccgctactgactaatgagcacaccgaggatctccagtctcctcacagggattctctgtatacatcgatgcccaccctcgcaggggtggctgccacagagtcagtgaccacatcaacacagaccgagcccccacccgcaaagtgtggggacgcagaggacgtatattacaagagcatgcccaatctcggaagtcgaaaccacgttcaccagctgcacacctattatcagctgggcaggggatcaagcgatgggttcatcgtgcctcctaacaaggatggaacaccccctgagggatccagtaaagggcctgcacacctggtcacttctttatag

SEQ ID NO: 325976 - protein, 1528 aa, Artificial Sequence
  derived and/or modified sequence
MWPSQLLIFMMLLAPIIHGGKHSERHPALAAPLRHAERSPGGALPPRHLLQQPAAERTAAHRGQGPRGATRGVRGPGAQGAQIAAQAFSRAPIPMAVVRRELSCESYPIELRCPGTDVIMIESANYGRTDDKICDSDPAQMENIRCYLPDAYKIMSQRCNNRTQCAVVAGPDVFPDPCPGTYKYLEVQYECVPYKVEQKVFLCPGLLKGVYQSEHLFESDHQSGAWCKDPLQASDKIYYMPWTPYRTDTLTEYSSKDDFIAGRPTTTYKLPHRVDGTGFVVYDGALFFNKERTRNIVKFDLRTRIKSGEAIIANANYHDTSPYRWGGKSDIDLAVDENGLWVIYATEQNNGKIVISQLNPYTLRIEGTWDTAYDKRSASNAFMICGILYVVKSVYEDDDNEATGNKIDYIYNTDQSKDSLVDVPFPNSYQYIAAVDYNPRDNLLYVWNNYHVVKYSLDFGPLDSRSGQAHHGQVSYISPPIHLDSELERPSVKDISTTGPLGMGSTTTSTTLRTTTLSPGRSTTPSVSGRRNRSTSTPSPAVEVLDDMTTHLPSASSQIPALEESCEAVEAREIMWFKTRQGQIAKQPCPAGTIGVSTYLCLAPDGIWDPQGPDLSNCSSPWVNHITQKLKSGETAANIARELAEQTRNHLNAGDITYSVRAMDQLVGLLDVQLRNLTPGGKDSAARSLNKLQKRERSCRAYVQAMVETVNNLLQPQALNAWRDLTTSDQLRAATMLLHTVEESAFVLADNLLKTDIVRENTDNIKLEVARLSTEGNLEDLKFPENMGHGSTIQLSANTLKQNGRNGEIRVAFVLYNNLGPYLSTENASMKLGTEALSTNHSVIVNSPVITAAINKEFSNKVYLADPVVFTVKHIKQSEENFNPNCSFWSYSKRTMTGYWSTQGCRLLTTNKTHTTCSCNHLTNFAVLMAHVEVKHSDAVHDLLLDVITWVGILLSLVCLLICIFTFCFFRGLQSDRNTIHKNLCISLFVAELLFLIGINRTDQPIACAVFAALLHFFFLAAFTWMFLEGVQLYIMLVEVFESEHSRRKYFYLVGYGMPALIVAVSAAVDYRSYGTDKVCWLRLDTYFIWSFIGPATLIIMLNVIFLGIALYKMFHHTAILKPESGCLDNIKSWVIGAIALLCLLGLTWAFGLMYINESTVIMAYLFTIFNSLQGMFIFIFHCVLQKKVRKEYGKCLRTHCCSGKSTESSIGSGKTSGSRTPGRYSTGSQSRIRRMWNDTVRKQSESSFITGDINSSASLNREGLLNNARDTSVMDTLPLNGNHGNSYSIASGEYLSNCVQIIDRGYNHNETALEKKILKELTSNYIPSYLNNHERSSEQNRNLMNKLVNNLGSGREDDAIVLDDATSFNHEESLGLELIHEESDAPLLPPRVYSTENHQPHHYTRRRIPQDHSESFFPLLTNEHTEDLQSPHRDSLYTSMPTLAGVAATESVTTSTQTEPPPAKCGDAEDVYYKSMPNLGSRNHVHQLHTYYQLGRGSSDGFIVPPNKDGTPPEGSSKGPAHLVTSL

SEQ ID NO: 325977 - DNA, 4587 bp, Artificial Sequence
  derived and/or modified sequence
atgtggcccagccagctgctgatcttcatgatgctgctggcccccatcatccacggcggcaagcacagcgagagacaccccgccctggccgcccccctgagacacgccgagagaagccccggcggcgccctgccccccagacacctgctgcagcagcccgccgccgagagaaccgccgcccacagaggccagggccccagaggcgccaccagaggcgtgagaggccccggcgcccagggcgcccagatcgccgcccaggccttcagcagagcccccatccccatggccgtggtgagaagagagctgagctgcgagagctaccccatcgagctgagatgccccggcaccgacgtgatcatgatcgagagcgccaactacggcagaaccgacgacaagatctgcgacagcgaccccgcccagatggagaacatcagatgctacctgcccgacgcctacaagatcatgagccagagatgcaacaacagaacccagtgcgccgtggtggccggccccgacgtgttccccgacccctgccccggcacctacaagtacctggaggtgcagtacgagtgcgtgccctacaaggtggagcagaaggtgttcctgtgccccggcctgctgaagggcgtgtaccagagcgagcacctgttcgagagcgaccaccagagcggcgcctggtgcaaggaccccctgcaggccagcgacaagatctactacatgccctggaccccctacagaaccgacaccctgaccgagtacagcagcaaggacgacttcatcgccggcagacccaccaccacctacaagctgccccacagagtggacggcaccggcttcgtggtgtacgacggcgccctgttcttcaacaaggagagaaccagaaacatcgtgaagttcgacctgagaaccagaatcaagagcggcgaggccatcatcgccaacgccaactaccacgacaccagcccctacagatggggcggcaagagcgacatcgacctggccgtggacgagaacggcctgtgggtgatctacgccaccgagcagaacaacggcaagatcgtgatcagccagctgaacccctacaccctgagaatcgagggcacctgggacaccgcctacgacaagagaagcgccagcaacgccttcatgatctgcggcatcctgtacgtggtgaagagcgtgtacgaggacgacgacaacgaggccaccggcaacaagatcgactacatctacaacaccgaccagagcaaggacagcctggtggacgtgcccttccccaacagctaccagtacatcgccgccgtggactacaaccccagagacaacctgctgtacgtgtggaacaactaccacgtggtgaagtacagcctggacttcggccccctggacagcagaagcggccaggcccaccacggccaggtgagctacatcagcccccccatccacctggacagcgagctggagagacccagcgtgaaggacatcagcaccaccggccccctgggcatgggcagcaccaccaccagcaccaccctgagaaccaccaccctgagccccggcagaagcaccacccccagcgtgagcggcagaagaaacagaagcaccagcacccccagccccgccgtggaggtgctggacgacatgaccacccacctgcccagcgccagcagccagatccccgccctggaggagagctgcgaggccgtggaggccagagagatcatgtggttcaagaccagacagggccagatcgccaagcagccctgccccgccggcaccatcggcgtgagcacctacctgtgcctggcccccgacggcatctgggacccccagggccccgacctgagcaactgcagcagcccctgggtgaaccacatcacccagaagctgaagagcggcgagaccgccgccaacatcgccagagagctggccgagcagaccagaaaccacctgaacgccggcgacatcacctacagcgtgagagccatggaccagctggtgggcctgctggacgtgcagctgagaaacctgacccccggcggcaaggacagcgccgccagaagcctgaacaagctgcagaagagagagagaagctgcagagcctacgtgcaggccatggtggagaccgtgaacaacctgctgcagccccaggccctgaacgcctggagagacctgaccaccagcgaccagctgagagccgccaccatgctgctgcacaccgtggaggagagcgccttcgtgctggccgacaacctgctgaagaccgacatcgtgagagagaacaccgacaacatcaagctggaggtggccagactgagcaccgagggcaacctggaggacctgaagttccccgagaacatgggccacggcagcaccatccagctgagcgccaacaccctgaagcagaacggcagaaacggcgagatcagagtggccttcgtgctgtacaacaacctgggcccctacctgagcaccgagaacgccagcatgaagctgggcaccgaggccctgagcaccaaccacagcgtgatcgtgaacagccccgtgatcaccgccgccatcaacaaggagttcagcaacaaggtgtacctggccgaccccgtggtgttcaccgtgaagcacatcaagcagagcgaggagaacttcaaccccaactgcagcttctggagctacagcaagagaaccatgaccggctactggagcacccagggctgcagactgctgaccaccaacaagacccacaccacctgcagctgcaaccacctgaccaacttcgccgtgctgatggcccacgtggaggtgaagcacagcgacgccgtgcacgacctgctgctggacgtgatcacctgggtgggcatcctgctgagcctggtgtgcctgctgatctgcatcttcaccttctgcttcttcagaggcctgcagagcgacagaaacaccatccacaagaacctgtgcatcagcctgttcgtggccgagctgctgttcctgatcggcatcaacagaaccgaccagcccatcgcctgcgccgtgttcgccgccctgctgcacttcttcttcctggccgccttcacctggatgttcctggagggcgtgcagctgtacatcatgctggtggaggtgttcgagagcgagcacagcagaagaaagtacttctacctggtgggctacggcatgcccgccctgatcgtggccgtgagcgccgccgtggactacagaagctacggcaccgacaaggtgtgctggctgagactggacacctacttcatctggagcttcatcggccccgccaccctgatcatcatgctgaacgtgatcttcctgggcatcgccctgtacaagatgttccaccacaccgccatcctgaagcccgagagcggctgcctggacaacatcaagagctgggtgatcggcgccatcgccctgctgtgcctgctgggcctgacctgggccttcggcctgatgtacatcaacgagagcaccgtgatcatggcctacctgttcaccatcttcaacagcctgcagggcatgttcatcttcatcttccactgcgtgctgcagaagaaggtgagaaaggagtacggcaagtgcctgagaacccactgctgcagcggcaagagcaccgagagcagcatcggcagcggcaagaccagcggcagcagaacccccggcagatacagcaccggcagccagagcagaatcagaagaatgtggaacgacaccgtgagaaagcagagcgagagcagcttcatcaccggcgacatcaacagcagcgccagcctgaacagagagggcctgctgaacaacgccagagacaccagcgtgatggacaccctgcccctgaacggcaaccacggcaacagctacagcatcgccagcggcgagtacctgagcaactgcgtgcagatcatcgacagaggctacaaccacaacgagaccgccctggagaagaagatcctgaaggagctgaccagcaactacatccccagctacctgaacaaccacgagagaagcagcgagcagaacagaaacctgatgaacaagctggtgaacaacctgggcagcggcagagaggacgacgccatcgtgctggacgacgccaccagcttcaaccacgaggagagcctgggcctggagctgatccacgaggagagcgacgcccccctgctgccccccagagtgtacagcaccgagaaccaccagccccaccactacaccagaagaagaatcccccaggaccacagcgagagcttcttccccctgctgaccaacgagcacaccgaggacctgcagagcccccacagagacagcctgtacaccagcatgcccaccctggccggcgtggccgccaccgagagcgtgaccaccagcacccagaccgagcccccccccgccaagtgcggcgacgccgaggacgtgtactacaagagcatgcccaacctgggcagcagaaaccacgtgcaccagctgcacacctactaccagctgggcagaggcagcagcgacggcttcatcgtgccccccaacaaggacggcaccccccccgagggcagcagcaagggccccgcccacctggtgaccagcctgtag

SEQ ID NO: 325978 - DNA, 4587 bp, Artificial Sequence
  derived and/or modified sequence
atgtggccatcacaacttcttatcttcatgatgctgctggcgccaattatccacggaggcaaacacagcgagcggcacccggcactggcagctccattgcggcacgctgagcgatcccccgggggagcgctgccccctcgacacctgttgcagcagcccgctgccgagagaactgctgctcaccgggggcaggggcccaggggggccacacgaggagtccgggggcctggcgcacagggcgcccagatcgctgcacaagcgttcagccgcgctcctattcccatggctgtagtgaggagggagctttcctgtgaatcatacccaatcgaattgcgttgccctggtactgatgttatcatgatcgagtccgctaattacggtcggacagacgataaaatatgcgattctgatcctgcacaaatggagaacatccgctgttatctgccggacgcctacaagatcatgagccagcgttgtaataatcgaactcagtgtgcagtagtcgccggaccagatgtgtttcccgacccatgtccgggcacctataaatacctggaggtccagtatgaatgcgtgccctacaaagtagagcagaaagtcttcctgtgcccaggcttgctgaaaggggtctatcagagcgaacacctgttcgaaagtgaccatcagagtggtgcttggtgcaaggaccccctccaggcttccgataagatctactacatgccatggactccttatcggaccgacacccttactgagtattcaagcaaagatgacttcattgccggcagacctacaactacctataagcttccacacagggtggatggaactggctttgtggtttacgatggggccctctttttcaacaaggaacgtacacgaaacatagttaaatttgatctgaggactcgcattaaatctggcgaagccattattgctaacgctaattaccatgataccagcccctaccgatggggaggcaaatctgacatagacttggccgttgatgagaatggactgtgggtcatatatgctaccgaacagaataatggcaagattgtgatttcccagctgaatccctacacacttcggatagagggaacatgggacaccgcatatgacaagaggtcagcatccaatgccttcatgatctgtgggattctttatgtggtgaagtctgtgtatgaggacgacgacaacgaggccacaggcaacaaaattgactacatctacaatacagatcagtcaaaagattctttggttgacgtgcccttccctaatagctatcagtacatcgccgccgttgattataatccccgtgacaacctgctctacgtctggaataattatcacgttgtgaagtattccctggactttggtcccctggactcacgttccggccaggctcatcatggccaggtgtcttatatctcgcccccaatacaccttgactcggagctggaacgacctagcgtgaaggatatcagcactacaggacctctgggcatgggtagcacgacaacaagcaccaccttacgcactacgaccctgtcccctggacgatctacaaccccctcggtttccgggaggaggaatcggtctacttccaccccatctcctgctgtcgaggtgctcgacgacatgactacgcatcttcctagcgcctccagtcagatacccgcgcttgaagagtcgtgcgaggcggttgaggctagagaaattatgtggttcaagacacgacaagggcagattgcaaaacagccttgcccggccggaaccattggcgtgtctacatatctctgcctggcaccagatggtatctgggacccgcagggccccgacctgagtaattgttccagcccttgggtgaatcatatcacccagaagttgaagtctggcgaaaccgcggcaaatatagcccgcgagctcgctgagcagacacggaaccacctgaatgctggcgatatcacctactcagtgcgagctatggatcaactcgtgggcctgttggacgtgcagttgagaaacctgacaccgggcggcaaagacagcgctgccagatctctcaataagttgcaaaaaagggaacgcagttgtcgcgcgtatgtacaggccatggttgagactgtgaacaacttgttgcagccccaagctttgaacgcctggagggatttgacaacgtccgaccagctccgggcagctactatgctattacacactgtggaggaatctgcttttgtgctggctgacaacctgctgaaaaccgatatcgttcgcgagaatactgataacatcaagcttgaggtggcaagactatcaaccgaggggaacctcgaggatcttaagttccccgaaaatatggggcatgggagtactatccagctgtctgcaaacactctgaaacagaacgggcgaaacggtgaaatcagagtcgcatttgtgctctataacaatttaggcccctacctctctacagaaaatgcttccatgaaactcggcacagaggccctgagcacaaaccatagtgtcattgttaactcacccgtgatcactgctgctatcaacaaagaattttcaaataaggtatacctagcagaccccgtcgtgtttacagtcaagcacattaaacagtcagaggagaattttaatccaaactgctccttctggtcttactcaaaaaggactatgaccgggtactggtctacgcaggggtgtagacttctgacgaccaacaagacccatactacctgttcttgcaatcacctgaccaactttgcagtgctgatggcccacgtggaagtcaaacattcagatgccgtgcacgatcttctgctggacgttataacctgggtgggaatccttctgtcattggtgtgtttgttgatctgcatcttcaccttttgcttcttccggggcctccagtcagacagaaataccatccacaagaacctttgtataagcctctttgtggcagaacttctgtttctgatcggaattaataggacagatcagcccatcgcatgtgctgtattcgccgcccttctgcactttttcttcttagctgcattcacatggatgtttctggaaggcgtgcagctgtacataatgctagttgaggtgttcgaaagtgaacactctaggagaaaatacttctacctggtgggctacggaatgccagctctaatcgtcgccgtgtccgcggctgtggattatcggtcttacgggaccgacaaggtgtgctggctgcgactcgatacttactttatctggagcttcatcggcccagccactctgataattatgctaaacgtgatcttcctcggcatcgctctgtacaaaatgttccaccataccgccattttaaaaccagagagcggatgtctggacaacatcaagagctgggttattggcgccatcgcgctcctgtgtctcctgggcctgacctgggccttcggcctcatgtatattaacgagtcaacagtgattatggcttacctgttcacaattttcaattccctgcagggtatgtttatctttattttccactgcgtacttcaaaaaaaagtccgaaaggagtacggaaagtgtctacgaacgcattgctgttccggaaagtctacggagagttccatcggatcaggcaaaacctcaggctcgaggactcccggtcgatatagcacaggaagccagtcccgaatccgtcgtatgtggaatgatacagtccggaagcagtccgagagctctttcattactggcgatatcaattcctccgccagtctgaatagagaggggttattgaacaatgctcgggatacctctgtgatggacactcttcctttgaatgggaatcacggaaactcctacagtatcgcaagtggggagtacctctccaattgtgtccaaatcattgacaggggttacaatcataacgagaccgccctggagaagaagattctgaaagagctgacctcaaattacattccaagctaccttaataatcacgagcggagtagcgagcaaaaccgaaacctgatgaacaagctggttaacaacctgggttcgggtcgggaagacgacgctatagtgcttgacgatgccacaagtttcaaccacgaggagagcctcgggctagagctcatccacgaagagtcagacgcgcctctcctgccgccccgggtgtattccactgagaatcatcagcctcaccattacacccgccgacgaataccacaggaccattccgaatcttttttccctctgctgactaacgagcacaccgaggacttacagagcccccaccgcgactcactgtatacaagtatgcctacgctcgcgggggttgctgcaactgagtcagtgacaacttccacacagaccgaacccccgcctgccaagtgcggagatgctgaggatgtatattacaaaagcatgccaaacctgggatcaaggaatcatgtgcatcagctgcacacttactatcagctaggaaggggctcaagcgatgggttcattgtgccacccaataaagatggaacccccccagagggctcatcaaagggacccgcacaccttgtgacaagcctttag

SEQ ID NO: 325979 - DNA, 4843 bp, Artificial Sequence
  derived and/or modified sequence
aaaatcatcagtcttggaatacagaagagaaactagaaatatacgtattttgtttcacatttgaacagtcattcttgaggaatactccatacctgagtagacagccatgtggccatcgcagctactaattttcatgatgctcttagctccaataattcatggtggcaagcacagtgaacgacatcctgcccttgctgctccattgcgacacgctgagcgcagcccaggaggcgctcttccacccagacatctgcttcagcagccagctgcagagcgcaccgctgctcatcgtggacaagggccccgtggagctaccagaggagttcgcggtccaggtgcccaaggagcacagattgcagcgcaagctttcagccgtgccccaattccaatggctgtggtccgcagagagctatcctgtgagagctatcctatagagcttcgctgtccaggaacagacgtcatcatgatagaaagtgccaactatggcaggactgatgacaaaatttgtgactctgaccctgctcagatggagaatatccgatgttatctgccagatgcctataagattatgtctcaaagatgcaataacagaacccagtgtgcagtggtggcaggtcctgatgtttttccagacccgtgtccaggaacctataaataccttgaagtgcagtatgaatgtgtcccttacaaagtggaacaaaaagtttttctttgtcctggactactaaaaggagtataccagagtgaacatttgtttgagtccgaccaccaatctggggcgtggtgcaaagaccctctgcaggcatctgacaagatttattatatgccctggactccctacagaactgataccctgactgagtattcatccaaggatgacttcattgctggaagaccaactacaacctacaagctccctcacagggtggatggcacaggatttgtagtgtatgatggagctttgttcttcaacaaagagcgcaccaggaacatagtaaagtttgatttgcggactaggataaagagtggagaggctatcatagcaaatgccaattaccatgatacctccccttaccgatggggaggcaaatctgacatagacctggcagtagatgagaatgggctatgggtaatctatgcaacagaacaaaacaatggtaaaattgtcattagtcaattgaacccttacaccctacggatcgaaggaacatgggatactgcatatgataaaaggtcagcttccaatgcctttatgatttgtggaattctgtatgtggtcaaatctgtatatgaggatgatgacaatgaggctactggaaataagattgactacatttacaacactgaccaaagcaaggatagtttggtggatgtaccctttcctaattcataccagtacattgcagctgtggattacaaccccagggacaacctactttatgtatggaataactatcacgtcgtgaaatattctttggattttggacctctggatagtagatcagggcaggcacatcatggacaagtttcatacatttctccgccaattcaccttgactctgagctagaaagaccctctgttaaagatatctctaccacaggacctcttggcatgggaagcactaccaccagtaccacccttcggaccacaactttgagcccaggaaggagtaccaccccgtcagtgtcaggaagaagaaaccggagtactagtaccccatctccagctgtcgaggtacttgatgacatgaccacacaccttccatcagcatcgtcccaaatcccagctctcgaagagagctgtgaggctgtggaagcccgagaaatcatgtggtttaagactcgtcaaggacagatagcaaagcagccatgccctgcaggaactataggtgtatcaacttatctatgccttgctcctgatggaatttgggatccccaaggtccagatctcagcaactgttcttctccttgggtcaatcatataacacagaagttgaaatctggtgaaacagctgccaacattgctagagagctggctgaacagacaagaaatcacttgaatgctggggacatcacctactctgtccgggccatggaccagctggtaggcctcctagatgtacagcttcggaacttgaccccaggtggaaaagatagtgctgcccggagtttgaacaagcttcagaaaagagagcgctcttgcagagcctatgtccaggcaatggtcgagacagttaacaacctccttcagccacaagctttgaatgcatggagagacctgactacgagtgatcagctgcgtgcggccaccatgttgcttcatactgtggaggaaagtgcttttgtgctggctgataaccttttgaagactgacattgtcagggagaatacagacaatattaaattggaagttgcaagactgagcacagaaggaaacttagaagacctaaaatttccagaaaacatgggccatggaagcactatccagctgtctgcaaataccttaaagcaaaatggccgaaatggagagatcagagtggcctttgtcctgtataacaacttgggtccttatttatccacggagaatgccagtatgaagttgggaacggaagctttgtccacaaatcattctgttattgtcaattcccctgttattacggcagcaataaacaaagagttcagtaacaaggtttatttggctgatcctgtggtatttactgttaaacatatcaagcagtcagaggaaaatttcaaccctaactgttcattttggagctactccaagcgtacaatgacaggttattggtcaacacaaggctgtcggctcctgacaacaaataagacacatactacatgctcttgtaaccacctaacaaattttgcagtactgatggcacatgtggaagttaagcacagtgatgcggtccatgacctccttctggatgtgatcacgtgggttggaattttgctgtcccttgtttgtctcctgatttgcatcttcacattttgctttttccgggggctccagagtgaccgtaacaccatccacaagaacctctgcatcagtctctttgtagcagagctgctcttcctgattgggatcaaccgaactgaccaaccaattgcctgtgctgttttcgctgccctgttacatttcttcttcttggctgccttcacctggatgttcctggagggggtgcagctttatatcatgctggtggaggtttttgagagtgaacattcacgtaggaaatacttttatctggtcggctatgggatgcctgcactcattgtggctgtgtcagctgcagtagactacaggagttatggaacagataaagtatgttggctccgacttgacacctacttcatttggagttttataggaccagcaactttgataattatgcttaatgtaatcttccttgggattgctttatataaaatgtttcatcatactgctatactgaaacctgaatcaggctgtcttgataacatcaagtcatgggttataggtgcaatagctcttctctgcctattaggattgacctgggcctttggactcatgtatattaatgaaagcacagtcatcatggcctatctcttcaccattttcaattctctacagggaatgtttatatttattttccattgtgtcctacagaagaaggtacgaaaagagtatgggaaatgcctgcgaacacattgctgtagtggcaaaagtacagagagttccattggttcagggaaaacatctggttctcgaactcctggacgctactccacaggctcacagagccgaatccgtagaatgtggaatgacacggttcgaaagcagtcagagtcttcctttattactggagacataaacagttcagcgtcactcaacagagaggggcttctgaacaatgccagggatacaagtgtcatggatactctaccactgaatggtaaccatggcaatagttacagcattgccagcggcgaatacctgagcaactgtgtgcaaatcatagaccgtggctataaccataacgagaccgccctagagaaaaagattctgaaggaactcacttccaactatatcccttcttacctgaacaaccatgagcgctccagtgaacagaacaggaatctgatgaacaagctggtgaataaccttggcagtggaagggaagatgatgccattgtcctggatgatgccacctcgtttaaccacgaggagagtttgggcctggaactcattcatgaggaatctgatgctcctttgctgcccccaagagtatactccaccgagaaccaccagccacaccattataccagaaggcggatcccccaagaccacagtgagagctttttccctttgctaaccaacgagcacacagaagatctccagtcaccccatagagactctctctataccagcatgccgacactggctggtgtggccgccacagagagtgttaccaccagcacccagaccgaacccccaccggccaaatgtggtgatgccgaagatgtttactacaaaagcatgccaaacctaggctccagaaaccacgtccatcagctgcatacttactaccagctaggtcgcggcagcagtgatggatttatagttcctccaaacaaagatgggacccctcccgagggaagttcaaaaggaccggctcatttggtcactagtctatagaagatgacacagaaattggaaccaacaaaactgctaacaccttgttgactgttctgagttgatataagcagtggtaataatgtgtgtactcctaaatctttatgctgtcctctaaagacaaacacaaactctcagactttttttttttta

SEQ ID NO: 325980 - DNA, 4587 bp, Artificial Sequence
  derived and/or modified sequence
atgtggcccagccagctgctgatcttcatgatgctgctggcccccatcatccacggcggcaagcacagcgagcggcacccagccctggccgcccccctgcggcatgctgagaggagccctgggggcgccctgcccccaagacacctgctgcagcagcctgctgctgagaggacagctgcccaccggggccagggccccaggggggccacccggggcgtgcggggccctggggcccagggcgcccagattgctgcccaggccttcagccgggcccccatccccatggctgtggtgagaagagagctgagctgtgagagctaccccatcgagctgcgctgccccggcacagatgtgatcatgattgaaagtgccaactacggccgcacagatgacaagatctgtgacagcgaccctgcccagatggagaacatccgctgctacctgcctgatgcctacaagatcatgagccagcgctgcaacaacagaacccagtgtgctgtggtggccggcccagatgtgtttcctgacccctgccccggcacctacaagtacctggaggtgcagtatgaatgtgtgccctacaaggtggagcagaaggtgttcctgtgccccggcctgctgaagggcgtgtaccagagcgagcacctgtttgaaagtgaccaccagagcggggcctggtgcaaggaccccctgcaggccagtgacaagatctactacatgccctggaccccctacagaacagacaccctgacagagtacagcagcaaggatgacttcatcgccggccggcccaccaccacctacaagctgccccaccgggtggatggcactggatttgtggtgtatgatggagccctcttcttcaacaaggagaggaccaggaacatcgtgaagtttgacctgcggacccgcatcaagtctggagaggccatcatcgccaatgccaactaccatgacaccagcccctaccgctggggcggcaagagtgacatcgacctggccgtggatgaaaatggcctgtgggtgatctatgccacagagcagaacaacgggaagatcgtcatcagccagctgaacccctacaccctgagaattgagggcacctgggacacagcctatgacaagaggtctgccagcaatgccttcatgatctgtggcatcctgtatgtggtgaagtctgtgtatgaagatgatgacaatgaggccactggaaacaagattgactacatctacaacacagaccagagcaaggacagcctggtggatgtgcccttccccaacagctaccagtacatcgctgctgtggactacaacccccgggacaacctgctgtatgtgtggaacaactaccacgtggtgaagtacagcctggactttggccccctggacagccgcagcggccaggcccaccacggccaggtgtcctacatcagcccccccatccacctggacagcgagctggagcggcccagcgtgaaggacatcagcaccaccggccccctgggcatgggcagcaccaccaccagcaccaccctgcggaccaccaccctgagccctggccgcagcaccacccccagcgtgtctggaagaagaaacagaagcaccagcacccccagccctgctgtggaggtgctggatgacatgaccacccacctgcccagcgccagcagccagatcccagccctggaggagagctgtgaggccgtggaggcccgggagatcatgtggttcaagacccggcagggccagatcgccaagcagccctgcccagctggcaccatcggcgtgtccacctacctgtgcctggccccagatggcatctgggacccccagggccctgacctgagcaactgcagcagcccctgggtgaaccacatcacccagaagctgaagagcggggagacagctgccaacatcgcccgggagctggccgagcagaccaggaaccacctgaatgctggggacatcacctacagcgtgcgggccatggaccagctggtgggcctgctggatgtgcagctgaggaacctgaccccaggcggcaaggacagcgctgcccggagcctgaacaagctgcagaagcgggagaggagctgccgggcctacgtgcaggccatggtggagaccgtgaacaacctgctgcagccccaggccctgaatgcctggagggacctgaccaccagtgaccagctgcgggccgccaccatgctgctgcacacagtggaggagagcgcctttgtgctggccgacaacctgctgaagacagacatcgtgcgggagaacacagacaacatcaagctggaggtggcccggctgagcacagagggcaacctggaggacctgaagtttcctgagaacatgggccacggcagcaccatccagctgagcgccaacaccctgaagcagaatggaagaaatggagagatccgggtggcctttgtgctgtacaacaacctgggcccctacctgagcacagaaaatgcctccatgaagctgggcacagaggccctgagcaccaaccacagcgtcatcgtgaacagccctgtgatcacagctgccatcaacaaggagttcagcaacaaggtgtacctggccgaccctgtggtgttcaccgtgaagcacatcaagcagagcgaggagaacttcaaccccaactgcagcttctggagctacagcaagaggaccatgacaggctactggagcacccagggctgccgcctgctgaccaccaacaagacccacaccacctgcagctgcaaccacctgaccaactttgctgtgctgatggcccacgtggaggtgaagcacagtgatgctgtgcatgacctgctgctggatgtgatcacctgggtgggcatcctgctgagcctggtgtgcctgctgatctgcatcttcaccttctgcttcttccggggcctgcagagcgacaggaacaccatccacaagaacctgtgcatcagcctgtttgtggccgagctgctcttcctgattggcatcaacagaacagaccagcccatcgcctgtgctgtgtttgctgccctgctgcacttcttcttcctggccgccttcacctggatgttcctggagggcgtgcagctgtacatcatgctggtggaggtgtttgaaagtgagcacagcaggaggaagtacttctacctggtgggctacggcatgcctgccctgattgtggccgtgtctgctgctgtggactaccgctcctatggaacagacaaggtgtgctggctgcggctggacacctacttcatctggagcttcatcggccctgccaccctcatcatcatgctgaatgtcatcttcctgggcatcgccctgtacaagatgttccaccacacagccatcctgaagccagagagcggctgcctggacaacatcaagtcctgggtgattggagccatcgccctgctgtgcctgctgggcctgacctgggccttcggcctgatgtacatcaatgaaagcaccgtcatcatggcctacctgttcaccatcttcaacagcctgcagggcatgttcatcttcatcttccactgtgtgctgcagaagaaggtgaggaaggagtatggcaagtgcctgcggacccactgctgcagcggcaagagcacagagagcagcatcggcagcggcaagaccagcggcagcaggaccccaggccgctacagcacaggcagccagagccgcatccggaggatgtggaatgacacagtgaggaagcagagcgagagcagcttcatcactggagacatcaacagcagcgccagcctgaaccgggagggcctgctgaacaatgcccgggacacctctgtgatggacaccctgcccctgaatggaaaccacggcaacagctacagcatcgccagcggggagtacctgagcaactgtgtgcagatcatcgaccggggctacaaccacaatgaaacagccctggagaagaagatcctgaaggagctgaccagcaactacatccccagctacctgaacaaccacgagaggagcagcgagcagaacagaaacctgatgaacaagctggtgaacaacctgggcagcggcagagaagatgatgccatcgtgctggatgatgccaccagcttcaaccacgaggagagcctgggcctggagctgattcatgaggagagtgatgcccccctgctgcccccccgggtgtacagcacagagaaccaccagccccaccactacacccggcggcgcatcccccaggaccacagcgagagcttcttccccctgctgaccaatgagcacacagaggacctgcagagcccccaccgggacagcctgtacacctccatgcccaccctggccggcgtggccgccacagagagcgtgaccaccagcacccagacagagcccccaccagccaagtgtggagatgctgaagatgtgtactacaagtccatgcccaacctgggcagcagaaatcatgtgcaccagctgcacacctactaccagctgggccggggcagcagtgatggcttcatcgtgccccccaacaaggatggcaccccacctgagggcagcagcaaaggacctgcccacctggtgaccagcctgtag

SEQ ID NO: 325981 - DNA, 4587 bp, Artificial Sequence
  derived and/or modified sequence
atgtggcccagccagctgctgatcttcatgatgctgctggcccccatcatccatgggggaaagcactcagagagacaccccgctctcgccgctcctttacgacatgccgagagaagtccaggcggggcccttccaccccgccatctattgcagcagccagcagccgaacggacagctgctcacagaggccagggccccagaggagctacaagaggcgtgcgaggccccggggcacagggggcccagattgcagcacaggccttctctcgagcccctatcccgatggcagtagttcggagggaattgtcctgcgaatcttaccccattgagctccggtgccctggtacagatgtcatcatgatcgagagtgctaactatggacgaacagacgacaagatctgtgactccgaccccgctcaaatggagaacatcaggtgctacctgcccgatgcctataaaatcatgtcacagcgatgcaataatcggactcaatgtgctgttgtcgccgggcctgacgtgttcccagatccatgtccgggaacttacaagtaccttgaggtccaatatgagtgcgtgccctacaaggtggaacagaaagtcttcctgtgccctggtctgctcaaaggtgtctaccagtcggaacatctgttcgagtctgatcatcagtctggagcctggtgtaaagatcccctgcaagcatccgacaaaatctactatatgccctggacaccttatcgcacggacacgttgaccgagtattcaagcaaggacgattttatagccggccgacccacgacgacatacaagctaccccaccgtgtcgacgggaccggcttcgtggtgtacgatggtgccctgttcttcaacaaggaacgcacaaggaatattgttaagttcgatctgagaacccggatcaaaagcggggaggccataatcgctaatgcaaattaccacgatacctccccttacagatgggggggcaaaagcgatatcgacctggccgttgatgaaaacgggctctgggtcatttacgcaacagagcagaacaacggaaagatagtgatcagccagctcaacccttatacactgcgtattgaaggcacttgggatactgcttacgataagcgatctgcgagcaatgcgtttatgatctgcggaattctatatgtggtaaagagcgtttatgaggacgatgacaatgaggctacaggcaataagattgactatatctacaacaccgaccaatccaaagactccctcgtggacgtcccctttcctaactcttaccagtatattgcagccgttgactacaatccccgagacaacctactgtacgtgtggaacaactatcacgttgtaaagtacagcttagatttcggccctttggactcccggagtggccaagcgcaccatggacaggtcagttacatttccccgcctatccatctcgactccgagctcgagcgcccaagcgtgaaagacatttcgaccactggaccattaggcatgggtagtaccactacctcaaccacccttaggacgacaacactgtccccggggaggagtaccactccctccgtgtctggaagaagaaaccgaagtacatctaccccctctcctgccgtcgaggtgttggatgatatgaccacacaccttcccagcgcctctagtcagatcccagccctcgaggagagctgtgaggccgtggaagcgagggagatcatgtggttcaagaccagacagggccagatcgctaagcaaccttgtccagctggtaccatcggggtgtcaacctacctgtgtctagccccagatggcatatgggatcctcagggcccggacctcagcaactgttcatctccttgggtgaatcacatcacacaaaagttgaaatccggagagaccgcagcaaacatcgctcgggagctggcggagcagacgaggaatcacctcaacgccggagacataacttacagcgttcgagcgatggatcagctggtaggcctgctggatgtgcagctacgaaacttaacgcccgggggaaaggactcggccgcaaggagtctgaacaagttgcagaaaagggaacggtcatgtcgagcctacgtccaggctatggtggagacagtcaacaatcttctgcagccccaagctttaaatgcatggagggatctgactacaagtgatcagctccgggcggcaacaatgctacttcacaccgtggaagaatctgcattcgtgctagccgacaatcttcttaaaacggatatcgtgagggagaacactgacaatatcaagcttgaggtagcacgactgtccaccgagggtaatctggaagatctgaagtttcccgagaacatggggcatggatcaactatccaactgtccgcaaacactctgaaacagaacggccgaaacggagagatcagagtggcattcgtactgtataacaatcttggaccgtacctgagcaccgaaaatgctagcatgaagcttgggactgaggctctttccaccaatcacagcgtgattgtcaacagcccagtgataacggccgcaattaataaggagtttagcaataaggtctaccttgccgatcccgtcgtctttaccgtgaaacacattaagcagtctgaggagaatttcaatccaaactgttccttctggtcctactcaaagcggaccatgacaggctactggtctacccaaggttgtaggcttctaaccactaataagacccatacgacttgctcatgtaatcacctcacgaatttcgccgtacttatggcacacgtagaggtgaagcattctgacgctgtgcacgacctactcctcgatgtgatcacatgggtggggattctgctaagcctagtgtgcttgttaatctgtatatttacattctgcttctttagaggcctacaaagcgatcgcaatactattcacaagaacctatgtatctccctgtttgtcgccgagcttttatttttaatcggcattaaccgaactgaccaacccatcgcttgcgctgtattcgctgcgcttcttcacttctttttcctcgctgcatttacctggatgttcctcgagggagtgcagctctacattatgctggtggaggtgttcgagtccgaacactctcgtaggaaatacttctacctcgtcggatacggaatgccagcactgatcgtagccgtttctgctgcagtggactatcgcagttacggtacagacaaggtgtgttggctacgtctggatacatacttcatctggtctttcattggaccagccaccctgataataatgctgaacgtcatctttctgggaatagctctatacaagatgtttcatcacacagccattcttaaaccagagtccggttgcctggacaatattaaatcctgggttattggcgctattgcactgctttgtctcctcggcttaacatgggcctttggcctgatgtatattaatgagtccacagtcataatggcttacctgtttacaatcttcaacagtctccagggtatgttcatctttatcttccactgcgtcctgcagaaaaaagttagaaaggagtacggaaaatgtctgcggacccactgctgttctggcaagagcacggagtccagcatcgggagtggaaaaacaagtgggtcacgcacgcctggacgatacagcaccggttcacagagccgtatacggcgcatgtggaatgacacggtgaggaagcagtcggagagcagctttataactggagacattaattcgtcagcatcattgaatagggaggggcttttaaataacgcacgggataccagcgttatggacaccttgcccctgaatggcaaccacgggaactcatattctatcgctagcggggaatacctgagcaactgcgttcagattattgatcgaggctataaccacaatgagacagccttggaaaagaaaatactcaaggagctgacaagcaattacataccttcctacctgaataaccatgagcgatcatcagagcagaatagaaacctgatgaataagctggtcaataacttagggagcgggcgagaggacgatgctatagtactggacgatgcaaccagtttcaatcacgaggagtccctcgggcttgagctcattcatgaagaatccgacgctcccctgctgccccccagagtgtatagtacggagaaccatcagccacaccattacacacgccgccgaatccctcaggaccattccgagtctttcttccccctgctcaccaatgagcacactgaggatctccagagcccacacagagactctctatacacgagcatgccaaccttggcaggggtggcagctactgagtccgtgaccaccagtacacagacagagcctcctcccgctaagtgcggggatgccgaagatgtgtattataaaagtatgcctaacttaggatcccgaaatcacgtgcatcagctgcatacatactatcagttgggccgaggctccagcgacgggttcatagttcccccaaacaaggacgggacccctccagaaggctcatccaaggggcctgcgcacctggtgacaagtctctag

SEQ ID NO: 325982 - DNA, 4587 bp, Artificial Sequence
  derived and/or modified sequence
atgtggccatctcaactcctcatcttcatgatgctgcttgcccctataattcatggcggaaagcattccgagaggcatccagctttggcggcacctctgcggcacgcggagagaagccccggaggagccctccctcctagacaccttcttcagcagcccgctgccgagcggaccgccgcacaccgcggacagggcccaagaggggctaccagaggtgtccgcggaccaggagcacagggggcacagatcgccgctcaagctttttcccgtgccccaatcccgatggctgtggtcagacgtgaactgtcctgcgagtcctacccaattgagctccgctgccccggaaccgacgttatcatgatagagagcgctaattacgggagaacagatgacaagatctgtgactcagatcccgctcagatggaaaatatccggtgctatctccccgacgcctacaagattatgagccagagatgtaataatcgaacccaatgcgcagtggtggcaggtcctgacgtattccccgatccgtgtcctgggacctacaagtatttggaagttcagtatgagtgtgttccatataaggtggaacagaaagtctttctatgtccaggactgctgaaaggtgtgtaccagtcagaacatctgtttgaaagtgaccatcaatccggggcttggtgtaaagatcctttacaggcctctgacaagatttactacatgccatggactccttatcgcacagatacactcaccgaatacagctccaaagacgactttattgcagggcgacctactactacctacaagctgccgcaccgcgtcgacggaaccgggttcgtggtgtacgacggcgcactattttttaacaaggagcgaacccgcaacatcgtaaagtttgacctccgcacgagaataaagtcgggcgaggctattattgccaacgccaattatcacgacacatccccctatcggtggggtggcaagtcagacattgatctggcagttgacgagaatggcttgtgggtgatctatgctacagaacaaaataacggaaagatcgtaatttctcagctcaacccctacacactgcggatcgaaggtacctgggatacggcgtacgacaagagatctgcatcaaacgcttttatgatttgcggtattctttacgttgttaaatcagtctatgaagacgatgataatgaagctaccggcaataagattgattatatttacaacacagatcagagtaaggatagcctggtagatgtgcccttcccaaattcatatcagtacatcgccgctgtcgattacaatccaagggacaacctgctatacgtgtggaacaactatcacgtggtgaagtacagtctggacttcggcccacttgattccaggtcaggccaggcccaccacggacaggttagttacatcagcccccctatacaccttgattcggaactggagagaccgtcagtgaaggacattagcactaccggccctctcggcatgggatcaactaccacatctaccaccctacgcacaaccactcttagcccaggcaggtccaccacccctagtgtgtcaggtcgtcggaaccggtccacttctactcccagccccgcagtcgaagtcctggatgatatgactacacatttgccaagtgcgtcctctcagattccagccctggaggagtcgtgtgaggcagtggaggcgagagagattatgtggtttaagactcgccagggacagattgcgaagcagccgtgtcccgcaggcacgattggggtgagtacatatctttgcttggccccagacggcatctgggatccccagggcccagaccttagcaactgctcttcaccgtgggtgaaccacattacccaaaagctgaagagcggcgagacggcagctaacatcgccagggaacttgccgagcagacacggaatcatctgaacgcgggagacatcacatactctgtgagggcaatggaccagctggttggactcttagacgtacagcttagaaacctgactcctggagggaaggactcagccgctcgcagtctgaacaagttgcagaagagagagaggtcctgtagggcatacgtgcaggccatggtagagaccgtgaacaatctacttcaaccacaagctcttaatgcctggcgggatctcaccacttcagatcagctgagggccgcaacaatgttgttgcatacggtggaagaaagcgcatttgtactggcagacaatctgctgaaaacagatattgtgcgcgaaaacaccgacaatattaagctggaggtcgccagactctcgacagagggaaacctagaggacttgaagttccccgagaatatgggacatggatctactatacagctctccgccaatacactaaagcagaacggacggaatggcgagatccgggtggccttcgtcctgtataacaatttaggtccatatctgagcactgagaatgcttcgatgaagctgggcaccgaggctttgagtacaaaccatagcgtgattgtcaactctcccgtgattacagcagccatcaataaagaattcagtaacaaagtctacctggctgatcccgtcgtgttcaccgtcaagcacattaagcaatctgaagaaaactttaatcctaattgttcgttctggtcttacagtaagcgtaccatgacagggtattggagcactcagggatgtaggctgctgactaccaacaagacccacactacatgctcttgtaaccacctcactaattttgcagtgctgatggcccacgtggaagttaagcactccgatgctgtgcatgatttgctgctggacgtaatcacatgggttggtattctgctatccctcgtttgtttactcatctgtatctttaccttttgtttcttccgcggtctccagagcgacaggaatacgatacacaaaaacctgtgtatctcattattcgttgcagaacttttatttctaatcgggatcaaccgcaccgatcagccaatagcttgtgctgtgtttgcagccctgctgcactttttctttttggccgcttttacgtggatgttcctagagggggtacaactttacatcatgctcgtcgaggtcttcgagagcgagcactccagacgtaaatatttctatctcgtgggatacgggatgccagccttaatcgtcgcagtctcagctgcggtagattaccgtagttacgggactgataaggtctgttggcttcggctggacacgtatttcatttggtccttcattggcccagccaccctgatcattatgctgaatgttatatttttaggaatcgcactgtataaaatgttccaccatactgctatactgaagccagaatctggttgtctggacaacattaaatcatgggtaataggtgccattgcgctgctgtgtttgctgggccttacatgggccttcggactgatgtacatcaacgaatccacggtcataatggcttacctttttacaattttcaacagtctgcagggaatgtttatttttattttccactgtgtactgcaaaagaaggtgcgtaaggagtatggaaaatgtctgagaactcactgctgctcaggtaaatccactgagtcgtccatcggatccgggaagacttctgggagcagaactcccggtcgatacagcaccgggtcacaatcccgcatacgccgaatgtggaacgataccgtccgcaagcagtccgaaagcagtttcatcaccggcgatatcaactccagcgccagccttaatagggaagggttactgaacaatgccagggataccagcgtgatggacacactgcctcttaacggcaaccatggtaactcctacagtattgctagcggggagtatctttccaattgcgtgcaaataatcgatagaggctacaaccacaatgaaacagccctggaaaagaagatactcaaggagcttacatctaattacattccaagctatctcaataatcacgagagatcaagtgaacaaaacagaaatctgatgaacaaattggtaaataacttgggcagcgggcgtgaagacgacgctatcgtgcttgacgacgcaacctcatttaatcatgaggagagtctgggcttggagctgatccatgaggagtccgacgcccctctgcttcctcccagagtgtactcaaccgagaaccaccagcctcaccactatactcggagaaggattcctcaggaccattccgagtccttttttcctctgttgacaaacgagcacacagaagacctccagtctccccatcgggactccttgtacacttctatgcctaccctggctggcgtagccgcaactgagagtgtcactactagcacacagacggagcccccacctgcaaagtgcggagacgcggaagatgtgtactacaaaagcatgcccaacttgggcagccgcaatcatgtgcatcaactccacacttactaccaacttggcagaggttccagcgatggttttatcgtgccaccgaataaggacggcaccccccctgagggatcatcgaaaggcccagctcacctggttacatctctgtag

SEQ ID NO: 325983 - protein, 918 aa, Artificial Sequence
  derived and/or modified sequence
  misc_feature (1)..(1): Xaa can be any naturally occurring amino acid
XYLCLAPDGIWDPQGPDLSNCSSPWVNHITQKLKSGETAANIARELAEQTRNHLNAGDITYSVRAMDQLVGLLDVQLRNLTPGGKDSAARSLNKAMVETVNNLLQPQALNAWRDLTTSDQLRAATMLLHTVEESAFVLADNLLKTDIVRENTDNIKLEVARLSTEGNLEDLKFPENMGHGSTIQLSANTLKQNGRNGEIRVAFVLYNNLGPYLSTENASMKLGTEALSTNHSVIVNSPVITAAINKEFSNKVYLADPVVFTVKHIKQSEENFNPNCSFWSYSKRTMTGYWSTQGCRLLTTNKTHTTCSCNHLTNFAVLMAHVEVKHSDAVHDLLLDVITWVGILLSLVCLLICIFTFCFFRGLQSDRNTIHKNLCISLFVAELLFLIGINRTDQPIACAVFAALLHFFFLAAFTWMFLEGVQLYIMLVEVFESEHSRRKYFYLVGYGMPALIVAVSAAVDYRSYGTDKVCWLRLDTYFIWSFIGPATLIIMLNVIFLGIALYKMFHHTAILKPESGCLDNIKSWVIGAIALLCLLGLTWAFGLMYINESTVIMAYLFTIFNSLQGMFIFIFHCVLQKKVRKEYGKCLRTHCCSGKSTESSIGSGKTSGSRTPGRYSTGSQSRIRRMWNDTVRKQSESSFITGDINSSASLNREGLLNNARDTSVMDTLPLNGNHGNSYSIASGEYLSNCVQIIDRGYNHNETALEKKILKELTSNYIPSYLNNHERSSEQNRNLMNKLVNNLGSGREDDAIVLDDATSFNHEESLGLELIHEESDAPLLPPRVYSTENHQPHHYTRRRIPQDHSESFFPLLTNEHTEDLQSPHRDSLYTSMPTLAGVAATESVTTSTQTEPPPAKCGDAEDVYYKSMPNLGSRNHVHQLHTYYQLGRGSSDGFIVPPNKDGTPPEGSSKGPAHLVTSL

SEQ ID NO: 325984 - DNA, 2757 bp, Artificial Sequence
  derived and/or modified sequence
tgatacctgtgcctggcccccgacggcatctgggacccccagggccccgacctgagcaactgcagcagcccctgggtgaaccacatcacccagaagctgaagagcggcgagaccgccgccaacatcgccagagagctggccgagcagaccagaaaccacctgaacgccggcgacatcacctacagcgtgagagccatggaccagctggtgggcctgctggacgtgcagctgagaaacctgacccccggcggcaaggacagcgccgccagaagcctgaacaaggccatggtggagaccgtgaacaacctgctgcagccccaggccctgaacgcctggagagacctgaccaccagcgaccagctgagagccgccaccatgctgctgcacaccgtggaggagagcgccttcgtgctggccgacaacctgctgaagaccgacatcgtgagagagaacaccgacaacatcaagctggaggtggccagactgagcaccgagggcaacctggaggacctgaagttccccgagaacatgggccacggcagcaccatccagctgagcgccaacaccctgaagcagaacggcagaaacggcgagatcagagtggccttcgtgctgtacaacaacctgggcccctacctgagcaccgagaacgccagcatgaagctgggcaccgaggccctgagcaccaaccacagcgtgatcgtgaacagccccgtgatcaccgccgccatcaacaaggagttcagcaacaaggtgtacctggccgaccccgtggtgttcaccgtgaagcacatcaagcagagcgaggagaacttcaaccccaactgcagcttctggagctacagcaagagaaccatgaccggctactggagcacccagggctgcagactgctgaccaccaacaagacccacaccacctgcagctgcaaccacctgaccaacttcgccgtgctgatggcccacgtggaggtgaagcacagcgacgccgtgcacgacctgctgctggacgtgatcacctgggtgggcatcctgctgagcctggtgtgcctgctgatctgcatcttcaccttctgcttcttcagaggcctgcagagcgacagaaacaccatccacaagaacctgtgcatcagcctgttcgtggccgagctgctgttcctgatcggcatcaacagaaccgaccagcccatcgcctgcgccgtgttcgccgccctgctgcacttcttcttcctggccgccttcacctggatgttcctggagggcgtgcagctgtacatcatgctggtggaggtgttcgagagcgagcacagcagaagaaagtacttctacctggtgggctacggcatgcccgccctgatcgtggccgtgagcgccgccgtggactacagaagctacggcaccgacaaggtgtgctggctgagactggacacctacttcatctggagcttcatcggccccgccaccctgatcatcatgctgaacgtgatcttcctgggcatcgccctgtacaagatgttccaccacaccgccatcctgaagcccgagagcggctgcctggacaacatcaagagctgggtgatcggcgccatcgccctgctgtgcctgctgggcctgacctgggccttcggcctgatgtacatcaacgagagcaccgtgatcatggcctacctgttcaccatcttcaacagcctgcagggcatgttcatcttcatcttccactgcgtgctgcagaagaaggtgagaaaggagtacggcaagtgcctgagaacccactgctgcagcggcaagagcaccgagagcagcatcggcagcggcaagaccagcggcagcagaacccccggcagatacagcaccggcagccagagcagaatcagaagaatgtggaacgacaccgtgagaaagcagagcgagagcagcttcatcaccggcgacatcaacagcagcgccagcctgaacagagagggcctgctgaacaacgccagagacaccagcgtgatggacaccctgcccctgaacggcaaccacggcaacagctacagcatcgccagcggcgagtacctgagcaactgcgtgcagatcatcgacagaggctacaaccacaacgagaccgccctggagaagaagatcctgaaggagctgaccagcaactacatccccagctacctgaacaaccacgagagaagcagcgagcagaacagaaacctgatgaacaagctggtgaacaacctgggcagcggcagagaggacgacgccatcgtgctggacgacgccaccagcttcaaccacgaggagagcctgggcctggagctgatccacgaggagagcgacgcccccctgctgccccccagagtgtacagcaccgagaaccaccagccccaccactacaccagaagaagaatcccccaggaccacagcgagagcttcttccccctgctgaccaacgagcacaccgaggacctgcagagcccccacagagacagcctgtacaccagcatgcccaccctggccggcgtggccgccaccgagagcgtgaccaccagcacccagaccgagcccccccccgccaagtgcggcgacgccgaggacgtgtactacaagagcatgcccaacctgggcagcagaaaccacgtgcaccagctgcacacctactaccagctgggcagaggcagcagcgacggcttcatcgtgccccccaacaaggacggcaccccccccgagggcagcagcaagggccccgcccacctggtgaccagcctgtag

SEQ ID NO: 325985 - DNA, 2757 bp, Artificial Sequence
  derived and/or modified sequence
tgatatctatgcctcgctccggacggcatctgggaccctcaaggtccggacctttcaaattgcagctcaccttgggtgaaccacattacccagaagctgaaatccggggaaaccgcagccaatatagctagggaactcgccgagcagactagaaaccacctgaacgcaggagatattacgtatagcgtgcgggctatggaccaactggtcggcctgctggacgttcagttacggaacttaactcccgggggtaaggatagcgcggccaggtccctgaataaggctatggttgaaacagtgaataacctactgcagccgcaggcactcaacgcttggcgggaccttaccaccagtgaccagttgagagcagctactatgcttttgcatacagtggaagagtctgcttttgtcttggctgacaacctgctgaaaacagatatcgtgcgcgaaaacacggataatataaaactggaagtggctcggctgtcaaccgaggggaacttggaagacctgaagtttcccgaaaatatggggcacggtagtacaatccaactgagcgctaatactttgaagcaaaatggacgtaacggggagatccgtgtggcttttgtgttgtacaacaacttaggcccctacctcagtactgagaacgccagtatgaagctgggaactgaggcactgagcacaaaccatagcgtgatagtcaatagtccagtgattacagccgctataaataaagagttctccaacaaggtctatttggccgatcccgttgtgtttaccgttaaacacatcaaacaatctgaagaaaacttcaatcccaactgcagcttctggagttactctaagcgaacaatgacaggctattggtctacccaagggtgcaggctccttacaaccaataagactcatacaacttgttcttgtaaccatctgactaacttcgccgtcctcatggcccatgttgaggttaaacacagcgacgctgtccacgacctgctactcgacgtgattacttgggtgggcatcttactgagcctggtgtgcctacttatctgtatattcaccttttgctttttcagggggctgcagtctgatagaaatacaatccataagaatctgtgcattagtttgtttgtcgccgagctgctcttcttgataggaattaatcgtacagaccaacctatcgcttgtgccgtttttgcagctttactacacttcttctttctggccgcttttacttggatgtttttggagggagtacaactttacatcatgttagtggaggtgtttgaatccgaacacagtagacggaagtacttctatcttgtgggttatggcatgccggcactcatcgtggccgtgtccgccgcagtggactatcgcagctacggaactgacaaggtctgctggctgaggctcgatacatacttcatttggtccttcatcgggccggctaccttgattattatgctgaacgttatcttcctgggcattgcactgtataaaatgtttcaccacaccgcgatccttaagccagagtccggatgcttggacaatattaaatcttgggtgattggtgcaattgcattgctttgcctgcttggcttaacctgggcttttggcttgatgtacatcaatgagagcactgtcataatggcctacctgttcaccatcttcaattctcttcagggcatgttcattttcatcttccactgtgttctgcagaaaaaggtgaggaaggagtacggaaaatgtttgaggacacactgctgttccggcaaatcaacagagtcctcgatcggctctggaaagacatccggctctcggacaccaggacggtacagtactgggtcccagagtagaattcgcaggatgtggaatgatactgtcagaaagcaaagtgagtcaagctttataacgggagacatcaactcctctgcctcactgaacagggaaggtttactgaacaacgctagggacacaagtgtcatggacaccctacctctgaacggaaaccacggcaatagctactccatcgccagtggggagtacctgtccaactgtgtgcagatcattgacagaggttataaccacaacgagacagcattggagaaaaagatcctgaaggaacttacttctaactacattcccagttacctgaacaatcacgaaaggagcagtgaacaaaatagaaacttgatgaataaactggtgaacaacctgggttcaggcagagaagatgacgccattgtacttgatgatgctacaagcttcaaccacgaagaatcactgggactcgaacttatacacgaggagtcagatgctccattgctgcctcctagagtatactctacagagaaccatcagcctcaccactacacgcgtcggagaataccccaggaccattcagaatccttctttccactgctgacaaacgagcatactgaggatttgcagtcaccccatcgtgattccctctacacttccatgcccaccctcgccggcgttgcagccactgagagcgttaccacatcaacccagacagagcctcctccggccaaatgcggcgacgctgaggacgtttattataagagcatgcctaatcttggctcgcgcaatcatgtgcatcagcttcatacctactatcagctggggcgtgggagttccgacggcttcattgtgcccccaaataaggacggaaccccacctgagggatcaagtaaggggccagctcacttggtcacttcactttag

SEQ ID NO: 325986 - DNA, 4284 bp, Artificial Sequence
  derived and/or modified sequence
ttatctatgccttgctcctgatggaatttgggatccccaaggtccagatctcagcaactgttcttctccttgggtcaatcatataacacagaagttgaaatctggtgaaacagctgccaacattgctagagagctggctgaacagacaagaaatcacttgaatgctggggacatcacctactctgtccgggccatggaccagctggtaggcctcctagatgtacagcttcggaacttgaccccaggtggaaaagatagtgctgcccggagtttgaacaaggcaatggtcgagacagttaacaacctccttcagccacaagctttgaatgcatggagagacctgactacgagtgatcagctgcgtgcggccaccatgttgcttcatactgtggaggaaagtgcttttgtgctggctgataaccttttgaagactgacattgtcagggagaatacagacaatattaaattggaagttgcaagactgagcacagaaggaaacttagaagacctaaaatttccagaaaacatgggccatggaagcactatccagctgtctgcaaataccttaaagcaaaatggccgaaatggagagatcagagtggcctttgtcctgtataacaacttgggtccttatttatccacggagaatgccagtatgaagttgggaacggaagctttgtccacaaatcattctgttattgtcaattcccctgttattacggcagcaataaacaaagagttcagtaacaaggtttatttggctgatcctgtggtatttactgttaaacatatcaagcagtcagaggaaaatttcaaccctaactgttcattttggagctactccaagcgtacaatgacaggttattggtcaacacaaggctgtcggctcctgacaacaaataagacacatactacatgctcttgtaaccacctaacaaattttgcagtactgatggcacatgtggaagttaagcacagtgatgcggtccatgacctccttctggatgtgatcacgtgggttggaattttgctgtcccttgtttgtctcctgatttgcatcttcacattttgctttttccgggggctccagagtgaccgtaacaccatccacaagaacctctgcatcagtctctttgtagcagagctgctcttcctgattgggatcaaccgaactgaccaaccaattgcctgtgctgttttcgctgccctgttacatttcttcttcttggctgccttcacctggatgttcctggagggggtgcagctttatatcatgctggtggaggtttttgagagtgaacattcacgtaggaaatacttttatctggtcggctatgggatgcctgcactcattgtggctgtgtcagctgcagtagactacaggagttatggaacagataaagtatgttggctccgacttgacacctacttcatttggagttttataggaccagcaactttgataattatgcttaatgtaatcttccttgggattgctttatataaaatgtttcatcatactgctatactgaaacctgaatcaggctgtcttgataacatcaagtcatgggttataggtgcaatagctcttctctgcctattaggattgacctgggcctttggactcatgtatattaatgaaagcacagtcatcatggcctatctcttcaccattttcaattctctacagggaatgtttatatttattttccattgtgtcctacagaagaaggtacgaaaagagtatgggaaatgcctgcgaacacattgctgtagtggcaaaagtacagagagttccattggttcagggaaaacatctggttctcgaactcctggacgctactccacaggctcacagagccgaatccgtagaatgtggaatgacacggttcgaaagcagtcagagtcttcctttattactggagacataaacagttcagcgtcactcaacagagaggggcttctgaacaatgccagggatacaagtgtcatggatactctaccactgaatggtaaccatggcaatagttacagcattgccagcggcgaatacctgagcaactgtgtgcaaatcatagaccgtggctataaccataacgagaccgccctagagaaaaagattctgaaggaactcacttccaactatatcccttcttacctgaacaaccatgagcgctccagtgaacagaacaggaatctgatgaacaagctggtgaataaccttggcagtggaagggaagatgatgccattgtcctggatgatgccacctcgtttaaccacgaggagagtttgggcctggaactcattcatgaggaatctgatgctcctttgctgcccccaagagtatactccaccgagaaccaccagccacaccattataccagaaggcggatcccccaagaccacagtgagagctttttccctttgctaaccaacgagcacacagaagatctccagtcaccccatagagactctctctataccagcatgccgacactggctggtgtggccgccacagagagtgttaccaccagcacccagaccgaacccccaccggccaaatgtggtgatgccgaagatgtttactacaaaagcatgccaaacctaggctccagaaaccacgtccatcagctgcatacttactaccagctaggtcgcggcagcagtgatggatttatagttcctccaaacaaagatgggacccctcccgagggaagttcaaaaggaccggctcatttggtcactagtctatagaagatgacacagaaattggaaccaacaaaactgctaacaccttgttgactgttctgagttgatataagcagtggtaataatgtgtgtactcctaaatctttatgctgtcctctaaagacaaacacaaactctcagacttttttttttttaatgggatttttaggtcagcccaggggagaaagataactgctaaaattcccctgtaccccatcctttcttgtcctttccccttcagatggagacttcattatgttaatgaacaagatatgaagaaaatggcactcattgtggccttgttgaattatgttgtgtatgttttaacatctctgatgctgtgttactaaaattacaaggacctgctttttaaaaggccagaacaattgtctgaaattagtaacaatgctgcatctagattggagtgctgcacaaacaaacataagagcaaagcaaaactgtatcacatagggtttttggtcactcacaacctgaattcaccacagctggaatagctgtggaaaacaaaataaaacaacaaaattaataatgaaatggaggggaattctagaattatatgctaaatgcatattttatgatttgctgtattaactgatgataaaactaatggcagaaaaagaagttgagcaatttctatgtaatgtacagatactagcattgcacatatagtctgctttctgttcctccagaatttgagtcctgttaatgtagtagaaaaaaaaaaaagaaattttctttttcttttgtgctggtcttgcaagtttgtctaccagtaagagagcaaagtttccttcctttcttctctttcttcattttctttttttcttttttgccttttattcctttaaaatttcgcctggcaaaaaataaataaatggaactatcactttataagaatcattttctagtaatgcaaacaaattattttttacaaaaaaacaaaataaataaaattagacttccttccctcactatatatctttatgcagtcagaatatttccaacagtgttttttgcaaattagagcaggacaaacttttatgtttacagggcacgtctgttgtaatgcaaagcatatttggcaagcagttcatcaccaggacactagctatgattctagaagtcaaaaggtgtctatagaactagtggggcttctgcatgtgaaaaacggttttccataggcattaaagtgctgaatgctcagtctgatcaacaagtgggcacctgcactaccactttttagaggaaattcactccctcgtaagcattggaaggtcaaattattttgaagtgatttttttaaaaaaaagtcttctgtttattaacaggaaaatttatttatttgacaggattttgagtaatgtaggaatacaaaaggtaaattagcagcacatataatttttttttaatttatgatccattttgtatggtctcaaagttggatgacctcattactaatatttgttgtaaaagtgaaacttgtttgccaaccaataaacaactgattgagattt

SEQ ID NO: 325987 - DNA, 2757 bp, Artificial Sequence
  derived and/or modified sequence
tgatacctgtgcctggccccagatggcatctgggacccccagggccctgacctgagcaactgcagcagcccctgggtgaaccacatcacccagaagctgaagtctggagaaacagctgccaacatcgcccgggagctggccgagcagaccaggaaccacctgaatgctggggacatcacctacagcgtgcgggccatggaccagctggtgggcctgctggatgtgcagctgaggaacctgacccctgggggcaaggacagcgctgcccggagcctgaacaaggccatggtggagaccgtgaacaacctgctgcagccccaggccctgaatgcctggagggacctgaccaccagtgaccagctgcgggccgccaccatgctgctgcacacagtggaggagagcgcctttgtgctggccgacaacctgctgaagacagacatcgtgcgggagaacacagacaacatcaagctggaggtggcccggctgagcacagagggcaacctggaggacctgaagtttcctgagaacatgggccacggcagcaccatccagctgagcgccaacaccctgaagcagaatggaagaaatggagagatccgggtggcctttgtgctgtacaacaacctgggcccctacctgagcacagaaaatgcctccatgaagctgggcacagaggccctgagcaccaaccacagcgtcatcgtgaacagccctgtgatcacagctgccatcaacaaggagttcagcaacaaggtgtacctggccgaccctgtggtgttcaccgtgaagcacatcaagcagagcgaggagaacttcaaccccaactgcagcttctggagctacagcaagaggaccatgacaggctactggagcacccagggctgccgcctgctgaccaccaacaagacccacaccacctgcagctgcaaccacctgaccaactttgctgtgctgatggcccacgtggaggtgaagcacagtgatgctgtgcatgacctgctgctggatgtgatcacctgggtgggcatcctgctgagcctggtgtgcctgctgatctgcatcttcaccttctgcttcttccggggcctgcagagcgacaggaacaccatccacaagaacctgtgcatcagcctgtttgtggccgagctgctcttcctgattggcatcaacagaacagaccagcccatcgcctgtgctgtgtttgctgccctgctgcacttcttcttcctggccgccttcacctggatgttcctggagggcgtgcagctgtacatcatgctggtggaggtgtttgaaagtgagcacagcaggaggaagtacttctacctggtgggctacggcatgcctgccctgattgtggccgtgtctgctgctgtggactaccgctcctatggaacagacaaggtgtgctggctgcggctggacacctacttcatctggagcttcatcggccctgccaccctcatcatcatgctgaatgtcatcttcctgggcatcgccctgtacaagatgttccaccacacagccatcctgaagccagagagcggctgcctggacaacatcaagtcctgggtgattggagccatcgccctgctgtgcctgctgggcctgacctgggccttcggcctgatgtacatcaatgaaagcaccgtcatcatggcctacctgttcaccatcttcaacagcctgcagggcatgttcatcttcatcttccactgtgtgctgcagaagaaggtgaggaaggagtatggcaagtgcctgcggacccactgctgcagcggcaagagcacagagagcagcatcggcagcggcaagaccagcggcagcaggaccccaggccgctacagcacaggcagccagagccgcatccggaggatgtggaatgacacagtgaggaagcagagcgagagcagcttcatcactggagacatcaacagcagcgccagcctgaaccgggagggcctgctgaacaatgcccgggacacctctgtgatggacaccctgcccctgaatggaaaccacggcaacagctacagcatcgccagcggggagtacctgagcaactgtgtgcagatcatcgaccggggctacaaccacaatgaaacagccctggagaagaagatcctgaaggagctgaccagcaactacatccccagctacctgaacaaccacgagaggagcagcgagcagaacagaaacctgatgaacaagctggtgaacaacctgggcagcggcagagaagatgatgccatcgtgctggatgatgccaccagcttcaaccacgaggagagcctgggcctggagctgattcatgaggagagtgatgcccccctgctgcccccccgggtgtacagcacagagaaccaccagccccaccactacacccggcggcgcatcccccaggaccacagcgagagcttcttccccctgctgaccaatgagcacacagaggacctgcagagcccccaccgggacagcctgtacacctccatgcccaccctggccggcgtggccgccacagagagcgtgaccaccagcacccagacagagcccccaccagccaagtgtggagatgctgaagatgtgtactacaagtccatgcccaacctgggcagcagaaatcatgtgcaccagctgcacacctactaccagctgggccggggcagcagtgatggcttcatcgtgccccccaacaaggatggcaccccacctgagggcagcagcaaaggacctgcccacctggtgaccagcctgtag

SEQ ID NO: 325988 - DNA, 2757 bp, Artificial Sequence
  derived and/or modified sequence
tgatacctgtgcctggcccccgacggcatctgggacccccagggccctgacctgtccaactgcagtagcccatgggtaaaccatatcacacagaagctaaagagtggggagactgcggctaatatcgcacgagagctagcggagcagaccagaaatcatctgaacgccggagacatcacttacagtgtgagggcaatggaccagctggttgggcttctggacgtgcagctgagaaacctcacgcctggcggcaaggactcggccgcccgaagtctgaataaggccatggtcgagaccgtgaacaatctcctccagcctcaggcccttaacgcctggcgagacctcactactagtgaccaactcagggcggctacaatgctgctgcacactgtcgaggagtccgcatttgtactggcggacaatctgcttaagaccgatatcgtcagagaaaacacggataacatcaaactcgaagtggcccggctgtcaactgagggaaatctcgaagatcttaaatttcccgaaaatatgggacatggcagcacaatccagctttctgccaacacactgaagcagaacggcagaaacggagagattcgagtggcttttgtactgtacaataaccttgggccgtatctgtctaccgagaatgccagtatgaagctggggaccgaggccttgtcgaccaaccactcagtcattgtgaactcacccgtcatcaccgccgcaatcaataaagaattcagtaataaggtctacctggccgatccggttgtctttactgtgaagcacattaagcaaagtgaagagaatttcaatcctaattgttctttctggtcctactcaaaacggaccatgaccggctactggtctactcaaggctgccgtctgctgaccacaaacaaaactcacactacctgcagttgtaaccacttgacaaacttcgccgtgctgatggcccacgttgaggtgaaacattcagatgctgtacacgatctgctcctcgacgtgatcacgtgggtaggaattctcctgagcttggtctgtctcctgatttgcatctttacgttttgcttctttcgaggtctgcagagcgatcgcaataccatacataagaacctgtgtatcagtctcttcgtggccgagttgctgttcctcataggtataaacagaactgatcaacccatcgcatgcgccgtgtttgctgctttgctgcacttcttctttctggcagcgttcacctggatgttcctcgagggtgtgcagctgtacatcatgcttgtggaagtcttcgaatccgagcatagccgcagaaagtacttctatctggtaggctacggtatgcccgcgcttatcgttgctgtgtccgctgccgttgattatagaagctacggcaccgacaaagtgtgctggctgaggctagatacctacttcatctggtcctttatcgggccagctactctgattatcatgttgaatgtcatttttttggggatagccctctacaaaatgttccaccatactgccattcttaaacctgaatcagggtgcttggacaacatcaaatcttgggtcattggcgcgatcgcactgttgtgcttgctgggactaacctgggcctttggtctaatgtatatcaatgagtcaaccgtgattatggcttacctcttcaccatctttaactcattgcaagggatgttcatctttatctttcactgtgtgttgcagaaaaaagttagaaaggagtacggtaaatgcttacgcactcattgctgctcaggcaagtctactgagagcagtattgggtccggtaaaaccagtgggtctcggacgcccggccgctattccaccgggtctcagtctcgtatcaggcgaatgtggaacgacacagtgagaaagcagtccgagagttcatttatcaccggcgacatcaattcctctgcctctctcaatcgcgaaggattgctgaacaacgcccgcgacacctctgtcatggacacactgccgcttaacggaaatcatggaaatagttacagcattgcgagtggtgagtacctatccaactgtgtgcagattatcgaccgtggctacaatcacaacgaaaccgccctggaaaaaaaaatcctgaaagagctcacctcaaactacattccctcatacctgaataaccatgaaaggagttccgagcagaatcgcaatctgatgaacaaactggttaataatctaggaagtggcagggaagacgacgctatagttttggatgacgccacatcctttaatcatgaagaatctctgggcctcgaactgattcacgaggaatcagatgcacccctgctccctcctagagtgtactcaactgagaatcaccagcctcaccactacaccaggcggcgaattccacaagaccattcagaatcatttttcccactgctcacaaatgagcatacagaagacttacagtccccacacagagattctctgtatacatcgatgcccacactcgccggggtggccgccaccgaatccgtgaccacctccacacaaacagaaccgccaccagctaagtgtggcgatgccgaagacgtgtactataaatccatgccaaatttagggtcgagaaatcacgtccatcaactgcacacctactaccagctgggccgtggctcaagcgatggcttcatcgttcctccaaacaaggatggaactccgcctgaaggtagctcgaagggcccagctcatctggtcacgtccctgtag

SEQ ID NO: 325989 - DNA, 2757 bp, Artificial Sequence
  derived and/or modified sequence
tagtatttgtgtttagcgccagacggaatttgggaccctcaggggcctgacttaagtaactgttcttcaccatgggtcaaccacatcactcaaaaacttaagtcaggcgaaaccgccgcaaacatcgctagagagctcgccgagcagacgcgcaatcacttgaatgcaggcgacataacatactctgtgcgcgctatggatcaattggtgggcctgctggacgtccaattacgaaacttgactcccggaggaaaggacagtgccgcaagaagcttgaataaagcaatggttgaaacagttaacaatcttctgcagcctcaggcactgaacgcatggcgggatctaacaacaagcgaccagctgagagctgccacaatgttgttgcataccgtggaggaaagtgcctttgtccttgcggacaaccttttaaagaccgacatcgtgcgggaaaacaccgacaatatcaagttggaagtggctcgcctgtccaccgaaggcaatcttgaggacctgaaattccctgagaacatgggtcacggctcaacgattcagctgagtgccaacacactgaaacagaacggaagaaacggggaaatccgagtagctttcgtgttatacaacaatttaggtccctatctctccacagagaacgcatccatgaagttggggacagaggccctgagtaccaaccactctgtgattgttaacagtcccgtcattacggcagctattaacaaagaatttagcaataaggtgtatctggccgatcccgtggtgttcaccgtcaagcacatcaagcagtcagaggaaaattttaatcccaactgttccttttggtcatattctaagcgtacaatgactgggtattggtctactcaggggtgcaggttgctaacgactaacaaaacacacactacatgctcctgcaatcatctgactaactttgctgtcctgatggcccacgtggaggttaaacactcagacgccgtccacgacctccttctggatgtgataacctgggtggggatcctgctgagtcttgtttgcctgttgatttgtattttcacattctgcttctttcggggactgcagagcgaccgtaacactattcacaagaacctctgcatctccctctttgtggcagagctcctgttcctgatcgggatcaatcgcacagatcagcccatcgcctgtgccgtctttgcagccctcctccacttctttttcctggccgcattcacttggatgttcctcgagggggtccaactttatattatgctagtagaggtattcgagtctgaacattcccgtcgtaaatacttttatctcgtgggctacggcatgccagctttaatagtagctgtgtcagcggctgtggactaccgaagttacggaactgataaggtgtgttggctgcgccttgatacctatttcatttggtcgtttattgggcctgctacactaatcatcatgctgaacgttatttttctgggaatcgccctctacaaaatgttccatcacacggccatcctgaagcctgagtcaggatgtctggacaacattaagagctgggtgatcggggctatcgcactgctatgcctgctgggattgacttgggcctttggcctcatgtatataaatgagtccacggtcattatggcctaccttttcacaatctttaattcactgcaaggtatgttcatttttatttttcactgcgtcctgcaaaagaaagtgcggaaagaatatggtaaatgtcttcgtacccattgttgcagtggaaagagcacagagtccagtattggaagtggaaagaccagtggatctagaaccccagggagatactccaccggatcccagtctaggatacgcaggatgtggaatgacacagtaaggaagcagtcagagtcctcatttatcaccggcgatatcaatagctcggcatccctcaatcgcgagggattgttaaacaatgcaagagacactagtgtcatggacactctgcccctaaatggcaatcacgggaattcctactccattgcttccggggaatatttaagtaattgtgtgcagattatcgaccgagggtacaatcacaatgagacggctctggagaagaagatactgaaagagctgaccagcaactatataccgtcctacctgaacaatcatgagcgttcatcagagcagaatcgaaatctcatgaacaaactggtcaacaacctgggatcaggacgcgaagacgatgcgattgttttggatgatgcgaccagcttcaatcatgaggagtcactgggtctggagctgattcacgaggaaagtgatgccccattgctgcctcccagggtatactccactgagaatcaccagccacatcactacacccgcaggaggatcccccaagatcactccgaaagcttttttccgctgctgaccaacgaacacaccgaggacctgcagtctccacatagggactccctgtacacttctatgcccaccctggccggtgttgctgctacggagtccgtcaccacgtccacgcaaacagaacctccgccagccaaatgtggtgacgcagaagatgtatactacaagtcaatgccgaacctgggaagccgtaaccacgtacatcaacttcatacttactatcagctcgggcgtggttcgagtgatggtttcatcgtccctcccaataaggacggtacaccgcctgagggatcctctaagggaccagcgcaccttgtcacatccctgtag

SEQ ID NO: 325990 - protein, 1240 aa, Artificial Sequence
  derived and/or modified sequence
MWPSQLLIFMMLLAPIIHAFSRAPIPMAVVRRELSCESYPIELRCPGTDVIMIESANYGRTDDKICDSDPAQMENIRCYLPDAYKIMSQRCNNRTQCAVVAGPDVFPDPCPGTYKYLEVQYECVPYRVDQKVFLCPGLLKGVYQSEHLFESDHQSGAWCKDPLQASDKIYYMPWTPYRTDTLTEYSSKDDFIAGRPTTTYKLPHRVDGTGFVVYDGALFFNKERTRNIVKFDLRTRIKSGEAIIANANYHDTSPYRWGGKSDIDLAVDENGLWVIYATEQNNGKIVISQLNPYTLRIEGTWDTAYDKRSASNAFMICGILYVVKSVYEDDDNEATGNKIDYIYNTDQSKDSLVDVPFPNSYQYIAAVDYNPRDNLLYVWNNYHVVKYSLDFGPLDSRSGQAHHGQVSYISPPIHLDSELERPSVKDISTTGPLGMGSTTTSTTLRTTTLSPGRSTTPSVSGRRNRSTSTPSPAVEVLDDMTTHLPSASSQIPALEESCEAVEAREIMWFKTRQGQIAKQPCPAGTIGVSTYLCLAPDGIWDPQGPDLSNCSSPWVNHITQKLKSGETAANIARELAEQTRNHLNAGDITYSVRAMDQLVGLLDVQLRNLTPGGKDSAARSLNKLQKRERSCRAYVQAMVETVNNLLQPQALNAWRDLTTSDQLRAATMLLHTVEESAFVLADNLLKTDIVRENTDNIKLEVARLSTEGNLEDLKFPENMGHGSTIQLSANTLKQNGRNGEIRVAFVLYNNLGPYLSTENASMKLGTEALSTNHSVIVNSPVITAAINKEFSNKVYLADPVVFTVKHIKQSEENFNPNCSFWSYSKRTMTGYWSTQGCRLLTTNKTHTTCSCNHLTNFAVLMAHVEVKHSDAVHDLLLDVITWVGILLSLVCLLICIFTFCFFRGLQSDRNTIHKNLCISLFVAELLFLIGINRTDQPIACAVFAALLHFFFLAAFTWMFLEGVQLYIMLVEVFESEHSRRKYFYLVGYGMPALIVAVSAAVDYRSYGTDKVCWLRLDTYFIWSFIGPATLIIMLNVIFLGIALYKMFHHTAILKPESGCLDNINYEDNRPFIKSWVIGAIALLCLLGLTWAFGLMYINESTVIMAYLFTIFNSLQGMFIFIFHCVLQKKVRKEYGKCLRTHCCSGKSTESSIGSGKTSGSRTPGRYSTGSQSRIRRMWNDTVRKQSESSFITGDINSSASLNREPYRETSMGVKLNIAYQIGASEQCQGYKCHGYSTTEW

SEQ ID NO: 325991 - protein, 1231 aa, Artificial Sequence
  derived and/or modified sequence
MWPSQLLIFMMLLAPIIHAFSRAPIPMAVVRRELSCESYPIELRCPGTDVIMIESANYGRTDDKICDSDPAQMENIRCYLPDAYKIMSQRCNNRTQCAVVAGPDVFPDPCPGTYKYLEVQYECVPYKVEQKVFLCPGLLKGVYQSEHLFESDHQSGAWCKDPLQASDKIYYMPWTPYRTDTLTEYSSKDDFIAGRPTTTYKLPHRVDGTGFVVYDGALFFNKERTRNIVKFDLRTRIKSGEAIIANANYHDTSPYRWGGKSDIDLAVDENGLWVIYATEQNNGKIVISQLNPYTLRIEGTWDTAYDKRSASNAFMICGILYVVKSVYEDDDNEATGNKIDYIYNTDQSKDSLVDVPFPNSYQYIAAVDYNPRDNLLYVWNNYHVVKYSLDFGPLDSRSGQAHHGQVSYISPPIHLDSELERPSVKDISTTGPLGMGSTTTSTTLRTTTLSPGRSTTPSVSGRRNRSTSTPSPAVEVLDDMTTHLPSASSQIPALEESCEAVEAREIMWFKTRQGQIAKQPCPAGTIGVSTYLCLAPDGIWDPQGPDLSNCSSPWVNHITQKLKSGETAANIARELAEQTRNHLNAGDITYSVRAMDQLVGLLDVQLRNLTPGGKDSAARSLNKLQKRERSCRAYVQAMVETVNNLLQPQALNAWRDLTTSDQLRAATMLLHTVEESAFVLADNLLKTDIVRENTDNIKLEVARLSTEGNLEDLKFPENMGHGSTIQLSANTLKQNGRNGEIRVAFVLYNNLGPYLSTENASMKLGTEALSTNHSVIVNSPVITAAINKEFSNKVYLADPVVFTVKHIKQSEENFNPNCSFWSYSKRTMTGYWSTQGCRLLTTNKTHTTCSCNHLTNFAVLMAHVEVKHSDAVHDLLLDVITWVGILLSLVCLLICIFTFCFFRGLQSDRNTIHKNLCISLFVAELLFLIGINRTDQPIACAVFAALLHFFFLAAFTWMFLEGVQLYIMLVEVFESEHSRRKYFYLVGYGMPALIVAVSAAVDYRSYGTDKVCWLRLDTYFIWSFIGPATLIIMLNVIFLGIALYKMFHHTAILKPESGCLDNIKSWVIGAIALLCLLGLTWAFGLMYINESTVIMAYLFTIFNSLQGMFIFIFHCVLQKKVRKEYGKCLRTHCCSGKSTESSIGSGKTSGSRTPGRYSTGSQSRIRRMWNDTVRKQSESSFITGDINSSASLNREPYRETSMGVKLNIAYQIGASEQCQGYKCHGYSTTEW

SEQ ID NO: 325992 - protein, 1308 aa, Artificial Sequence
  derived and/or modified sequence
MWPSQLLIFMMLLAPIIHGGKHSERHPALAAPLRHAERSPGGALPPRHLLQQPAAERTAAHRGQGPRGATRGVRGPGAQGAQIAAQAFSRAPIPMAVVRRELSCESYPIELRCPGTDVIMIESANYGRTDDKICDSDPAQMENIRCYLPDAYKIMSQRCNNRTQCAVVAGPDVFPDPCPGTYKYLEVQYECVPYKVEQKVFLCPGLLKGVYQSEHLFESDHQSGAWCKDPLQASDKIYYMPWTPYRTDTLTEYSSKDDFIAGRPTTTYKLPHRVDGTGFVVYDGALFFNKERTRNIVKFDLRTRIKSGEAIIANANYHDTSPYRWGGKSDIDLAVDENGLWVIYATEQNNGKIVISQLNPYTLRIEGTWDTAYDKRSASNAFMICGILYVVKSVYEDDDNEATGNKIDYIYNTDQSKDSLVDVPFPNSYQYIAAVDYNPRDNLLYVWNNYHVVKYSLDFGPLDSRSGQAHHGQVSYISPPIHLDSELERPSVKDISTTGPLGMGSTTTSTTLRTTTLSPGRSTTPSVSGRRNRSTSTPSPAVEVLDDMTTHLPSASSQIPALEESCEAVEAREIMWFKTRQGQIAKQPCPAGTIGVSTYLCLAPDGIWDPQGPDLSNCSSPWVNHITQKLKSGETAANIARELAEQTRNHLNAGDITYSVRAMDQLVGLLDVQLRNLTPGGKDSAARSLNKLQKRERSCRAYVQAMVETVNNLLQPQALNAWRDLTTSDQLRAATMLLHTVEESAFVLADNLLKTDIVRENTDNIKLEVARLSTEGNLEDLKFPENMGHGSTIQLSANTLKQNGRNGEIRVAFVLYNNLGPYLSTENASMKLGTEALSTNHSVIVNSPVITAAINKEFSNKVYLADPVVFTVKHIKQSEENFNPNCSFWSYSKRTMTGYWSTQGCRLLTTNKTHTTCSCNHLTNFAVLMAHVEVKHSDAVHDLLLDVITWVGILLSLVCLLICIFTFCFFRGLQSDRNTIHKNLCISLFVAELLFLIGINRTDQPIACAVFAALLHFFFLAAFTWMFLEGVQLYIMLVEVFESEHSRRKYFYLVGYGMPALIVAVSAAVDYRSYGTDKVCWLRLDTYFIWSFIGPATLIIMLNVIFLGIALYKMFHHTAILKPESGCLDNINYEDNRPFIKSWVIGAIALLCLLGLTWAFGLMYINESTVIMAYLFTIFNSLQGMFIFIFHCVLQKKVRKEYGKCLRTHCCSGKSTESSIGSGKTSGSRTPGRYSTGSQSRIRRMWNDTVRKQSESSFITGDINSSASLNREPYRETSMGVKLNIAYQIGASEQCQGYKCHGYSTTEW

SEQ ID NO: 325993 - protein, 1299 aa, Artificial Sequence
  derived and/or modified sequence
MWPSQLLIFMMLLAPIIHGGKHSERHPALAAPLRHAERSPGGALPPRHLLQQPAAERTAAHRGQGPRGATRGVRGPGAQGAQIAAQAFSRAPIPMAVVRRELSCESYPIELRCPGTDVIMIESANYGRTDDKICDSDPAQMENIRCYLPDAYKIMSQRCNNRTQCAVVAGPDVFPDPCPGTYKYLEVQYECVPYKVEQKVFLCPGLLKGVYQSEHLFESDHQSGAWCKDPLQASDKIYYMPWTPYRTDTLTEYSSKDDFIAGRPTTTYKLPHRVDGTGFVVYDGALFFNKERTRNIVKFDLRTRIKSGEAIIANANYHDTSPYRWGGKSDIDLAVDENGLWVIYATEQNNGKIVISQLNPYTLRIEGTWDTAYDKRSASNAFMICGILYVVKSVYEDDDNEATGNKIDYIYNTDQSKDSLVDVPFPNSYQYIAAVDYNPRDNLLYVWNNYHVVKYSLDFGPLDSRSGQAHHGQVSYISPPIHLDSELERPSVKDISTTGPLGMGSTTTSTTLRTTTLSPGRSTTPSVSGRRNRSTSTPSPAVEVLDDMTTHLPSASSQIPALEESCEAVEAREIMWFKTRQGQIAKQPCPAGTIGVSTYLCLAPDGIWDPQGPDLSNCSSPWVNHITQKLKSGETAANIARELAEQTRNHLNAGDITYSVRAMDQLVGLLDVQLRNLTPGGKDSAARSLNKLQKRERSCRAYVQAMVETVNNLLQPQALNAWRDLTTSDQLRAATMLLHTVEESAFVLADNLLKTDIVRENTDNIKLEVARLSTEGNLEDLKFPENMGHGSTIQLSANTLKQNGRNGEIRVAFVLYNNLGPYLSTENASMKLGTEALSTNHSVIVNSPVITAAINKEFSNKVYLADPVVFTVKHIKQSEENFNPNCSFWSYSKRTMTGYWSTQGCRLLTTNKTHTTCSCNHLTNFAVLMAHVEVKHSDAVHDLLLDVITWVGILLSLVCLLICIFTFCFFRGLQSDRNTIHKNLCISLFVAELLFLIGINRTDQPIACAVFAALLHFFFLAAFTWMFLEGVQLYIMLVEVFESEHSRRKYFYLVGYGMPALIVAVSAAVDYRSYGTDKVCWLRLDTYFIWSFIGPATLIIMLNVIFLGIALYKMFHHTAILKPESGCLDNIKSWVIGAIALLCLLGLTWAFGLMYINESTVIMAYLFTIFNSLQGMFIFIFHCVLQKKVRKEYGKCLRTHCCSGKSTESSIGSGKTSGSRTPGRYSTGSQSRIRRMWNDTVRKQSESSFITGDINSSASLNREPYRETSMGVKLNIAYQIGASEQCQGYKCHGYSTTEW

SEQ ID NO: 325994 - protein, 1240 aa, Artificial Sequence
  derived and/or modified sequence
MWPSQLLIFMMLLAPIIHAFSRAPIPMAVVRRELSCESYPIELRCPGTDVIMIESANYGRTDDKICDSDPAQMENIRCYLPDAYKIMSQRCNNRTQCAVVAGPDVFPDPCPGTYKYLEVQYECVPYKVEQKVFLCPGLLKGVYQSEHLFESDHQSGAWCKDPLQASDKIYYMPWTPYRTDTLTEYSSKDDFIAGRPTTTYKLPHRVDGTGFVVYDGALFFNKERTRNIVKFDLRTRIKSGEAIIANANYHDTSPYRWGGKSDIDLAVDENGLWVIYATEQNNGKIVISQLNPYTLRIEGTWDTAYDKRSASNAFMICGILYVVKSVYEDDDNEATGNKIDYIYNTDQSKDSLVDVPFPNSYQYIAAVDYNPRDNLLYVWNNYHVVKYSLDFGPLDSRSGQAHHGQVSYISPPIHLDSELERPSVKDISTTGPLGMGSTTTSTTLRTTTLSPGRSTTPSVSGRRNRSTSTPSPAVEVLDDMTTHLPSASSQIPALEESCEAVEAREIMWFKTRQGQIAKQPCPAGTIGVSTYLCLAPDGIWDPQGPDLSNCSSPWVNHITQKLKSGETAANIARELAEQTRNHLNAGDITYSVRAMDQLVGLLDVQLRNLTPGGKDSAARSLNKLQKRERSCRAYVQAMVETVNNLLQPQALNAWRDLTTSDQLRAATMLLHTVEESAFVLADNLLKTDIVRENTDNIKLEVARLSTEGNLEDLKFPENMGHGSTIQLSANTLKQNGRNGEIRVAFVLYNNLGPYLSTENASMKLGTEALSTNHSVIVNSPVITAAINKEFSNKVYLADPVVFTVKHIKQSEENFNPNCSFWSYSKRTMTGYWSTQGCRLLTTNKTHTTCSCNHLTNFAVLMAHVEVKHSDAVHDLLLDVITWVGILLSLVCLLICIFTFCFFRGLQSDRNTIHKNLCISLFVAELLFLIGINRTDQPIACAVFAALLHFFFLAAFTWMFLEGVQLYIMLVEVFESEHSRRKYFYLVGYGMPALIVAVSAAVDYRSYGTDKVCWLRLDTYFIWSFIGPATLIIMLNVIFLGIALYKMFHHTAILKPESGCLDNINYEDNRPFIKSWVIGAIALLCLLGLTWAFGLMYINESTVIMAYLFTIFNSLQGMFIFIFHCVLQKKVRKEYGKCLRTHCCSGKSTESSIGSGKTSGSRTPGRYSTGSQSRIRRMWNDTVRKQSESSFITGDINSSASLNREPYRETSMGVKLNIAYQIGASEQCQGYKCHGYSTTEW

SEQ ID NO: 325995 - DNA, 3723 bp, Artificial Sequence
  derived and/or modified sequence
atgtggcccagccagctgctgatcttcatgatgctgctggcccccatcatccacgccttcagcagagcccccatccccatggccgtggtgagaagagagctgagctgcgagagctaccccatcgagctgagatgccccggcaccgacgtgatcatgatcgagagcgccaactacggcagaaccgacgacaagatctgcgacagcgaccccgcccagatggagaacatcagatgctacctgcccgacgcctacaagatcatgagccagagatgcaacaacagaacccagtgcgccgtggtggccggccccgacgtgttccccgacccctgccccggcacctacaagtacctggaggtgcagtacgagtgcgtgccctacagagtggaccagaaggtgttcctgtgccccggcctgctgaagggcgtgtaccagagcgagcacctgttcgagagcgaccaccagagcggcgcctggtgcaaggaccccctgcaggccagcgacaagatctactacatgccctggaccccctacagaaccgacaccctgaccgagtacagcagcaaggacgacttcatcgccggcagacccaccaccacctacaagctgccccacagagtggacggcaccggcttcgtggtgtacgacggcgccctgttcttcaacaaggagagaaccagaaacatcgtgaagttcgacctgagaaccagaatcaagagcggcgaggccatcatcgccaacgccaactaccacgacaccagcccctacagatggggcggcaagagcgacatcgacctggccgtggacgagaacggcctgtgggtgatctacgccaccgagcagaacaacggcaagatcgtgatcagccagctgaacccctacaccctgagaatcgagggcacctgggacaccgcctacgacaagagaagcgccagcaacgccttcatgatctgcggcatcctgtacgtggtgaagagcgtgtacgaggacgacgacaacgaggccaccggcaacaagatcgactacatctacaacaccgaccagagcaaggacagcctggtggacgtgcccttccccaacagctaccagtacatcgccgccgtggactacaaccccagagacaacctgctgtacgtgtggaacaactaccacgtggtgaagtacagcctggacttcggccccctggacagcagaagcggccaggcccaccacggccaggtgagctacatcagcccccccatccacctggacagcgagctggagagacccagcgtgaaggacatcagcaccaccggccccctgggcatgggcagcaccaccaccagcaccaccctgagaaccaccaccctgagccccggcagaagcaccacccccagcgtgagcggcagaagaaacagaagcaccagcacccccagccccgccgtggaggtgctggacgacatgaccacccacctgcccagcgccagcagccagatccccgccctggaggagagctgcgaggccgtggaggccagagagatcatgtggttcaagaccagacagggccagatcgccaagcagccctgccccgccggcaccatcggcgtgagcacctacctgtgcctggcccccgacggcatctgggacccccagggccccgacctgagcaactgcagcagcccctgggtgaaccacatcacccagaagctgaagagcggcgagaccgccgccaacatcgccagagagctggccgagcagaccagaaaccacctgaacgccggcgacatcacctacagcgtgagagccatggaccagctggtgggcctgctggacgtgcagctgagaaacctgacccccggcggcaaggacagcgccgccagaagcctgaacaagctgcagaagagagagagaagctgcagagcctacgtgcaggccatggtggagaccgtgaacaacctgctgcagccccaggccctgaacgcctggagagacctgaccaccagcgaccagctgagagccgccaccatgctgctgcacaccgtggaggagagcgccttcgtgctggccgacaacctgctgaagaccgacatcgtgagagagaacaccgacaacatcaagctggaggtggccagactgagcaccgagggcaacctggaggacctgaagttccccgagaacatgggccacggcagcaccatccagctgagcgccaacaccctgaagcagaacggcagaaacggcgagatcagagtggccttcgtgctgtacaacaacctgggcccctacctgagcaccgagaacgccagcatgaagctgggcaccgaggccctgagcaccaaccacagcgtgatcgtgaacagccccgtgatcaccgccgccatcaacaaggagttcagcaacaaggtgtacctggccgaccccgtggtgttcaccgtgaagcacatcaagcagagcgaggagaacttcaaccccaactgcagcttctggagctacagcaagagaaccatgaccggctactggagcacccagggctgcagactgctgaccaccaacaagacccacaccacctgcagctgcaaccacctgaccaacttcgccgtgctgatggcccacgtggaggtgaagcacagcgacgccgtgcacgacctgctgctggacgtgatcacctgggtgggcatcctgctgagcctggtgtgcctgctgatctgcatcttcaccttctgcttcttcagaggcctgcagagcgacagaaacaccatccacaagaacctgtgcatcagcctgttcgtggccgagctgctgttcctgatcggcatcaacagaaccgaccagcccatcgcctgcgccgtgttcgccgccctgctgcacttcttcttcctggccgccttcacctggatgttcctggagggcgtgcagctgtacatcatgctggtggaggtgttcgagagcgagcacagcagaagaaagtacttctacctggtgggctacggcatgcccgccctgatcgtggccgtgagcgccgccgtggactacagaagctacggcaccgacaaggtgtgctggctgagactggacacctacttcatctggagcttcatcggccccgccaccctgatcatcatgctgaacgtgatcttcctgggcatcgccctgtacaagatgttccaccacaccgccatcctgaagcccgagagcggctgcctggacaacatcaactacgaggacaacagacccttcatcaagagctgggtgatcggcgccatcgccctgctgtgcctgctgggcctgacctgggccttcggcctgatgtacatcaacgagagcaccgtgatcatggcctacctgttcaccatcttcaacagcctgcagggcatgttcatcttcatcttccactgcgtgctgcagaagaaggtgagaaaggagtacggcaagtgcctgagaacccactgctgcagcggcaagagcaccgagagcagcatcggcagcggcaagaccagcggcagcagaacccccggcagatacagcaccggcagccagagcagaatcagaagaatgtggaacgacaccgtgagaaagcagagcgagagcagcttcatcaccggcgacatcaacagcagcgccagcctgaacagagagccctacagagagaccagcatgggcgtgaagctgaacatcgcctaccagatcggcgccagcgagcagtgccagggctacaagtgccacggctacagcaccaccgagtggtag

SEQ ID NO: 325996 - DNA, 3696 bp, Artificial Sequence
  derived and/or modified sequence
atgtggcccagccagctgctgatcttcatgatgctgctggcccccatcatccacgccttcagcagagcccccatccccatggccgtggtgagaagagagctgagctgcgagagctaccccatcgagctgagatgccccggcaccgacgtgatcatgatcgagagcgccaactacggcagaaccgacgacaagatctgcgacagcgaccccgcccagatggagaacatcagatgctacctgcccgacgcctacaagatcatgagccagagatgcaacaacagaacccagtgcgccgtggtggccggccccgacgtgttccccgacccctgccccggcacctacaagtacctggaggtgcagtacgagtgcgtgccctacaaggtggagcagaaggtgttcctgtgccccggcctgctgaagggcgtgtaccagagcgagcacctgttcgagagcgaccaccagagcggcgcctggtgcaaggaccccctgcaggccagcgacaagatctactacatgccctggaccccctacagaaccgacaccctgaccgagtacagcagcaaggacgacttcatcgccggcagacccaccaccacctacaagctgccccacagagtggacggcaccggcttcgtggtgtacgacggcgccctgttcttcaacaaggagagaaccagaaacatcgtgaagttcgacctgagaaccagaatcaagagcggcgaggccatcatcgccaacgccaactaccacgacaccagcccctacagatggggcggcaagagcgacatcgacctggccgtggacgagaacggcctgtgggtgatctacgccaccgagcagaacaacggcaagatcgtgatcagccagctgaacccctacaccctgagaatcgagggcacctgggacaccgcctacgacaagagaagcgccagcaacgccttcatgatctgcggcatcctgtacgtggtgaagagcgtgtacgaggacgacgacaacgaggccaccggcaacaagatcgactacatctacaacaccgaccagagcaaggacagcctggtggacgtgcccttccccaacagctaccagtacatcgccgccgtggactacaaccccagagacaacctgctgtacgtgtggaacaactaccacgtggtgaagtacagcctggacttcggccccctggacagcagaagcggccaggcccaccacggccaggtgagctacatcagcccccccatccacctggacagcgagctggagagacccagcgtgaaggacatcagcaccaccggccccctgggcatgggcagcaccaccaccagcaccaccctgagaaccaccaccctgagccccggcagaagcaccacccccagcgtgagcggcagaagaaacagaagcaccagcacccccagccccgccgtggaggtgctggacgacatgaccacccacctgcccagcgccagcagccagatccccgccctggaggagagctgcgaggccgtggaggccagagagatcatgtggttcaagaccagacagggccagatcgccaagcagccctgccccgccggcaccatcggcgtgagcacctacctgtgcctggcccccgacggcatctgggacccccagggccccgacctgagcaactgcagcagcccctgggtgaaccacatcacccagaagctgaagagcggcgagaccgccgccaacatcgccagagagctggccgagcagaccagaaaccacctgaacgccggcgacatcacctacagcgtgagagccatggaccagctggtgggcctgctggacgtgcagctgagaaacctgacccccggcggcaaggacagcgccgccagaagcctgaacaagctgcagaagagagagagaagctgcagagcctacgtgcaggccatggtggagaccgtgaacaacctgctgcagccccaggccctgaacgcctggagagacctgaccaccagcgaccagctgagagccgccaccatgctgctgcacaccgtggaggagagcgccttcgtgctggccgacaacctgctgaagaccgacatcgtgagagagaacaccgacaacatcaagctggaggtggccagactgagcaccgagggcaacctggaggacctgaagttccccgagaacatgggccacggcagcaccatccagctgagcgccaacaccctgaagcagaacggcagaaacggcgagatcagagtggccttcgtgctgtacaacaacctgggcccctacctgagcaccgagaacgccagcatgaagctgggcaccgaggccctgagcaccaaccacagcgtgatcgtgaacagccccgtgatcaccgccgccatcaacaaggagttcagcaacaaggtgtacctggccgaccccgtggtgttcaccgtgaagcacatcaagcagagcgaggagaacttcaaccccaactgcagcttctggagctacagcaagagaaccatgaccggctactggagcacccagggctgcagactgctgaccaccaacaagacccacaccacctgcagctgcaaccacctgaccaacttcgccgtgctgatggcccacgtggaggtgaagcacagcgacgccgtgcacgacctgctgctggacgtgatcacctgggtgggcatcctgctgagcctggtgtgcctgctgatctgcatcttcaccttctgcttcttcagaggcctgcagagcgacagaaacaccatccacaagaacctgtgcatcagcctgttcgtggccgagctgctgttcctgatcggcatcaacagaaccgaccagcccatcgcctgcgccgtgttcgccgccctgctgcacttcttcttcctggccgccttcacctggatgttcctggagggcgtgcagctgtacatcatgctggtggaggtgttcgagagcgagcacagcagaagaaagtacttctacctggtgggctacggcatgcccgccctgatcgtggccgtgagcgccgccgtggactacagaagctacggcaccgacaaggtgtgctggctgagactggacacctacttcatctggagcttcatcggccccgccaccctgatcatcatgctgaacgtgatcttcctgggcatcgccctgtacaagatgttccaccacaccgccatcctgaagcccgagagcggctgcctggacaacatcaagagctgggtgatcggcgccatcgccctgctgtgcctgctgggcctgacctgggccttcggcctgatgtacatcaacgagagcaccgtgatcatggcctacctgttcaccatcttcaacagcctgcagggcatgttcatcttcatcttccactgcgtgctgcagaagaaggtgagaaaggagtacggcaagtgcctgagaacccactgctgcagcggcaagagcaccgagagcagcatcggcagcggcaagaccagcggcagcagaacccccggcagatacagcaccggcagccagagcagaatcagaagaatgtggaacgacaccgtgagaaagcagagcgagagcagcttcatcaccggcgacatcaacagcagcgccagcctgaacagagagccctacagagagaccagcatgggcgtgaagctgaacatcgcctaccagatcggcgccagcgagcagtgccagggctacaagtgccacggctacagcaccaccgagtggtag

SEQ ID NO: 325997 - DNA, 3927 bp, Artificial Sequence
  derived and/or modified sequence
atgtggcccagccagctgctgatcttcatgatgctgctggcccccatcatccacggcggcaagcacagcgagagacaccccgccctggccgcccccctgagacacgccgagagaagccccggcggcgccctgccccccagacacctgctgcagcagcccgccgccgagagaaccgccgcccacagaggccagggccccagaggcgccaccagaggcgtgagaggccccggcgcccagggcgcccagatcgccgcccaggccttcagcagagcccccatccccatggccgtggtgagaagagagctgagctgcgagagctaccccatcgagctgagatgccccggcaccgacgtgatcatgatcgagagcgccaactacggcagaaccgacgacaagatctgcgacagcgaccccgcccagatggagaacatcagatgctacctgcccgacgcctacaagatcatgagccagagatgcaacaacagaacccagtgcgccgtggtggccggccccgacgtgttccccgacccctgccccggcacctacaagtacctggaggtgcagtacgagtgcgtgccctacaaggtggagcagaaggtgttcctgtgccccggcctgctgaagggcgtgtaccagagcgagcacctgttcgagagcgaccaccagagcggcgcctggtgcaaggaccccctgcaggccagcgacaagatctactacatgccctggaccccctacagaaccgacaccctgaccgagtacagcagcaaggacgacttcatcgccggcagacccaccaccacctacaagctgccccacagagtggacggcaccggcttcgtggtgtacgacggcgccctgttcttcaacaaggagagaaccagaaacatcgtgaagttcgacctgagaaccagaatcaagagcggcgaggccatcatcgccaacgccaactaccacgacaccagcccctacagatggggcggcaagagcgacatcgacctggccgtggacgagaacggcctgtgggtgatctacgccaccgagcagaacaacggcaagatcgtgatcagccagctgaacccctacaccctgagaatcgagggcacctgggacaccgcctacgacaagagaagcgccagcaacgccttcatgatctgcggcatcctgtacgtggtgaagagcgtgtacgaggacgacgacaacgaggccaccggcaacaagatcgactacatctacaacaccgaccagagcaaggacagcctggtggacgtgcccttccccaacagctaccagtacatcgccgccgtggactacaaccccagagacaacctgctgtacgtgtggaacaactaccacgtggtgaagtacagcctggacttcggccccctggacagcagaagcggccaggcccaccacggccaggtgagctacatcagcccccccatccacctggacagcgagctggagagacccagcgtgaaggacatcagcaccaccggccccctgggcatgggcagcaccaccaccagcaccaccctgagaaccaccaccctgagccccggcagaagcaccacccccagcgtgagcggcagaagaaacagaagcaccagcacccccagccccgccgtggaggtgctggacgacatgaccacccacctgcccagcgccagcagccagatccccgccctggaggagagctgcgaggccgtggaggccagagagatcatgtggttcaagaccagacagggccagatcgccaagcagccctgccccgccggcaccatcggcgtgagcacctacctgtgcctggcccccgacggcatctgggacccccagggccccgacctgagcaactgcagcagcccctgggtgaaccacatcacccagaagctgaagagcggcgagaccgccgccaacatcgccagagagctggccgagcagaccagaaaccacctgaacgccggcgacatcacctacagcgtgagagccatggaccagctggtgggcctgctggacgtgcagctgagaaacctgacccccggcggcaaggacagcgccgccagaagcctgaacaagctgcagaagagagagagaagctgcagagcctacgtgcaggccatggtggagaccgtgaacaacctgctgcagccccaggccctgaacgcctggagagacctgaccaccagcgaccagctgagagccgccaccatgctgctgcacaccgtggaggagagcgccttcgtgctggccgacaacctgctgaagaccgacatcgtgagagagaacaccgacaacatcaagctggaggtggccagactgagcaccgagggcaacctggaggacctgaagttccccgagaacatgggccacggcagcaccatccagctgagcgccaacaccctgaagcagaacggcagaaacggcgagatcagagtggccttcgtgctgtacaacaacctgggcccctacctgagcaccgagaacgccagcatgaagctgggcaccgaggccctgagcaccaaccacagcgtgatcgtgaacagccccgtgatcaccgccgccatcaacaaggagttcagcaacaaggtgtacctggccgaccccgtggtgttcaccgtgaagcacatcaagcagagcgaggagaacttcaaccccaactgcagcttctggagctacagcaagagaaccatgaccggctactggagcacccagggctgcagactgctgaccaccaacaagacccacaccacctgcagctgcaaccacctgaccaacttcgccgtgctgatggcccacgtggaggtgaagcacagcgacgccgtgcacgacctgctgctggacgtgatcacctgggtgggcatcctgctgagcctggtgtgcctgctgatctgcatcttcaccttctgcttcttcagaggcctgcagagcgacagaaacaccatccacaagaacctgtgcatcagcctgttcgtggccgagctgctgttcctgatcggcatcaacagaaccgaccagcccatcgcctgcgccgtgttcgccgccctgctgcacttcttcttcctggccgccttcacctggatgttcctggagggcgtgcagctgtacatcatgctggtggaggtgttcgagagcgagcacagcagaagaaagtacttctacctggtgggctacggcatgcccgccctgatcgtggccgtgagcgccgccgtggactacagaagctacggcaccgacaaggtgtgctggctgagactggacacctacttcatctggagcttcatcggccccgccaccctgatcatcatgctgaacgtgatcttcctgggcatcgccctgtacaagatgttccaccacaccgccatcctgaagcccgagagcggctgcctggacaacatcaactacgaggacaacagacccttcatcaagagctgggtgatcggcgccatcgccctgctgtgcctgctgggcctgacctgggccttcggcctgatgtacatcaacgagagcaccgtgatcatggcctacctgttcaccatcttcaacagcctgcagggcatgttcatcttcatcttccactgcgtgctgcagaagaaggtgagaaaggagtacggcaagtgcctgagaacccactgctgcagcggcaagagcaccgagagcagcatcggcagcggcaagaccagcggcagcagaacccccggcagatacagcaccggcagccagagcagaatcagaagaatgtggaacgacaccgtgagaaagcagagcgagagcagcttcatcaccggcgacatcaacagcagcgccagcctgaacagagagccctacagagagaccagcatgggcgtgaagctgaacatcgcctaccagatcggcgccagcgagcagtgccagggctacaagtgccacggctacagcaccaccgagtggtag

SEQ ID NO: 325998 - DNA, 3900 bp, Artificial Sequence
  derived and/or modified sequence
atgtggcccagccagctgctgatcttcatgatgctgctggcccccatcatccacggcggcaagcacagcgagagacaccccgccctggccgcccccctgagacacgccgagagaagccccggcggcgccctgccccccagacacctgctgcagcagcccgccgccgagagaaccgccgcccacagaggccagggccccagaggcgccaccagaggcgtgagaggccccggcgcccagggcgcccagatcgccgcccaggccttcagcagagcccccatccccatggccgtggtgagaagagagctgagctgcgagagctaccccatcgagctgagatgccccggcaccgacgtgatcatgatcgagagcgccaactacggcagaaccgacgacaagatctgcgacagcgaccccgcccagatggagaacatcagatgctacctgcccgacgcctacaagatcatgagccagagatgcaacaacagaacccagtgcgccgtggtggccggccccgacgtgttccccgacccctgccccggcacctacaagtacctggaggtgcagtacgagtgcgtgccctacaaggtggagcagaaggtgttcctgtgccccggcctgctgaagggcgtgtaccagagcgagcacctgttcgagagcgaccaccagagcggcgcctggtgcaaggaccccctgcaggccagcgacaagatctactacatgccctggaccccctacagaaccgacaccctgaccgagtacagcagcaaggacgacttcatcgccggcagacccaccaccacctacaagctgccccacagagtggacggcaccggcttcgtggtgtacgacggcgccctgttcttcaacaaggagagaaccagaaacatcgtgaagttcgacctgagaaccagaatcaagagcggcgaggccatcatcgccaacgccaactaccacgacaccagcccctacagatggggcggcaagagcgacatcgacctggccgtggacgagaacggcctgtgggtgatctacgccaccgagcagaacaacggcaagatcgtgatcagccagctgaacccctacaccctgagaatcgagggcacctgggacaccgcctacgacaagagaagcgccagcaacgccttcatgatctgcggcatcctgtacgtggtgaagagcgtgtacgaggacgacgacaacgaggccaccggcaacaagatcgactacatctacaacaccgaccagagcaaggacagcctggtggacgtgcccttccccaacagctaccagtacatcgccgccgtggactacaaccccagagacaacctgctgtacgtgtggaacaactaccacgtggtgaagtacagcctggacttcggccccctggacagcagaagcggccaggcccaccacggccaggtgagctacatcagcccccccatccacctggacagcgagctggagagacccagcgtgaaggacatcagcaccaccggccccctgggcatgggcagcaccaccaccagcaccaccctgagaaccaccaccctgagccccggcagaagcaccacccccagcgtgagcggcagaagaaacagaagcaccagcacccccagccccgccgtggaggtgctggacgacatgaccacccacctgcccagcgccagcagccagatccccgccctggaggagagctgcgaggccgtggaggccagagagatcatgtggttcaagaccagacagggccagatcgccaagcagccctgccccgccggcaccatcggcgtgagcacctacctgtgcctggcccccgacggcatctgggacccccagggccccgacctgagcaactgcagcagcccctgggtgaaccacatcacccagaagctgaagagcggcgagaccgccgccaacatcgccagagagctggccgagcagaccagaaaccacctgaacgccggcgacatcacctacagcgtgagagccatggaccagctggtgggcctgctggacgtgcagctgagaaacctgacccccggcggcaaggacagcgccgccagaagcctgaacaagctgcagaagagagagagaagctgcagagcctacgtgcaggccatggtggagaccgtgaacaacctgctgcagccccaggccctgaacgcctggagagacctgaccaccagcgaccagctgagagccgccaccatgctgctgcacaccgtggaggagagcgccttcgtgctggccgacaacctgctgaagaccgacatcgtgagagagaacaccgacaacatcaagctggaggtggccagactgagcaccgagggcaacctggaggacctgaagttccccgagaacatgggccacggcagcaccatccagctgagcgccaacaccctgaagcagaacggcagaaacggcgagatcagagtggccttcgtgctgtacaacaacctgggcccctacctgagcaccgagaacgccagcatgaagctgggcaccgaggccctgagcaccaaccacagcgtgatcgtgaacagccccgtgatcaccgccgccatcaacaaggagttcagcaacaaggtgtacctggccgaccccgtggtgttcaccgtgaagcacatcaagcagagcgaggagaacttcaaccccaactgcagcttctggagctacagcaagagaaccatgaccggctactggagcacccagggctgcagactgctgaccaccaacaagacccacaccacctgcagctgcaaccacctgaccaacttcgccgtgctgatggcccacgtggaggtgaagcacagcgacgccgtgcacgacctgctgctggacgtgatcacctgggtgggcatcctgctgagcctggtgtgcctgctgatctgcatcttcaccttctgcttcttcagaggcctgcagagcgacagaaacaccatccacaagaacctgtgcatcagcctgttcgtggccgagctgctgttcctgatcggcatcaacagaaccgaccagcccatcgcctgcgccgtgttcgccgccctgctgcacttcttcttcctggccgccttcacctggatgttcctggagggcgtgcagctgtacatcatgctggtggaggtgttcgagagcgagcacagcagaagaaagtacttctacctggtgggctacggcatgcccgccctgatcgtggccgtgagcgccgccgtggactacagaagctacggcaccgacaaggtgtgctggctgagactggacacctacttcatctggagcttcatcggccccgccaccctgatcatcatgctgaacgtgatcttcctgggcatcgccctgtacaagatgttccaccacaccgccatcctgaagcccgagagcggctgcctggacaacatcaagagctgggtgatcggcgccatcgccctgctgtgcctgctgggcctgacctgggccttcggcctgatgtacatcaacgagagcaccgtgatcatggcctacctgttcaccatcttcaacagcctgcagggcatgttcatcttcatcttccactgcgtgctgcagaagaaggtgagaaaggagtacggcaagtgcctgagaacccactgctgcagcggcaagagcaccgagagcagcatcggcagcggcaagaccagcggcagcagaacccccggcagatacagcaccggcagccagagcagaatcagaagaatgtggaacgacaccgtgagaaagcagagcgagagcagcttcatcaccggcgacatcaacagcagcgccagcctgaacagagagccctacagagagaccagcatgggcgtgaagctgaacatcgcctaccagatcggcgccagcgagcagtgccagggctacaagtgccacggctacagcaccaccgagtggtag

SEQ ID NO: 325999 - DNA, 3723 bp, Artificial Sequence
  derived and/or modified sequence
atgtggcccagccagctgctgatcttcatgatgctgctggcccccatcatccacgccttcagcagagcccccatccccatggccgtggtgagaagagagctgagctgcgagagctaccccatcgagctgagatgccccggcaccgacgtgatcatgatcgagagcgccaactacggcagaaccgacgacaagatctgcgacagcgaccccgcccagatggagaacatcagatgctacctgcccgacgcctacaagatcatgagccagagatgcaacaacagaacccagtgcgccgtggtggccggccccgacgtgttccccgacccctgccccggcacctacaagtacctggaggtgcagtacgagtgcgtgccctacaaggtggagcagaaggtgttcctgtgccccggcctgctgaagggcgtgtaccagagcgagcacctgttcgagagcgaccaccagagcggcgcctggtgcaaggaccccctgcaggccagcgacaagatctactacatgccctggaccccctacagaaccgacaccctgaccgagtacagcagcaaggacgacttcatcgccggcagacccaccaccacctacaagctgccccacagagtggacggcaccggcttcgtggtgtacgacggcgccctgttcttcaacaaggagagaaccagaaacatcgtgaagttcgacctgagaaccagaatcaagagcggcgaggccatcatcgccaacgccaactaccacgacaccagcccctacagatggggcggcaagagcgacatcgacctggccgtggacgagaacggcctgtgggtgatctacgccaccgagcagaacaacggcaagatcgtgatcagccagctgaacccctacaccctgagaatcgagggcacctgggacaccgcctacgacaagagaagcgccagcaacgccttcatgatctgcggcatcctgtacgtggtgaagagcgtgtacgaggacgacgacaacgaggccaccggcaacaagatcgactacatctacaacaccgaccagagcaaggacagcctggtggacgtgcccttccccaacagctaccagtacatcgccgccgtggactacaaccccagagacaacctgctgtacgtgtggaacaactaccacgtggtgaagtacagcctggacttcggccccctggacagcagaagcggccaggcccaccacggccaggtgagctacatcagcccccccatccacctggacagcgagctggagagacccagcgtgaaggacatcagcaccaccggccccctgggcatgggcagcaccaccaccagcaccaccctgagaaccaccaccctgagccccggcagaagcaccacccccagcgtgagcggcagaagaaacagaagcaccagcacccccagccccgccgtggaggtgctggacgacatgaccacccacctgcccagcgccagcagccagatccccgccctggaggagagctgcgaggccgtggaggccagagagatcatgtggttcaagaccagacagggccagatcgccaagcagccctgccccgccggcaccatcggcgtgagcacctacctgtgcctggcccccgacggcatctgggacccccagggccccgacctgagcaactgcagcagcccctgggtgaaccacatcacccagaagctgaagagcggcgagaccgccgccaacatcgccagagagctggccgagcagaccagaaaccacctgaacgccggcgacatcacctacagcgtgagagccatggaccagctggtgggcctgctggacgtgcagctgagaaacctgacccccggcggcaaggacagcgccgccagaagcctgaacaagctgcagaagagagagagaagctgcagagcctacgtgcaggccatggtggagaccgtgaacaacctgctgcagccccaggccctgaacgcctggagagacctgaccaccagcgaccagctgagagccgccaccatgctgctgcacaccgtggaggagagcgccttcgtgctggccgacaacctgctgaagaccgacatcgtgagagagaacaccgacaacatcaagctggaggtggccagactgagcaccgagggcaacctggaggacctgaagttccccgagaacatgggccacggcagcaccatccagctgagcgccaacaccctgaagcagaacggcagaaacggcgagatcagagtggccttcgtgctgtacaacaacctgggcccctacctgagcaccgagaacgccagcatgaagctgggcaccgaggccctgagcaccaaccacagcgtgatcgtgaacagccccgtgatcaccgccgccatcaacaaggagttcagcaacaaggtgtacctggccgaccccgtggtgttcaccgtgaagcacatcaagcagagcgaggagaacttcaaccccaactgcagcttctggagctacagcaagagaaccatgaccggctactggagcacccagggctgcagactgctgaccaccaacaagacccacaccacctgcagctgcaaccacctgaccaacttcgccgtgctgatggcccacgtggaggtgaagcacagcgacgccgtgcacgacctgctgctggacgtgatcacctgggtgggcatcctgctgagcctggtgtgcctgctgatctgcatcttcaccttctgcttcttcagaggcctgcagagcgacagaaacaccatccacaagaacctgtgcatcagcctgttcgtggccgagctgctgttcctgatcggcatcaacagaaccgaccagcccatcgcctgcgccgtgttcgccgccctgctgcacttcttcttcctggccgccttcacctggatgttcctggagggcgtgcagctgtacatcatgctggtggaggtgttcgagagcgagcacagcagaagaaagtacttctacctggtgggctacggcatgcccgccctgatcgtggccgtgagcgccgccgtggactacagaagctacggcaccgacaaggtgtgctggctgagactggacacctacttcatctggagcttcatcggccccgccaccctgatcatcatgctgaacgtgatcttcctgggcatcgccctgtacaagatgttccaccacaccgccatcctgaagcccgagagcggctgcctggacaacatcaactacgaggacaacagacccttcatcaagagctgggtgatcggcgccatcgccctgctgtgcctgctgggcctgacctgggccttcggcctgatgtacatcaacgagagcaccgtgatcatggcctacctgttcaccatcttcaacagcctgcagggcatgttcatcttcatcttccactgcgtgctgcagaagaaggtgagaaaggagtacggcaagtgcctgagaacccactgctgcagcggcaagagcaccgagagcagcatcggcagcggcaagaccagcggcagcagaacccccggcagatacagcaccggcagccagagcagaatcagaagaatgtggaacgacaccgtgagaaagcagagcgagagcagcttcatcaccggcgacatcaacagcagcgccagcctgaacagagagccctacagagagaccagcatgggcgtgaagctgaacatcgcctaccagatcggcgccagcgagcagtgccagggctacaagtgccacggctacagcaccaccgagtggtag

SEQ ID NO: 326000 - DNA, 3723 bp, Artificial Sequence
  derived and/or modified sequence
atgtggccctcccaactcttgatcttcatgatgctgcttgcacccattatccacgctttctcacgagctcccattcctatggctgtcgtgcggcgggagctgtcttgtgaatcttatcccattgaactacgatgtcctggcacagatgtgattatgatcgagtctgccaactacggccgaactgatgataaaatctgtgatagcgatccggcgcagatggagaacatccgctgctatctaccagacgcatataaaatcatgtcgcagcgatgcaacaaccgcacccagtgcgccgtcgtggcgggtcctgacgtattccctgacccatgtccagggacttacaagtacctggaggtacagtatgagtgtgtgccctaccgagttgaccaaaaagtttttctgtgtccaggcttgctgaaaggcgtgtatcagtctgagcacctgttcgagagtgatcatcagagcggggcttggtgtaaggaccctctgcaggccagtgacaaaatctattatatgccttggactccataccgcactgatacccttactgagtactcgtccaaggacgatttcattgccggccgaccaacgactacatacaagttgcctcaccgtgtcgacggaacaggtttcgtggtatacgatggcgccctgttcttcaacaaagagcgcacacgaaacatcgtcaaatttgatctgcggacccgcattaaaagtggcgaagccataatcgccaacgccaattaccacgatacctccccttatagatggggcggtaagtcagatatcgatctggccgtggatgagaacgggttgtgggtcatttacgccaccgaacagaataacggtaaaatagtaattagtcaactcaacccctacaccctcagaatcgagggcacttgggatacagcttatgataaacgctccgcttccaatgcattcatgatatgtggtatcctctatgttgtcaaaagtgtgtacgaagatgatgataacgaagctacaggtaacaagatagattatatctataataccgaccagtcgaaggactctctcgtcgacgtacctttcccgaacagctaccagtatatagctgcagtggactataacccacgggacaatctgctatacgtgtggaacaattatcacgtggttaaatattccctcgatttcggccctctcgactcccggagtggtcaggcccaccacggccaggtctcctatatttcgcctcccatacacctggactcagagttagaacgccctagcgtcaaagatattagtacaaccggaccgttggggatggggtctactacgacttcaaccactctgcggaccactacactgtctcccggcagatctaccacaccatctgtgagcggacgcaggaaccgttctacaagcacaccctcccctgcagtcgaggtgcttgacgacatgacgacccaccttcccagcgcttcctcccagatccccgcacttgaggagagctgcgaagcagtagaagcgcgtgaaatcatgtggttcaaaacccgtcagggacaaattgccaagcagccttgtcctgctggtactataggcgtgtccacatatctgtgtctggccccagatgggatttgggacccccagggtcctgacctgtccaactgctcttccccctgggtgaatcatattacccagaagcttaaaagcggagagacggcagcaaacattgctagggagctcgccgagcagacgcgcaatcatttgaacgccggagacattacttactctgtgcgcgccatggaccagctggttggcctgctggatgtgcaactacgcaacctgacgcctggcggaaaggattccgctgccagatcactaaataagcttcagaagagggaacgctcatgtagagcctatgtccaggccatggtggaaacagtcaataacctcctacagccccaggcccttaatgcttggagagacctgacaacctccgaccagctccgtgccgctaccatgctacttcatacagtggaggaatccgcctttgttctggctgataatctgctaaagactgatatcgttcgtgaaaatacggacaacattaaattagaagtcgcaaggttgtccactgaggggaatcttgaagatctaaaatttccggagaacatggggcatggctctaccatccagctcagcgccaatacactgaagcaaaacgggcgtaatggggaaatccgggttgctttcgtgctttataacaatttgggaccctacctttctaccgaaaatgccagcatgaaattgggcaccgaagcactaagtacaaaccacagcgtcattgttaactcccccgtgatcactgctgccatcaacaaggagttctccaacaaggtctacctagcagatccagtcgtctttacagtgaagcacatcaagcagtccgaggaaaacttcaaccccaattgttctttctggtcatatagcaaaaggacaatgaccggctactggtccacacaaggatgccggctcctaaccacgaataaaacacacacaacctgcagctgcaatcacctaactaacttcgccgtcctgatggcacacgttgaggttaaacatagcgacgccgtccatgacctcttgctggatgtgatcacatgggtgggcatcttattaagccttgtgtgtctgcttatttgcattttcacattctgcttctttcgaggactgcagagtgaccgcaataccattcataagaacctgtgtatctcattgttcgttgctgaactcctgtttctgattggaatcaatcgaacagaccagcctatcgcatgcgccgtcttcgctgctctgcttcattttttcttcctggccgctttcacgtggatgttcctggaaggcgtccagctctacattatgctagttgaggtatttgaaagcgaacactccagaaggaagtatttctacttggtgggctacggtatgccagcactgattgtggcagtgtctgcagcagtcgactacagatcatacggaactgacaaagtgtgctggttgaggttggacacctactttatctggagcttcattgggccggcaacccttattattatgcttaatgtgatattcctgggcattgctctgtacaagatgtttcaccataccgccatcttaaagccagagagtggctgtctggataatattaactatgaggataacagaccattcatcaagtcctgggtaattggagctatcgcattactttgtctcctgggtctgacatgggcttttggcctgatgtacattaacgaatcaactgtcattatggcatatctcttcactatatttaactcccttcagggcatgttcatcttcatcttccattgcgtgcttcagaagaaagtcagaaaggaatacgggaaatgtctgaggactcactgctgctcaggtaagtctaccgaaagcagcatcgggtctggaaagacttccggctcaagaaccccaggtcggtactctacggggtctcagtctaggattcgccgtatgtggaatgacaccgttaggaaacagagcgaatcatctttcatcacaggcgatattaattcctctgcgagtctcaacagggaaccctacagagagacttcaatgggggtaaaattgaacatcgcctatcagataggggcctcagaacagtgccaaggctacaagtgtcacggttatagtacgaccgaatggtag

SEQ ID NO: 326001 - DNA, 3696 bp, Artificial Sequence
  derived and/or modified sequence
atgtggccgtcgcagctactcattttcatgatgctgctcgctcccatcatacacgccttttctagagccccgattccaatggcagtcgtgcggagagagctgtcgtgcgagagctaccccatcgagctgcggtgccccggcactgacgtaattatgatcgagagtgcgaactatggaaggactgacgacaaaatctgcgactccgatcccgctcagatggaaaacattagatgttatctacctgacgcttataaaatcatgtcacagcgctgtaataaccggactcaatgtgcggtagtcgccggaccggatgtttttcccgatccctgcccagggacctacaagtatctagaagtgcagtatgagtgcgtgccctataaggtggagcaaaaggtattcctgtgccctgggctcctgaagggggtctaccagtctgagcacctgttcgaatccgaccaccaaagcggcgcgtggtgcaaagaccccttacaagcttcagacaaaatctactatatgccttggacaccataccgaaccgataccctaactgaatactcctccaaggatgacttcatagctgggaggcccaccaccacttacaaactcccccatcgcgtcgatggtactgggttcgttgtgtacgacggcgcactgttcttcaacaaggagagaactcgcaatatcgtcaaattcgaccttagaactcgaattaagagcggcgaggcgatcatcgcaaacgctaactatcacgatacgtcaccctaccggtggggcggcaaatcagatatcgacttagccgtggacgagaacggtctgtgggtgatctacgccacggaacagaacaacggtaagattgtgattagccagctaaacccttacacccttcgcattgaaggaacatgggatacggcctatgataaacgctccgcctccaacgcttttatgatttgtggcattctttatgtcgttaagagcgtgtatgaggatgatgataatgaggctaccggcaacaagatcgactacatttacaataccgatcagagcaaggactccctggttgacgtgccatttccaaacagttatcagtacattgccgctgttgattataatccgagagacaatcttctttatgtgtggaacaattatcatgttgtaaagtacagcttagatttcggccctctggacagccgctcagggcaggcccaccacgggcaggtttcctatatcagtcccccgattcacctcgattctgaactggaacgcccgagcgttaaggatatctccacaacagggcccctgggcatgggatcaacgacaacatccaccactctgcggactacaacactgtcacccggtaggagcacgacgccttccgtatccggcaggcgcaataggtccacttcaacaccaagcccagcagtggaggtgctggatgacatgacaacccatctaccttctgcctcttcacagatcccagccctggaggagtcctgtgaagccgtggaagcaagagaaatcatgtggtttaaaacccggcaaggccagattgcaaaacagccatgtccagctgggactatcggggtttccacctacttatgtctcgcacccgacggaatctgggatccccagggcccagatctcagtaactgctcatcgccttgggtgaaccatattacgcagaagttgaaatccggcgaaaccgccgcgaacattgcgagggaactggcagagcagacgcgcaatcacctgaacgctggcgatatcacatatagtgttcgcgctatggaccaactggtggggctgttggatgtgcagttacggaacctgacgcctggagggaaagattccgcagcaagaagcctgaacaaactgcagaaacgcgagagatcctgccgcgcttatgtgcaagctatggtggagactgtgaataatttgttgcagcctcaggctctcaacgcctggcgtgatctcactacgagtgaccagcttcgtgcagcgacgatgctgctccacacagtagaagagtctgcgtttgtcttagctgacaatcttctgaaaactgatatcgtgagagagaacactgacaatatcaaactggaagtggcccgactctctaccgaggggaatctggaggacctgaagtttcccgaaaatatggggcacgggagtaccatacagttgtcggccaatactctgaaacagaacggacgcaacggcgagattcgtgtggcatttgtactttataataatctgggaccatatctttctacagaaaacgcctcgatgaagctgggtaccgaagctctgtccaccaaccatagcgtgattgtgaacagccctgtaattactgctgctatcaacaaagagtttagtaacaaagtgtatttggccgacccggtcgtgttcaccgtgaaacacattaagcagagcgaagagaactttaaccccaactgctcgttttggagctactccaaacggaccatgaccggctattggagcacccagggctgtcgtctgctgaccaccaacaaaacccataccacatgttcctgcaatcatttaactaacttcgcagtgctgatggcccatgtggaggtgaaacattccgacgccgtacatgacctcctcctggacgtgattacatgggtcggaattctgttgtctcttgtttgcctccttatttgtatttttactttctgctttttccggggcctccaaagtgataggaacaccattcataagaacctgtgtatcagcctgttcgttgccgagctgttgtttctcatcggaatcaacagaacggaccagcccatcgcgtgcgcagtgttcgcggcactgctacactttttcttccttgccgccttcacatggatgttcctcgagggagtgcagctgtacattatgctcgtggaggtcttcgagtctgagcactctaggcgaaaatacttttatctcgtgggttacgggatgccagcactgattgtggccgtgagtgccgccgttgattacagaagctatggcactgacaaagtctgctggctgaggctggatacctactttatctggtcctttataggaccggctaccttgattatcatgctgaatgtaatttttctaggcatcgcattatacaaaatgttccaccatactgccattcttaagccagaaagtggttgccttgataacatcaagtcctgggtaattggcgccatcgctttgctgtgccttcttgggcttacatgggccttcggcctgatgtatattaatgagagtacagttattatggcctatctctttacaatctttaactccttgcaaggcatgttcatcttcatcttccactgtgtgcttcaaaaaaaggtcaggaaggagtacggcaagtgtcttcggacacattgctgtagcggcaaaagtacggaatcatccatcggctcggggaagacaagcggttcacggactcccgggagatattccactggctctcagagcagaattcgacgaatgtggaacgacactgtccgcaagcaatctgaatctagcttcattaccggcgatattaactcgagtgcctccctcaatagagaaccataccgcgaaacaagcatgggggtgaaactgaatattgcatatcagatcggggctagcgagcagtgccaggggtataagtgccatggatattccactactgagtggtag

SEQ ID NO: 326002 - DNA, 3927 bp, Artificial Sequence
  derived and/or modified sequence
atgtggccaagccaactgttgatatttatgatgctgttagcaccgattatacacggcgggaaacatagcgaaagacatcccgccctcgccgcacctttacgacacgctgaaaggagcccaggcggtgctcttccccctcgccacctgttgcagcagcccgctgctgaaaggaccgccgcccacagaggccagggacctcgcggagctactcggggggttagaggcccaggtgcccagggcgcccagatcgcggcacaggcattttcacgagctccgatcccgatggccgtcgtccgccgtgagttgagttgtgagagttatcctatcgaactccggtgtccaggaaccgatgtgattatgattgagtctgcgaactatggaaggacggacgataaaatatgtgatagtgatccagctcaaatggaaaatatacggtgttaccttcctgacgcttacaagataatgagccaacggtgcaacaatcgcacacagtgcgccgttgttgcaggcccagacgttttccctgacccctgtccagggacatataaataccttgaagtacaatacgaatgcgtcccgtacaaggtagaacaaaaggtgttcttgtgtccggggcttctcaagggtgtgtatcagtcagagcatctgtttgagagcgaccaccagagtggagcatggtgtaaggacccactgcaggcctccgacaaaatctactatatgccctggacaccatatagaaccgatactttgacagaatattctagtaaggatgactttatcgcaggccgtccaacgactacttataaacttccgcaccgcgtagacgggactggttttgttgtctacgacggagcgcttttcttcaacaaggaacggactcggaacatcgtgaagttcgacctgcgcacacgaataaaatccggagaggccatcatagccaacgctaactaccacgacacaagcccctatcgctggggcggcaagtccgacatagacctggccgtcgatgagaatggcctgtgggtgatctacgcaacagagcagaataacgggaaaattgtcataagccaacttaatccttatacactccgtatcgaggggacatgggacacagcctatgataagagaagtgccagcaacgccttcatgatctgcggtatcctgtacgtggttaagagtgtctacgaggacgatgacaacgaagctacaggcaataagattgactatatttacaacacggatcagtccaaggacagcctggttgacgttcctttccccaattcctatcagtacatcgccgcggtggattacaatccccgtgacaacctgctgtacgtatggaacaactaccatgtggtcaaatactcacttgatttcggacctctcgactctaggagcggtcaagcccatcacggtcaggtatcatacatttcccctccgatccacctggactctgagttagagcggccctccgttaaggacatcagcaccacaggaccccttgggatgggcagcacaactacatcaacgacactaaggacgactaccctgagtccaggcaggagcaccacgccaagcgtgtcaggccgacgcaacagatcaacgtcaacaccttcccccgccgtggaggttctggacgacatgacgactcacttaccatccgctagcagccagatcccagccctcgaggaatcctgcgaggccgtggaggctagagagatcatgtggtttaagaccagacagggacagatcgccaagcaaccttgtcctgcaggcacaatcggtgtttctacatacctttgcttagctcctgacgggatatgggatccccagggtcctgacttgagcaattgtagctcaccttgggtgaaccacattacccagaaactcaagtctggggaaaccgcagcaaacattgctcgggaattagcagagcagaccagaaaccacctgaacgccggagacattacatactccgtacgcgcaatggaccagctggttgggttgctggacgtccagttgcggaatctgacaccaggaggtaaggattcagctgctcgcagccttaataaactccagaagagagaacggagctgtcgagcgtacgtacaagctatggtggaaacagtaaacaacctgttgcaaccccaggccctgaatgcctggcgcgacctaacgacaagtgatcagctgagagccgcaaccatgctgctccataccgttgaggaatcagccttcgtcttggctgataaccttttaaagactgacatcgtcagagaaaacaccgacaacatcaagcttgaagtcgctaggctctctactgaaggcaacctggaggacttgaaatttccagagaacatggggcacggttcaacaatccagctatccgcgaacaccctcaagcagaatggaaggaatggggagatccgcgtagcttttgtcctgtacaacaacttaggaccatatctgtccaccgagaatgcatctatgaagctcggcaccgaagcactatctactaaccactccgtgattgtcaacagtcctgttataactgccgctatcaacaaggaatttagcaataaggtttatctggcagatcccgtggtgttcactgtgaaacatattaaacagtccgaagagaactttaatccaaattgttccttctggtcttacagtaagcggaccatgacaggatattggtcaacgcagggttgtaggttgctaaccactaacaagacccacacgacctgcagctgcaaccacctgaccaatttcgctgtgctgatggctcacgtggaagttaaacattctgacgccgtgcacgatctcttactcgacgtaattacatgggtgggtatactgctgagcttggtgtgcctcctcatttgtatctttaccttctgcttctttaggggcctccagtcggaccgcaacacaatccataaaaatctgtgtatatctctgtttgttgcagagctattgttcctgataggaataaaccgcaccgaccagcccatagcttgcgcggtgttcgcagcacttctgcatttctttttcttggccgctttcacatggatgtttctggagggagtgcagttgtatatcatgctcgtcgaggtgttcgagtctgagcacagtcgccgcaagtatttctatttagtcggctacggaatgccagccttaatcgtggctgtgagcgccgccgtcgactacagatcctatggtactgataaggtgtgctggcttagattggatacatacttcatatggtcattcattggtccagcaacgctgatcatcatgctgaatgtgatcttcttagggatcgctctctataagatgtttcaccatactgctatcctgaagccggagtctggatgtctcgataacatcaattacgaggataatcgtcctttcatcaagagttgggtgattggcgcgattgccctactttgtttgctcggcctgacctgggcgtttgggcttatgtatataaacgagtccaccgtgataatggcctacctgtttaccatcttcaatagtctgcagggcatgttcatcttcattttccactgtgtactgcagaaaaaagttcgtaaggagtatgggaagtgcttgcggacccactgttgctctggcaaatccactgaatctagtatcggctccgggaaaaccagcgggagccggactcccgggcgctactctacgggaagtcaatcaagaataaggagaatgtggaacgatactgtccgcaagcagtcagaatcatcctttatcactggcgatattaattcatccgcctcactgaacagggaaccgtaccgcgagacaagcatgggtgtgaagctgaacatcgcctaccagattggtgcgagtgagcaatgccaaggctataaatgccacggttactccactaccgaatggtag

SEQ ID NO: 326003 - DNA, 3900 bp, Artificial Sequence
  derived and/or modified sequence
atgtggccgagtcagcttctcatatttatgatgctgctggcgccaattatccatgggggaaaacattctgagaggcatccggcccttgccgcccctctcaggcacgccgaacgtagtccaggtggtgccctgccccccaggcaccttctgcagcagcccgctgcagaacgcaccgcggctcatcgcggccaaggtcctcgcggagctacgcggggtgtaaggggccccggagctcagggagcgcaaattgccgctcaagcctttagccgcgccccaatccccatggccgtcgtccggcgcgagctgtcttgcgaatcatatcccatagaactaaggtgtcccggcacggatgtcatcatgattgagagcgcgaattacggtcgcacggacgataaaatttgtgacagtgatccggcgcagatggaaaatattcgatgttatttgcctgacgcctacaagataatgagccaacgttgcaacaacagaactcaatgcgccgtcgtcgccggacccgacgtgttccctgacccctgtcccgggacctataaatatcttgaggtccagtacgagtgcgtcccatataaggtggagcagaaggtgtttctgtgccccgggctgctgaagggcgtgtaccagagcgagcatctgtttgagagcgaccaccaatccggtgcctggtgcaaagatccactacaggccagcgacaagatctactatatgccatggactccatacagaacggatactctgacggaatattccagcaaagatgactttatcgctgggcggcctacaaccacatataagttgccccatagggtggacggcactggatttgtggtttacgatggcgcgctgttttttaacaaagaacggaccagaaatatcgtgaaatttgatctgcgcacacgcattaaatctggagaggctatcatagccaatgcaaactatcacgacacgagtccctacaggtggggcgggaaatccgacattgatcttgcagtggacgaaaacggcctgtgggtgatttatgccactgagcaaaataatgggaagatcgttatctcccagcttaatccgtacaccctgcgcatcgaaggaacctgggacacggcttacgacaaacggtctgcttccaacgcatttatgatctgcggcatcctgtatgtagtgaagtctgtatacgaggacgatgacaatgaggccaccgggaataagattgactatatatacaacacagaccagtccaaagacagtttggtagatgtgcccttccctaactcataccagtatattgctgccgtggactataacccccgtgataaccttctttatgtatggaacaactatcatgtcgtgaagtattctcttgattttgggcctctggactcacggtcagggcaggcccaccacggacaggttagttatatcagccccccaatccatctggacagtgaattggagagaccctcggtcaaagatatctccacgactgggcccttgggcatgggtagtaccactacttctactacactgagaactactaccttgtctcctggcagaagcaccacccctagcgtgagcgggaggaggaataggtctacatccactccaagccccgccgttgaggtgctggatgatatgactacacacctgccgtccgcttccagccagatcccagccttggaggagagctgtgaagcagtggaggcacgcgaaatcatgtggttcaaaacccgtcagggacagatcgcaaagcagccatgtccagccgggacgataggggtaagcacctacctgtgcctagccccagatgggatttgggacccccagggtcccgacctctctaactgtagttcaccttgggttaaccacatcacacaaaaactaaagagcggcgagaccgccgcaaatattgcacgtgagctggccgagcagacccgaaaccacctgaatgcgggggacataacctacagcgtcagggccatggaccagctggtggggcttcttgacgtccagcttagaaacctgacccctgggggaaaggattccgccgcccggagcttaaacaagctacagaaacgcgagcgctcttgcagggcgtacgtgcaagccatggtggagaccgtaaataacctgctccagccacaggctcttaatgcttggcgcgatctgaccaccagcgaccagctccgggcagctacaatgctgcttcatactgtggaagaatctgcttttgtgctggcagataaccttttaaagactgacatcgttcgggagaacactgacaatatcaagcttgaagtcgcgagactgagcaccgagggcaatctggaggatttgaagtttccagagaatatgggccacggctctacaattcaattgtccgccaacactttgaagcagaatggccgtaacggcgaaatacgggtcgcttttgttctctacaataacttgggaccatatctgtctaccgaaaatgccagcatgaagctgggaacagaagcactgtccacaaaccacagcgtcattgtgaacagcccggtcatcaccgccgccatcaataaggagttctcaaacaaagtctacctcgccgacccagttgtgtttactgttaagcacattaagcagagcgaagagaactttaatccgaattgttctttttggtcctactctaagagaacgatgacgggctattggtcgactcagggatgtaggttactcaccacaaataaaacccatacgacatgttcgtgtaatcacttgactaatttcgctgtcctcatggcgcacgtcgaagtgaagcactctgacgctgtccatgacctactcctggacgtcattacctgggtgggaattctgttgtctctggtgtgcctgctgatttgcattttcacattttgcttcttcaggggcctccagagcgaccggaatacgatacataagaacctgtgcatcagcttgtttgtggcagaacttctattcctgataggtatcaacaggactgatcaacccatcgcttgcgcagtctttgccgcccttcttcacttcttctttctggctgcctttacctggatgttcctggagggagtgcagctgtacatcatgttggtggaggtcttcgaatccgaacatagcaggcgaaagtacttttatctggtgggctatggcatgccagccctcatcgtggcagtgagcgccgctgtggactatcggtcctatggcacggacaaagtctgctggctgagactagacacgtactttatttggtctttcataggtccagcaacgctgataattatgcttaatgttattttcttggggatcgcgctgtacaaaatgttccatcatacagcgatccttaaaccagagagcggatgtcttgataacatcaaaagctgggttattggggctatcgcactgctttgtttgctgggactgacatgggcattcggacttatgtacatcaatgagtcaacggttatcatggcatacctttttaccatctttaattcactgcagggaatgtttatctttatctttcactgcgttctccaaaaaaaggttagaaaggaatacggaaagtgcctccggacacactgttgcagcggcaagagcaccgaatctagtataggcagcgggaaaacgtcaggttcccgcacacccggacgctattccacgggctcccagtcaaggatccgccgaatgtggaacgatacagttcgtaagcagagcgagagttcctttattaccggggacatcaactcttccgcaagcctgaatagagagccgtacagagagacatcaatgggggtgaagctgaacatcgcttatcaaattggggcttccgaacagtgtcagggttacaagtgccacggctattcaaccacagaatggtag

SEQ ID NO: 326004 - DNA, 3723 bp, Artificial Sequence
  derived and/or modified sequence
atgtggccaagtcagctcctgatcttcatgatgctgttagcgcccatcatacatgcgttcagcagggctcccattccgatggctgtggttagacgggaactgagctgcgagtcttaccctatcgaactcaggtgccctggtacggatgtgataatgattgagagtgcaaattacggcagaaccgacgacaaaatatgcgatagtgatcccgcacagatggaaaacatccgctgctatttaccggatgcctataagatcatgtcccaacgatgtaataacagaacccagtgcgccgtcgtagccggccccgacgtgttcccggatccctgtcccgggacatacaagtacctggaggttcagtatgagtgcgtcccatacaaggtagagcaaaaagtcttcctctgtcccgggctccttaagggggtgtaccaaagcgagcaccttttcgaaagcgaccaccagtccggtgcatggtgtaaagaccctctgcaagcatcagacaaaatctattatatgccatggactccataccgcaccgataccctcactgaatactcctccaaggacgattttatcgctggaaggcccactacaacctacaagcttccccacagagtggacggaaccggtttcgtcgtgtatgacggcgctctgttctttaacaaggaacgaacacgaaatatagtcaaatttgatttgcgtacgaggattaagtctggcgaggcaatcattgccaatgccaactaccacgacacctctccttatcgttgggggggaaagtcagatattgacctcgcagtggacgaaaacggattgtgggtcatctatgcaaccgagcagaacaacggaaagattgtgatttcccagctgaacccttatacccttcggatcgaaggaacgtgggatacagcatacgacaaacgtagtgctagcaacgcattcatgatctgtggcattctgtatgttgtgaagtccgtctacgaagacgatgacaacgaggccacgggcaacaagattgattatatttataacacagatcagtcaaaagattcactggtggacgtgccctttcccaattcgtaccaatacatagccgcagtggattacaaccccagagataatctgctctatgtatggaataactaccatgtggtcaagtatagcctcgactttggtccattggactctaggtcaggccaggctcaccatggacaggtgagctatatcagcccacctatacatctggacagtgaacttgaaaggccctctgtcaaggatatatcaacaacgggtcccctggggatgggttccactactacctctaccacgctacgaacgacgacgttgtctccgggccgctcgaccaccccctctgtgagcggacgaaggaaccggtcaactagcacccctagtccagcagtggaggtgttggatgacatgacgacccacttgcccagcgcctctagtcagatccctgctctggaagaatcttgcgaggcggtcgaggctcgtgaaatcatgtggtttaagactcggcaggggcagattgccaagcagccgtgtcctgctggtacaattggcgtgtcgacttacctttgcttggcacccgacggaatttgggacccccagggccctgatctgtcaaattgctctagtccatgggtgaatcacattactcagaaactcaaatctggggagaccgctgctaacatcgcgcgcgagttagccgagcaaacccggaatcacctcaatgctggtgatattacctatagcgtccgcgccatggatcagttggtggggctgcttgacgtgcaactccgcaatcttactcctggcggtaaggattcagctgcgcgctctttgaacaaattacagaaaagggagaggtcttgtagagcttacgttcaggccatggtggagactgtgaataatctgctccagccccaagctttaaacgcctggcgtgatctgacaacatccgaccaacttagagcagcaactatgctccttcatactgtggaggagtcagcttttgtgctggctgataatttgttaaagacagatatcgtccgggaaaacaccgataatatcaagctcgaggtggcacggttgagtactgaaggcaatctcgaggatctaaaattccccgaaaacatgggccatggatcaactatccagctttcagcgaatacactgaagcaaaacggaaggaatggtgaaatccgagtggctttcgtgctgtacaataacctcggaccctacttgtccacagagaatgcatctatgaaacttgggacagaggccctgtctactaaccatagtgtgatcgttaatagccccgttatcactgctgctatcaataaagaattctctaataaggtttacttagccgatccggtggtgtttaccgtgaagcatatcaaacaaagtgaagaaaatttcaaccccaattgttccttttggtcatatagcaagagaaccatgaccggctattggagcacccagggctgtcgcttgctgacgactaacaagacgcacactacgtgcagttgcaaccacctgactaacttcgcggttctgatggcccacgttgaggtgaagcactccgacgccgtgcacgacttacttctggacgttatcacttgggtgggcatcctcttgagcctggtttgtctgctgatctgtatattcaccttctgcttttttcgaggactacagagcgaccgaaacactatacataagaacctttgtataagcttgtttgtggccgagttgttattcctgataggaatcaaccgaactgaccagcccatcgcctgtgccgtattcgccgccctgttacatttttttttcctggctgcttttacgtggatgtttctcgagggtgtgcagctgtacatcatgttagtggaggtgtttgaatctgagcactctagacgtaagtacttttatcttgtcggatacgggatgcccgccctgatagtggccgttagcgcagccgtggactaccgctcatatgggacagacaaggtgtgttggctgcggctcgatacttactttatttggagctttataggccctgccactctaatcatcatgctgaacgtcatttttctgggcatcgcactttacaagatgttccaccacacagcaattctgaaacccgagtcaggatgccttgataacattaattacgaagacaaccgaccgttcataaaatcttgggtaattggagctattgctctcctgtgtctcctcggtcttacgtgggcttttggactaatgtacattaatgaaagcaccgtgattatggcttacttgttcacaatttttaattccctgcaaggcatgtttattttcatcttccattgtgttttgcagaagaaggtccgcaaggagtatggcaaatgtctgaggacccattgctgctccggtaagtctacagagtccagcattggtagcgggaaaacctccggaagtaggaccccgggccggtatagtaccggtagccaatctcgcatccgacgtatgtggaatgacacggttcgaaagcaatccgagtcaagctttattacaggagatattaattcctctgcctcactaaacagagaaccatacagagagacgagtatgggggtgaaattgaacattgcctaccagataggagcttctgaacagtgccaggggtataaatgtcatggctactcgacaacagaatggtag

SEQ ID NO: 326005 - DNA, 6176 bp, Artificial Sequence
  derived and/or modified sequence
gtttcagatttgggatattggtgtttctgttttggagaaattattctttttctttttaatttgaagaaaaatcatcagtcttggaatacagaagagaaactagaaatatacgtattttgtttcacatttgaacagtcattcttgaggaatactccatacctgagtagacagccatgtggccatcgcagctactaattttcatgatgctcttagctccaataattcatgctttcagccgtgccccaattccaatggctgtggtccgcagagagctatcctgtgagagctatcctatagagcttcgctgtccaggaacagacgtcatcatgatagaaagtgccaactatggcaggactgatgacaaaatttgtgactctgaccctgctcagatggagaatatccgatgttatctgccagatgcctataagattatgtctcaaagatgcaataacagaacccagtgtgcagtggtggcaggtcctgatgtttttccagacccgtgtccaggaacctataaataccttgaagtgcagtatgaatgtgtcccttacagagtagaccagaaagtttttctttgtcctggactactaaaaggagtataccagagtgaacatttgtttgagtccgaccaccaatctggggcgtggtgcaaagaccctctgcaggcatctgacaagatttattatatgccctggactccctacagaactgataccctgactgagtattcatccaaggatgacttcattgctggaagaccaactacaacctacaagctccctcacagggtggatggcacaggatttgtagtgtatgatggagctttgttcttcaacaaagagcgcaccaggaacatagtaaagtttgatttgcggactaggataaagagtggagaggctatcatagcaaatgccaattaccatgatacctccccttaccgatggggaggcaaatctgacatagacctggcagtagatgagaatgggctatgggtaatctatgcaacagaacaaaacaatggtaaaattgtcattagtcaattgaacccttacaccctacggatcgaaggaacatgggatactgcatatgataaaaggtcagcttccaatgcctttatgatttgtggaattctgtatgtggtcaaatctgtatatgaggatgatgacaatgaggctactggaaataagattgactacatttacaacactgaccaaagcaaggatagtttggtggatgtaccctttcctaattcataccagtacattgcagctgtggattacaaccccagggacaacctactttatgtatggaataactatcacgtcgtgaaatattctttggattttggacctctggatagtagatcagggcaggcacatcatggacaagtttcatacatttctccgccaattcaccttgactctgagctagaaagaccctctgttaaagatatctctaccacaggacctcttggcatgggaagcactaccaccagtaccacccttcggaccacaactttgagcccaggaaggagtaccaccccgtcagtgtcaggaagaagaaaccggagtactagtaccccatctccagctgtcgaggtacttgatgacatgaccacacaccttccatcagcatcgtcccaaatcccagctctcgaagagagctgtgaggctgtggaagcccgagaaatcatgtggtttaagactcgtcaaggacagatagcaaagcagccatgccctgcaggaactataggtgtatcaacttatctatgccttgctcctgatggaatttgggatccccaaggtccagatctcagcaactgttcttctccttgggtcaatcatataacacagaagttgaaatctggtgaaacagctgccaacattgctagagagctggctgaacagacaagaaatcacttgaatgctggggacatcacctactctgtccgggccatggaccagctggtaggcctcctagatgtacagcttcggaacttgaccccaggtggaaaagatagtgctgcccggagtttgaacaagcttcagaaaagagagcgctcttgcagagcctatgtccaggcaatggtcgagacagttaacaacctccttcagccacaagctttgaatgcatggagagacctgactacgagtgatcagctgcgtgcggccaccatgttgcttcatactgtggaggaaagtgcttttgtgctggctgataaccttttgaagactgacattgtcagggagaatacagacaatattaaattggaagttgcaagactgagcacagaaggaaacttagaagacctaaaatttccagaaaacatgggccatggaagcactatccagctgtctgcaaataccttaaagcaaaatggccgaaatggagagatcagagtggcctttgtcctgtataacaacttgggtccttatttatccacggagaatgccagtatgaagttgggaacggaagctttgtccacaaatcattctgttattgtcaattcccctgttattacggcagcaataaacaaagagttcagtaacaaggtttatttggctgatcctgtggtatttactgttaaacatatcaagcagtcagaggaaaatttcaaccctaactgttcattttggagctactccaagcgtacaatgacaggttattggtcaacacaaggctgtcggctcctgacaacaaataagacacatactacatgctcttgtaaccacctaacaaattttgcagtactgatggcacatgtggaagttaagcacagtgatgcggtccatgacctccttctggatgtgatcacgtgggttggaattttgctgtcccttgtttgtctcctgatttgcatcttcacattttgctttttccgggggctccagagtgaccgtaacaccatccacaagaacctctgcatcagtctctttgtagcagagctgctcttcctgattgggatcaaccgaactgaccaaccaattgcctgtgctgttttcgctgccctgttacatttcttcttcttggctgccttcacctggatgttcctggagggggtgcagctttatatcatgctggtggaggtttttgagagtgaacattcacgtaggaaatacttttatctggtcggctatgggatgcctgcactcattgtggctgtgtcagctgcagtagactacaggagttatggaacagataaagtatgttggctccgacttgacacctacttcatttggagttttataggaccagcaactttgataattatgcttaatgtaatcttccttgggattgctttatataaaatgtttcatcatactgctatactgaaacctgaatcaggctgtcttgataacatcaactatgaggataacagacccttcatcaagtcatgggttataggtgcaatagctcttctctgcctattaggattgacctgggcctttggactcatgtatattaatgaaagcacagtcatcatggcctatctcttcaccattttcaattctctacagggaatgtttatatttattttccattgtgtcctacagaagaaggtacgaaaagagtatgggaaatgcctgcgaacacattgctgtagtggcaaaagtacagagagttccattggttcagggaaaacatctggttctcgaactcctggacgctactccacaggctcacagagccgaatccgtagaatgtggaatgacacggttcgaaagcagtcagagtcttcctttattactggagacataaacagttcagcgtcactcaacagagagccctacagagagacaagtatgggagtaaagctaaacattgcatatcaaataggggcttctgaacaatgccagggatacaagtgtcatggatactctaccactgaatggtaaccatggcaatagttacagcattgccagcggcgaatacctgagcaactgtgtgcaaatcatagaccgtggctataaccataacgagaccgccctagagaaaaagattctgaaggaactcacttccaactatatcccttcttacctgaacaaccatgagcgctccagtgaacagaacaggaatctgatgaacaagctggtgaataaccttggcagtggaagggaagatgatgccattgtcctggatgatgccacctcgtttaaccacgaggagagtttgggcctggaactcattcatgaggaatctgatgctcctttgctgcccccaagagtatactccaccgagaaccaccagccacaccattataccagaaggcggatcccccaagaccacagtgagagctttttccctttgctaaccaacgagcacacagaagatctccagtcaccccatagagactctctctataccagcatgccgacactggctggtgtggccgccacagagagtgttaccaccagcacccagaccgaacccccaccggccaaatgtggtgatgccgaagatgtttactacaaaagcatgccaaacctaggctccagaaaccacgtccatcagctgcatacttactaccagctaggtcgcggcagcagtgatggatttatagttcctccaaacaaagatgggacccctcccgagggaagttcaaaaggaccggctcatttggtcactagtctatagaagatgacacagaaattggaaccaacaaaactgctaacaccttgttgactgttctgagttgatataagcagtggtaataatgtgtgtactcctaaatctttatgctgtcctctaaagacaaacacaaactctcagacttttttttttttaatgggatttttaggtcagcccaggggagaaagataactgctaaaattcccctgtaccccatcctttcttgtcctttccccttcagatggagacttcattatgttaatgaacaagatatgaagaaaatggcactcattgtggccttgttgaattatgttgtgtatgttttaacatctctgatgctgtgttactaaaattacaaggacctgctttttaaaaggccagaacaattgtctgaaattagtaacaatgctgcatctagattggagtgctgcacaaacaaacataagagcaaagcaaaactgtatcacatagggtttttggtcactcacaacctgaattcaccacagctggaatagctgtggaaaacaaaataaaacaacaaaattaataatgaaatggaggggaattctagaattatatgctaaatgcatattttatgatttgctgtattaactgatgataaaactaatggcagaaaaagaagttgagcaatttctatgtaatgtacagatactagcattgcacatatagtctgctttctgttcctccagaatttgagtcctgttaatgtagtagaaaaaaaaaaaagaaattttctttttcttttgtgctggtcttgcaagtttgtctaccagtaagagagcaaagtttccttcctttcttctctttcttcattttctttttttcttttttgccttttattcctttaaaatttcgcctggcaaaaaataaataaatggaactatcactttataagaatcattttctagtaatgcaaacaaattattttttacaaaaaaacaaaataaataaaattagacttccttccctcactatatatctttatgcagtcagaatatttccaacagtgttttttgcaaattagagcaggacaaacttttatgtttacagggcacgtctgttgtaatgcaaagcatatttggcaagcagttcatcaccaggacactagctatgattctagaagtcaaaaggtgtctatagaactagtggggcttctgcatgtgaaaaacggttttccataggcattaaagtgctgaatgctcagtctgatcaacaagtgggcacctgcactaccactttttagaggaaattcactccctcgtaagcattggaaggtcaaattattttgaagtgatttttttaaaaaaaagtcttctgtttattaacaggaaaatttatttatttgacaggattttgagtaatgtaggaatacaaaaggtaaattagcagcacatataatttttttttaatttatgatccattttgtatggtctcaaagttggatgacctcattactaatatttgttgtaaaagtgaaacttgtttgccaaccaataaacaactgattgagatttagaagatattgt

SEQ ID NO: 326006 - DNA, 4838 bp, Artificial Sequence
  derived and/or modified sequence
gtttcagatttgggatattggtgtttctgttttggagaaattattctttttctttttaatttgaagaaaaatcatcagtcttggaatacagaagagaaactagaaatatacgtattttgtttcacatttgaacagtcattcttgaggaatactccatacctgagtagacagccatgtggccatcgcagctactaattttcatgatgctcttagctccaataattcatgctttcagccgtgccccaattccaatggctgtggtccgcagagagctatcctgtgagagctatcctatagagcttcgctgtccaggaacagacgtcatcatgatagaaagtgccaactatggcaggactgatgacaaaatttgtgactctgaccctgctcagatggagaatatccgatgttatctgccagatgcctataagattatgtctcaaagatgcaataacagaacccagtgtgcagtggtggcaggtcctgatgtttttccagacccgtgtccaggaacctataaataccttgaagtgcagtatgaatgtgtcccttacaaagtggaacaaaaagtttttctttgtcctggactactaaaaggagtataccagagtgaacatttgtttgagtccgaccaccaatctggggcgtggtgcaaagaccctctgcaggcatctgacaagatttattatatgccctggactccctacagaactgataccctgactgagtattcatccaaggatgacttcattgctggaagaccaactacaacctacaagctccctcacagggtggatggcacaggatttgtagtgtatgatggagctttgttcttcaacaaagagcgcaccaggaacatagtaaagtttgatttgcggactaggataaagagtggagaggctatcatagcaaatgccaattaccatgatacctccccttaccgatggggaggcaaatctgacatagacctggcagtagatgagaatgggctatgggtaatctatgcaacagaacaaaacaatggtaaaattgtcattagtcaattgaacccttacaccctacggatcgaaggaacatgggatactgcatatgataaaaggtcagcttccaatgcctttatgatttgtggaattctgtatgtggtcaaatctgtatatgaggatgatgacaatgaggctactggaaataagattgactacatttacaacactgaccaaagcaaggatagtttggtggatgtaccctttcctaattcataccagtacattgcagctgtggattacaaccccagggacaacctactttatgtatggaataactatcacgtcgtgaaatattctttggattttggacctctggatagtagatcagggcaggcacatcatggacaagtttcatacatttctccgccaattcaccttgactctgagctagaaagaccctctgttaaagatatctctaccacaggacctcttggcatgggaagcactaccaccagtaccacccttcggaccacaactttgagcccaggaaggagtaccaccccgtcagtgtcaggaagaagaaaccggagtactagtaccccatctccagctgtcgaggtacttgatgacatgaccacacaccttccatcagcatcgtcccaaatcccagctctcgaagagagctgtgaggctgtggaagcccgagaaatcatgtggtttaagactcgtcaaggacagatagcaaagcagccatgccctgcaggaactataggtgtatcaacttatctatgccttgctcctgatggaatttgggatccccaaggtccagatctcagcaactgttcttctccttgggtcaatcatataacacagaagttgaaatctggtgaaacagctgccaacattgctagagagctggctgaacagacaagaaatcacttgaatgctggggacatcacctactctgtccgggccatggaccagctggtaggcctcctagatgtacagcttcggaacttgaccccaggtggaaaagatagtgctgcccggagtttgaacaagcttcagaaaagagagcgctcttgcagagcctatgtccaggcaatggtcgagacagttaacaacctccttcagccacaagctttgaatgcatggagagacctgactacgagtgatcagctgcgtgcggccaccatgttgcttcatactgtggaggaaagtgcttttgtgctggctgataaccttttgaagactgacattgtcagggagaatacagacaatattaaattggaagttgcaagactgagcacagaaggaaacttagaagacctaaaatttccagaaaacatgggccatggaagcactatccagctgtctgcaaataccttaaagcaaaatggccgaaatggagagatcagagtggcctttgtcctgtataacaacttgggtccttatttatccacggagaatgccagtatgaagttgggaacggaagctttgtccacaaatcattctgttattgtcaattcccctgttattacggcagcaataaacaaagagttcagtaacaaggtttatttggctgatcctgtggtatttactgttaaacatatcaagcagtcagaggaaaatttcaaccctaactgttcattttggagctactccaagcgtacaatgacaggttattggtcaacacaaggctgtcggctcctgacaacaaataagacacatactacatgctcttgtaaccacctaacaaattttgcagtactgatggcacatgtggaagttaagcacagtgatgcggtccatgacctccttctggatgtgatcacgtgggttggaattttgctgtcccttgtttgtctcctgatttgcatcttcacattttgctttttccgggggctccagagtgaccgtaacaccatccacaagaacctctgcatcagtctctttgtagcagagctgctcttcctgattgggatcaaccgaactgaccaaccaattgcctgtgctgttttcgctgccctgttacatttcttcttcttggctgccttcacctggatgttcctggagggggtgcagctttatatcatgctggtggaggtttttgagagtgaacattcacgtaggaaatacttttatctggtcggctatgggatgcctgcactcattgtggctgtgtcagctgcagtagactacaggagttatggaacagataaagtatgttggctccgacttgacacctacttcatttggagttttataggaccagcaactttgataattatgcttaatgtaatcttccttgggattgctttatataaaatgtttcatcatactgctatactgaaacctgaatcaggctgtcttgataacatcaagtcatgggttataggtgcaatagctcttctctgcctattaggattgacctgggcctttggactcatgtatattaatgaaagcacagtcatcatggcctatctcttcaccattttcaattctctacagggaatgtttatatttattttccattgtgtcctacagaagaaggtacgaaaagagtatgggaaatgcctgcgaacacattgctgtagtggcaaaagtacagagagttccattggttcagggaaaacatctggttctcgaactcctggacgctactccacaggctcacagagccgaatccgtagaatgtggaatgacacggttcgaaagcagtcagagtcttcctttattactggagacataaacagttcagcgtcactcaacagagagccctacagagagacaagtatgggagtaaagctaaacattgcatatcaaataggggcttctgaacaatgccagggatacaagtgtcatggatactctaccactgaatggtaaccatggcaatagttacagcattgccagcggcgaatacctgagcaactgtgtgcaaatcatagaccgtggctataaccataacgagaccgccctagagaaaaagattctgaaggaactcacttccaactatatcccttcttacctgaacaaccatgagcgctccagtgaacagaacaggaatctgatgaacaagctggtgaataaccttggcagtggaagggaagatgatgccattgtcctggatgatgccacctcgtttaaccacgaggagagtttgggcctggaactcattcatgaggaatctgatgctcctttgctgcccccaagagtatactccaccgagaaccaccagccacaccattataccagaaggcggatcccccaagaccacagtgagagctttttccctttgctaaccaacgagcacacagaagatctccagtcaccccatagagactctctctataccagcatgccgacactggctggtgtggccgccacagagagtgttaccaccagcacccagaccgaacccccaccggccaaatgtggtgatgccgaagatgtttactacaaaagcatgccaaacctaggctccagaaaccacgtccatcagctgcatacttactaccagctaggtcgcggcagcagtgatggatttatagttcctccaaacaaagatgggacccctcccgagggaagttcaaaaggaccggctcatttggtcactagtctatagaagatgacacagaaattggaaccaacaaaactgctaacaccttgttgactgttctgagttgatataagcagtggtaataatgtgtgtactcctaaatctttatgctgtcctctaaagacaaacacaaactctcagacttttttttttttaatgggatttttaggtcagcccaggggagaaagataactgctaaaattcccctgtaccccatcctttcttgtcctttcccc

SEQ ID NO: 326007 - DNA, 5069 bp, Artificial Sequence
  derived and/or modified sequence
gtttcagatttgggatattggtgtttctgttttggagaaattattctttttctttttaatttgaagaaaaatcatcagtcttggaatacagaagagaaactagaaatatacgtattttgtttcacatttgaacagtcattcttgaggaatactccatacctgagtagacagccatgtggccatcgcagctactaattttcatgatgctcttagctccaataattcatggtggcaagcacagtgaacgacatcctgcccttgctgctccattgcgacacgctgagcgcagcccaggaggcgctcttccacccagacatctgcttcagcagccagctgcagagcgcaccgctgctcatcgtggacaagggccccgtggagctaccagaggagttcgcggtccaggtgcccaaggagcacagattgcagcgcaagctttcagccgtgccccaattccaatggctgtggtccgcagagagctatcctgtgagagctatcctatagagcttcgctgtccaggaacagacgtcatcatgatagaaagtgccaactatggcaggactgatgacaaaatttgtgactctgaccctgctcagatggagaatatccgatgttatctgccagatgcctataagattatgtctcaaagatgcaataacagaacccagtgtgcagtggtggcaggtcctgatgtttttccagacccgtgtccaggaacctataaataccttgaagtgcagtatgaatgtgtcccttacaaagtggaacaaaaagtttttctttgtcctggactactaaaaggagtataccagagtgaacatttgtttgagtccgaccaccaatctggggcgtggtgcaaagaccctctgcaggcatctgacaagatttattatatgccctggactccctacagaactgataccctgactgagtattcatccaaggatgacttcattgctggaagaccaactacaacctacaagctccctcacagggtggatggcacaggatttgtagtgtatgatggagctttgttcttcaacaaagagcgcaccaggaacatagtaaagtttgatttgcggactaggataaagagtggagaggctatcatagcaaatgccaattaccatgatacctccccttaccgatggggaggcaaatctgacatagacctggcagtagatgagaatgggctatgggtaatctatgcaacagaacaaaacaatggtaaaattgtcattagtcaattgaacccttacaccctacggatcgaaggaacatgggatactgcatatgataaaaggtcagcttccaatgcctttatgatttgtggaattctgtatgtggtcaaatctgtatatgaggatgatgacaatgaggctactggaaataagattgactacatttacaacactgaccaaagcaaggatagtttggtggatgtaccctttcctaattcataccagtacattgcagctgtggattacaaccccagggacaacctactttatgtatggaataactatcacgtcgtgaaatattctttggattttggacctctggatagtagatcagggcaggcacatcatggacaagtttcatacatttctccgccaattcaccttgactctgagctagaaagaccctctgttaaagatatctctaccacaggacctcttggcatgggaagcactaccaccagtaccacccttcggaccacaactttgagcccaggaaggagtaccaccccgtcagtgtcaggaagaagaaaccggagtactagtaccccatctccagctgtcgaggtacttgatgacatgaccacacaccttccatcagcatcgtcccaaatcccagctctcgaagagagctgtgaggctgtggaagcccgagaaatcatgtggtttaagactcgtcaaggacagatagcaaagcagccatgccctgcaggaactataggtgtatcaacttatctatgccttgctcctgatggaatttgggatccccaaggtccagatctcagcaactgttcttctccttgggtcaatcatataacacagaagttgaaatctggtgaaacagctgccaacattgctagagagctggctgaacagacaagaaatcacttgaatgctggggacatcacctactctgtccgggccatggaccagctggtaggcctcctagatgtacagcttcggaacttgaccccaggtggaaaagatagtgctgcccggagtttgaacaagcttcagaaaagagagcgctcttgcagagcctatgtccaggcaatggtcgagacagttaacaacctccttcagccacaagctttgaatgcatggagagacctgactacgagtgatcagctgcgtgcggccaccatgttgcttcatactgtggaggaaagtgcttttgtgctggctgataaccttttgaagactgacattgtcagggagaatacagacaatattaaattggaagttgcaagactgagcacagaaggaaacttagaagacctaaaatttccagaaaacatgggccatggaagcactatccagctgtctgcaaataccttaaagcaaaatggccgaaatggagagatcagagtggcctttgtcctgtataacaacttgggtccttatttatccacggagaatgccagtatgaagttgggaacggaagctttgtccacaaatcattctgttattgtcaattcccctgttattacggcagcaataaacaaagagttcagtaacaaggtttatttggctgatcctgtggtatttactgttaaacatatcaagcagtcagaggaaaatttcaaccctaactgttcattttggagctactccaagcgtacaatgacaggttattggtcaacacaaggctgtcggctcctgacaacaaataagacacatactacatgctcttgtaaccacctaacaaattttgcagtactgatggcacatgtggaagttaagcacagtgatgcggtccatgacctccttctggatgtgatcacgtgggttggaattttgctgtcccttgtttgtctcctgatttgcatcttcacattttgctttttccgggggctccagagtgaccgtaacaccatccacaagaacctctgcatcagtctctttgtagcagagctgctcttcctgattgggatcaaccgaactgaccaaccaattgcctgtgctgttttcgctgccctgttacatttcttcttcttggctgccttcacctggatgttcctggagggggtgcagctttatatcatgctggtggaggtttttgagagtgaacattcacgtaggaaatacttttatctggtcggctatgggatgcctgcactcattgtggctgtgtcagctgcagtagactacaggagttatggaacagataaagtatgttggctccgacttgacacctacttcatttggagttttataggaccagcaactttgataattatgcttaatgtaatcttccttgggattgctttatataaaatgtttcatcatactgctatactgaaacctgaatcaggctgtcttgataacatcaactatgaggataacagacccttcatcaagtcatgggttataggtgcaatagctcttctctgcctattaggattgacctgggcctttggactcatgtatattaatgaaagcacagtcatcatggcctatctcttcaccattttcaattctctacagggaatgtttatatttattttccattgtgtcctacagaagaaggtacgaaaagagtatgggaaatgcctgcgaacacattgctgtagtggcaaaagtacagagagttccattggttcagggaaaacatctggttctcgaactcctggacgctactccacaggctcacagagccgaatccgtagaatgtggaatgacacggttcgaaagcagtcagagtcttcctttattactggagacataaacagttcagcgtcactcaacagagagccctacagagagacaagtatgggagtaaagctaaacattgcatatcaaataggggcttctgaacaatgccagggatacaagtgtcatggatactctaccactgaatggtaaccatggcaatagttacagcattgccagcggcgaatacctgagcaactgtgtgcaaatcatagaccgtggctataaccataacgagaccgccctagagaaaaagattctgaaggaactcacttccaactatatcccttcttacctgaacaaccatgagcgctccagtgaacagaacaggaatctgatgaacaagctggtgaataaccttggcagtggaagggaagatgatgccattgtcctggatgatgccacctcgtttaaccacgaggagagtttgggcctggaactcattcatgaggaatctgatgctcctttgctgcccccaagagtatactccaccgagaaccaccagccacaccattataccagaaggcggatcccccaagaccacagtgagagctttttccctttgctaaccaacgagcacacagaagatctccagtcaccccatagagactctctctataccagcatgccgacactggctggtgtggccgccacagagagtgttaccaccagcacccagaccgaacccccaccggccaaatgtggtgatgccgaagatgtttactacaaaagcatgccaaacctaggctccagaaaccacgtccatcagctgcatacttactaccagctaggtcgcggcagcagtgatggatttatagttcctccaaacaaagatgggacccctcccgagggaagttcaaaaggaccggctcatttggtcactagtctatagaagatgacacagaaattggaaccaacaaaactgctaacaccttgttgactgttctgagttgatataagcagtggtaataatgtgtgtactcctaaatctttatgctgtcctctaaagacaaacacaaactctcagacttttttttttttaatgggatttttaggtcagcccaggggagaaagataactgctaaaattcccctgtaccccatcctttcttgtcctttcccc

SEQ ID NO: 326008 - DNA, 5042 bp, Artificial Sequence
  derived and/or modified sequence
gtttcagatttgggatattggtgtttctgttttggagaaattattctttttctttttaatttgaagaaaaatcatcagtcttggaatacagaagagaaactagaaatatacgtattttgtttcacatttgaacagtcattcttgaggaatactccatacctgagtagacagccatgtggccatcgcagctactaattttcatgatgctcttagctccaataattcatggtggcaagcacagtgaacgacatcctgcccttgctgctccattgcgacacgctgagcgcagcccaggaggcgctcttccacccagacatctgcttcagcagccagctgcagagcgcaccgctgctcatcgtggacaagggccccgtggagctaccagaggagttcgcggtccaggtgcccaaggagcacagattgcagcgcaagctttcagccgtgccccaattccaatggctgtggtccgcagagagctatcctgtgagagctatcctatagagcttcgctgtccaggaacagacgtcatcatgatagaaagtgccaactatggcaggactgatgacaaaatttgtgactctgaccctgctcagatggagaatatccgatgttatctgccagatgcctataagattatgtctcaaagatgcaataacagaacccagtgtgcagtggtggcaggtcctgatgtttttccagacccgtgtccaggaacctataaataccttgaagtgcagtatgaatgtgtcccttacaaagtggaacaaaaagtttttctttgtcctggactactaaaaggagtataccagagtgaacatttgtttgagtccgaccaccaatctggggcgtggtgcaaagaccctctgcaggcatctgacaagatttattatatgccctggactccctacagaactgataccctgactgagtattcatccaaggatgacttcattgctggaagaccaactacaacctacaagctccctcacagggtggatggcacaggatttgtagtgtatgatggagctttgttcttcaacaaagagcgcaccaggaacatagtaaagtttgatttgcggactaggataaagagtggagaggctatcatagcaaatgccaattaccatgatacctccccttaccgatggggaggcaaatctgacatagacctggcagtagatgagaatgggctatgggtaatctatgcaacagaacaaaacaatggtaaaattgtcattagtcaattgaacccttacaccctacggatcgaaggaacatgggatactgcatatgataaaaggtcagcttccaatgcctttatgatttgtggaattctgtatgtggtcaaatctgtatatgaggatgatgacaatgaggctactggaaataagattgactacatttacaacactgaccaaagcaaggatagtttggtggatgtaccctttcctaattcataccagtacattgcagctgtggattacaaccccagggacaacctactttatgtatggaataactatcacgtcgtgaaatattctttggattttggacctctggatagtagatcagggcaggcacatcatggacaagtttcatacatttctccgccaattcaccttgactctgagctagaaagaccctctgttaaagatatctctaccacaggacctcttggcatgggaagcactaccaccagtaccacccttcggaccacaactttgagcccaggaaggagtaccaccccgtcagtgtcaggaagaagaaaccggagtactagtaccccatctccagctgtcgaggtacttgatgacatgaccacacaccttccatcagcatcgtcccaaatcccagctctcgaagagagctgtgaggctgtggaagcccgagaaatcatgtggtttaagactcgtcaaggacagatagcaaagcagccatgccctgcaggaactataggtgtatcaacttatctatgccttgctcctgatggaatttgggatccccaaggtccagatctcagcaactgttcttctccttgggtcaatcatataacacagaagttgaaatctggtgaaacagctgccaacattgctagagagctggctgaacagacaagaaatcacttgaatgctggggacatcacctactctgtccgggccatggaccagctggtaggcctcctagatgtacagcttcggaacttgaccccaggtggaaaagatagtgctgcccggagtttgaacaagcttcagaaaagagagcgctcttgcagagcctatgtccaggcaatggtcgagacagttaacaacctccttcagccacaagctttgaatgcatggagagacctgactacgagtgatcagctgcgtgcggccaccatgttgcttcatactgtggaggaaagtgcttttgtgctggctgataaccttttgaagactgacattgtcagggagaatacagacaatattaaattggaagttgcaagactgagcacagaaggaaacttagaagacctaaaatttccagaaaacatgggccatggaagcactatccagctgtctgcaaataccttaaagcaaaatggccgaaatggagagatcagagtggcctttgtcctgtataacaacttgggtccttatttatccacggagaatgccagtatgaagttgggaacggaagctttgtccacaaatcattctgttattgtcaattcccctgttattacggcagcaataaacaaagagttcagtaacaaggtttatttggctgatcctgtggtatttactgttaaacatatcaagcagtcagaggaaaatttcaaccctaactgttcattttggagctactccaagcgtacaatgacaggttattggtcaacacaaggctgtcggctcctgacaacaaataagacacatactacatgctcttgtaaccacctaacaaattttgcagtactgatggcacatgtggaagttaagcacagtgatgcggtccatgacctccttctggatgtgatcacgtgggttggaattttgctgtcccttgtttgtctcctgatttgcatcttcacattttgctttttccgggggctccagagtgaccgtaacaccatccacaagaacctctgcatcagtctctttgtagcagagctgctcttcctgattgggatcaaccgaactgaccaaccaattgcctgtgctgttttcgctgccctgttacatttcttcttcttggctgccttcacctggatgttcctggagggggtgcagctttatatcatgctggtggaggtttttgagagtgaacattcacgtaggaaatacttttatctggtcggctatgggatgcctgcactcattgtggctgtgtcagctgcagtagactacaggagttatggaacagataaagtatgttggctccgacttgacacctacttcatttggagttttataggaccagcaactttgataattatgcttaatgtaatcttccttgggattgctttatataaaatgtttcatcatactgctatactgaaacctgaatcaggctgtcttgataacatcaagtcatgggttataggtgcaatagctcttctctgcctattaggattgacctgggcctttggactcatgtatattaatgaaagcacagtcatcatggcctatctcttcaccattttcaattctctacagggaatgtttatatttattttccattgtgtcctacagaagaaggtacgaaaagagtatgggaaatgcctgcgaacacattgctgtagtggcaaaagtacagagagttccattggttcagggaaaacatctggttctcgaactcctggacgctactccacaggctcacagagccgaatccgtagaatgtggaatgacacggttcgaaagcagtcagagtcttcctttattactggagacataaacagttcagcgtcactcaacagagagccctacagagagacaagtatgggagtaaagctaaacattgcatatcaaataggggcttctgaacaatgccagggatacaagtgtcatggatactctaccactgaatggtaaccatggcaatagttacagcattgccagcggcgaatacctgagcaactgtgtgcaaatcatagaccgtggctataaccataacgagaccgccctagagaaaaagattctgaaggaactcacttccaactatatcccttcttacctgaacaaccatgagcgctccagtgaacagaacaggaatctgatgaacaagctggtgaataaccttggcagtggaagggaagatgatgccattgtcctggatgatgccacctcgtttaaccacgaggagagtttgggcctggaactcattcatgaggaatctgatgctcctttgctgcccccaagagtatactccaccgagaaccaccagccacaccattataccagaaggcggatcccccaagaccacagtgagagctttttccctttgctaaccaacgagcacacagaagatctccagtcaccccatagagactctctctataccagcatgccgacactggctggtgtggccgccacagagagtgttaccaccagcacccagaccgaacccccaccggccaaatgtggtgatgccgaagatgtttactacaaaagcatgccaaacctaggctccagaaaccacgtccatcagctgcatacttactaccagctaggtcgcggcagcagtgatggatttatagttcctccaaacaaagatgggacccctcccgagggaagttcaaaaggaccggctcatttggtcactagtctatagaagatgacacagaaattggaaccaacaaaactgctaacaccttgttgactgttctgagttgatataagcagtggtaataatgtgtgtactcctaaatctttatgctgtcctctaaagacaaacacaaactctcagacttttttttttttaatgggatttttaggtcagcccaggggagaaagataactgctaaaattcccctgtaccccatcctttcttgtcctttcccc

SEQ ID NO: 326009 - DNA, 6767 bp, Artificial Sequence
  derived and/or modified sequence
ttcttaagcggcggcggcagcagcagcagcaagagaaggagaagcagccccagctatgactgccgcatgttaatagctgccgctgggtccctcggctgctgctggagacagagcctgactccgaagttgtgcaactgtggactgggagagacatttgaaccctcttttcttttcgctccccttttgcccccttggggtgtgtgaagcgaggaacgtaaaggaaggcgaacatttggctctctttttccttcccctttctccgtggctgtgtagcggaagaaagggaagagagactttttgttgttgtttccttgactggggtctccaccctcctgctgctttctctgcgcttcgattctcgttatttgccgcgtgtggttgggggtgtctgcacaggggccggccggtcttttgccccgggctcaatggctggattgtggaaactgcacccgccttcaggttgttgagcaactgatgggacgatctcagggaccggcgtttacgaaagaaatgtttaatttggtaaattggaggaaaaaaacatggatttttagcaattgaagagcaaattaaggtttcagatttgggatattggtgtttctgttttggagaaattattctttttctttttaatttgaagaaaaatcatcagtcttggaatacagaagagaaactagaaatatacgtattttgtttcacatttgaacagtcattcttgaggaatactccatacctgagtagacagccatgtggccatcgcagctactaattttcatgatgctcttagctccaataattcatgctttcagccgtgccccaattccaatggctgtggtccgcagagagctatcctgtgagagctatcctatagagcttcgctgtccaggaacagacgtcatcatgatagaaagtgccaactatggcaggactgatgacaaaatttgtgactctgaccctgctcagatggagaatatccgatgttatctgccagatgcctataagattatgtctcaaagatgcaataacagaacccagtgtgcagtggtggcaggtcctgatgtttttccagacccgtgtccaggaacctataaataccttgaagtgcagtatgaatgtgtcccttacaaagtggaacaaaaagtttttctttgtcctggactactaaaaggagtataccagagtgaacatttgtttgagtccgaccaccaatctggggcgtggtgcaaagaccctctgcaggcatctgacaagatttattatatgccctggactccctacagaactgataccctgactgagtattcatccaaggatgacttcattgctggaagaccaactacaacctacaagctccctcacagggtggatggcacaggatttgtagtgtatgatggagctttgttcttcaacaaagagcgcaccaggaacatagtaaagtttgatttgcggactaggataaagagtggagaggctatcatagcaaatgccaattaccatgatacctccccttaccgatggggaggcaaatctgacatagacctggcagtagatgagaatgggctatgggtaatctatgcaacagaacaaaacaatggtaaaattgtcattagtcaattgaacccttacaccctacggatcgaaggaacatgggatactgcatatgataaaaggtcagcttccaatgcctttatgatttgtggaattctgtatgtggtcaaatctgtatatgaggatgatgacaatgaggctactggaaataagattgactacatttacaacactgaccaaagcaaggatagtttggtggatgtaccctttcctaattcataccagtacattgcagctgtggattacaaccccagggacaacctactttatgtatggaataactatcacgtcgtgaaatattctttggattttggacctctggatagtagatcagggcaggcacatcatggacaagtttcatacatttctccgccaattcaccttgactctgagctagaaagaccctctgttaaagatatctctaccacaggacctcttggcatgggaagcactaccaccagtaccacccttcggaccacaactttgagcccaggaaggagtaccaccccgtcagtgtcaggaagaagaaaccggagtactagtaccccatctccagctgtcgaggtacttgatgacatgaccacacaccttccatcagcatcgtcccaaatcccagctctcgaagagagctgtgaggctgtggaagcccgagaaatcatgtggtttaagactcgtcaaggacagatagcaaagcagccatgccctgcaggaactataggtgtatcaacttatctatgccttgctcctgatggaatttgggatccccaaggtccagatctcagcaactgttcttctccttgggtcaatcatataacacagaagttgaaatctggtgaaacagctgccaacattgctagagagctggctgaacagacaagaaatcacttgaatgctggggacatcacctactctgtccgggccatggaccagctggtaggcctcctagatgtacagcttcggaacttgaccccaggtggaaaagatagtgctgcccggagtttgaacaagcttcagaaaagagagcgctcttgcagagcctatgtccaggcaatggtcgagacagttaacaacctccttcagccacaagctttgaatgcatggagagacctgactacgagtgatcagctgcgtgcggccaccatgttgcttcatactgtggaggaaagtgcttttgtgctggctgataaccttttgaagactgacattgtcagggagaatacagacaatattaaattggaagttgcaagactgagcacagaaggaaacttagaagacctaaaatttccagaaaacatgggccatggaagcactatccagctgtctgcaaataccttaaagcaaaatggccgaaatggagagatcagagtggcctttgtcctgtataacaacttgggtccttatttatccacggagaatgccagtatgaagttgggaacggaagctttgtccacaaatcattctgttattgtcaattcccctgttattacggcagcaataaacaaagagttcagtaacaaggtttatttggctgatcctgtggtatttactgttaaacatatcaagcagtcagaggaaaatttcaaccctaactgttcattttggagctactccaagcgtacaatgacaggttattggtcaacacaaggctgtcggctcctgacaacaaataagacacatactacatgctcttgtaaccacctaacaaattttgcagtactgatggcacatgtggaagttaagcacagtgatgcggtccatgacctccttctggatgtgatcacgtgggttggaattttgctgtcccttgtttgtctcctgatttgcatcttcacattttgctttttccgggggctccagagtgaccgtaacaccatccacaagaacctctgcatcagtctctttgtagcagagctgctcttcctgattgggatcaaccgaactgaccaaccaattgcctgtgctgttttcgctgccctgttacatttcttcttcttggctgccttcacctggatgttcctggagggggtgcagctttatatcatgctggtggaggtttttgagagtgaacattcacgtaggaaatacttttatctggtcggctatgggatgcctgcactcattgtggctgtgtcagctgcagtagactacaggagttatggaacagataaagtatgttggctccgacttgacacctacttcatttggagttttataggaccagcaactttgataattatgcttaatgtaatcttccttgggattgctttatataaaatgtttcatcatactgctatactgaaacctgaatcaggctgtcttgataacatcaactatgaggataacagacccttcatcaagtcatgggttataggtgcaatagctcttctctgcctattaggattgacctgggcctttggactcatgtatattaatgaaagcacagtcatcatggcctatctcttcaccattttcaattctctacagggaatgtttatatttattttccattgtgtcctacagaagaaggtacgaaaagagtatgggaaatgcctgcgaacacattgctgtagtggcaaaagtacagagagttccattggttcagggaaaacatctggttctcgaactcctggacgctactccacaggctcacagagccgaatccgtagaatgtggaatgacacggttcgaaagcagtcagagtcttcctttattactggagacataaacagttcagcgtcactcaacagagagccctacagagagacaagtatgggagtaaagctaaacattgcatatcaaataggggcttctgaacaatgccagggatacaagtgtcatggatactctaccactgaatggtaaccatggcaatagttacagcattgccagcggcgaatacctgagcaactgtgtgcaaatcatagaccgtggctataaccataacgagaccgccctagagaaaaagattctgaaggaactcacttccaactatatcccttcttacctgaacaaccatgagcgctccagtgaacagaacaggaatctgatgaacaagctggtgaataaccttggcagtggaagggaagatgatgccattgtcctggatgatgccacctcgtttaaccacgaggagagtttgggcctggaactcattcatgaggaatctgatgctcctttgctgcccccaagagtatactccaccgagaaccaccagccacaccattataccagaaggcggatcccccaagaccacagtgagagctttttccctttgctaaccaacgagcacacagaagatctccagtcaccccatagagactctctctataccagcatgccgacactggctggtgtggccgccacagagagtgttaccaccagcacccagaccgaacccccaccggccaaatgtggtgatgccgaagatgtttactacaaaagcatgccaaacctaggctccagaaaccacgtccatcagctgcatacttactaccagctaggtcgcggcagcagtgatggatttatagttcctccaaacaaagatgggacccctcccgagggaagttcaaaaggaccggctcatttggtcactagtctatagaagatgacacagaaattggaaccaacaaaactgctaacaccttgttgactgttctgagttgatataagcagtggtaataatgtgtgtactcctaaatctttatgctgtcctctaaagacaaacacaaactctcagacttttttttttttaatgggatttttaggtcagcccaggggagaaagataactgctaaaattcccctgtaccccatcctttcttgtcctttccccttcagatggagacttcattatgttaatgaacaagatatgaagaaaatggcactcattgtggccttgttgaattatgttgtgtatgttttaacatctctgatgctgtgttactaaaattacaaggacctgctttttaaaaggccagaacaattgtctgaaattagtaacaatgctgcatctagattggagtgctgcacaaacaaacataagagcaaagcaaaactgtatcacatagggtttttggtcactcacaacctgaattcaccacagctggaatagctgtggaaaacaaaataaaacaacaaaattaataatgaaatggaggggaattctagaattatatgctaaatgcatattttatgatttgctgtattaactgatgataaaactaatggcagaaaaagaagttgagcaatttctatgtaatgtacagatactagcattgcacatatagtctgctttctgttcctccagaatttgagtcctgttaatgtagtagaaaaaaaaaaaagaaattttctttttcttttgtgctggtcttgcaagtttgtctaccagtaagagagcaaagtttccttcctttcttctctttcttcattttctttttttcttttttgccttttattcctttaaaatttcgcctggcaaaaaataaataaatggaactatcactttataagaatcattttctagtaatgcaaacaaattattttttacaaaaaaacaaaataaataaaattagacttccttccctcactatatatctttatgcagtcagaatatttccaacagtgttttttgcaaattagagcaggacaaacttttatgtttacagggcacgtctgttgtaatgcaaagcatatttggcaagcagttcatcaccaggacactagctatgattctagaagtcaaaaggtgtctatagaactagtggggcttctgcatgtgaaaaacggttttccataggcattaaagtgctgaatgctcagtctgatcaacaagtgggcacctgcactaccactttttagaggaaattcactccctcgtaagcattggaaggtcaaattattttgaagtgatttttttaaaaaaaagtcttctgtttattaacaggaaaatttatttatttgacaggattttgagtaatgtaggaatacaaaaggtaaattagcagcacatataatttttttttaatttatgatccattttgtatggtctcaaagttggatgacctcattactaatatttgttgtaaaagtgaaacttgtttgccaaccaataaacaactgattgagatttagaagatattgtattgatgtatgtactat

SEQ ID NO: 326010 - DNA, 3723 bp, Artificial Sequence
  derived and/or modified sequence
atgtggcccagccagctgctgatcttcatgatgctgctggcccccatcatccacgccttcagccgggcccccatccccatggctgtggtgagaagagagctgagctgtgagagctaccccatcgagctgcgctgccccggcacagatgtgatcatgattgaaagtgccaactacggccgcacagatgacaagatctgtgacagcgaccctgcccagatggagaacatccgctgctacctgcctgatgcctacaagatcatgagccagcgctgcaacaacagaacccagtgtgctgtggtggccggcccagatgtgtttcctgacccctgccccggcacctacaagtacctggaggtgcagtatgaatgtgtgccctacagagtggaccagaaggtgttcctgtgccccggcctgctgaagggcgtgtaccagagcgagcacctgtttgaaagtgaccaccagagcggggcctggtgcaaggaccccctgcaggccagtgacaagatctactacatgccctggaccccctacagaacagacaccctgacagagtacagcagcaaggatgacttcatcgccggccggcccaccaccacctacaagctgccccaccgggtggatggcactggatttgtggtgtatgatggagccctcttcttcaacaaggagaggaccaggaacatcgtgaagtttgacctgcggacccgcatcaagtctggagaggccatcatcgccaatgccaactaccatgacaccagcccctaccgctggggcggcaagagtgacatcgacctggccgtggatgaaaatggcctgtgggtgatctatgccacagagcagaacaacgggaagatcgtcatcagccagctgaacccctacaccctgagaattgagggcacctgggacacagcctatgacaagaggtctgccagcaatgccttcatgatctgtggcatcctgtatgtggtgaagtctgtgtatgaagatgatgacaatgaggccactggaaacaagattgactacatctacaacacagaccagagcaaggacagcctggtggatgtgcccttccccaacagctaccagtacatcgctgctgtggactacaacccccgggacaacctgctgtatgtgtggaacaactaccacgtggtgaagtacagcctggactttggccccctggacagccgcagcggccaggcccaccacggccaggtgtcctacatcagcccccccatccacctggacagcgagctggagcggcccagcgtgaaggacatcagcaccaccggccccctgggcatgggcagcaccaccaccagcaccaccctgcggaccaccaccctgagccctggccgcagcaccacccccagcgtgtctggaagaagaaacagaagcaccagcacccccagccctgctgtggaggtgctggatgacatgaccacccacctgcccagcgccagcagccagatcccagccctggaggagagctgtgaggccgtggaggcccgggagatcatgtggttcaagacccggcagggccagatcgccaagcagccctgcccagctggcaccatcggcgtgtccacctacctgtgcctggccccagatggcatctgggacccccagggccctgacctgagcaactgcagcagcccctgggtgaaccacatcacccagaagctgaagagcggggagacagctgccaacatcgcccgggagctggccgagcagaccaggaaccacctgaatgctggggacatcacctacagcgtgcgggccatggaccagctggtgggcctgctggatgtgcagctgaggaacctgaccccaggcggcaaggacagcgctgcccggagcctgaacaagctgcagaagcgggagaggagctgccgggcctacgtgcaggccatggtggagaccgtgaacaacctgctgcagccccaggccctgaatgcctggagggacctgaccaccagtgaccagctgcgggccgccaccatgctgctgcacacagtggaggagagcgcctttgtgctggccgacaacctgctgaagacagacatcgtgcgggagaacacagacaacatcaagctggaggtggcccggctgagcacagagggcaacctggaggacctgaagtttcctgagaacatgggccacggcagcaccatccagctgagcgccaacaccctgaagcagaatggaagaaatggagagatccgggtggcctttgtgctgtacaacaacctgggcccctacctgagcacagaaaatgcctccatgaagctgggcacagaggccctgagcaccaaccacagcgtcatcgtgaacagccctgtgatcacagctgccatcaacaaggagttcagcaacaaggtgtacctggccgaccctgtggtgttcaccgtgaagcacatcaagcagagcgaggagaacttcaaccccaactgcagcttctggagctacagcaagaggaccatgacaggctactggagcacccagggctgccgcctgctgaccaccaacaagacccacaccacctgcagctgcaaccacctgaccaactttgctgtgctgatggcccacgtggaggtgaagcacagtgatgctgtgcatgacctgctgctggatgtgatcacctgggtgggcatcctgctgagcctggtgtgcctgctgatctgcatcttcaccttctgcttcttccggggcctgcagagcgacaggaacaccatccacaagaacctgtgcatcagcctgtttgtggccgagctgctcttcctgattggcatcaacagaacagaccagcccatcgcctgtgctgtgtttgctgccctgctgcacttcttcttcctggccgccttcacctggatgttcctggagggcgtgcagctgtacatcatgctggtggaggtgtttgaaagtgagcacagcaggaggaagtacttctacctggtgggctacggcatgcctgccctgattgtggccgtgtctgctgctgtggactaccgctcctatggaacagacaaggtgtgctggctgcggctggacacctacttcatctggagcttcatcggccctgccaccctcatcatcatgctgaatgtcatcttcctgggcatcgccctgtacaagatgttccaccacacagccatcctgaagccagagagcggctgcctggacaacatcaactatgaggacaaccggcccttcatcaagtcctgggtgattggagccatcgccctgctgtgcctgctgggcctgacctgggccttcggcctgatgtacatcaatgaaagcaccgtcatcatggcctacctgttcaccatcttcaacagcctgcagggcatgttcatcttcatcttccactgtgtgctgcagaagaaggtgaggaaggagtatggcaagtgcctgcggacccactgctgcagcggcaagagcacagagagcagcatcggcagcggcaagaccagcggcagcaggaccccaggccgctacagcacaggcagccagagccgcatccggaggatgtggaatgacacagtgaggaagcagagcgagagcagcttcatcaccggggacatcaacagcagcgccagcctgaaccgggagccctaccgggagacctccatgggcgtgaagctgaacatcgcctaccagattggagccagcgagcagtgccagggctacaagtgccacggctacagcaccacagagtggtag

SEQ ID NO: 326011 - DNA, 3696 bp, Artificial Sequence
  derived and/or modified sequence
atgtggcccagccagctgctgatcttcatgatgctgctggcccccatcatccacgccttcagccgggcccccatccccatggctgtggtgagaagagagctgagctgtgagagctaccccatcgagctgcgctgccccggcacagatgtgatcatgattgaaagtgccaactacggccgcacagatgacaagatctgtgacagcgaccctgcccagatggagaacatccgctgctacctgcctgatgcctacaagatcatgagccagcgctgcaacaacagaacccagtgtgctgtggtggccggcccagatgtgtttcctgacccctgccccggcacctacaagtacctggaggtgcagtatgaatgtgtgccctacaaggtggagcagaaggtgttcctgtgccccggcctgctgaagggcgtgtaccagagcgagcacctgtttgaaagtgaccaccagagcggggcctggtgcaaggaccccctgcaggccagtgacaagatctactacatgccctggaccccctacagaacagacaccctgacagagtacagcagcaaggatgacttcatcgccggccggcccaccaccacctacaagctgccccaccgggtggatggcactggatttgtggtgtatgatggagccctcttcttcaacaaggagaggaccaggaacatcgtgaagtttgacctgcggacccgcatcaagtctggagaggccatcatcgccaatgccaactaccatgacaccagcccctaccgctggggcggcaagagtgacatcgacctggccgtggatgaaaatggcctgtgggtgatctatgccacagagcagaacaacgggaagatcgtcatcagccagctgaacccctacaccctgagaattgagggcacctgggacacagcctatgacaagaggtctgccagcaatgccttcatgatctgtggcatcctgtatgtggtgaagtctgtgtatgaagatgatgacaatgaggccactggaaacaagattgactacatctacaacacagaccagagcaaggacagcctggtggatgtgcccttccccaacagctaccagtacatcgctgctgtggactacaacccccgggacaacctgctgtatgtgtggaacaactaccacgtggtgaagtacagcctggactttggccccctggacagccgcagcggccaggcccaccacggccaggtgtcctacatcagcccccccatccacctggacagcgagctggagcggcccagcgtgaaggacatcagcaccaccggccccctgggcatgggcagcaccaccaccagcaccaccctgcggaccaccaccctgagccctggccgcagcaccacccccagcgtgtctggaagaagaaacagaagcaccagcacccccagccctgctgtggaggtgctggatgacatgaccacccacctgcccagcgccagcagccagatcccagccctggaggagagctgtgaggccgtggaggcccgggagatcatgtggttcaagacccggcagggccagatcgccaagcagccctgcccagctggcaccatcggcgtgtccacctacctgtgcctggccccagatggcatctgggacccccagggccctgacctgagcaactgcagcagcccctgggtgaaccacatcacccagaagctgaagagcggggagacagctgccaacatcgcccgggagctggccgagcagaccaggaaccacctgaatgctggggacatcacctacagcgtgcgggccatggaccagctggtgggcctgctggatgtgcagctgaggaacctgaccccaggcggcaaggacagcgctgcccggagcctgaacaagctgcagaagcgggagaggagctgccgggcctacgtgcaggccatggtggagaccgtgaacaacctgctgcagccccaggccctgaatgcctggagggacctgaccaccagtgaccagctgcgggccgccaccatgctgctgcacacagtggaggagagcgcctttgtgctggccgacaacctgctgaagacagacatcgtgcgggagaacacagacaacatcaagctggaggtggcccggctgagcacagagggcaacctggaggacctgaagtttcctgagaacatgggccacggcagcaccatccagctgagcgccaacaccctgaagcagaatggaagaaatggagagatccgggtggcctttgtgctgtacaacaacctgggcccctacctgagcacagaaaatgcctccatgaagctgggcacagaggccctgagcaccaaccacagcgtcatcgtgaacagccctgtgatcacagctgccatcaacaaggagttcagcaacaaggtgtacctggccgaccctgtggtgttcaccgtgaagcacatcaagcagagcgaggagaacttcaaccccaactgcagcttctggagctacagcaagaggaccatgacaggctactggagcacccagggctgccgcctgctgaccaccaacaagacccacaccacctgcagctgcaaccacctgaccaactttgctgtgctgatggcccacgtggaggtgaagcacagtgatgctgtgcatgacctgctgctggatgtgatcacctgggtgggcatcctgctgagcctggtgtgcctgctgatctgcatcttcaccttctgcttcttccggggcctgcagagcgacaggaacaccatccacaagaacctgtgcatcagcctgtttgtggccgagctgctcttcctgattggcatcaacagaacagaccagcccatcgcctgtgctgtgtttgctgccctgctgcacttcttcttcctggccgccttcacctggatgttcctggagggcgtgcagctgtacatcatgctggtggaggtgtttgaaagtgagcacagcaggaggaagtacttctacctggtgggctacggcatgcctgccctgattgtggccgtgtctgctgctgtggactaccgctcctatggaacagacaaggtgtgctggctgcggctggacacctacttcatctggagcttcatcggccctgccaccctcatcatcatgctgaatgtcatcttcctgggcatcgccctgtacaagatgttccaccacacagccatcctgaagccagagagcggctgcctggacaacatcaagtcctgggtgattggagccatcgccctgctgtgcctgctgggcctgacctgggccttcggcctgatgtacatcaatgaaagcaccgtcatcatggcctacctgttcaccatcttcaacagcctgcagggcatgttcatcttcatcttccactgtgtgctgcagaagaaggtgaggaaggagtatggcaagtgcctgcggacccactgctgcagcggcaagagcacagagagcagcatcggcagcggcaagaccagcggcagcaggaccccaggccgctacagcacaggcagccagagccgcatccggaggatgtggaatgacacagtgaggaagcagagcgagagcagcttcatcactggagacatcaacagcagcgccagcctgaaccgggagccctaccgggagacctccatgggcgtgaagctgaacatcgcctaccagatcggggccagcgagcagtgccagggctacaagtgccacggctacagcaccacagagtggtag

SEQ ID NO: 326012 - DNA, 3927 bp, Artificial Sequence
  derived and/or modified sequence
atgtggcccagccagctgctgatcttcatgatgctgctggcccccatcatccacggcggcaagcacagcgagcggcacccagccctggccgcccccctgcggcatgctgagaggagccctgggggcgccctgcccccaagacacctgctgcagcagcctgctgctgagaggacagctgcccaccggggccagggccccaggggggccacccggggcgtgcggggccctggggcccagggcgcccagattgctgcccaggccttcagccgggcccccatccccatggctgtggtgagaagagagctgagctgtgagagctaccccatcgagctgcgctgccccggcacagatgtgatcatgattgaaagtgccaactacggccgcacagatgacaagatctgtgacagcgaccctgcccagatggagaacatccgctgctacctgcctgatgcctacaagatcatgagccagcgctgcaacaacagaacccagtgtgctgtggtggccggcccagatgtgtttcctgacccctgccccggcacctacaagtacctggaggtgcagtatgaatgtgtgccctacaaggtggagcagaaggtgttcctgtgccccggcctgctgaagggcgtgtaccagagcgagcacctgtttgaaagtgaccaccagagcggggcctggtgcaaggaccccctgcaggccagtgacaagatctactacatgccctggaccccctacagaacagacaccctgacagagtacagcagcaaggatgacttcatcgccggccggcccaccaccacctacaagctgccccaccgggtggatggcactggatttgtggtgtatgatggagccctcttcttcaacaaggagaggaccaggaacatcgtgaagtttgacctgcggacccgcatcaagtctggagaggccatcatcgccaatgccaactaccatgacaccagcccctaccgctggggcggcaagagtgacatcgacctggccgtggatgaaaatggcctgtgggtgatctatgccacagagcagaacaacgggaagatcgtcatcagccagctgaacccctacaccctgagaattgagggcacctgggacacagcctatgacaagaggtctgccagcaatgccttcatgatctgtggcatcctgtatgtggtgaagtctgtgtatgaagatgatgacaatgaggccactggaaacaagattgactacatctacaacacagaccagagcaaggacagcctggtggatgtgcccttccccaacagctaccagtacatcgctgctgtggactacaacccccgggacaacctgctgtatgtgtggaacaactaccacgtggtgaagtacagcctggactttggccccctggacagccgcagcggccaggcccaccacggccaggtgtcctacatcagcccccccatccacctggacagcgagctggagcggcccagcgtgaaggacatcagcaccaccggccccctgggcatgggcagcaccaccaccagcaccaccctgcggaccaccaccctgagccctggccgcagcaccacccccagcgtgtctggaagaagaaacagaagcaccagcacccccagccctgctgtggaggtgctggatgacatgaccacccacctgcccagcgccagcagccagatcccagccctggaggagagctgtgaggccgtggaggcccgggagatcatgtggttcaagacccggcagggccagatcgccaagcagccctgcccagctggcaccatcggcgtgtccacctacctgtgcctggccccagatggcatctgggacccccagggccctgacctgagcaactgcagcagcccctgggtgaaccacatcacccagaagctgaagagcggggagacagctgccaacatcgcccgggagctggccgagcagaccaggaaccacctgaatgctggggacatcacctacagcgtgcgggccatggaccagctggtgggcctgctggatgtgcagctgaggaacctgaccccaggcggcaaggacagcgctgcccggagcctgaacaagctgcagaagcgggagaggagctgccgggcctacgtgcaggccatggtggagaccgtgaacaacctgctgcagccccaggccctgaatgcctggagggacctgaccaccagtgaccagctgcgggccgccaccatgctgctgcacacagtggaggagagcgcctttgtgctggccgacaacctgctgaagacagacatcgtgcgggagaacacagacaacatcaagctggaggtggcccggctgagcacagagggcaacctggaggacctgaagtttcctgagaacatgggccacggcagcaccatccagctgagcgccaacaccctgaagcagaatggaagaaatggagagatccgggtggcctttgtgctgtacaacaacctgggcccctacctgagcacagaaaatgcctccatgaagctgggcacagaggccctgagcaccaaccacagcgtcatcgtgaacagccctgtgatcacagctgccatcaacaaggagttcagcaacaaggtgtacctggccgaccctgtggtgttcaccgtgaagcacatcaagcagagcgaggagaacttcaaccccaactgcagcttctggagctacagcaagaggaccatgacaggctactggagcacccagggctgccgcctgctgaccaccaacaagacccacaccacctgcagctgcaaccacctgaccaactttgctgtgctgatggcccacgtggaggtgaagcacagtgatgctgtgcatgacctgctgctggatgtgatcacctgggtgggcatcctgctgagcctggtgtgcctgctgatctgcatcttcaccttctgcttcttccggggcctgcagagcgacaggaacaccatccacaagaacctgtgcatcagcctgtttgtggccgagctgctcttcctgattggcatcaacagaacagaccagcccatcgcctgtgctgtgtttgctgccctgctgcacttcttcttcctggccgccttcacctggatgttcctggagggcgtgcagctgtacatcatgctggtggaggtgtttgaaagtgagcacagcaggaggaagtacttctacctggtgggctacggcatgcctgccctgattgtggccgtgtctgctgctgtggactaccgctcctatggaacagacaaggtgtgctggctgcggctggacacctacttcatctggagcttcatcggccctgccaccctcatcatcatgctgaatgtcatcttcctgggcatcgccctgtacaagatgttccaccacacagccatcctgaagccagagagcggctgcctggacaacatcaactatgaggacaaccggcccttcatcaagtcctgggtgattggagccatcgccctgctgtgcctgctgggcctgacctgggccttcggcctgatgtacatcaatgaaagcaccgtcatcatggcctacctgttcaccatcttcaacagcctgcagggcatgttcatcttcatcttccactgtgtgctgcagaagaaggtgaggaaggagtatggcaagtgcctgcggacccactgctgcagcggcaagagcacagagagcagcatcggcagcggcaagaccagcggcagcaggaccccaggccgctacagcacaggcagccagagccgcatccggaggatgtggaatgacacagtgaggaagcagagcgagagcagcttcatcaccggggacatcaacagcagcgccagcctgaaccgggagccctaccgggagacctccatgggcgtgaagctgaacatcgcctaccagattggagccagcgagcagtgccagggctacaagtgccacggctacagcaccacagagtggtag

SEQ ID NO: 326013 - DNA, 3900 bp, Artificial Sequence
  derived and/or modified sequence
atgtggcccagccagctgctgatcttcatgatgctgctggcccccatcatccacggcggcaagcacagcgagcggcacccagccctggccgcccccctgcggcatgctgagaggagccctgggggcgccctgcccccaagacacctgctgcagcagcctgctgctgagaggacagctgcccaccggggccagggccccaggggggccacccggggcgtgcggggccctggggcccagggcgcccagattgctgcccaggccttcagccgggcccccatccccatggctgtggtgagaagagagctgagctgtgagagctaccccatcgagctgcgctgccccggcacagatgtgatcatgattgaaagtgccaactacggccgcacagatgacaagatctgtgacagcgaccctgcccagatggagaacatccgctgctacctgcctgatgcctacaagatcatgagccagcgctgcaacaacagaacccagtgtgctgtggtggccggcccagatgtgtttcctgacccctgccccggcacctacaagtacctggaggtgcagtatgaatgtgtgccctacaaggtggagcagaaggtgttcctgtgccccggcctgctgaagggcgtgtaccagagcgagcacctgtttgaaagtgaccaccagagcggggcctggtgcaaggaccccctgcaggccagtgacaagatctactacatgccctggaccccctacagaacagacaccctgacagagtacagcagcaaggatgacttcatcgccggccggcccaccaccacctacaagctgccccaccgggtggatggcactggatttgtggtgtatgatggagccctcttcttcaacaaggagaggaccaggaacatcgtgaagtttgacctgcggacccgcatcaagtctggagaggccatcatcgccaatgccaactaccatgacaccagcccctaccgctggggcggcaagagtgacatcgacctggccgtggatgaaaatggcctgtgggtgatctatgccacagagcagaacaacgggaagatcgtcatcagccagctgaacccctacaccctgagaattgagggcacctgggacacagcctatgacaagaggtctgccagcaatgccttcatgatctgtggcatcctgtatgtggtgaagtctgtgtatgaagatgatgacaatgaggccactggaaacaagattgactacatctacaacacagaccagagcaaggacagcctggtggatgtgcccttccccaacagctaccagtacatcgctgctgtggactacaacccccgggacaacctgctgtatgtgtggaacaactaccacgtggtgaagtacagcctggactttggccccctggacagccgcagcggccaggcccaccacggccaggtgtcctacatcagcccccccatccacctggacagcgagctggagcggcccagcgtgaaggacatcagcaccaccggccccctgggcatgggcagcaccaccaccagcaccaccctgcggaccaccaccctgagccctggccgcagcaccacccccagcgtgtctggaagaagaaacagaagcaccagcacccccagccctgctgtggaggtgctggatgacatgaccacccacctgcccagcgccagcagccagatcccagccctggaggagagctgtgaggccgtggaggcccgggagatcatgtggttcaagacccggcagggccagatcgccaagcagccctgcccagctggcaccatcggcgtgtccacctacctgtgcctggccccagatggcatctgggacccccagggccctgacctgagcaactgcagcagcccctgggtgaaccacatcacccagaagctgaagagcggggagacagctgccaacatcgcccgggagctggccgagcagaccaggaaccacctgaatgctggggacatcacctacagcgtgcgggccatggaccagctggtgggcctgctggatgtgcagctgaggaacctgaccccaggcggcaaggacagcgctgcccggagcctgaacaagctgcagaagcgggagaggagctgccgggcctacgtgcaggccatggtggagaccgtgaacaacctgctgcagccccaggccctgaatgcctggagggacctgaccaccagtgaccagctgcgggccgccaccatgctgctgcacacagtggaggagagcgcctttgtgctggccgacaacctgctgaagacagacatcgtgcgggagaacacagacaacatcaagctggaggtggcccggctgagcacagagggcaacctggaggacctgaagtttcctgagaacatgggccacggcagcaccatccagctgagcgccaacaccctgaagcagaatggaagaaatggagagatccgggtggcctttgtgctgtacaacaacctgggcccctacctgagcacagaaaatgcctccatgaagctgggcacagaggccctgagcaccaaccacagcgtcatcgtgaacagccctgtgatcacagctgccatcaacaaggagttcagcaacaaggtgtacctggccgaccctgtggtgttcaccgtgaagcacatcaagcagagcgaggagaacttcaaccccaactgcagcttctggagctacagcaagaggaccatgacaggctactggagcacccagggctgccgcctgctgaccaccaacaagacccacaccacctgcagctgcaaccacctgaccaactttgctgtgctgatggcccacgtggaggtgaagcacagtgatgctgtgcatgacctgctgctggatgtgatcacctgggtgggcatcctgctgagcctggtgtgcctgctgatctgcatcttcaccttctgcttcttccggggcctgcagagcgacaggaacaccatccacaagaacctgtgcatcagcctgtttgtggccgagctgctcttcctgattggcatcaacagaacagaccagcccatcgcctgtgctgtgtttgctgccctgctgcacttcttcttcctggccgccttcacctggatgttcctggagggcgtgcagctgtacatcatgctggtggaggtgtttgaaagtgagcacagcaggaggaagtacttctacctggtgggctacggcatgcctgccctgattgtggccgtgtctgctgctgtggactaccgctcctatggaacagacaaggtgtgctggctgcggctggacacctacttcatctggagcttcatcggccctgccaccctcatcatcatgctgaatgtcatcttcctgggcatcgccctgtacaagatgttccaccacacagccatcctgaagccagagagcggctgcctggacaacatcaagtcctgggtgattggagccatcgccctgctgtgcctgctgggcctgacctgggccttcggcctgatgtacatcaatgaaagcaccgtcatcatggcctacctgttcaccatcttcaacagcctgcagggcatgttcatcttcatcttccactgtgtgctgcagaagaaggtgaggaaggagtatggcaagtgcctgcggacccactgctgcagcggcaagagcacagagagcagcatcggcagcggcaagaccagcggcagcaggaccccaggccgctacagcacaggcagccagagccgcatccggaggatgtggaatgacacagtgaggaagcagagcgagagcagcttcatcactggagacatcaacagcagcgccagcctgaaccgggagccctaccgggagacctccatgggcgtgaagctgaacatcgcctaccagatcggggccagcgagcagtgccagggctacaagtgccacggctacagcaccacagagtggtag

SEQ ID NO: 326014 - DNA, 3723 bp, Artificial Sequence
  derived and/or modified sequence
atgtggcccagccagctgctgatcttcatgatgctgctggcccccatcatccacgccttcagccgggcccccatccccatggctgtggtgagaagagagctgagctgtgagagctaccccatcgagctgcgctgccccggcacagatgtgatcatgattgaaagtgccaactacggccgcacagatgacaagatctgtgacagcgaccctgcccagatggagaacatccgctgctacctgcctgatgcctacaagatcatgagccagcgctgcaacaacagaacccagtgtgctgtggtggccggcccagatgtgtttcctgacccctgccccggcacctacaagtacctggaggtgcagtatgaatgtgtgccctacaaggtggagcagaaggtgttcctgtgccccggcctgctgaagggcgtgtaccagagcgagcacctgtttgaaagtgaccaccagagcggggcctggtgcaaggaccccctgcaggccagtgacaagatctactacatgccctggaccccctacagaacagacaccctgacagagtacagcagcaaggatgacttcatcgccggccggcccaccaccacctacaagctgccccaccgggtggatggcactggatttgtggtgtatgatggagccctcttcttcaacaaggagaggaccaggaacatcgtgaagtttgacctgcggacccgcatcaagtctggagaggccatcatcgccaatgccaactaccatgacaccagcccctaccgctggggcggcaagagtgacatcgacctggccgtggatgaaaatggcctgtgggtgatctatgccacagagcagaacaacgggaagatcgtcatcagccagctgaacccctacaccctgagaattgagggcacctgggacacagcctatgacaagaggtctgccagcaatgccttcatgatctgtggcatcctgtatgtggtgaagtctgtgtatgaagatgatgacaatgaggccactggaaacaagattgactacatctacaacacagaccagagcaaggacagcctggtggatgtgcccttccccaacagctaccagtacatcgctgctgtggactacaacccccgggacaacctgctgtatgtgtggaacaactaccacgtggtgaagtacagcctggactttggccccctggacagccgcagcggccaggcccaccacggccaggtgtcctacatcagcccccccatccacctggacagcgagctggagcggcccagcgtgaaggacatcagcaccaccggccccctgggcatgggcagcaccaccaccagcaccaccctgcggaccaccaccctgagccctggccgcagcaccacccccagcgtgtctggaagaagaaacagaagcaccagcacccccagccctgctgtggaggtgctggatgacatgaccacccacctgcccagcgccagcagccagatcccagccctggaggagagctgtgaggccgtggaggcccgggagatcatgtggttcaagacccggcagggccagatcgccaagcagccctgcccagctggcaccatcggcgtgtccacctacctgtgcctggccccagatggcatctgggacccccagggccctgacctgagcaactgcagcagcccctgggtgaaccacatcacccagaagctgaagagcggggagacagctgccaacatcgcccgggagctggccgagcagaccaggaaccacctgaatgctggggacatcacctacagcgtgcgggccatggaccagctggtgggcctgctggatgtgcagctgaggaacctgaccccaggcggcaaggacagcgctgcccggagcctgaacaagctgcagaagcgggagaggagctgccgggcctacgtgcaggccatggtggagaccgtgaacaacctgctgcagccccaggccctgaatgcctggagggacctgaccaccagtgaccagctgcgggccgccaccatgctgctgcacacagtggaggagagcgcctttgtgctggccgacaacctgctgaagacagacatcgtgcgggagaacacagacaacatcaagctggaggtggcccggctgagcacagagggcaacctggaggacctgaagtttcctgagaacatgggccacggcagcaccatccagctgagcgccaacaccctgaagcagaatggaagaaatggagagatccgggtggcctttgtgctgtacaacaacctgggcccctacctgagcacagaaaatgcctccatgaagctgggcacagaggccctgagcaccaaccacagcgtcatcgtgaacagccctgtgatcacagctgccatcaacaaggagttcagcaacaaggtgtacctggccgaccctgtggtgttcaccgtgaagcacatcaagcagagcgaggagaacttcaaccccaactgcagcttctggagctacagcaagaggaccatgacaggctactggagcacccagggctgccgcctgctgaccaccaacaagacccacaccacctgcagctgcaaccacctgaccaactttgctgtgctgatggcccacgtggaggtgaagcacagtgatgctgtgcatgacctgctgctggatgtgatcacctgggtgggcatcctgctgagcctggtgtgcctgctgatctgcatcttcaccttctgcttcttccggggcctgcagagcgacaggaacaccatccacaagaacctgtgcatcagcctgtttgtggccgagctgctcttcctgattggcatcaacagaacagaccagcccatcgcctgtgctgtgtttgctgccctgctgcacttcttcttcctggccgccttcacctggatgttcctggagggcgtgcagctgtacatcatgctggtggaggtgtttgaaagtgagcacagcaggaggaagtacttctacctggtgggctacggcatgcctgccctgattgtggccgtgtctgctgctgtggactaccgctcctatggaacagacaaggtgtgctggctgcggctggacacctacttcatctggagcttcatcggccctgccaccctcatcatcatgctgaatgtcatcttcctgggcatcgccctgtacaagatgttccaccacacagccatcctgaagccagagagcggctgcctggacaacatcaactatgaggacaaccggcccttcatcaagtcctgggtgattggagccatcgccctgctgtgcctgctgggcctgacctgggccttcggcctgatgtacatcaatgaaagcaccgtcatcatggcctacctgttcaccatcttcaacagcctgcagggcatgttcatcttcatcttccactgtgtgctgcagaagaaggtgaggaaggagtatggcaagtgcctgcggacccactgctgcagcggcaagagcacagagagcagcatcggcagcggcaagaccagcggcagcaggaccccaggccgctacagcacaggcagccagagccgcatccggaggatgtggaatgacacagtgaggaagcagagcgagagcagcttcatcaccggggacatcaacagcagcgccagcctgaaccgggagccctaccgggagacctccatgggcgtgaagctgaacatcgcctaccagattggagccagcgagcagtgccagggctacaagtgccacggctacagcaccacagagtggtag

SEQ ID NO: 326015 - DNA, 3723 bp, Artificial Sequence
  derived and/or modified sequence
atgtggcccagccagctgctgatcttcatgatgctgctggcccccatcattcatgctttcagccgtgcaccaattccaatggcggtggtgcgacgggagctgagctgcgagagttaccccatcgagttgcggtgtcccgggaccgacgttattatgatcgaatcagcaaattatggaaggactgacgacaaaatttgcgactcagaccccgcccagatggaaaacatccgatgttatctcccagatgcctacaaaattatgagccagcggtgtaataacaggacgcagtgtgcagtggttgccggccctgacgtgtttcctgatccatgtcccggtacgtacaagtatctggaagtgcagtatgagtgcgttccttatagggtggaccaaaaggttttcctgtgccccgggctgctcaaaggtgtgtaccaaagcgagcatctgttcgagagcgaccaccagtctggcgcctggtgtaaggaccctctccaggcctccgacaagatttattatatgccttggaccccatacaggacggataccctcaccgaatacagctctaaggatgatttcattgctggccgacccacaactacatataaactgccacacagggtggatggtacaggctttgttgtatacgatggagctttgttcttcaacaaggagaggactagaaacatcgtgaaatttgatttacggactagaatcaagagcggcgaggcgattatagccaacgccaattatcatgacaccagcccctatcgctggggcgggaagtctgacattgacctggccgtggacgaaaacggcctgtgggtaatctacgctaccgaacagaataacggaaaaattgtcatcagtcagctcaatccttacaccctgcgaatcgaggggacttgggacaccgcctatgataagagatccgccagcaacgcctttatgatctgcggcatcctgtacgtcgtaaagtctgtctatgaggacgacgataacgaagccacaggtaataaaatcgactacatatacaacacagaccagtcaaaagactctctggtggacgtgccctttccgaacagttatcagtatattgccgccgtagactacaatcctagagataatttgctgtacgtctggaataattatcacgtggtgaaatactcccttgactttgggcctctcgatagcagatcgggccaggcccaccacggacaggtctcgtatatttcccctcctattcatttagactcagagctcgagaggcctagcgtgaaagacatttcaacaactggacccttggggatgggatcaacaacgacatctactaccctgcgaaccacaactctatcgcctggaagatctactactccgtccgtcagtggtagaagaaatcgctctacaagcaccccatctccagccgtggaagtgctggatgacatgacgacgcatttaccctcagctagctcccagatccctgcacttgaggaatcttgcgaagccgtggaggcacgagaaataatgtggtttaagacccgccaaggccagattgctaagcagccatgccccgctgggacaattggagtatcaacttatctgtgtctcgccccggacggcatctgggaccctcaggggcccgacctgtctaactgtagttccccttgggtgaaccatatcacacagaagctcaaatccggagaaacagccgccaatatcgccagggagttagccgagcagacccgtaaccatctgaatgctggagacatcacgtactcagtgcgggcaatggatcagctcgtcgggcttcttgatgtgcagttacgtaaccttacgccagggggcaaggattccgccgcgaggtcattgaacaaacttcagaagcgcgaacgtagttgtagagcatatgtgcaagcaatggtagaaactgtgaacaacttgctgcagccccaggccctgaatgcgtggcgcgatctgaccacaagcgaccaattgcgggccgccacgatgctgctgcacaccgtcgaggagtcagcctttgtcctggcagacaacctgctaaagactgatatcgtgagggagaacacggataacattaaattggaggtcgcgcggctgagcactgagggcaatctggaggacctgaagtttccagagaatatgggacatggatctaccattcagctcagcgctaataccctgaaacagaacgggagaaatggagaaatccgcgtggccttcgtgctgtataataacctgggcccatacttgagcaccgaaaacgcttctatgaaactgggcacagaggcattatcaaccaaccatagcgtgattgttaactcccccgttattactgctgctataaacaaagaattcagcaataaagtttatctcgccgatccggtggtcttcaccgtgaaacatatcaagcagtcggaggagaactttaaccctaactgcagcttttggtcatacagcaaacgcactatgaccggatactggagcacgcagggttgtaggctcctgacaacaaataaaacacacaccacctgctcatgcaatcaccttacaaacttcgcagtgctgatggcacatgtggaggtgaagcacagcgatgcggtgcacgatctgctgctggatgtgatcacatgggtcggcatactgctctccctagtgtgccttttgatctgcatctttaccttctgtttcttccgcgggctgcagtccgatcgcaatactattcacaagaatctctgcatcagtctgttcgtggccgagcttctgttcttgataggcattaatcgcaccgaccagcccatagcctgcgctgtttttgccgctctcttacattttttcttcctggcagcctttacttggatgttcttggagggcgtgcagctctatattatgctcgtcgaggtcttcgagtcagaacacagccgacgcaagtacttctacctggtggggtacggtatgcccgcactaattgttgccgtttccgccgccgtcgattacagatcttacgggacagacaaagtctgctggctgaggctcgacacctacttcatctggtccttcatcggacccgctaccttgataatcatgctcaacgtaatttttttggggatcgctctctacaaaatgttccatcatacagccattctgaagcccgaaagcggctgtctcgacaatattaactatgaggataatagaccatttatcaagtcatgggtaattggggcaatcgccctactttgtctgcttggcctaacttgggcttttggtttgatgtacataaatgaaagcacggtgattatggcttacctcttcacgatcttcaattctcttcaagggatgtttattttcatttttcactgcgttcttcagaaaaaagtgcggaaagagtatggcaagtgtctgagaacacactgctgctccggcaaatccacagaatcctcgattggcagtggtaaaacctccggttcccgtactccagggagatattcaacaggaagccagagtcgtattagacgaatgtggaatgatacagtgaggaaacagtctgaatctagcttcatcactggcgatataaacagcagcgccagcctcaatagagagccctatcgagagactagcatgggtgtgaagcttaatatagcctaccagatcggagcatccgagcagtgccaagggtataaatgtcacggctactctactaccgaatggtag

SEQ ID NO: 326016 - DNA, 3696 bp, Artificial Sequence
  derived and/or modified sequence
atgtggcccagccagctgctgatcttcatgatgctgctggcccccataattcacgccttctctagggcacccatacctatggccgtcgtgaggcgagagctaagttgcgaatcgtatccaattgagctgcgttgtcctggcactgacgtgattatgatcgagtcggcgaactacgggagaacagacgacaaaatttgcgacagcgatcctgcccagatggagaatattcgttgctatctcccagatgcctataaaattatgtcacagagatgtaacaatcgtacccagtgtgccgtggtggccggccctgacgtgttccccgacccctgcccaggtacatacaaatacctggaggtgcagtacgagtgcgtgccatacaaggtggagcagaaggtgttcctgtgccccggcctgcttaagggcgtgtaccaatcagagcacctgtttgaaagtgatcaccagagcggcgcgtggtgcaaagacccgctccaggcctccgacaagatatactatatgccttggaccccatataggactgataccttgactgaatattcaagcaaagatgatttcatagccggccggcctacaaccacctacaagcttccgcaccgagtggacggtactggctttgtggtttacgacggcgcactttttttcaataaagagagaacgagaaatatagtcaaattcgatctgcggactcggataaagagtggcgaggctattattgcgaatgctaactatcacgacacaagcccgtatcggtggggtggcaaaagtgacatcgaccttgcggtcgacgagaatgggctgtgggtgatttacgcaactgaacagaataacggtaagatcgtgatctcccaactcaatccatacaccctgcggattgaaggcacttgggacaccgcctacgacaagcggagcgcgtctaacgcctttatgatctgcggcattctttacgttgtgaaaagcgtttatgaggatgatgataatgaagcgacaggcaacaagatcgactatatctacaataccgaccagagcaaggactctttggttgacgtgccatttcctaattcataccagtacatcgccgctgtggactacaacccccgggataatttgctttacgtatggaacaactaccacgtagtgaaatatagtctggactttggcccactggatagtcgttcaggtcaagcacatcacggtcaagtaagctacataagcccccctatccacctcgacagtgaacttgaacggccctctgttaaagacatcagcactaccggccccttggggatgggttccactaccaccagcactaccctacggacgaccacgctttcacctggaagatcgacgacgccctccgtgagcggccgccgtaaccggtccacttccaccccctcaccggcagtcgaagtgctggacgatatgacaacccatctacctagtgcctcttcccaaattcccgcactggaagagtcctgcgaagccgtggaagctcgggagatcatgtggttcaagacccgccaggggcagatcgctaagcaaccttgcccagcaggcaccattggcgtcagcacctatctctgcctagctcctgacggaatctgggaccctcaggggcctgacctctcaaattgttctagtccctgggtgaaccacatcacacaaaaactcaaatctggagagaccgccgcaaacatagcaagagaactggcggaacagacacgtaatcatttaaacgcgggcgacattacttatagcgttcgcgctatggaccagctagttggattgctggatgtgcagctgcgaaacctcacccccggaggaaaggattcagcggcacgatcgctgaataagctgcaaaaaagggaacgatcctgcagagcctatgtgcaggcgatggtggagacagtcaataacctgttgcagccacaggccctgaatgcgtggcgggacttgaccacatctgatcaattgagggctgcaacgatgttgctacatactgtggaagaatctgcctttgtgctggctgacaacctgctgaagactgacattgtgagagagaatacagataacattaagctggaagtcgccagactgtccaccgagggaaacctggaagacctgaagttccctgaaaatatgggacacggttccacaattcagctttccgccaataccctgaaacagaacggaagaaatggagagatcagggtggcatttgtgttgtacaacaacctcgggccctacctcagtacagaaaacgcaagcatgaaactcggtaccgaagccctcagcactaatcacagtgtgatcgttaattctccagtgatcacggcggccattaataaggaatttagtaataaggtctatctggctgaccctgtggtcttcactgttaagcacattaagcagtctgaggaaaacttcaaccccaattgttccttttggtcctatagcaagcgtactatgactggatactggtctactcaggggtgccggctgttgaccaccaataaaacacacactacttgctcatgcaatcacctgaccaacttcgccgtgttgatggcccacgttgaagttaaacactccgacgcagttcatgatctgctgcttgatgtgataacgtgggtcggcatcctcttgagtttggtctgcctcctgatctgcatcttcactttctgcttctttcgcggtttacagtctgatagaaacaccatccataaaaacctgtgtattagtcttttcgtggctgaactactttttctgatcggcattaatcgcacagaccagcccattgcttgtgccgtgtttgcggccctgctacactttttcttcctcgccgcattcacctggatgttcttggaaggcgtgcaattatacattatgctagtagaagtgttcgaatcagaacactctcgcaggaaatacttctatctggtcggatatggcatgccagcgctgatcgtggccgtatccgccgctgttgattataggagttacgggacagataaggtatgttggctgcgattagatacctacttcatttggtcttttatcggtccggcgaccctaatcattatgctcaatgtgatattcctgggaatcgctctgtacaagatgtttcaccatacagcaatcctgaagcctgagtcaggctgtctcgacaatattaagtcctgggttattggggcaatcgcgctcctgtgcctgcttggcctgacctgggccttcgggctcatgtatattaatgagtctactgtgattatggcatatctgtttaccatatttaactcactccagggcatgtttatcttcatattccactgcgtgttgcagaaaaaggtgcgtaaggagtacggaaagtgcctccgaactcactgttgcagcgggaagagcacagagtcctcaatcgggagtgggaaaacctctggatcccgcacaccaggccgctactctacaggctctcagtctcgcataagacgcatgtggaatgatacagtccgcaagcagagcgagagctctttcatcacaggcgacattaatagctccgccagcctcaatagagaaccctaccgagagacttccatgggcgtcaagttgaatatcgcctaccagatcggtgcctccgaacagtgccagggatacaaatgccacggttactccactacagagtggtag

SEQ ID NO: 326017 - DNA, 3927 bp, Artificial Sequence
  derived and/or modified sequence
atgtggcccagccagctgctgatcttcatgatgctgctggcccccattatccatgggggcaaacacagtgagcggcaccccgctctggccgccccacttcggcatgccgaaaggagtcctggcggcgcacttccgccaaggcatttgctgcagcagcctgccgccgagcgcacagctgctcacagaggacagggacctagaggagccacccggggagttcgcggaccaggcgcccagggtgctcagattgcagcccaggctttttctcgcgcaccaatccctatggccgttgtccgcagagagttatcatgtgaatcttatccgatcgaactgcgctgtcctggaaccgatgttattatgattgaatcagcaaattatgggcgcactgacgacaagatatgtgactcagaccctgcgcagatggaaaacatccgctgttatctgcccgatgcctataagatcatgagccaaaggtgtaataataggacacagtgcgccgtcgtcgctggcccggatgtgttccccgatccatgtcctggtacttacaagtatctggaagtgcaatatgaatgtgtgccttacaaggtcgaacagaaggtcttcttatgcccgggcctcctaaagggcgtataccagagtgagcacctcttcgaatccgatcatcagtctggcgcatggtgcaaagatccactgcaagcctcggacaagatctactatatgccatggaccccatatagaaccgatacgctgactgaatactcaagcaaggacgatttcatcgcggggagacctactacaacttataaactgccacatagggtggatgggactgggttcgtagtgtatgatggcgcactgttctttaataaggagagaacaaggaacatagtaaaatttgacctcaggacaagaatcaagtcaggagaagcaatcatcgcgaatgccaactaccatgatacttccccctaccgctggggaggcaaaagtgacatcgacctcgccgtggacgagaacggcctttgggtgatttacgctactgagcagaataacggcaagattgtgatttctcaacttaatccgtatacccttcgcatagaggggacatgggatactgcatacgacaaacgcagtgcctctaatgcattcatgatctgtggaatattgtatgtcgtcaaatccgtgtacgaggacgatgacaatgaggccaccggcaataaaatagactacatctacaacacagaccaaagcaaggatagcctcgtggacgttcccttccctaatagctaccagtacattgcggccgttgattataatccccgggacaatctgctctacgtatggaacaactaccacgttgtcaagtattctctcgacttcggacccctggactctagatcagggcaagcacaccacggtcaggtaagctatatatccccaccaattcatctcgattccgagctcgagcgaccatcggtaaaggacattagcacgaccggcccgctgggtatgggaagcaccactacgtccacaactcttcgaacaaccacactgagcccaggtcggtcgacgactccatcggtgtcagggcgtcgcaacaggagcacatctacgcctagcccggccgtcgaggtcctggacgatatgacgactcacttgccctctgcatcatcccagattccagccctggaagaatcctgtgaggcggttgaggctagagagatcatgtggttcaaaacccgccaagggcagattgcaaaacagccatgtcctgcagggacgattggtgtttctacatatttatgtctggccccggacggcatctgggacccccaaggccccgatctgtcgaattgttcgagtccctgggtcaatcacatcacccagaagctcaaatctggagagacagccgccaacatagctcgtgagctcgcagagcaaacacgcaaccaccttaatgccggagacatcacctattctgtgcgggccatggatcagctcgtcggactactcgacgtccagttaagaaaccttacccccggcggcaaggatagcgccgctcgttctctgaacaagttacagaagcgggagagaagttgccgcgcttatgtgcaggccatggtagagaccgtcaataacctgctgcagccccaggcccttaatgcctggagggatctgacgacctctgatcagctgcgcgctgcaacaatgctcttacacaccgtggaggaatctgcgtttgtactggccgacaacctactgaagacagatatcgttagggagaacacggacaatatcaagctggaggtggcaaggctctcaaccgaggggaacctggaagatcttaaattccccgaaaatatgggccacggctcaacaatacagctgtctgccaacacactaaagcaaaatggtaggaatggcgagattcgagtggctttcgtgctctacaacaacctgggcccctacctgtctacggagaatgccagtatgaagttgggaacggaagcattgtccacaaaccacagcgtgatcgtaaattcccccgtgatcaccgcagccatcaacaaggagttctccaataaggtgtatctcgccgatccagttgtattcactgtcaagcacatcaagcaaagtgaggagaactttaatccaaactgttcattttggagctactccaaacgtactatgactggctactggtccactcagggttgtaggctgctgaccacaaacaagacacataccacttgctcttgtaatcatcttactaattttgcagtgctgatggcacacgtcgaagtgaagcattcagacgctgtgcatgatctgctcctggacgtgattacttgggttggaatcttgctctccttggtgtgcctgctaatatgcattttcacgttttgttttttcagaggactgcaatccgatcgaaacactattcacaagaatctctgcatttcactcttcgtggccgagctgctctttttaatcggaataaatcggacagaccagcctattgcatgcgctgtgttcgccgcgctcctgcattttttttttctcgccgccttcacttggatgttcctggagggagtgcagctttatattatgctggttgaagtgttcgagtctgagcactctaggagaaagtacttttatctcgtcggctatggcatgcccgctctgatcgttgctgtgagtgcggctgtagactaccggagctacggtaccgacaaggtgtgctggctccgactggacacctattttatttggagcttcatcggacctgccaccttgattataatgctgaacgttatctttcttggtattgcgctttacaaaatgtttcaccacacagcaatcctgaaacctgaatccgggtgcctggacaacataaactacgaggataacaggcctttcattaagagttgggtcataggcgctatagctttgctgtgtttactgggtctcacttgggcatttggcttaatgtatattaacgagtcgacagtcatcatggcgtacctgtttacgattttcaatagcctgcaagggatgttcattttcatcttccactgcgtgctgcagaaaaaagtcagaaaggagtacggtaagtgtttaagaacacactgctgcagcgggaagtctaccgagtcatctatcggatcaggtaagacaagcggctcccggactcccgggcgatactctacaggaagccagtctcgaatccggaggatgtggaatgatactgtgcggaagcagagtgaatccagctttatcactggcgatattaactcgagcgcctctctgaatcgagagccctacagggagacttctatgggggttaaactaaatatcgcttatcagatcggagcatctgaacaatgccaagggtacaaatgtcacggatattccactacagagtggtag

SEQ ID NO: 326018 - DNA, 3900 bp, Artificial Sequence
  derived and/or modified sequence
atgtggcccagccagctgctgatcttcatgatgctgctggcccccattatccatgggggaaaacattccgagcgacatccagccctagctgcccctctgagacacgctgagcgttcccccgggggtgcgttgcctcctcgacacctgctccagcagccagctgccgagcgaaccgccgcccaccggggtcagggcccccggggcgctactcgcggcgtgaggggccccggagcccagggagcacagatagcagcgcaagcattttcacgagccccgatccccatggcggttgtcaggagggagttgagttgcgaaagctacccaattgaactgcggtgcccgggaacagatgttattatgatcgaatccgccaactacggccggacagatgacaagatctgtgactccgaccccgcacagatggagaacatccggtgctatctgccagatgcctacaagataatgagtcagagatgcaataaccggacccagtgtgccgtggtcgccgggcccgatgtctttccggacccctgtccaggaacctacaagtatcttgaggtccaatacgagtgtgtgccgtacaaggtggagcagaaggtcttcctgtgccccggcctgttaaaaggcgtgtatcagagcgagcatctgtttgagtccgatcaccaaagtggggcatggtgtaaagacccacttcaagcatccgacaagatctattacatgccatggaccccctatcgcactgacaccctaaccgagtacagttctaaggatgatttcatcgccggaaggcccaccaccacatataaattgccccatagagtagacggcactggatttgtggtgtacgatggggccttatttttcaataaagagcgaacccgtaacatcgtaaagttcgatcttcgaactaggatcaagtctggggaagccatcatcgccaatgcaaattatcacgatacatccccttacaggtggggcggtaaaagcgacatcgacctggcagttgatgagaatggactctgggttatttacgccacggagcaaaataatggaaagattgtgatctcacagctgaacccatacacgctgcgtatcgagggcacatgggacaccgcttacgacaagcggtccgcttctaatgcttttatgatctgcgggatattgtatgtcgtcaaaagtgtctatgaggacgatgacaacgaggcaacaggcaataagatcgactacatttacaacacggatcaatccaaggactcactggtagatgtaccattccccaacagttatcagtacattgcggctgtcgattacaatcccagggacaacctgttgtatgtgtggaataactaccatgtagtgaagtattcactggacttcggtccgctggattcccggtccggccaggcgcatcacgggcaggtatcctatattagtccacccatccacctggactctgagcttgagagacccagcgtgaaggatatctctactaccgggcctctgggtatgggatccaccacaacgtccaccacactgcgtactaccaccttgtctcccggtcggtccactaccccttctgtatctggtaggcgcaaccgttctacgtcaaccccgagcccagccgtcgaagtcctggatgacatgacaacacatttgccatctgcaagctcgcagattcccgcgctcgaggagtcttgcgaggctgtcgaagcgagggaaattatgtggttcaaaacccgtcagggccagatcgctaagcagccatgtcccgccggtaccatcggcgtatcgacatacctctgccttgcacctgatggtatctgggaccctcagggtcctgacctgagcaactgtagttccccatgggttaatcacatcactcagaagctcaaatcaggcgagactgccgccaacatagctagagaactcgccgaacagacccgcaatcatctgaatgctggggatattacctattccgtgcgcgctatggatcagttggtcggactcctggatgtgcagctgcgcaatctgacaccgggaggaaaggattctgcagctaggagtttgaataaactacagaagcgtgagaggagctgccgtgcttatgtgcaggccatggtcgagaccgtaaacaatctgctgcagccccaggcgttaaatgcctggagagatctgacaacctccgatcagttgagagccgcgactatgctgcttcacacagtggaagaatcggccttcgttctggctgataacctcctcaaaacggacattgtcagggagaatacagataacataaagttggaggtggccaggctgtccaccgaggggaacctcgaagacctcaagtttcctgaaaatatgggccacgggtccaccatccagttgagtgcaaatacgctcaagcagaatggtcgtaatggggagatacgggtagcttttgttctgtacaataacttgggcccctacttatctacagagaacgcctccatgaagctggggacagaggccctgagtacgaaccactccgtgatcgttaacagtccagtgattacagcggccattaataaggaatttagcaacaaagtgtatcttgccgatcccgtcgtgtttacagtcaagcatatcaagcagagtgaagaaaactttaatccaaactgttcattctggtcatactccaagcggacaatgacaggatattggagcactcagggttgtaggctgctcactactaacaagactcatactacatgttcgtgtaaccacctgactaatttcgctgtgttgatggctcatgttgaagtgaagcattctgatgccgtgcatgaccttctgctggatgtgattacttgggtggggatactgctatccctggtttgtctgctgatttgtatattcacattctgtttttttaggggtctgcaatcagaccggaatacaatacacaagaatttgtgcattagcctgttcgtggctgaactcctatttctgataggcattaacagaactgatcaaccaattgcctgcgccgtattcgctgccttgttgcacttttttttcctcgctgcttttacctggatgttcctcgagggggtgcagctgtacatcatgctcgtggaggtcttcgagtccgagcatagccggagaaaatatttttacctggtgggttacggtatgccggctcttatcgtcgctgtctcggcagcggtcgattacaggtcctatggaactgacaaggtgtgttggctcagactcgatacttattttatctggtccttcattggacctgccacactcatcatcatgctgaacgtcatctttctcggcatagccttgtataaaatgtttcatcatactgccattctgaagcctgagtcaggatgtctggataatataaagtcttgggtaattggagctattgcgctcctttgtctgctgggcttgacatgggccttcgggctcatgtatatcaacgagtccaccgtcattatggcttacctctttaccatttttaactcgctgcaaggaatgttcatctttatctttcactgtgtgttgcagaagaaggtacggaaagagtacggaaagtgccttagaacccactgttgtagcggtaaatcaaccgaatcttcgatcggctcagggaagacctctggcagtagaactcctggaagatatagcactgggtctcagtccaggataagaagaatgtggaatgataccgtccgaaaacagtcggaatcgagctttattactggggacatcaattcaagtgcctcactgaatcgggaaccataccgagagaccagtatgggggttaagctaaacatcgcctatcagataggcgctagcgaacaatgccagggctacaagtgccacgggtattctacaaccgaatggtag

SEQ ID NO: 326019 - DNA, 3723 bp, Artificial Sequence
  derived and/or modified sequence
atgtggcccagccagctgctgatcttcatgatgctgctggcccccatcattcacgccttttcacgggctccaattccaatggctgtggtgcgccgcgagctctcctgtgagagttatcctatcgagctgcgctgcccggggaccgacgtgataatgattgagagtgccaattacggtaggactgatgataagatctgtgattcggacccagctcagatggagaacatccggtgttatctgcctgacgcttataagatcatgagccagcggtgtaacaaccggactcaatgcgctgttgtggcaggcccggatgtcttccctgacccctgccctggaacttacaagtatttggaggtgcaatacgagtgtgtcccttacaaggtcgaacagaaggtctttctgtgccctggtctgttaaagggtgtgtatcagtcagaacacctttttgaatctgaccaccagagtggcgcgtggtgcaaggaccctcttcaggcgtcagataagatttactacatgccatggaccccttaccgtaccgacacactgactgagtactctagtaaagatgacttcattgcgggaagacctacaacaacttataagcttcctcaccgggtggacggtactgggttcgtggtgtacgacggtgcgctgtttttcaacaaggagagaacccgaaacatagttaaatttgatctaagaacaagaataaaaagtggagaggctattattgccaacgcaaattatcacgatacatcgccttatcgttggggcgggaaaagcgatattgatttggccgtcgacgagaacggcctctgggtgatctatgccacggagcagaataacgggaaaatcgtgatctcacagctgaacccatatacactccgcatagaggggacatgggacacagcgtatgacaaaaggagcgcgtctaacgcctttatgatttgtggaatactgtatgtcgtcaagtctgtgtacgaagacgacgacaatgaggccaccggcaataagatcgattatatttacaacactgatcaatctaaggacagtctggtggatgtgccattccctaactcctaccaatatattgccgccgtagattacaatccccgggataacctgctatacgtctggaacaattaccacgtggtcaaatatagcctggattttggcccactggattctcgctcaggccaggcccatcatggccaggtgtcatatatctcaccaccgatccatcttgacagtgagttggagagaccatctgtcaaggacatctccactacaggacccctgggtatgggtagtaccaccactagcactaccttacgcacaacaactcttagcccagggcgctccacaactccttccgtgagcgggaggagaaaccgcagcacctctacgccatctcctgccgtggaggtgctggacgacatgacgacccacctcccaagcgcctcaagccaaattcctgctctcgaggaaagttgtgaagccgtggaggctcgggagatcatgtggtttaagacaagacagggacagatcgctaaacaaccgtgccccgcagggactatcggtgtgtccacctacctatgcttggcccccgatggcatatgggaccctcagggacctgacctctcgaactgtagtagcccatgggtcaatcacatcacccaaaagttgaaatcaggcgagaccgccgctaatatagcccgcgaacttgctgagcagacgagaaaccacctcaacgctggcgatattacatactctgttagagctatggatcaattagtggggttgctggacgtacagctgaggaacttgacgcccggtggcaaggattcggccgctaggagcctcaacaagctgcaaaagcgggagcggtcctgccgagcatacgtccaggctatggtcgagacggtgaacaatcttctgcagcctcaagcactcaatgcctggcgcgatctcaccacaagcgatcaactgagagccgctactatgctgttgcatacggttgaagagagcgcatttgtgctggcagataaccttctgaaaaccgacatcgtccgggagaacaccgacaatatcaagctcgaggtcgcccgattaagtaccgagggtaaccttgaagaccttaagtttcctgagaacatgggtcatggttctacgattcagctgtcagccaacacactgaagcagaacggaaggaacggcgagatcagggttgctttcgtcttgtacaacaacctggggccgtacctcagtacagagaatgcttccatgaaactgggcactgaagccctgtccaccaaccactcagttatcgtcaactcaccagttatcacagccgccattaataaggagtttagtaacaaagtctacctggcagaccccgtcgtctttacggtgaaacatatcaaacagtcagaagagaactttaatcccaactgctcattttggtcctacagtaaacggactatgacaggctactggagcactcaaggctgccggctgcttaccacaaacaaaacgcataccacatgctcttgtaatcacttaactaacttcgcagtcctgatggcccacgtggaagtgaagcattccgatgccgtgcatgatttactgctggatgtgattacatgggtgggaattcttttgtcattggtgtgcttgctcatttgtatctttacgttttgcttcttccgggggctccagtcggaccgcaatactatccacaaaaatctgtgcatctcattgtttgttgctgagctgttgttcctgatcggcattaacaggacagatcagcccattgcctgtgcagtgttcgccgccctcttgcattttttctttttggccgcgtttacctggatgttcctggaaggggtccagctgtacatcatgctcgtcgaggtttttgaaagtgagcatagccgcaggaagtatttctatttagtgggctacggcatgccagctcttattgttgctgtaagtgcagccgtcgattatcgttcatatggaacagacaaggtgtgttggctgcgtctggatacctacttcatctggtccttcataggacctgctactcttatcataatgctgaacgtgatcttcctcgggatcgcactgtataagatgttccaccacaccgccattctcaaacccgaaagtggatgcttagataatattaattacgaagataatagacctttcataaaaagctgggttattggcgctattgccctcctctgtctattaggtctgacctgggcgttcggcttgatgtatatcaacgagtctactgtgattatggcttacctattcacaatctttaactctttgcaaggaatgtttatatttatcttccactgcgtgctacagaaaaaagtgaggaaagagtacggcaaatgcttaagaacccattgttgcagtgggaagagtactgagtctagcataggatccggcaaaacgagcggcagccgaactcccggtcggtattcgacaggctctcagagcaggatccggaggatgtggaatgatactgtacgaaaacaatcagagagcagcttcatcactggagatatcaattcaagcgcaagcctaaaccgagaaccatatcgggagacaagcatgggcgtgaaattaaacatagcttaccagatcggcgcatctgaacagtgccagggctataaatgtcacgggtacagcaccactgaatggtag

SEQ ID NO: 326020 - DNA, 3723 bp, Artificial Sequence
  derived and/or modified sequence
atgtggccaagtcagctgcttatcttcatgatgctgctggccccaatcattcatgctttcagtagggcacccatcccgatggcagtagtcagacgcgaattaagttgtgagtcctatccaatcgagctgcgttgcccagggactgatgttattatgattgaaagcgccaactatggcaggacagacgacaagatctgcgactcggaccccgctcagatggaaaacatccggtgctaccttcctgatgcttacaagatcatgtctcaacgatgtaacaataggactcagtgtgccgtcgtcgctggaccggatgtgttcccagatccctgccccggaacttataaatatttggaagtacagtacgagtgtgtaccctatcgggttgaccagaaggtgtttctctgccctggtcttctgaaaggggtgtaccaatcagagcatctgtttgagagcgatcaccagagtggggcatggtgtaaagaccccctgcaggcaagtgacaaaatatactatatgccatggactccttatcggaccgatacactgaccgagtattcttccaaggatgatttcatcgcgggaaggccaaccacgacatacaaactgcctcaccgcgtcgacggaacagggttcgttgtatatgacggggcattgtttttcaataaggagcggacaagaaatatcgtaaaattcgacttacgtacaaggattaagtcaggggaggctattatcgctaatgccaattaccacgacacgagcccttatcgatggggcggaaaaagcgacatcgacctcgccgtggatgagaacggcctgtgggtgatctacgccacagagcagaacaatgggaagatcgttataagccaactcaatccttataccctcagaattgaaggaacctgggataccgcctatgataagcggtccgcatcaaacgccttcatgatctgcgggattctttatgtcgtgaaaagcgtatatgaggatgatgataacgaggccacaggaaataaaattgattacatatacaacacagaccagagcaaagactctcttgtggacgtgccttttccaaattcttaccagtacatagccgcagtcgactataaccctcgcgataatctgttgtacgtttggaacaattaccatgttgtcaaatatagtctagactttgggccactcgactcaaggagcggacaagcccatcatggtcaggtgtcctacatatccccccctattcatcttgactccgagctcgaacgccctagcgtgaaagatatttcaaccacaggacctcttggaatgggctccactacgacatccacgactctccgcactaccactctctcccctggcaggtcaaccactccatcggtctctggacggcgaaaccggtcaaccagcactcctagtcccgctgtggaggtcctggatgacatgacaacgcacttgccatccgcatccagccagatacccgcactcgaggagagttgcgaggccgtagaggctagagaaatcatgtggttcaagacacggcagggacaaatcgcaaaacagccctgtcccgctggaactattggagtgtcaacctacctgtgtctcgccccagacggcatatgggatccacagggacccgatttgtcaaattgtagcagtccttgggtgaaccacatcacccaaaaactcaagtccggcgaaacagcggctaacatcgcacgtgaattggccgaacagacccgtaatcacttgaatgctggagatattacttacagcgtgcgcgctatggatcagctcgtgggccttctggacgtccaactgcgaaacctgacaccagggggaaaagacagtgcagcacgaagtttgaataagctgcaaaagagggagaggagctgccgagcctacgtccaggcgatggtcgagacagttaacaatctgctgcaaccccaggctcttaatgcttggagagatctcaccacttccgaccagttgcgggctgccacaatgctgctgcacacagtcgaagaaagtgccttcgtactggcagataatctgctcaagactgacatcgtcagagagaacaccgataatatcaagcttgaggttgcccgtctgagcactgaagggaacctagaggacttaaagtttccggagaatatgggccacggctccactatccaactgagtgctaacactctgaaacagaatggacggaatggcgagattcgggtcgcttttgttttatacaacaacttaggaccctatctgagtaccgaaaatgccagcatgaaactcggaaccgaagccctgtccaccaatcactccgtaatcgtgaacagtcccgtgattacagctgctattaacaaagagttcagtaataaggtgtatcttgcagatcccgtggtgtttaccgtgaagcacataaagcagtccgaggaaaatttcaatccaaattgctctttctggagctacagcaaaagaactatgactggttactggagtacacagggctgtagactccttacaactaataagacacatactacgtgttcatgcaaccatcttacaaatttcgctgtgctaatggcacatgtcgaggttaaacactccgatgcagttcacgaccttttactggatgtgataacctgggtaggtattttattgagcctggtctgtctgctgatctgtatttttactttctgcttctttcggggtttgcagagcgacaggaacaccatacataagaatctctgtatttccctgtttgtggccgagcttctctttctaatcggaattaaccggaccgaccaacccatagcctgcgccgtgtttgcggcacttctccatttcttttttcttgcagccttcacgtggatgtttctggagggcgtgcagttatacattatgttagtggaagtctttgaatctgaacacagccggcgaaagtacttctacctggttggctatggcatgcctgcactcatcgtggcagtttccgcagctgtggattacaggtcatatggtacagataaggtgtgttggttacgcttagacacatattttatctggtcgttcattggacctgcgactctgattatcatgctcaacgttatcttcctaggaatcgcactctacaagatgtttcatcacaccgcaatcctcaaacctgaatctggctgcttggataacatcaactatgaggataaccggcctttcattaagagctgggttattggtgccattgcccttctgtgtctgctcggacttacttgggctttcggcctaatgtacattaacgagagcaccgtgattatggcttacctgttcactatttttaattcactgcaagggatgttcatctttattttccattgtgtgctgcagaagaaggtgagaaaggaatatgggaagtgtctgcggacccattgttgtagcggaaagagcacagagagctctataggtagtggcaaaaccagcggcagtaggacgccaggcaggtacagtacaggcagccagtctcgcattcggcgaatgtggaacgatactgtgcgcaaacagtctgaatcatcttttattacgggtgacataaatagctccgcgagtctgaacagggaaccatacagagaaaccagtatgggagtgaaactgaatatcgcctaccagattggggcatccgagcaatgccaaggctataagtgccacggttatagtacaaccgaatggtag

SEQ ID NO: 326021 - DNA, 3696 bp, Artificial Sequence
  derived and/or modified sequence
atgtggccctcacagttgcttattttcatgatgctgcttgcccctatcatacacgccttctctagagctcccattcccatggccgtcgtaaggagggagcttagctgcgagtcgtaccccatagaattaaggtgccctggcacagatgtcatcatgatcgagtctgccaattatggtcggacagacgacaagatttgtgactccgatcctgctcagatggaaaatatccgctgctatctgcctgacgcctataagatcatgagtcagcggtgtaataaccgaacgcagtgtgctgtggtcgccggtccagacgtgtttccagatccgtgtcctggaacctacaaataccttgaggtacagtacgaatgtgtgccctataaggtcgaacagaaagtgttcctatgcccgggactccttaagggcgtttaccagtcagaacaccttttcgaatcagatcaccagagtggtgcttggtgtaaagaccctttacaagcctcagataagatttactacatgccctggaccccatataggacagataccttgactgagtattcttccaaggatgatttcatagcgggacgtcctacaactacctacaaactgccccatagggtcgacggtactggttttgtggtgtacgatggcgcactcttcttcaataaggagcgcaccaggaatattgtgaaatttgacctgcgcacccggattaaatctggggaagccattatcgccaatgcaaattaccacgatacaagtccatacagatggggcggaaagtccgacatcgatctggctgtcgacgaaaatgggctgtgggtgatatatgccaccgagcagaacaatgggaaaatagtgatatcgcaactcaatccttacacattgcgaatagaggggacgtgggacacggcgtatgacaagcggtccgcctccaacgcattcatgatttgtggaatcctatacgttgtgaaatctgtctatgaggacgacgataatgaagcaacgggaaacaagattgactatatatacaacactgaccaaagcaaagatagcttagttgatgtcccatttcccaattcttatcagtacattgctgccgtggattacaaccccagagacaatctgttatatgtgtggaataactaccatgtggtgaagtacagcctggatttcggccctctagattcccgtagcgggcaggcacaccacggccaggtgtcatatatctcccccccaattcatctggactccgaattggagaggccatccgtcaaagacatcagcaccacggggccactcggaatgggatctacgactacgtccaccacactcaggacaaccacactgtcccccggaagatctaccacgccctcagtatctggtcggagaaatagatcaaccagcacaccttcgccagctgtggaggtgctggatgatatgacaactcacctgccatccgccagctcccaaatccccgcattggaggaaagctgcgaagctgtggaggcccgtgaaatcatgtggttcaaaactcgacagggacagatcgcaaagcagccttgcccagctggaacaataggagtcagtacttacctctgtctggcacccgacggcatctgggatcctcagggcccagacttatccaactgcagtagcccatgggtgaatcacattacacagaagttgaagtctggggagacggctgctaacatcgccagggagctggccgagcagacaaggaaccacctaaacgcaggcgacatcacatacagcgtcagggctatggatcagctggttggactcctcgacgtgcagctcagaaatctgactccgggaggcaaggactcagcggctagatccctaaataagctacagaagcgggagagatcctgccgagcatacgtgcaggctatggtcgagacggtgaacaatctgctgcagccccaggcactgaacgcttggcgggacctgacaacaagtgaccagttgcgcgcagccacaatgctgttacacactgtggaggagagtgccttcgtcctagccgataatttgctgaagaccgacatcgtgcgagagaatacagacaatatcaagctggaggtcgctagactgtctacagagggaaaccttgaagatctgaaattccccgagaacatgggtcatggtagcactattcaattgtccgcaaatacactgaaacagaacgggaggaatggtgagatccgggtcgccttcgtactgtacaacaaccttgggccttatctgtcaacggagaatgcatccatgaaacttgggactgaggctctgtcaaccaaccattctgtgattgtcaattcacctgtgattaccgcggctataaacaaagagttcagtaacaaggtctacttggctgacccagtagtgtttacagtaaaacacattaaacagtctgaggaaaactttaacccaaactgcagtttttggtcttacagtaaacgtaccatgactggctactggtccacgcaggggtgtcggctgctcactactaataaaacccacacaacctgttcgtgtaatcacctgacgaatttcgcggtcctgatggcgcacgtagaggtgaaacattctgatgctgttcacgacctgctgctagacgtaattacatgggttggtatcctcctgagcctggtttgtttgttgatttgcatctttactttttgcttttttcgcggactacagagtgaccggaatacgatccacaaaaacctgtgtatctcactattcgttgctgagctcctgttccttataggaatcaaccgcactgatcagcctatcgcttgcgccgtgtttgcagccctgctgcacttctttttccttgccgcatttacctggatgttcctcgagggcgtgcaactgtacattatgcttgtggaagtgttcgagtccgaacactcccgcaggaagtacttttacctggtagggtatggcatgccggctcttatcgtcgccgtttcagccgctgtggactatcgttcttatggaaccgacaaagtttgctggctacgcctggatacctactttatctggtcgtttatcggcccagccactctcatcattatgttaaacgtgatctttttgggtattgccctgtataaaatgttccaccatacagctatcctcaaacccgaatctggatgtctggacaatatcaagtcttgggtgatcggcgcaatagccctgctctgtctcctgggcctgacctgggccttcggcctgatgtatattaacgagagcacagtgattatggcatatctcttcacaatcttcaatagtctgcaaggtatgtttatcttcatttttcactgtgtgttgcagaagaaggtgcgcaaggagtatggaaagtgcttacgaactcactgctgttctggcaagtccacagaatcgagcataggttctggtaaaacatcaggttccaggactcctgggaggtatagcaccggaagccagtcccgcattagaagaatgtggaatgataccgtaaggaaacagagtgaaagctctttcattaccggggatatcaacagcagcgcatcgttaaaccgtgaaccatatcgcgagacatccatgggagttaagctaaatatcgcctatcagattggggcatccgaacaatgccagggctacaaatgtcatggatactccacaaccgagtggtag

SEQ ID NO: 326022 - DNA, 3927 bp, Artificial Sequence
  derived and/or modified sequence
atgtggccgagtcagttgctgatctttatgatgctgctagcgcctatcattcacggtggcaaacactccgagcggcaccctgcgctggccgctccgcttcgtcacgccgaacgctcaccaggaggcgcactccctcccaggcacctcctgcagcagcccgctgccgagcgcactgcggcacacaggggacaaggcccacgaggggcaaccagaggtgtgcggggtccgggtgcccagggtgcacagattgccgctcaggcattttctagagcaccgatccctatggccgtcgtgcggagggaactgagttgtgaaagctaccccatcgaacttcgatgtcctggcactgatgtgattatgattgaatcagcaaattatggccgaactgacgataaaatttgcgattccgaccctgcacagatggagaatattaggtgctacttaccagacgcttataagatcatgagtcagaggtgcaacaatagaacccagtgtgcagtcgtggctggaccggatgtctttccagatccatgtcctggtacctacaaatacctggaagtgcaatacgaatgtgttccatacaaggtggaacagaaggtgtttctgtgtcctggacttcttaagggggtttaccaaagcgagcacctgtttgagtcagaccatcagagcggagcctggtgcaaggatcctcttcaggccagcgacaagatctactacatgccttggacaccctacaggactgatactcttacagaatattcttcaaaggatgactttatcgcgggacgcccaactacgacgtataaactaccgcatcgcgtcgacggtactggcttcgtcgtatatgacggagccctgttttttaataaagagcgaacgagaaatatcgtgaaatttgacttgcgcacaagaattaagtcgggcgaagctattattgctaacgccaattatcatgatacctccccttacaggtggggcggtaagagtgacatcgatctggcagtggacgaaaatgggctctgggtgatatacgccactgaacagaataacggtaaaatcgttatcagccagttaaacccctatacccttagaatcgaaggcacctgggacacggcctacgataaaagatcagcctccaatgcttttatgatctgtggcattctctatgtcgtgaaatctgtatacgaggacgatgataatgaagcaactggaaataaaatagactacatctataatacagaccaaagtaaggacagtcttgtcgacgtaccgtttccaaactcctaccaatatatagcagcagtggactataatcctcgcgataaccttttgtatgtgtggaataactatcacgtcgttaagtattctctggactttgggccattagattctcgctctggccaggcgcatcatggacaggttagctacatctctccaccgatacacctggactcagaattggagcggccttccgtgaaagatatctctaccactggaccattaggtatggggagcacaaccacgagcacaaccttgcgcactactactttgtccccaggcaggagcacaaccccatcagtgagtggaagaaggaatcggtctaccagcaccccctctcccgctgtggaagtgctggacgatatgacgactcatttaccttccgcctcatcgcagattcccgctttggaggagagttgtgaagccgtcgaggctagggagattatgtggttcaagaccaggcaaggccaaatagcaaagcagccatgtcctgcagggaccatcggtgtgtcgacttatctctgcctggctcccgacggtatctgggacccccagggcccagacctgagtaattgcagctctccctgggtcaaccacattactcagaagctgaagtccggggagaccgcggcaaatatagcccgtgagctggcagaacagactagaaatcatctcaatgccggtgacatcacctattccgtgagagccatggatcaacttgtaggcctgctggatgtccaattaagaaatctcacccctggagggaaggattccgctgcgcgttctctcaataagttgcagaagcgtgagcggtcctgtagagcgtacgtccaagctatggtcgagactgtgaacaatctgttgcaaccacaggccctaaacgcatggagagatctgactacttctgatcagcttcgggctgccaccatgctactgcataccgtcgaggagtccgcctttgtgctggcggataatctcctcaaaaccgacatcgtgagagaaaataccgacaacattaaactagaggttgcaaggctgtctacagagggaaacctggaggacctaaagtttcctgagaatatgggccacgggagcaccattcagctaagcgccaatactctgaagcagaacggcaggaacggcgagatccgcgtggctttcgtcctttacaataatctcggcccttacctgtccacagaaaatgcaagtatgaagttaggcaccgaagcgctatcaaccaatcattcagttattgtaaattcacctgttataaccgcagcgataaacaaagaattcagcaataaggtttatctggcagaccctgtggttttcaccgtaaaacatatcaagcagagcgaggaaaactttaatccaaactgttctttttggtcctactccaagagaactatgacggggtactggtctacgcagggttgtagactgctgaccacaaacaaaactcatacaacgtgctcctgcaatcatttgacgaatttcgccgttctgatggcgcacgtcgaagtcaagcactcggacgccgttcatgacctgctccttgatgtcattacatgggtagggattctcctctcattagtctgtctactcatatgcattttcactttttgtttctttagagggctgcagtccgaccgtaacacgatccacaagaatctgtgcataagtctgttcgtagcggagttattgttcctcatcgggatcaaccgaacagaccagcctatcgcctgcgccgtgttcgcagctctgctccacttctttttcttggccgcttttacttggatgtttctcgaaggagtacagctgtacatcatgttagtcgaagtcttcgagagcgaacattctaggcgcaagtacttttatctggtcggctatggcatgcccgctctaatagttgccgtgagtgctgctgtcgattaccgcagctacggaacagataaggtgtgttggctccgcctggacacttatttcatctggagcttcatcggtcccgctacactgattatcatgctgaacgtgatcttcttggggatcgcgctgtacaagatgttccatcacactgccattcttaagcccgagtctggctgtctcgacaatattaactacgaggataaccgcccttttataaagagctgggtgataggcgcaattgccctcctctgccttctagggctcacctgggccttcggcctgatgtatattaacgaaagtaccgtgattatggcgtatctctttaccatctttaactcacttcagggcatgttcatctttatcttccattgcgtcttgcagaagaaggtacgcaaggaatacgggaaatgcctgagaacacactgctgtagtggaaagtctactgaatcttcaattgggagtgggaagacctccgggagtcgcactccaggccgatactcgacaggatcacagtctcggatccggagaatgtggaacgacactgtacgcaagcaatctgagagcagcttcattactggagacattaattcatccgctagccttaaccgggagccgtacagagaaacgagcatgggggtgaaactgaatattgcataccagattggcgcttccgaacaatgccaggggtataaatgccacggctatagtaccacagaatggtag

SEQ ID NO: 326023 - DNA, 3900 bp, Artificial Sequence
  derived and/or modified sequence
atgtggccttctcagttactgatcttcatgatgcttcttgcccctatcatccacggaggaaaacactctgagagacatccagctctggctgccccactaaggcacgctgagaggtctcccggaggagccctgccacccagacacctcctccaacagcccgctgcagaacgtactgccgcacacagagggcaaggtcctcggggagcaacacgcggagtgcgcggaccaggggctcagggagctcaaatcgccgctcaggcattctctcgagcccctattcccatggccgtggttcgcagggagctttcttgtgagtcataccctatcgagcttaggtgtcctggaacggacgtgattatgatcgagagcgcaaattatggacgcaccgacgataagatatgcgactcagatcctgctcaaatggagaacattcgatgctacttaccagacgcctataagatcatgtcccaacgctgcaataacaggacccagtgcgctgttgtggcgggacccgatgtctttccagacccctgtcctggtacatataagtatctcgaagtgcagtacgaatgtgtgccgtataaagttgagcagaaagtgtttctttgcccgggactcctgaagggcgtttaccagtctgagcatcttttcgaatccgatcatcaatctggtgcttggtgtaaagatcccttacaagccagcgataagatatactatatgccatggaccccctaccgcacagacacactgacagaatactccagcaaggacgacttcattgccggacgcccaaccaccacttataaactgcctcaccgtgttgacgggacgggcttcgtggtgtacgatggggcactgttcttcaataaagagcgtaccaggaacattgtcaagttcgatctgagaactcgaataaagagcggcgaggcaattattgcgaatgccaactatcacgatacctcgccctaccggtgggggggtaagtcagatatagatttagctgtagacgagaacggcctgtgggtgatctacgctacagaacagaataacggaaagattgtcattagtcagctcaatccttacactctccgtatagaaggcacctgggacaccgcctacgataagcgcagtgcttccaacgctttcatgatttgcggcatcctgtacgtagtgaagagtgtttatgaagatgatgacaatgaggccactggtaataagatcgactacatttacaatactgatcagagtaaggattccttggtggatgtgccgtttccaaatagctaccagtacatagccgcagttgactataaccccagggataaccttctatacgtgtggaataattatcacgtcgttaagtattcgctggactttggcccactggatagtaggtccggacaggcccatcatggccaggtgtcgtatatctccccaccgatccacctcgattccgaacttgaacgtccatccgtgaaggacatctccactaccggcccactgggtatgggcagcaccactacgtctaccaccctgcgtaccactaccctatctcccggacggtccaccactccatccgtgagtggcaggcgcaatcgcagcacgtcaacacccagtcccgcagtggaggtcctggatgatatgaccactcacctccctagcgcttccagccagattccggctctggaagagtcatgcgaggcagttgaggcccgagaaattatgtggttcaagacacgacaaggacaaatcgctaaacaaccctgccctgcgggaacaatcggcgtctctacatacctgtgtctagccccagacggcatttgggatccccaggggcctgatctgagcaactgtagttcaccatgggtgaaccacataactcagaaacttaaaagtggagagacggctgccaacatcgcccgagaattggcagagcagaccagaaatcatttgaacgcaggcgacatcacatactccgtgagagcaatggaccaattagtgggcctgctggatgtgcagctgcgaaacctcactccgggtggaaaagacagtgctgccagatcactcaacaagctgcaaaaacgcgagcgtagctgtagagcgtacgtgcaggccatggtggaaacggttaacaatctgctccagccacaggcactgaacgcctggagggacctaacaaccagcgatcagctgagagctgccacaatgctactgcacacagtggaagagtctgcgtttgtcttggcagataacttgctaaaaacggatatcgttcgggaaaatacagataacatcaagctcgaggtggccagactttcgaccgagggaaaccttgaagacctgaaattcccagagaacatgggacacggtagtaccattcagctaagtgcgaacaccctgaaacagaatggaagaaatggtgagatccgggtggcctttgtgctctataataacctcggcccatatctcagtactgaaaacgcaagtatgaaactcggcactgaggcgctgtcgacaaatcattctgtgatcgtgaattcgccagtgatcacagcggcaatcaataaagagttttcaaacaaggtgtatctggccgacccggtcgtcttcactgtgaagcatattaagcagtctgaggaaaattttaatccaaattgctcattctggagttactcaaaaagaactatgacaggatattggagtacacaggggtgcagacttttaaccaccaacaaaacacatacaacatgttcctgtaaccacctgaccaatttcgcggttctaatggctcatgtggaggttaaacactcagatgccgttcacgatctccttctggatgtgattacttgggtaggtatacttctttctttggtttgcctgctcatctgcatttttaccttttgtttttttagggggctgcaaagcgatcgaaataccatccacaagaacctgtgcatatccctgttcgtagcagagttgctctttctcatcggaattaacaggaccgatcagcctattgcatgtgccgtgttcgctgctctgcttcatttctttttcctcgccgctttcacatggatgttcctagagggcgtgcaattgtatataatgctggtcgaggttttcgaatcagaacactccaggagaaagtacttctacctggtaggatacggcatgccggcactgattgtggccgtttctgccgctgtggactacaggtcctatggaactgacaaggtctgctggttgcgtctcgacacatacttcatctggagtttcattggaccagccacactcatcataatgttgaatgtcatttttctcgggatcgctctgtacaaaatgttccaccacacggccatcttaaagcccgagtctggctgcctggataacatcaaaagctgggttataggggctatcgcgctgttatgccttcttggactcacctgggcctttggcctgatgtatattaacgagtcaactgtcattatggcttatctgttcacaattttcaatagcttgcagggcatgttcatctttatatttcattgcgtgctgcaaaagaaagtgaggaaggagtacggcaagtgcttacgaacacactgctgctctgggaagtcaacagaatctagtatcggtagtggcaagaccagcggctcacggactccagggagatatagcaccggttctcagtccaggattcgtcgcatgtggaacgatactgtgagaaagcagagcgaatctagtttcataaccggggatatcaacagcagtgccagtctcaatcgagagccatatagagagacgtctatgggggtgaagctgaacattgcctaccagataggtgcctccgagcagtgccagggatataaatgtcacgggtattccaccacagaatggtag

SEQ ID NO: 326024 - DNA, 3723 bp, Artificial Sequence
  derived and/or modified sequence
atgtggcctagtcagctcctgatctttatgatgctcctggccccaatcatccatgccttcagcagagcgcctatccccatggccgttgtcagaagggaactttcctgcgagtcttaccccattgagcttcggtgccctgggacagatgttatcatgattgagtcagccaactacggcagaacagacgacaagatttgcgatagcgacccggctcaaatggagaacatccggtgctatttacctgatgcatacaagataatgtctcagcgctgcaacaacaggacccagtgtgcagtggtggccggacccgatgtattcccagacccctgccccggtacatacaagtatttggaggtccaatacgagtgtgtgccctacaaagttgagcagaaggtgtttctttgtcctggcttgctgaaaggggtataccaaagcgaacatctcttcgagagtgaccatcaaagcggggcatggtgtaaggatccactgcaggcatcggataaaatctactatatgccatggacaccttatagaactgacaccctcacagagtatagtagcaaagatgattttatcgcgggaagacccactacaacttataaactgcctcacagggtggacggcactggttttgttgtttacgacggagccctgttttttaacaaagaaaggaccagaaatatcgttaagttcgatctgaggacccgcattaagtcaggcgaagccattatcgctaacgcgaactaccacgataccagtccatatcggtgggggggtaaaagtgacatcgacctcgctgtggatgagaacggtctctgggttatttacgctactgagcagaataacggcaagatagtgatctctcagctgaacccctacacgctgcggattgagggaacttgggacacagcatatgacaaacgcagcgcttccaacgctttcatgatttgcggaatcttgtatgtggtcaaaagtgtctatgaggatgatgataacgaggccacaggtaacaaaatagactatatttataacacggaccagagcaaagactctttggtcgatgtgccttttcccaactcgtatcaatacatcgcagctgtggactataaccctagggacaacctcctttacgtgtggaataactaccacgtggtcaaatatagtctcgactttgggcctctggacagtagaagcggccaagcccaccacggccaggtcagttatatctctccaccaatacatttggattccgagcttgagagaccctcagtaaaggacattagcactaccgggcctttaggtatgggtagtacaaccacttccaccacacttcggacaacaacactttcccctggacggagcaccacaccatccgtgtctggaagacgcaatcgtagtacatcaactccaagccccgctgtagaggtcctagacgacatgacaactcatctgcccagcgccagctcccaaatcccagcattggaggagtcatgtgaagcagtcgaagccagggagattatgtggttcaaaacccgtcaagggcagatagctaagcagccttgtcctgctggtactattggcgtctccacttacctttgtttagcgcctgatgggatttgggacccacaggggcctgatctgagcaattgttcttccccatgggtaaaccatattacgcagaaactcaagagtggggaaactgccgctaacatcgcgagagagctggctgagcagacgaggaatcatctgaatgcaggagacatcacatactctgtgcgggctatggatcaactagtcgggcttctggacgtccagctcaggaatctgactcctgggggtaaggattcggcagccagatcactcaacaagctgcagaaacgggaaagatcttgtcgcgcatatgtccaggcgatggttgagacagtgaacaatctccttcagccacaggcattgaatgcttggagagacctcacgactagcgatcagcttcgtgccgctactatgctactacacaccgtggaagagagtgcttttgtactggcagacaacttattgaaaacagatatcgttcgagaaaataccgataatatcaagctcgaagtggctagactctccactgaagggaatcttgaagacctcaaatttccagagaatatgggacatggttctaccattcagttgtcagcaaacactttgaagcagaacggtcggaatggtgagatccgagtggccttcgtattgtacaacaacctgggcccatatctgagcacagaaaacgcatctatgaagctgggcactgaggcactgagcaccaaccactctgtcatcgtcaacagccccgtgatcacagcagccatcaacaaagaattctctaataaggtctacctggccgaccccgtcgtgttcaccgtcaaacacatcaagcagagtgaagaaaatttcaatccaaactgctctttttggtcctattccaagcgtactatgacagggtattggagtacccagggttgcaggctgctcactaccaataaaactcacacaacctgttcctgtaatcatttgaccaatttcgctgtgcttatggcccacgtggaggttaaacattctgatgcagtgcatgacttacttctggacgtgattacctgggtgggtattttgctatctcttgtgtgtttactgatttgcatttttactttctgttttttccggggattgcaaagcgataggaacacaattcacaaaaacctttgcatcagtctgttcgtcgcggaactcttgttcctgatcggcataaaccggacagaccagcccatagcttgcgccgtgtttgccgctttgctgcacttcttctttctggctgctttcacttggatgttcctggagggtgttcagttgtatatcatgctggtggaggtgtttgagtccgaacacagccgtaggaagtacttttacctggtgggctacgggatgccggctctgatcgtggctgtgtccgctgccgtagattacagatcctacgggacggataaggtttgttggctccgtctcgatacttatttcatctggtcgttcattggacccgctacattgattatcatgctcaatgttatttttctcggtattgcactttataaaatgtttcatcatacagctattctgaaacccgagagtggctgtcttgacaacatcaattacgaagataacaggccattcatcaagtcgtgggtcatcggggctattgctctactttgtcttcttggcttaacttgggccttcgggttgatgtacattaatgagagcaccgtgatcatggcctacctcttcactatatttaattccctccagggaatgttcatctttatatttcattgcgtgctccagaagaaggtgagaaaagagtacggcaagtgccttcgtacccactgctgctccggtaaaagcaccgagtcaagtatcggcagcggtaagacctccgggtcaaggacccccggtaggtactcaactggaagccaatctaggattcgcagaatgtggaatgataccgtacggaagcagtccgagagttccttcataaccggcgacatcaactcctctgccagtcttaatcgggagccttaccgagaaacatccatgggagtgaaattgaacatcgcataccagatcggcgcaagcgagcagtgccaaggctataagtgtcatggatacagtacaactgaatggtag

SEQ ID NO: 326025 - protein, 555 aa, Artificial Sequence
  derived and/or modified sequence
MRLIGMPKEKYDPPDPRRIYTIMSAEEVANGKKSHWAELEISGRVRSLSTSLWSLTHLTALHLNDNYLSRIPPDIAKLHNLVYLDLSSNKLRSLPAELGNMVSLRELLLNNNLLRVLPYELGRLFQLQTLGLKGNPLSQDILNLYQDPDGTRKLLNFMLDNLAVHPEQLPPRPWITLKERDQILPSASFTVMCYNVLCDKYATRQLYGYCPSWALNWEYRKKGIMEEIVNCDADIISLQEVETEQYFTLFLPALKERGYDGFFSPKSRAKIMSEQERKHVDGCAIFFKTEKFTLVQKHTVEFNQVAMANSDGSEAMLNRVMTKDNIGVAVVLEVHKELFGAGMKPIHAADKQLLIVANAHMHWDPEYSDVKLIQTMMFVSEVKNILEKASSRPGSPTADPNSIPLVLCADLNSLPDSGVVEYLSNGGVADNHKDFKELRYNECLMNFSCNGKNGSSEGRITHGFQLKSAYENNLMPYTNYTFDFKGVIDYIFYSKTHMNVLGVLGPLDPQWLVENNITGCPHPHIPSDHFSLLTQLELHPPLLPLVNGVHLPNRR

SEQ ID NO: 326026 - DNA, 8843 bp, Artificial Sequence
  derived and/or modified sequence
gtgtgtgtttcccctgccgcggggaaatggctgctgttgcttctgggccagaggaagagaatgaggtagagtgttcttttgcctccgagtaggaccgagagtgttgggaagaggagcgcgtccccggggaaatgagactaatagggatgccaaaggaaaaatatgatcctccagatcctcgcagaatttataccatcatgtcagcagaggaggtagccaatgggaaaaaatctcactgggcagaattagaaatctcgggtagagtgcggagcctaagtacatcactttggtcattgacacacttgacagcgctgcacctaaatgacaattaccttagtcgcattccacctgatattgccaagcttcataatctggtttacctggatctgtcatccaataaactcagaagtttaccagcagaactaggaaacatggtgtctctcagggaattgcttttaaataacaatctgttacgggttttgccttatgaacttggtcggctcttccagctacaaactctaggtttgaaaggcaatcctttatcacaggatattctcaacttataccaggacccagatggaacccgaaagctactgaacttcatgcttgacaatctcgcagttcatccagagcagcttcctccgaggccatggattacattaaaagaacgagaccaaattctgccgtcagcatcattcacggttatgtgttacaatgtgttatgtgataaatacgctacccggcagctatatggctattgcccatcctgggcattaaactgggaatacaggaaaaagggaattatggaagaaattgttaactgtgacgcagatatcattagtcttcaggaagtggaaacagagcaatacttcactctctttctgccagcattgaaggagcgtggatatgatggatttttttctccaaagtcacgtgccaaaatcatgtctgagcaggagagaaagcatgtagatggttgtgcaatattcttcaaaacagaaaaatttacattggtgcagaagcatacagtggaatttaaccaagtggcgatggctaattcagatggatccgaagctatgctgaacagagtgatgacaaaagataacattggtgtcgctgtggtattagaggtccacaaagaactatttggagcaggtatgaagcctattcatgctgcagacaaacagctgcttatagtggcaaatgcccacatgcattgggacccagagtattctgatgtgaagctcatccagaccatgatgtttgtctcagaggttaaaaacattctggagaaagcctctagtaggcctggaagcccaactgcagatcctaattccatcccgctggtgctatgtgcagatcttaactcattgccagattcaggtgttgtggaatacttaagcaatggaggagtagctgacaaccataaagacttcaaggaactaaggtacaatgagtgtcttatgaacttcagctgcaatggaaagaatggaagctcagaagggagaatcacacatggcttccaacttaagagcgcctatgaaaataacttgatgccttacaccaattacacctttgatttcaaaggcgtgattgactacattttctattccaagactcatatgaacgtgcttggtgtcctggggcctttagatcctcaatggctggttgagaacaacatcactgggtgtccacaccctcacatcccttcagaccacttctcactgttaacacaacttgaactccaccctccactcctgcctcttgtcaatggtgttcacttgcctaatcggaggtagtggagtactgccccgccaagacggggatctgttgctatggacctgtacagttgtaaatcaaagtatgtaggagtgaagtatggccatccttaagctgcttcttcaggtttctttcattatgtgtttgctgtaagactttgtacatttttgtgcatattggtatcatttggcagtagggctggaaccaaagtattactctctttacaaaattttaatttaacatgtttttaaattggaccttctttatattgtattaacagccagcattcaaaattgataaattaccaatttgaggcccaataacagtgtatttgtttttccaaaacaaatactttcttttgaatggtttcagtgagccaaccattttataaaaggcaatttttaaaaactataaatacagtattttaaactgaatgatgatatgccttccagggaaaaccttgaatttttcctttataactgacttttggattccaaagtcatttgcacattaacagagtacttaaatttacttgttcagtccataaactatgatatagcctctatacatggtaagaaaatttgaaaaattaaagatggttgcacagtatacttttataatccagcatgtaacaccacatgacaatttgttggccaaatgctggtttggagtttttttgaggaatcactttggtttttttgtcctttatatataaccttattggaagtattaattctaagcctgtctctcaagtttatttatagagaaaaagtaagtaatctgtattgccacataccttgaaaatagaatgtggtatgtttaggatgcccacggaatgaatttttccttattccaattcaaccttctgtctggttgtgccaggaaaacagatgttatatgacctatgtcatttttgccattatagtcaaatgttaaaagaagaaaaaagtctgctgaataaaaaggccttgatcaaagtttcagatggggaaaatcatacagatattttatgtgtttccaacatagattatgtggctgttggtttcttgagatgacagtgcaaaggatttgggagagagaacaaatttggggcagtagttgaaaacgttgggtcattttcctgactctagctgccaaatggccatcatatgcttttaatctttgtttcagttgtctgtcagggttgaattaagaagctactggtttattcccaattgttgatgcctttaggtatgttggaatcttttttttgcctaggaggggccagttgaaaatctgtgactcaagaggcagtgaacagaatactgttttctggggaaaaattggttggctacttgatgttaattatggcacagtaacaggaaaaggttgtgtctgtgtttttaagtttttctttattctgcttttttgctgctataagagttttctgaaatttatattttaaacttttcatgcactttactgtttctagtctcaaaatgtgatatttttaataaacaagaaattttccattatgtgaatgaaattttaaaagacaatagcctatatttgtgtctcactaatatataaagtataggtcaaatttaaattatttaattagttttaaatatacacaatttgtctcctctttcaaacctgacatcttcggctgttttattagtcttaaatgatgcatttactttggtcattttatgctaatttcttccatagtaaattaatcaggctatataaggtaatatttccccagagggtaattttagtgggacgagggtggtgggatgatgtcatatcatacatgggattgcatcagaagggttctgtaaagcctgaactcccttttaaaagtgcctagtgatagaggcgttgtttgtcatctattataattggaatgtcattgtagttcagtgaattttgatgtaaataaaatatcttttaaaaatgttaaagtaccaggataaacaaacaaaaagaaacaacccttaagatgacagattttcctcaacatgcaggtttcccttcttatatacctcaagtatccaacatctagccatgcaaattgattacctgaagcatagtactggaaagtagaatagcatgaaaaacttaattttgtggacattacctttttttgtaatcagctactgtatgttttattttagatcttttgttttgggtgggttttctgctctggaggtatatgcactaacaaaacattttcctcctttcatatacgcatgttaattagcaatgtgagcaatatttcctaccatacttcactcccaatattttttgagatgtttgtataaaatggaatttaaagttcacttatgattgtatatgaaccacagaggagcccatttattaataaaaaacttttttaatagttaaatgtagagggaaaaaataaaaaaaaatgggaaacattgtaaacagcttaagtttattttgtgtatgatcgaggcactctgttgcaggaaggtgtgtaattgggttctctctgcttcaaatgcgctctttcaaaccattcattatcctgtgtatttttaatgtggttttagtaaatgttggtagtagctctgttgaagtaggtaattgtgttatgttttgggtggtacacacttggggcatggtaacccaaatttcatgtgcacggtttccctttagcccactgcccaaatttcacatacccttcaccctttgttccctttgtaaaaggagtggtatctgttttgagctgccaattcagatgatcagaaatgctgctttcctcagcattgtcttgttaaaccgcatgccatttggaactttggcagtgagaagccaaaaggaagaggtgaatgacatatatatatatatattcaatgaaagtaaaatatatatgctcatatactttctagttatcagaatgagttaagctttatgccattgggctgctgcatattttaatcagaagataaaagaaaatctgggcatttttagaatgtgatacatgtttttttaaaactgttaaatattatttcgatatttgtctaagaaccggaatgttcttaaaatttactaaaacagtattgtttgaggaagagaaaactgtactgtttgccattattacagtcatacaagtgcatgtcaagtcacccactctctcaggcatcagtatccacctcatagctttacacattttgatggggaatattgcagcatcctcaggcctgacatctgggaaaggctcagatccacctactgctccttgctcgttgattttgttttaaaatattgtgcctggtgtcaacttttaagcaacagcactgcctaaaagcaagcagagaacagaatcccagcaccattctataggcaactttttagaattcagatatagtaaatctgttccagatttatgatgttttatgtaaaaaaaattttgtataataacatagctgaatatttttgtttcatttctttgatgtaaggcgtgtgaacattcgtttgaatatcacatgttgaagtcaggtatggcacaatgggttctgagaccagcttttcctcccctcccatttgccttgttccaagctctttcttttcaaattacttttctgatattcataggcaggtatttaattttactaattagcatcctgtgtgaatgtattaaagaagccactgtgttttagtgtagttggcaaaaatataaaagctgtttcttatttgcccctatttttttggtgtcttaaagttatatattaaatcacagagaagcaagggagaaagttgaaagatatctaaggctcatatcacttgattctatggtagattatattagaattgaggatgtggcacattaaaactggaacatgggcaaatatagtgttccattttaaaattctaagtttatattgttaaatgggtgaaaatttaagtttatatttgcatttccaagcgtttctaaaaatcactaatgccatctatacttttagtatgaaacagcagactatagaaagcacagggaagaataggctaaatacattctttgaagaaccagaggcatataaccacatcattatgtcattcctaatacatggctagattttctaatgataaaattgactgtgtcccaatgcttatttgattctaagcttttttattctgtttctgagatattttaatagctttgcaaaatatgctgaccagtttttggaaaataatggtttttatagcaagcaaagactttatggcacattttcaaaatagcactcatacatacttacattttgacagaaatgtgaattctcacattgatgagatattctttttcccacctgccctaccctttaaaaaaggtcacttttctaatgtgtagtagattcatttacgcctttccctttgagtcataccatgtttggagaactgtgtgaattgtaggtagagaaattaactagggaagccagaagcttgaactaaagttttaaatttgtaggcagatgagaacttttatactatggttgctttgggcgattctaattttgtaatagcatcatgatcaccaaaattaattcaaacattttagtacatctttaatctgtcttatttaccaaagttctaatctgtttaagaacaggatgccaagagcatctttcattttatagaatgatatgctcacctttataagtgtcacctaaaagcttgagggtaaaaaagaagcagcccatatatctaaactacaggatgtcttgaacaagattcacagaaagaaagaaaaaaaagcagttctttccaggaaggtggtaaggaagagcatgcatatttcttgttttaaccaaataccttttttatgtaaatgtctctattaaaccccaggtcctacaccaggaaatagggtgataaccaggaaaataccaagctttaacccagttggcagttccttgtggcatacatttggttagacttgggtttttcctggaaccaaaggaaaataagcatgttgagttcttcgttcaacagacatgacattgaagtaatagaatattttttaagtaaaatagttttcactttcaaagcctatgacataaggacatttgtgcttattaattgttaatttttttttatggtacattgtataaactgagtagcattgaactgcattttagaagtatgtcatcagaaacaaatcacattatggaaaggatatacaaatgccaagtgatatgactcttttggcatggtggtagcatggtccattcagctttcagaatctttcggaggctctagtttggtgcctagtactagttatttttgttagaacaatctctcaaaatttagataattttccagttgtatgtctgtcacttttaactctaaagcgtaagaatcatggtaaccctctcagaagtggtcctttcttgctcatttcagtttcgtattaacttcaaatcactgatgtattgtctttcaagctatcaattgttatatgtaccaatttaatttagtttgtagttatctgaagtcacaaaattggttcagcattgatgtcaaacaatggctttgcttcttaccaaacagacttagtatcctgctgcttgtttcaatcttgatgcagtaagtgatgcagtatctgggtctgtatttacttagaaactgtactgtcctttctctgtgcttaacttgctaaaaatatattcccttacctgtgaaattcctgagcggtgctctgccaacttttcaaggggagggatttggatggctgtgttactgcacactggatctggaattgttcagggttatgagtgacaaatttcttaaacaccagcagcactgagatgtgcactatgggcattcgtacagttgttgtccaaatgcaaacaactttttcatcttggagaagctgagatacagagttcaatagaactacttggaatattttgagaaggttgaatgtttcatctttggctttgttgtctctggagtggggaagtatggagggctttttttttttttttttttttttttttttttttttttaaagagagtgtgtatgtactttttctctctataagggccagggtgttggtcaaattcaccatcgattaatttatatcttctgttgtgatttttttcaactatataacaagtgccaactaattgtccatgggacaatctacttttccactcaatttatcgttttgagtagggaaaggttcatttattttcattacctggcattaagttaaagaattcattattttgcatacatttgagtcattctgtgacctataaagtgtttttgtaactatctaattctaatggttgcaaagcaaagcacatgactgtaaaaccaagcaaggtgttttagtaactttttccctgaatacttggtagtttccattgatactattccaaaacaaattctgctgttttaggttgtatatttactttgcttttgttctaagaaaaagccaaggactaaatcaacttgtttttgtgtttcagtaatcagtttaaaatctaagatttttttttaaattagactatttaatgaagtgccatgtaattgtagcttgctagtgtttaatgtttaatagactggttctgtaggtgttttaaccatttaacactctctgccatccctggagaaagtggttctactcttactgaacacattctctctgacaaaatcaccagctgctttatttttctatttattacagttaaacagttgatgaggtctgaatcttgaccaaaactgctcagctgagatgtttttcacaatagacactgtacaaagtgtgcgtgcaaaaggacacggttggtagtattttttcattaatgtgaacattgactaaaaaaaagcagtcctgccttttaaatcttgtggcagctcagaagggaggtgcttaagaaccttaactactatgtcagataacaaaatatttttttccattttggagattggttactgctcacacatgatgtatagggctaaatatatgcttgtttccttgcacctgtgtacttcccctctctccctccctttccttcccctgtaggcaataaatggccattttgcaactgca

SEQ ID NO: 326027 - protein, 35 aa, Artificial Sequence
  derived and/or modified sequence
MFISLWEFFYGHFFRFWMKWLLRQMTGKCELQRIF

SEQ ID NO: 326028 - DNA, 738 bp, Artificial Sequence
  derived and/or modified sequence
gcgcgaggggggtcggcgcagagacgcccagagccctggggtgctcaggcgccgctacgcgtgcatcccctctgctcggcagttctgcgcttttgtcctaatgagcgcggactagatggcttgattttcaagataatgatcaacccagctgtgctatgcgctctttctgcactgacctgcgggtacttcgaacttcgacagtccctcctcaggccctagtccagaggaaaaaaaaatgtttatttctttgtgggagttcttctatgggcacttttttcgattttggatgaaatggctattacgacagatgactgggaagtgtgaattgcagcgaatatttgatacctatgtaggtgcacaaaggacacacaggatagaaaattccttgacatactccaagaataaggttttacagaaggcgacacatgttgttcagagtgaagtggacaaatatgtagatgatattatgaaggaaaagaatattaaccctgagaaggatgccagttttaaaatatgcatgaagatgtgcttactgcagataactggttataaacagctgtatttggatgtagaaagtgtgaggaaaaggccatatgattctgataacctacagcatgaagagctactcatgaagctttggaatcttctaatgcccacgaagaagttaaacgctagaatctccaagcagtgggctgaaattggttttcagggtgatgatcccaagacagacttcagagg

SEQ ID NO: 326029 - DNA, 594 bp, Artificial Sequence
  derived and/or modified sequence
ggtgcttgaagggagtgttccgtcgtttccgttgccggctgtttgcagtggggaaaccgaggcagctcctgctccccctagttcttccgctcctgtgaggtggctgctgtttcttttcctcttgccccggatgcctcggtgcggctgcactgagagcgcgcgggctcgcgagccccgcggggttctgcgggaacccgggggcgcctgggccggcgggtctttgtgcgagccctgccctcccattcgcgggcggcgcgcgaggggggtcggcgcagagacgcccagagccctggggtgctcaggcgccgctacgcgtgcatcccctctgctcggcagttctgcgcttttgtcctaatgagcgcggactagatggcttgattttcaagataatgatcaacccagctgtgctatgcgctctttctgcactgacctgcgggtacttcgaacttcgacagtccctcctcaggccctagtccagaggaaaaaaaaatgtttatttctttgtgggagttcttctatgggcacttttttcgattttggatgaaatggctattacgacagatgactgggaagtgtgaattgcagcgaatattt

SEQ ID NO: 326030 - DNA, 910 bp, Artificial Sequence
  derived and/or modified sequence
agcagatcccaccttcagtcctggctctgacaagccctccagagaatgggacattttagagactgaagagcattataagagccgatggagatctattaggattttatatcttactatgtttctcagcagtgtagggttttctgtagtgatgatgtccatatggccatatctccaaaagattgatccgacagctgatacaagttttttgggctgggttattgcttcatatagtcttggccaaatggtagcttcacctatatttggtttatggtctaattatagaccaagaaaagagcctcttattgtctccatcttgatttccgtggcagccaactgcctctatgcatatctccacatcccagcttctcataataaatactacatgctggttgctcgtggattgttgggaattggagcagtttttcagacttgttttacattccttggagaaaaaggtgtgacatgggatgtgattaaactgcagataaacatgtatacaacaccagttttacttagcgccttcctgggaattttaaatattattctgatccttgccatactaagcaagtacagatgaagctcaggttccccaaggaaatattgaccaggttgctgttgtggccatcaatgttctgttttttgtgactctatttatctttgccctttttgaaaccatcattactccattaacaatggatatgtatgcctggactcaagaacaagctgtgttatataatggcataatacttgctgctcttggggttgaagccgttgttattttcttaggagttaagttgctttccaaaaagattggcgagcgtgctattctactgggaggactcatcgttgtatgggttggcttctttatcttgttaccttggggaaatcaatttcccaaaatacagtggga

SEQ ID NO: 326031 - protein, 153 aa, Artificial Sequence
  derived and/or modified sequence
MFLSSVGFSVVMMSIWPYLQKIDPTADTSFLGWVIASYSLGQMVASPIFGLWSNYRPRKEPLIVSILISVAANCLYAYLHIPASHNKYYMLVARGLLGIGAVFQTCFTFLGEKGVTWDVIKLQINMYTTPVLLSAFLGILNIILILAILSKYR

SEQ ID NO: 326032 - DNA, 462 bp, Artificial Sequence
  derived and/or modified sequence
atgttcctgtcatcagtcggcttcagtgtcgtaatgatgagtatttggccatacctacagaaaatagatcccacagccgacactagtttcttaggatgggtgatagcctcttactccctgggacagatggtggcatcgccgatatttgggctgtggtctaactaccggcctaggaaggaacctttgatcgtttcaatcctcatcagtgtcgccgccaactgcctctacgcttatcttcatattccagcctctcacaacaaatactacatgctcgtggctagaggccttctaggcattggagcagtattccagacatgttttaccttcctgggagaaaaaggcgtgacttgggacgttatcaagctgcagatcaacatgtatacaaccccggttcttctcagcgcttttctgggcatactgaatattatacttatcttagctattctaagcaaatatcgctag

SEQ ID NO: 326033 - DNA, 462 bp, Artificial Sequence
  derived and/or modified sequence
atgttcctgagctctgtgggcttctctgtggtgatgatgagcatctggccctacctgcagaagattgaccccacagctgacaccagcttcctgggctgggtgattgccagctacagcctgggccagatggtggccagccccatcttcggcctgtggagcaactaccggcccaggaaggagcccctgattgtgtccatcctgatctctgtggccgccaactgcctgtatgcctacctgcacatcccagccagccacaacaagtactacatgctggtggcccggggcctgctgggcattggagctgtgttccagacctgcttcaccttcctgggggagaagggcgtgacctgggatgtgatcaagctgcagatcaacatgtacaccacccctgtgctgctgagcgccttcctgggcatcctgaacatcatcctgatcctggccatcctgagcaagtacagatag

SEQ ID NO: 326034 - DNA, 462 bp, Artificial Sequence
  derived and/or modified sequence
atgttcctgagcagcgtgggcttcagcgtggtgatgatgagcatctggccctacctgcagaagatcgatccaaccgcagacacttcattcctcggttgggtgatcgctagctactctttaggacaaatggtggcatccccaatttttgggctctggtcaaactatcgcccccgaaaggaaccgctaattgtctccattcttattagcgttgccgctaactgtttgtacgcctacctgcatattcccgcctctcacaataagtactacatgctagtggcccgaggcctccttggcattggcgcggtgtttcaaacttgctttacgtttttaggggagaagggcgttacgtgggatgtgatcaagctgcaaatcaacatgtacaccaccccagtgctactgtcggcgttcttaggcattctcaatatcatccttatactcgctatcctctccaagtaccgttag

SEQ ID NO: 326035 - DNA, 462 bp, Artificial Sequence
  derived and/or modified sequence
atgttcctctcatctgtaggcttttccgtcgtcatgatgtcgatttggccctatttgcaaaagatcgatccaacggctgacaccagcttcctaggttgggtaatcgcttcctattcactggggcagatggtggcgagccctattttcggcttgtggtctaattaccgtccccgaaaggaacctctcattgtgagcatcctcatctccgtggctgccaattgtctctacgcttatctccatatccccgcaagccacaataaatactacatgctggtcgctcgtggactgctgggcattggtgcggtctttcagacatgcttcaccttcttgggcgaaaaaggcgttacttgggatgtgattaagctgcagatcaacatgtatactaccccggtcttgcttagcgctttcctcgggatccttaacatcatcttgatcttggctattctgagcaagtataggtag

SEQ ID NO: 326036 - DNA, 462 bp, Artificial Sequence
  derived and/or modified sequence
atgttcctgagcagcgtgggcttcagcgtggtgatgatgagcatctggccctacctgcagaagatcgaccccaccgccgacaccagcttcctgggctgggtgatcgccagctacagcctgggccagatggtggccagccccatcttcggcctgtggagcaactacagacccagaaaggagcccctgatcgtgagcatcctgatcagcgtggccgccaactgcctgtacgcctacctgcacatccccgccagccacaacaagtactacatgctggtggccagaggcctgctgggcatcggcgccgtgttccagacctgcttcaccttcctgggcgagaagggcgtgacctgggacgtgatcaagctgcagatcaacatgtacaccacccccgtgctgctgagcgccttcctgggcatcctgaacatcatcctgatcctggccatcctgagcaagtacagatag

SEQ ID NO: 326037 - DNA, 186 bp, Artificial Sequence
  derived and/or modified sequence
atgctgttcgagggcaaggtgaacccccagacccagagcctgctggccgagtgcggcgagtggaccagaagaagcctgcacctgagagtgctgggcagacagctgatcctgcccaccgacaagggcgtgcagcacttccagggcagcacccccgccagcgccgtgcacagaccccccctgagctag

SEQ ID NO: 326038 - DNA, 186 bp, Artificial Sequence
  derived and/or modified sequence
atgttgttcgaaggtaaggtgaatccacagactcagagcctgctcgctgagtgtggggaatggacccgccgctcattgcatctcagagtgctggggcgccaacttattctgccaacagacaagggggtacagcattttcagggcagcactccagcgtccgccgtgcaccgcccacctctgtcttag

SEQ ID NO: 326039 - DNA, 570 bp, Artificial Sequence
  derived and/or modified sequence
aaaactgaaacgagcacatggtaacgcaagcggcaggcatgctcggggtgtgcaggagatgcaccggcttgtgtgagccgaagaggactgtcagaaggacgtagaaggcacggttttactgtgaggagcaaagattctttacctacgcattttacaagaaatgtgcagaaagccattgataaatatacctgcaaatccttgtcatccttttcctccagcggaagccatacacccacgggagcccacacctcttggtctgggtcggccacacagagctctaccaccggctcatccacggagaggggctccgtttattcctggagagatgacgaatttgacgaagccagttcacagtcagtgcagcggttactctgggaggtggaggaaatgttatttgaagggaaagtgaaccctcagacccagagtctgctggccgaatgcggggagtggacaagaagatccctccatttgagagtattaggaagacagctgatcctgcccactgacaaaggcgtccagcatttccagggcagcactcctgcctccgcagtccacagacccccgctcagt

SEQ ID NO: 326040 - DNA, 186 bp, Artificial Sequence
  derived and/or modified sequence
atgctgtttgagggcaaggtgaacccccagacccagagcctgctggctgaatgtggggagtggaccaggaggagcctgcacctgcgggtgctgggccggcagctgatcctgcccacagacaagggcgtgcagcacttccagggcagcaccccagccagcgctgtgcaccggccccccctgtcctag

SEQ ID NO: 326041 - DNA, 186 bp, Artificial Sequence
  derived and/or modified sequence
atgctgttcgagggcaaggtgaacccccagacccagagcctgctggcagaatgtggcgagtggaccagacgaagtctacatctccgcgttctaggcagacagcttatcctgcccaccgataagggcgtgcagcatttccaaggttcaactcctgctagcgctgtacacagaccgcctcttagttag

SEQ ID NO: 326042 - DNA, 186 bp, Artificial Sequence
  derived and/or modified sequence
atgctgttcgagggaaaggtgaatcctcagacccagtccttgctcgccgagtgtggggaatggactcggagaagtctccatctcagagtgttaggcaggcaactaattctccctacagacaaaggagtgcagcattttcaggggtccactcccgcatccgcggttcacagacctcccctcagctag

SEQ ID NO: 326043 - protein, 408 aa, Artificial Sequence
  derived and/or modified sequence
MASVASCDSRPSSDELPGDPSSQEEDEDYDFEDRVSDSGSYSSASSDYDDLEPEWLDSVQKNGELFYLELSEDEEESLLPETPTVNHVRFSENEIIIEDDYKERKKYEPKLKQFTKILRRKRLLPKRCNKKNSNDNGPVSILKHQSNQKTGVIVQQRYKDVNVYVNPKKLTVIKAKEQLKLLEVLVGIIHQTKWSWRRTGKQGDGERLVVHGLLPGGSAMKSGQVLIGDVLVAVNDVDVTTENIERVLSCIPGPMQVKLTFENAYDVKRETSHPRQKKTQSNTSDLVKLLWGEEVEGIQQSGLNTPHIIMYLTLQLDSETSKEEQEILYHYPMSEASQKLKSVRGIFLTLCDMLENVTGTQVTSSSLLLNGKQIHVAYWKESDKLLLIGLPAEEIELPSSAHTHGERN

SEQ ID NO: 326044 - DNA, 1227 bp, Artificial Sequence
  derived and/or modified sequence
atggcctccgtggctagttgcgactcccggccttcaagcgacgagctccccggggacccctcatcccaggaggaggatgaagattacgacttcgaagatcgtgtttcagactccggatcttactcctccgctagctccgattacgacgatttagaaccggaatggctggacagcgtccaaaaaaacggtgaactgttttacctcgaactgtctgaggatgaggaggagagtctactgcctgagactccgaccgtgaatcacgtccgctttagcgagaacgaaatcatcatagaagacgactacaaagaacgaaagaagtacgaacctaaactaaaacagttcacaaagatactacggagaaaaaggttattaccgaaacgctgcaataaaaagaatagtaacgataatggccccgtgtcgatcctgaagcatcagtcgaaccaaaaaacaggcgtgatagtgcagcagcgctataaggacgtaaacgtgtatgtgaaccccaagaagctgacagtcattaaggctaaggagcagttgaaactgctggaggtgttggtaggcattatccaccagaccaagtggtcctggagacgaaccgggaagcagggggacggagagcggctcgtggttcacggtctgctcccaggtgggagcgcgatgaaatcaggtcaggtgctcatcggagatgtgctggtcgcagttaacgatgtggatgtgactaccgaaaatattgaaagagttttgagttgtattcccggcccaatgcaagtgaaactcacttttgaaaacgcctacgatgtaaagcgggagacaagtcatccacgccaaaagaagacgcaatccaatacatccgacctagtcaaactgttatggggcgaggaagtggagggcatacagcaatctggcctgaacaccccacacattattatgtacctgactctccagttggactctgagacttctaaggaggaacaggagattctgtatcactaccccatgtccgaggcttcccagaagttaaagagcgttcgggggattttccttacactctgcgacatgttggaaaacgttactggcacacaggtaacttctagttcattgctccttaatggcaaacagattcatgttgcatattggaaggaatctgataagcttctgttgattgggttacccgccgaggagatagagctgccatcaagcgcccacacgcatggcgaaagaaactag

SEQ ID NO: 326045 - DNA, 1297 bp, Artificial Sequence
  derived and/or modified sequence
catggcggccttagcaagctatagctgcgagatttgaattactccactcgtagctattgcattcctgacgatggcctctgtggcttcgtgcgattcgcgtccgagctcagacgagctccctggagacccctcttcacaagaagaagatgaggactatgattttgaagatcgggtcagcgactcgggttcatattcctcagcgagtagcgattatgatgatcttgagcctgaatggctggacagtgtgcagaaaaatggagagctgttttatttggaattgagtgaggatgaagaagaaagcctccttcctgagacaccaactgtgaaccatgtcaggttcagtgaaaatgagattatcattgaagatgactacaaagaaagaaaaaagtatgaacccaaactcaagcagtttaccaaaattttaagaaggaaaagacttttacccaagcgctgcaataaaaaaaatagcaatgacaatggaccagtatccattctaaagcatcagtccaatcagaagacaggagtcattgtccaacagcgatacaaagatgtgaatgtttatgtaaaccccaaaaagctaactgttatcaaagccaaagagcagctcaagcttctggaagtgctggttggaattattcatcagaccaagtggagctggagaagaaccggaaagcagggtgatggagagaggcttgtggttcatggcctgctgccagggggatctgctatgaagagcggtcaggtactcattggtgatgtccttgttgctgtgaatgatgtcgatgttactactgaaaacatcgagagagttctgtcttgcattcctggacctatgcaggtgaaactgacatttgaaaatgcatatgatgtgaaaagggagacgtcccatccaagacagaaaaagacacagtccaacacaagtgatttagtcaagcttctctggggagaagaggttgaaggtatccagcagagtggcctaaacactcctcatatcattatgtatctcacactacagctcgactcagaaacctcaaaggaagagcaggaaattctttatcattatccaatgtctgaagcatctcagaaacttaaaagtgtgagagggatttttctcacactctgtgacatgctggaaaacgtaactgggacacaagttactagttcatccctccttttaaatggaaaacaaattcatgtggcttattggaaagaatctgacaagttgttgctaattggcctgcctgctgaagaaattgagttaccaagctcagcccacactcatggggagaggaattaa

SEQ ID NO: 326046 - DNA, 1227 bp, Artificial Sequence
  derived and/or modified sequence
atggcctctgtggccagctgtgacagccggcccagcagtgatgagctgcccggggaccccagcagccaggaggaggatgaagattatgactttgaggacagagtgtctgacagcggcagctacagcagcgccagcagtgactatgatgacctggagcctgagtggctggacagcgtgcagaagaatggagagctgttctacctggagctgtctgaagatgaggaggagagcctgctgcctgagacccccaccgtgaaccacgtgcgcttctctgaaaatgagatcatcattgaagatgactacaaggagaggaagaagtatgagcccaagctgaagcagttcaccaagatcctgcggaggaagaggctgctgcccaagcgctgcaacaagaagaacagcaatgacaatggacctgtgtccatcctgaagcaccagagcaaccagaagacaggagtgattgtgcagcagcgctacaaggatgtgaatgtgtatgtgaaccccaagaagctgaccgtcatcaaggccaaggagcagctgaagctgctggaggtgctggtgggcatcatccaccagaccaagtggagctggaggagaacaggcaagcagggagatggagagcggctggtggtgcacggcctgctgcccggcggcagcgccatgaagagcggccaggtgctgattggagatgtgctggtggccgtgaatgatgtggatgtgaccacagagaacatcgagcgggtgctgagctgcatccctggccccatgcaggtgaagctgacctttgaaaatgcctatgatgtgaagcgggagaccagccacccccggcagaagaagacccagagcaacaccagtgacctggtgaagctgctgtggggcgaggaggtggagggcatccagcagagcggcctgaacaccccccacatcatcatgtacctgaccctgcagctggacagcgagaccagcaaggaggagcaggagatcctgtaccactaccccatgtctgaggccagccagaagctgaagtctgtgcggggcatcttcctgaccctgtgtgacatgctggagaatgtgacaggcacccaggtgaccagcagcagcctgctgctgaatggcaagcagatccacgtggcctactggaaggagagtgacaagctgctgctgattggcctgcctgctgaggagattgagctgcccagcagcgcccacacccacggggagagaaattag

SEQ ID NO: 326047 - DNA, 1227 bp, Artificial Sequence
  derived and/or modified sequence
atggccagcgtggccagctgcgacagccggcccagcagcgacgagttgcccggggatccatcatctcaggaggaggacgaggactacgatttcgaggaccgagtgtctgattctggaagttactccagcgcctcctccgattacgacgacctcgagcccgaatggctggattccgtgcagaagaacggtgagctgttctacctggagctcagcgaagatgaggaagagtccctgctgcccgagacaccaaccgtcaaccacgtgcgcttctcagaaaacgagatcatcatcgaagacgattataaggagaggaagaagtacgaacctaagctgaagcaattcaccaagattctgagacgtaaacgccttttgcccaagcgttgtaacaagaagaacagcaatgacaacggacctgtgagcatattaaaacaccagtctaatcagaagacaggtgtgattgttcagcagagatacaaggatgtcaatgtctacgtgaatcccaagaagctaacagtcatcaaggctaaagaacagttgaagctgctggaggtattggtgggcattattcatcagaccaaatggagctggcgccgaacggggaagcagggggatggcgagaggctcgttgtgcacgggttactaccaggtggcagcgccatgaaatctggccaagtgctaataggtgatgtactcgtggcagtgaacgacgttgacgtgacaacagagaatatcgagcgggtcttgagctgcattcccggtcctatgcaagtcaagctgacgtttgaaaacgcatatgacgtcaaacgcgagacctctcacccccggcagaagaagacgcagtccaacacctccgatctggtcaaactgctgtggggcgaggaggtcgagggcatacagcagagtgggctgaatacacctcacattatcatgtacctcaccctccagctcgacagcgagacatcaaaggaggagcaggagatactctaccactatcccatgtcggaggctagccaaaaactgaagtcagtcagaggcatcttcctgacactttgtgacatgcttgaaaacgtgaccggcacacaagtgacatctagcagcctgctactcaatggaaagcagatccatgttgcatattggaaggagagtgacaagctcttgcttatcggcctccccgccgaagagatcgaactgcctagcagcgcacacactcacggcgagcggaactag

SEQ ID NO: 326048 - DNA, 1227 bp, Artificial Sequence
  derived and/or modified sequence
atggcaagtgtggccagctgcgatagtaggccaagttccgacgaactgccaggcgacccgtcctcccaggaggaggacgaagactatgattttgaagacagagtgtccgacagtggctcctacagcagtgcgtcctctgactacgacgacctggaaccagaatggttggactccgtccagaaaaatggcgagctgttctatcttgagctttccgaggacgaggaagagagcctcttgccagaaaccccaactgttaatcatgttcgattttcggaaaatgaaatcattattgaagatgattacaaggaacggaaaaagtatgagccgaagctgaagcaattcacaaagatccttcgccgtaaaaggctgctgcctaagcgctgtaataaaaagaattccaacgataatggcccagtctctatcctgaagcaccaatctaaccagaaaacaggcgtgattgtgcagcagcgctacaaagatgtaaacgtgtatgtgaatcccaagaagttgactgtcatcaaggcaaaagagcagttgaaactcttagaagttttggtcggaataattcaccaaacaaaatggagctggcgacgcactggaaaacaaggggacggggagcgactggtggttcacggccttctgcccggagggtctgcaatgaaatctggacaggtcttaatcggtgatgtattagtcgctgtgaacgacgtcgatgtcaccaccgaaaacatcgaaagagttctctcctgtatccctggacccatgcaggttaagctcacatttgagaatgcttacgatgtgaagcgcgagactagccatccgaggcaaaaaaagacgcaatccaacaccagtgatcttgtcaagctgctgtggggggaggaggttgaggggatccagcagagcggacttaacacccctcatatcatcatgtatctcacactccagctcgatagcgagacttctaaggaggagcaagaaatcctgtaccattatcccatgtccgaagcttctcaaaagctcaaatctgtcaggggtatattcctgactctgtgtgatatgcttgaaaatgtgaccgggacacaggtgaccagcagttcactcctgctcaatggaaagcaaatccatgtggcctactggaaggaaagtgataaactgctgctgatcgggcttcctgcggaggaaatcgaacttccttccagcgcacacacccatggcgaaaggaactag

SEQ ID NO: 326049 - DNA, 1227 bp, Artificial Sequence
  derived and/or modified sequence
atggccagcgtggccagctgcgacagcagacccagcagcgacgagctgcccggcgaccccagcagccaggaggaggacgaggactacgacttcgaggacagagtgagcgacagcggcagctacagcagcgccagcagcgactacgacgacctggagcccgagtggctggacagcgtgcagaagaacggcgagctgttctacctggagctgagcgaggacgaggaggagagcctgctgcccgagacccccaccgtgaaccacgtgagattcagcgagaacgagatcatcatcgaggacgactacaaggagagaaagaagtacgagcccaagctgaagcagttcaccaagatcctgagaagaaagagactgctgcccaagagatgcaacaagaagaacagcaacgacaacggccccgtgagcatcctgaagcaccagagcaaccagaagaccggcgtgatcgtgcagcagagatacaaggacgtgaacgtgtacgtgaaccccaagaagctgaccgtgatcaaggccaaggagcagctgaagctgctggaggtgctggtgggcatcatccaccagaccaagtggagctggagaagaaccggcaagcagggcgacggcgagagactggtggtgcacggcctgctgcccggcggcagcgccatgaagagcggccaggtgctgatcggcgacgtgctggtggccgtgaacgacgtggacgtgaccaccgagaacatcgagagagtgctgagctgcatccccggccccatgcaggtgaagctgaccttcgagaacgcctacgacgtgaagagagagaccagccaccccagacagaagaagacccagagcaacaccagcgacctggtgaagctgctgtggggcgaggaggtggagggcatccagcagagcggcctgaacaccccccacatcatcatgtacctgaccctgcagctggacagcgagaccagcaaggaggagcaggagatcctgtaccactaccccatgagcgaggccagccagaagctgaagagcgtgagaggcatcttcctgaccctgtgcgacatgctggagaacgtgaccggcacccaggtgaccagcagcagcctgctgctgaacggcaagcagatccacgtggcctactggaaggagagcgacaagctgctgctgatcggcctgcccgccgaggagatcgagctgcccagcagcgcccacacccacggcgagagaaactag

SEQ ID NO: 326050 - DNA, 83 bp, Artificial Sequence
  derived and/or modified sequence
gaatggaatcgaatggaatgaacatcaaacggaaaaaaacggaattatcgaatggaatcaaagagaatcatcgaatggacccg

SEQ ID NO: 326051 - protein, 189 aa, Artificial Sequence
  derived and/or modified sequence
MPQTVILPGPAPWGFRLSGGIDFNQPLVITRITPGSKAAAANLCPGDVILAIDGFGTESMTHADAQDRIKAAAHQLCLKIDRGETHLWSPQVSEDGKAHPFKINLESEPQEFKPIGTAHNRRAQPFVAAANIDDKRQVVSASYNSPIGLYSTSNIQDALHGQLRGLIPSSPQKTGTTLNTSIIFGPNLS

SEQ ID NO: 326052 - DNA, 570 bp, Artificial Sequence
  derived and/or modified sequence
atgccccaaacagtgattctgccaggccctgccccatggggattccgtctgagtggcgggattgacttcaatcaaccacttgtcattacccgtattacacctggaagcaaggcagctgccgccaacttatgtccaggagacgtgatcttggccatcgatgggttcggaaccgaatctatgacccatgctgacgcacaggatcgcattaaggctgctgctcaccagttgtgtctgaagattgatcggggcgaaacacatctgtggagcccccaagtgtctgaggatggcaaggcccaccctttcaagattaatctagagtcagaaccacaggaatttaaaccaataggaaccgctcataatcgccgggcccagcccttcgttgctgccgccaatattgacgacaagcggcaggtcgttagcgcaagttataactcgccgatcggtctttatagcacctccaacattcaggacgcattgcacgggcaactgcgaggactgatcccgagtagcccgcagaaaactggcactaccctcaacacctccattatttttggccccaatcttagctag

SEQ ID NO: 326053 - DNA, 570 bp, Artificial Sequence
  derived and/or modified sequence
atgccccagaccgtcatcctgcccggccctgccccctggggcttccggctgagcggcggcatcgacttcaaccagcccctggtgatcacccgcatcaccccaggcagcaaggctgctgctgccaacctgtgccctggagatgtgatcctggccattgatggctttggaacagagagcatgacccatgctgatgcccaggaccgcatcaaggccgccgcccaccagctgtgcctgaagattgacagaggagagacccacctgtggagcccccaggtgtctgaagatggcaaggcccaccccttcaagatcaacctggagagcgagccccaggagttcaagcccatcggcacagcccacaacagaagagcccagccctttgtggccgccgccaacattgatgacaagaggcaggtggtgtctgccagctacaacagccccatcggcctgtacagcaccagcaacatccaggatgccctgcacggccagctgcggggcctcatccccagcagcccccagaagacaggcaccaccctgaacaccagcatcatcttcggccccaacctgtcctag

SEQ ID NO: 326054 - DNA, 570 bp, Artificial Sequence
  derived and/or modified sequence
atgccccagaccgtgatcctgcccggccccgccccctggggcttccgtctgagcggaggtatcgacttcaaccagccactagttatcacccgcatcactcccgggtctaaggctgccgcagcaaacttgtgtccaggagacgtcatcctggctatcgatgggtttggtaccgagtcaatgacacacgctgacgcacaggataggatcaaggccgcagctcaccagctgtgcctgaaaatcgatagaggcgagactcatctgtggtcccctcaagtttcggaggatggtaaggctcaccccttcaagattaatctggaaagtgagccacaggagtttaagccaattggtaccgctcacaaccggcgggcacagccattcgtggccgccgcgaacatagacgacaagcggcaggtagtgagcgcctcatacaatagccccattgggttatatagcacttctaacatccaggatgcgctccacggccagctacgcggattgatccccagtagccctcagaaaaccggcaccaccctgaataccagcattattttcggtcctaacctgagctag

SEQ ID NO: 326055 - DNA, 570 bp, Artificial Sequence
  derived and/or modified sequence
atgccccagaccgtcattctgcccggaccagccccttggggcttccgcctgtcagggggtatcgatttcaatcaacccctggttataacccgcattacacccggatcaaaggccgcagcagccaatctctgtccaggagatgtaattttagcaatagatggtttcggcacagaatccatgacacacgccgatgcacaagacagaattaaagccgcagcgcaccagctctgcctgaaaattgatcgaggagagacacacttgtggtcaccacaagtatccgaggatggtaaggcccatccctttaaaattaacttagagtcggagccacaagagttcaagccaataggaactgctcataacagacgcgctcagcccttcgtggcagcagctaatattgacgataagcgtcaggtagtgtcggcctcctataattccccgatcggcctctattccacctccaatattcaggacgctctgcacggacaactgcggggacttataccctcaagtcctcagaagacaggaaccaccctgaacacatctattattttcggacctaatctgtcttag

SEQ ID NO: 326056 - DNA, 570 bp, Artificial Sequence
  derived and/or modified sequence
atgccccagaccgtgatcctgcccggccccgccccctggggcttcagactgagcggcggcatcgacttcaaccagcccctggtgatcaccagaatcacccccggcagcaaggccgccgccgccaacctgtgccccggcgacgtgatcctggccatcgacggcttcggcaccgagagcatgacccacgccgacgcccaggacagaatcaaggccgccgcccaccagctgtgcctgaagatcgacagaggcgagacccacctgtggagcccccaggtgagcgaggacggcaaggcccaccccttcaagatcaacctggagagcgagccccaggagttcaagcccatcggcaccgcccacaacagaagagcccagcccttcgtggccgccgccaacatcgacgacaagagacaggtggtgagcgccagctacaacagccccatcggcctgtacagcaccagcaacatccaggacgccctgcacggccagctgagaggcctgatccccagcagcccccagaagaccggcaccaccctgaacaccagcatcatcttcggccccaacctgagctag

SEQ ID NO: 326057 - protein, 320 aa, Artificial Sequence
  derived and/or modified sequence
MPKKKTGARKKAENRREREKQLRASRSTIDLAKHPCNASMECDKCQRRQKNRAFCYFCNSVQKLPICAQCGKTKCMMKSSDCVIKHAGVYSTGLAMVGAICDFCEAWVCHGRKCLSTHACACPLTDAECVECERGVWDHGGRIFSCSFCHNFLCEDDQFEHQASCQVLEAETFKCVSCNRLGQHSCLRCKACFCDDHTRSKVFKQEKGKQPPCPKCGHETQETKDLSMSTRSLKFGRQTGGEEGDGASGYDAYWKNLSSDKYGDTSYHDEEEDEYEAEDDEEEEDEGRKDSDTESSDLFTNLNLGRTYASGYAHYEEQEN

SEQ ID NO: 326058 - protein, 140 aa, Artificial Sequence
  derived and/or modified sequence
MPKKKTGARKKAENRREREKQLRASRSTIDLAKHPCNASMECDKCQRRQKNRAFCYFCNSVQKLPICAQCGKTKCMMKSSDCVIKHAGVYSTGLAMVGAICDFCEAWVCHGRKCLSTHACACPLTDAECVECERGVWDHG

SEQ ID NO: 326059 - protein, 153 aa, Artificial Sequence
  derived and/or modified sequence
MPKKKTGARKKAENRREREKQLRASRSTIDLAKHPCNASMECDKCQRRQKNRAFCYFCNSVQKLPICAQCGKTKCMMKSSDCVIKHAGVYSTGLAMVGAICDFCEAWVCHGRKCLSTHACACPLTDAECVECERGVWDHGGRIFSCSFCHNFL

SEQ ID NO: 326060 - protein, 229 aa, Artificial Sequence
  derived and/or modified sequence
MPKKKTGARKKAENRREREKQLRASRSTIDLAKHPCNASMECDKCQRRQKNRAFCYFCNSVQKLPICAQCGKTKCMMKSSDCVIKHAGVYSTGLAMVGAICDFCEAWVCHGRKCLSTHACACPLTDAECVECERGVWDHGGRIFSCSFCHNFLCEDDQFEHQASCQVLEAETFKCVSCNRLGQHSCLRCKACFCDDHTRSKVFKQEKGKQPPCPKCGHETQETKDLSMS

SEQ ID NO: 326061 - DNA, 963 bp, Artificial Sequence
  derived and/or modified sequence
atgcccaagaagaagaccggcgccagaaagaaggccgagaacagaagagagagagagaagcagctgagagccagcagaagcaccatcgacctggccaagcacccctgcaacgccagcatggagtgcgacaagtgccagagaagacagaagaacagagccttctgctacttctgcaacagcgtgcagaagctgcccatctgcgcccagtgcggcaagaccaagtgcatgatgaagagcagcgactgcgtgatcaagcacgccggcgtgtacagcaccggcctggccatggtgggcgccatctgcgacttctgcgaggcctgggtgtgccacggcagaaagtgcctgagcacccacgcctgcgcctgccccctgaccgacgccgagtgcgtggagtgcgagagaggcgtgtgggaccacggcggcagaatcttcagctgcagcttctgccacaacttcctgtgcgaggacgaccagttcgagcaccaggccagctgccaggtgctggaggccgagaccttcaagtgcgtgagctgcaacagactgggccagcacagctgcctgagatgcaaggcctgcttctgcgacgaccacaccagaagcaaggtgttcaagcaggagaagggcaagcagcccccctgccccaagtgcggccacgagacccaggagaccaaggacctgagcatgagcaccagaagcctgaagttcggcagacagaccggcggcgaggagggcgacggcgccagcggctacgacgcctactggaagaacctgagcagcgacaagtacggcgacaccagctaccacgacgaggaggaggacgagtacgaggccgaggacgacgaggaggaggaggacgagggcagaaaggacagcgacaccgagagcagcgacctgttcaccaacctgaacctgggcagaacctacgccagcggctacgcccactacgaggagcaggagaactag

SEQ ID NO: 326062 - DNA, 423 bp, Artificial Sequence
  derived and/or modified sequence
atgcccaagaagaagaccggcgccagaaagaaggccgagaacagaagagagagagagaagcagctgagagccagcagaagcaccatcgacctggccaagcacccctgcaacgccagcatggagtgcgacaagtgccagagaagacagaagaacagagccttctgctacttctgcaacagcgtgcagaagctgcccatctgcgcccagtgcggcaagaccaagtgcatgatgaagagcagcgactgcgtgatcaagcacgccggcgtgtacagcaccggcctggccatggtgggcgccatctgcgacttctgcgaggcctgggtgtgccacggcagaaagtgcctgagcacccacgcctgcgcctgccccctgaccgacgccgagtgcgtggagtgcgagagaggcgtgtgggaccacggctag

SEQ ID NO: 326063 - DNA, 462 bp, Artificial Sequence
  derived and/or modified sequence
atgcccaagaagaagaccggcgccagaaagaaggccgagaacagaagagagagagagaagcagctgagagccagcagaagcaccatcgacctggccaagcacccctgcaacgccagcatggagtgcgacaagtgccagagaagacagaagaacagagccttctgctacttctgcaacagcgtgcagaagctgcccatctgcgcccagtgcggcaagaccaagtgcatgatgaagagcagcgactgcgtgatcaagcacgccggcgtgtacagcaccggcctggccatggtgggcgccatctgcgacttctgcgaggcctgggtgtgccacggcagaaagtgcctgagcacccacgcctgcgcctgccccctgaccgacgccgagtgcgtggagtgcgagagaggcgtgtgggaccacggcggcagaatcttcagctgcagcttctgccacaacttcctgtag

SEQ ID NO: 326064 - DNA, 690 bp, Artificial Sequence
  derived and/or modified sequence
atgcccaagaagaagaccggcgccagaaagaaggccgagaacagaagagagagagagaagcagctgagagccagcagaagcaccatcgacctggccaagcacccctgcaacgccagcatggagtgcgacaagtgccagagaagacagaagaacagagccttctgctacttctgcaacagcgtgcagaagctgcccatctgcgcccagtgcggcaagaccaagtgcatgatgaagagcagcgactgcgtgatcaagcacgccggcgtgtacagcaccggcctggccatggtgggcgccatctgcgacttctgcgaggcctgggtgtgccacggcagaaagtgcctgagcacccacgcctgcgcctgccccctgaccgacgccgagtgcgtggagtgcgagagaggcgtgtgggaccacggcggcagaatcttcagctgcagcttctgccacaacttcctgtgcgaggacgaccagttcgagcaccaggccagctgccaggtgctggaggccgagaccttcaagtgcgtgagctgcaacagactgggccagcacagctgcctgagatgcaaggcctgcttctgcgacgaccacaccagaagcaaggtgttcaagcaggagaagggcaagcagcccccctgccccaagtgcggccacgagacccaggagaccaaggacctgagcatgagctag

SEQ ID NO: 326065 - DNA, 963 bp, Artificial Sequence
  derived and/or modified sequence
atgcctaagaaaaaaacaggcgctcggaagaaggccgaaaatcggagggagagagagaagcagctccgagccagtcgcagcactatcgatctcgccaagcatccctgcaacgcaagcatggagtgtgataaatgtcaaaggagacaaaagaatagagctttttgttacttctgtaattctgtccagaagttacctatttgcgctcagtgcggtaaaactaagtgtatgatgaaatccagcgactgcgtcatcaaacatgctggcgtatactctacaggactggcaatggtcggggcgatatgcgacttctgtgaagcctgggtctgtcacgggaggaaatgcctctccacccacgcgtgcgcatgtcccctgacagatgctgagtgcgtggagtgtgaaagaggcgtgtgggaccatggaggacgaatctttagctgctctttctgccataacttcctctgcgaggacgaccagtttgagcatcaggccagctgtcaagtgttggaggccgaaacgtttaagtgtgtgagctgtaacaggctgggacagcattcttgccttcggtgcaaggcctgcttctgtgacgatcacacaaggtccaaggtatttaaacaagaaaagggtaaacaaccaccttgcccaaagtgcggtcatgagacacaagagacaaaagatttaagcatgtccaccaggagcctcaaattcggaaggcaaactggcggcgaggagggtgatggtgcctccggctacgatgcctattggaaaaacctctcctccgacaaatacggtgacaccagctatcacgacgaagaagaggacgagtatgaggcggaagatgacgaggaagaagaggatgagggtagaaaggactctgatacagagtctagcgacctcttcacaaacctgaacctgggccgcacctacgcttccgggtatgcccactacgaagaacaggaaaattag

SEQ ID NO: 326066 - DNA, 423 bp, Artificial Sequence
  derived and/or modified sequence
atgccaaaaaagaaaacaggtgcaagaaaaaaggcagaaaaccgaagggagcgggagaagcagctccgtgcgagtaggagtacaatcgatctggccaaacacccatgcaatgcatccatggagtgtgataaatgccagcggaggcagaaaaaccgcgccttctgctacttttgtaattcagtgcagaagctgcccatatgcgctcaatgcggcaagaccaagtgtatgatgaaatcgtcggattgtgttattaaacacgccggagtgtactctaccgggctggcgatggtcggcgcgatttgcgatttttgtgaggcctgggtgtgtcatggacgaaaatgcctctcaactcacgcttgtgcttgtcctttaaccgatgccgaatgcgtggaatgcgagcggggtgtttgggatcatgggtag

SEQ ID NO: 326067 - DNA, 462 bp, Artificial Sequence
  derived and/or modified sequence
atgcccaagaagaagaccggggccagaaaaaaagccgaaaataggagggagagagaaaagcagctgagagccagcagatcaaccattgatctggctaagcacccctgcaacgccagtatggagtgtgataaatgccaaaggcgacaaaaaaacagggcattttgttacttttgcaatagcgtgcagaaactgccaatctgcgcgcagtgtggcaaaaccaagtgtatgatgaagtcctcggactgcgtcataaagcacgccggagtgtatagcactgggctggcaatggtgggggcgatttgcgacttttgcgaggcatgggtgtgtcacggtaggaagtgtctgagcactcatgcctgcgcatgtcctctgacagatgcagagtgcgtcgaatgtgagcgcggagtgtgggatcatgggggcaggatcttttcctgcagcttttgccataactttctgtag

SEQ ID NO: 326068 - DNA, 690 bp, Artificial Sequence
  derived and/or modified sequence
atgcctaagaaaaagactggcgcccggaaaaaggcggagaatagacgagagcgcgagaagcagctaagagcatccagatcaacaatagaccttgcaaagcacccatgcaacgcatccatggagtgcgacaagtgccaacgacgacaaaagaacagggccttctgttacttttgcaactctgtgcaaaagctccccatctgtgcacagtgcgggaaaaccaaatgcatgatgaaaagtagtgattgcgtgatcaagcatgcgggtgtgtacagtaccggactggctatggtgggtgctatatgtgatttctgcgaagcctgggtatgtcatggtagaaagtgcctgagcacccacgcctgcgcctgccctttgacagatgctgagtgtgtggaatgcgagcggggcgtgtgggatcacggtggcaggatcttctcatgttccttctgtcataacttcctgtgcgaggatgaccagttcgaacaccaagcgtcctgccaggtgctggaagccgagacctttaagtgtgtctcctgtaacaggttaggacaacactcttgcttacgctgtaaggcatgcttttgcgacgaccacactaggagcaaagtgtttaagcaggagaaaggtaagcagccaccgtgtccaaagtgtggccacgagacccaggagaccaaggatctctcaatgtcctag

SEQ ID NO: 326069 - DNA, 963 bp, Artificial Sequence
  derived and/or modified sequence
atgcccaagaagaagacaggagccaggaagaaggcagaaaatagaagagagcgggagaagcagctgcgggccagccgcagcaccatcgacctggccaagcacccctgcaatgcctccatggagtgtgacaagtgccagaggcggcagaagaacagagccttctgctacttctgcaacagcgtgcagaagctgcccatctgtgcccagtgtgggaagaccaagtgcatgatgaagagcagtgactgtgtgatcaagcatgctggggtgtacagcacaggcctggccatggtgggcgccatctgtgacttctgtgaggcctgggtgtgccacggcaggaagtgcctgagcacccacgcctgtgcctgccccctgacagatgctgaatgtgtggagtgtgagcggggcgtgtgggaccatggaggccgcatcttcagctgcagcttctgccacaacttcctgtgtgaagatgaccagtttgagcaccaggccagctgccaggtgctggaggccgagaccttcaagtgtgtgtcctgcaaccggctgggccagcacagctgcctgcgctgcaaggcctgcttctgtgatgaccacaccaggagcaaggtgttcaagcaggagaagggcaagcagcccccctgccccaagtgtggccacgagacccaggagaccaaggacctgtccatgagcaccaggagcctgaagtttggccggcagacaggaggagaggagggagatggagccagcggctatgatgcctactggaagaacctgagcagtgacaagtacggggacaccagctaccatgatgaggaggaggatgaatatgaagcagaagatgatgaggaggaggaggatgagggcaggaaggacagcgacacagagagcagtgacctcttcaccaacctgaacctgggccgcacctacgccagcggctacgcccactatgaggagcaggagaactag

SEQ ID NO: 326070 - DNA, 423 bp, Artificial Sequence
  derived and/or modified sequence
atgcccaagaagaagacaggagccaggaagaaggcagaaaatagaagagagcgggagaagcagctgcgggccagccgcagcaccatcgacctggccaagcacccctgcaatgcctccatggagtgtgacaagtgccagaggcggcagaagaacagagccttctgctacttctgcaacagcgtgcagaagctgcccatctgtgcccagtgtgggaagaccaagtgcatgatgaagagcagtgactgtgtgatcaagcatgctggggtgtacagcacaggcctggccatggtgggcgccatctgtgacttctgtgaggcctgggtgtgccacggcaggaagtgcctgagcacccacgcctgtgcctgccccctgacagatgctgaatgtgtggagtgtgagcggggcgtgtgggaccatggatag

SEQ ID NO: 326071 - DNA, 462 bp, Artificial Sequence
  derived and/or modified sequence
atgcccaagaagaagacaggagccaggaagaaggcagaaaatagaagagagcgggagaagcagctgcgggccagccgcagcaccatcgacctggccaagcacccctgcaatgcctccatggagtgtgacaagtgccagaggcggcagaagaacagagccttctgctacttctgcaacagcgtgcagaagctgcccatctgtgcccagtgtgggaagaccaagtgcatgatgaagagcagtgactgtgtgatcaagcatgctggggtgtacagcacaggcctggccatggtgggcgccatctgtgacttctgtgaggcctgggtgtgccacggcaggaagtgcctgagcacccacgcctgtgcctgccccctgacagatgctgaatgtgtggagtgtgagcggggcgtgtgggaccatggaggccgcatcttcagctgcagcttctgccacaacttcctgtag

SEQ ID NO: 326072 - DNA, 690 bp, Artificial Sequence
  derived and/or modified sequence
atgcccaagaagaagacaggagccaggaagaaggcagaaaatagaagagagcgggagaagcagctgcgggccagccgcagcaccatcgacctggccaagcacccctgcaatgcctccatggagtgtgacaagtgccagaggcggcagaagaacagagccttctgctacttctgcaacagcgtgcagaagctgcccatctgtgcccagtgtgggaagaccaagtgcatgatgaagagcagtgactgtgtgatcaagcatgctggggtgtacagcacaggcctggccatggtgggcgccatctgtgacttctgtgaggcctgggtgtgccacggcaggaagtgcctgagcacccacgcctgtgcctgccccctgacagatgctgaatgtgtggagtgtgagcggggcgtgtgggaccatggaggccgcatcttcagctgcagcttctgccacaacttcctgtgtgaagatgaccagtttgagcaccaggccagctgccaggtgctggaggccgagaccttcaagtgtgtgtcctgcaaccggctgggccagcacagctgcctgcgctgcaaggcctgcttctgtgatgaccacaccaggagcaaggtgttcaagcaggagaagggcaagcagcccccctgccccaagtgtggccacgagacccaggagaccaaggacctgtccatgtcctag

SEQ ID NO: 326073 - DNA, 963 bp, Artificial Sequence
  derived and/or modified sequence
atgcccaagaagaagaccggcgcccggaagaaggccgagaaccggcgggaaagggagaagcagttacgcgcatcccgttcaaccatagatctggccaagcatccctgtaatgcctccatggagtgcgataaatgtcagcggaggcaaaaaaatagagctttctgttatttctgtaattctgtgcagaaattacctatttgtgcacaatgcgggaaaactaaatgcatgatgaaaagcagtgactgtgtcataaaacacgctggcgtttacagcactgggctcgcaatggtaggggccatctgtgacttctgcgaggcatgggtctgccacggaaggaagtgtctatcaactcatgcgtgcgcctgcccgctcaccgacgccgaatgcgtggagtgcgaacgaggagtgtgggatcatggaggccgtatcttttcttgctccttctgtcataactttctgtgcgaagacgaccagtttgagcatcaggccagctgtcaggtgctggaggctgagacatttaagtgtgtttcttgtaaccgactcggacagcacagctgcctcaggtgcaaggcatgcttttgcgacgatcatactcgatctaaggtattcaagcaagagaagggcaagcaacctccatgccctaaatgtggccacgagacccaggagaccaaggatctgtctatgagcacccggtccctgaagttcgggaggcagacaggaggggaggagggggacggggcctccggctacgacgcttactggaagaacctgagctcagacaagtatggggacacgtcttatcatgatgaggaggaggatgagtacgaggctgaagatgacgaagaagaggaagacgagggccgtaaagattccgacactgagagtagtgacctgtttacaaatctgaacttaggtagaacatacgcttctggctatgctcactatgaagagcaagagaactag

SEQ ID NO: 326074 - DNA, 423 bp, Artificial Sequence
  derived and/or modified sequence
atgcccaagaagaagaccggcgcccggaagaaggccgagaaccggagagagagagagaagcagctgcgtgcaagcaggtcaactattgacctggcgaaacatccttgtaacgcgagtatggagtgcgacaagtgccagaggcgccagaagaaccgagcattctgctacttttgcaactcagtgcagaaactgccaatctgcgcccagtgtggaaaaacaaaatgcatgatgaagagcagcgattgcgtcatcaagcacgccggcgtctactccaccggtctcgccatggtgggggcaatttgtgacttttgcgaggcctgggtgtgccacggtcggaagtgtctttccactcatgcctgcgcttgtcctctgacagatgccgaatgcgtggaatgcgagcggggagtctgggaccacggctag

SEQ ID NO: 326075 - DNA, 462 bp, Artificial Sequence
  derived and/or modified sequence
atgcccaagaagaagaccggcgcccggaagaaggccgagaaccggcgcgaaagagaaaagcagctccgcgccagccgctccaccattgacctcgccaagcacccttgcaatgcttccatggaatgtgacaagtgtcagcggcggcaaaagaatagagccttctgctacttctgcaattccgtgcagaagcttcccatctgcgcccagtgcggcaagactaaatgtatgatgaaaagcagtgattgtgtgatcaagcacgccggcgtgtatagcactggcctggcaatggtgggagcgatatgtgacttttgcgaggcctgggtgtgccatggtcgaaagtgcctatccactcacgcttgcgcttgtccactcacagatgcagagtgtgttgaatgcgaacggggagtatgggatcacgggggccggatcttcagttgttctttctgtcacaatttcctgtag

SEQ ID NO: 326076 - DNA, 690 bp, Artificial Sequence
  derived and/or modified sequence
atgcccaagaagaagaccggcgcccggaagaaggccgagaaccggcgggagcgagaaaaacagctgcgcgcttcaagaagtacaatcgacctggccaaacacccttgcaacgcttcaatggaatgcgacaaatgccagcggaggcaaaaaaatcgggctttctgctacttctgtaactccgtacagaaactccctatttgtgcacaatgtggcaaaacaaagtgtatgatgaagtctagtgactgcgtcattaagcatgccggcgtgtactcgactggccttgccatggtcggcgccatctgcgatttttgcgaagcctgggtctgtcacggaagaaagtgcctgagcacgcacgcttgtgcatgtcctctgaccgacgccgagtgtgtggagtgtgagagaggcgtatgggatcacgggggcagaatcttctcgtgtagtttttgccacaacttcctgtgcgaggatgaccagttcgaacaccaggcatcctgccaggttctagaggccgaaacttttaaatgtgtgagctgtaatagattgggtcagcacagttgtctccggtgcaaagcctgtttttgtgatgatcacactcgttccaaggtcttcaagcaagagaaaggtaagcagccgccatgtccgaaatgtgggcatgaaacccaggagaccaaggatctgagtatgtcctag

SEQ ID NO: 326077 - DNA, 963 bp, Artificial Sequence
  derived and/or modified sequence
atgcctaagaagaaaactggcgctcggaaaaaagctgaaaataggagagaaagggaaaagcaactcagagcctcacggtccacaattgacctagccaaacacccgtgcaacgcttccatggagtgtgacaaatgccaacgcagacagaaaaatcgcgctttttgctacttttgcaatagtgttcaaaagctgcctatttgtgcgcagtgtggaaaaactaagtgcatgatgaaatcatctgactgtgtgattaagcacgccggagtttatagcaccggattggctatggtcggcgcaatatgtgatttctgcgaggcctgggtctgccacggtcggaagtgcttatcaactcatgcatgcgcgtgtcccctgactgatgcagagtgtgttgagtgcgaacgtggagtctgggaccacggaggcaggatttttagttgctcattctgccacaactttctgtgcgaggacgaccagttcgagcaccaggctagctgccaggtgctggaggctgaaacttttaagtgcgtatcgtgtaataggctgggacaacattcctgtctgaggtgcaaggcctgtttttgcgatgaccatacgcgttcgaaggtgtttaagcaggagaaaggtaagcaacccccttgtcctaaatgtggccacgagactcaggagactaaagatctgagcatgagcacgcgttcgctgaagttcggtagacagaccggcggagaggagggcgatggcgcttcaggatatgatgcgtactggaagaatctctcctccgataaatacggcgatacatcctatcatgatgaggaggaggacgaatacgaggccgaggacgacgaagaagaggaggatgaaggcagaaaggattccgatacggaaagctccgacctgttcacaaacctgaacctgggacgcacttacgctagcggttatgcccattatgaggagcaagagaactag

SEQ ID NO: 326078 - DNA, 423 bp, Artificial Sequence
  derived and/or modified sequence
atgcctaaaaagaagaccggagctcgcaagaaggcggagaatcgcagggaacgcgaaaaacagctgcgcgcatcgcggagcactattgatctggcgaagcacccctgcaatgcatccatggaatgcgataagtgtcagcgccgacagaagaatagagcattttgctacttctgtaattccgtgcagaaacttcccatctgcgcccagtgtggcaagaccaaatgtatgatgaagtcttccgattgcgtcatcaagcacgcaggcgtttactctaccggcttggcaatggtgggagccatttgcgacttttgtgaggcctgggtctgtcatggaagaaaatgcctcagcactcacgcctgtgcatgcccccttacagacgccgagtgcgttgagtgcgagcgcggtgtgtgggatcatggatag

SEQ ID NO: 326079 - DNA, 462 bp, Artificial Sequence
  derived and/or modified sequence
atgccaaaaaagaaaaccggagccaggaagaaagcagaaaatagaagggagcgcgagaagcagctgagagctagcagaagtacaatagacttggccaagcacccgtgtaatgcttccatggagtgtgataagtgccaaagaaggcagaaaaatcgcgcattctgctatttttgtaattctgttcagaagctgccgatttgcgctcaatgtggtaaaacaaagtgcatgatgaagagcagcgactgcgtcatcaagcacgctggcgtgtacagcactggcctggccatggtcggcgcaatctgcgacttttgcgaggcatgggtttgtcatggaagaaagtgtctgagcacccatgcttgcgcatgccctctgaccgatgctgaatgcgtggagtgtgaaagaggggtatgggaccacggcggaagaatcttcagttgctccttctgtcacaattttttgtag

SEQ ID NO: 326080 - DNA, 690 bp, Artificial Sequence
  derived and/or modified sequence
atgccaaagaagaaaaccggagccagaaaaaaggccgagaacaggcgcgagcgggaaaagcagttaagggctagtaggagcacaattgaccttgctaagcatccttgcaatgcttcaatggagtgcgacaagtgccagaggcgccagaagaaccgcgcattctgctatttttgcaacagcgttcagaagttacccatatgcgcccagtgcggtaaaactaagtgcatgatgaaaagctcggactgcgtgatcaaacacgcaggggtgtactctaccgggcttgccatggtgggagccatttgtgatttttgtgaggcatgggtgtgtcacggacggaagtgtcttagtacccacgcgtgcgcatgtcccttaaccgacgcagagtgtgtcgagtgtgaacggggtgtgtgggatcatggtggaagaatcttcagctgctccttttgccataacttcttgtgcgaagatgatcagttcgaacatcaggccagttgccaagtcttggaggccgaaaccttcaagtgcgtgagctgcaatcgccttggccagcattcatgtctgcgttgtaaggcatgcttctgcgacgaccacacacgatctaaggtgttcaaacaggaaaagggtaagcagccaccttgtcccaagtgcggccacgaaacacaagagactaaggatctcagcatgagctag

SEQ ID NO: 326081 - DNA, 1899 bp, Artificial Sequence
  derived and/or modified sequence
aaggcgctgctgtcgtaaaaggacgtccggtccgtctcctagtgtccggaatcggctgtcagcctccctggctgttagtaccttctttcccggagtcctggtccacgagttggatttactgctgtcgcgggtgggcctcacgccattccctgtccctcggccccctgagtgagtccggtctcccggcgaaagtgagcgaggtttgcccggagcgcgcacgaggggaaaatgcctaaaaaaaagactggtgcgaggaagaaggctgagaaccgccgagaacgtgaaaaacaactaagagcatcaagaagcactatagatttagctaaacatccatgtaatgcctcaatggaatgtgacaagtgtcagaggcggcagaagaatagagcattttgctacttttgtaattctgtacagaagttaccaatttgtgcacagtgtgggaaaacaaagtgcatgatgaagtcttcagactgtgtcataaagcatgctggtgtatacagtactggccttgcaatggtgggtgcaatatgtgacttctgtgaagcttgggtttgccatggtaggaaatgtctcagtacacatgcttgtgcctgccctcttaccgatgctgagtgtgttgaatgtgaacgaggcgtgtgggaccatggaggcagaatattcagttgttctttttgccataactttctctgtgaagatgatcaatttgagcatcaagccagctgccaggttttagaggcagaaacatttaaatgtgtttcatgcaatcggcttggtcagcactcatgtctccgttgtaaggcttgtttctgtgatgatcatacaaggagcaaagtgtttaagcaagaaaaaggaaaacagcctccttgtcctaaatgtgggcatgaaactcaggagactaaggaccttagcatgtcaacacgctccctgaaatttggcaggcagactggaggtgaagagggagatggagcttctgggtatgatgcttattggaagaacctttcatctgataagtatggtgataccagctaccacgatgaggaggaggatgagtatgaagcagaggatgatgaagaggaagaagatgaaggcagaaaggattcagatactgagtcatcagatttgtttactaatttgaatttaggaaggacctatgctagtggctatgctcactatgaggaacaagagaactaggggagctgctctggtggccgtgtgtgagaggagcaggagtgagtgtgtgtgcttgatgaattgtgtgtggttgttcaaaagtaccttagccacttagccttgtgcagaagactagttacacttaatgggccaagcaatagggtgtagcgtttttatagaactgataatcaggcttatggcataagaaaaatgagtttcaaatttaagatgtttattgatcgaagcaattgaagtatcatggattggattgttactgatttcagtaaagtatgttttgccaattagatacatatatacaagataaaggaataggatggtaatatatttgtttgaaattaaattactgtttttattaaaaaatactgcttcattgggctgattttgtaaaatgtaatgagtaaaatgaattactgtatttttccttttatgtccacagaatgagagtcatatgttgttatattctaaattttcattaaatattcatgtcaccttgagttgtcatgataagtatgttttagtatttgacttattcttctctttcttcacaatgtatgtcctcagtggtacctattattgatgccttaaatgtattgataaggtgactagttagccatttttcagagatacagtatcagaaatagtattattacagaagctttacccaggacattttatttctctttgaataaatctattatttcacttaaa

SEQ ID NO: 326082 - DNA, 573 bp, Artificial Sequence
  derived and/or modified sequence
gtccggaatcggctgtcagcctccctggctgttagtaccttctttcccggagtcctggtccacgagttggatttactgctgtcgcgggtgggcctcacgccattccctgtccctcggccccctgagtgagtccggtctcccggcgaaagggaaaatgcctaaaaaaaagactggtgcgaggaagaaggctgagaaccgccgagaacgtgaaaaacaactaagagcatcaagaagcactatagatttagctaaacatccatgtaatgcctcaatggaatgtgacaagtgtcagaggcggcagaagaatagagcattttgctacttttgtaattctgtacagaagttaccaatttgtgcacagtgtgggaaaacaaagtgcatgatgaagtcttcagactgtgtcataaagcatgctggtgtatacagtactggccttgcaatggtgggtgcaatatgtgacttctgtgaagcttgggtttgccatggtaggaaatgtctcagtacacatgcttgtgcctgccctcttaccgatgctgagtgtgttgaatgtgaacgaggcgtgtgggaccatgg

SEQ ID NO: 326083 - DNA, 552 bp, Artificial Sequence
  derived and/or modified sequence
gtccggaatcggctgtcagcctccctggctgttagtaccttctttcccggagtcctggtccacgagttggatttactgctgtcgcgggggaaaatgcctaaaaaaaagactggtgcgaggaagaaggctgagaaccgccgagaacgtgaaaaacaactaagagcatcaagaagcactatagatttagctaaacatccatgtaatgcctcaatggaatgtgacaagtgtcagaggcggcagaagaatagagcattttgctacttttgtaattctgtacagaagttaccaatttgtgcacagtgtgggaaaacaaagtgcatgatgaagtcttcagactgtgtcataaagcatgctggtgtatacagtactggccttgcaatggtgggtgcaatatgtgacttctgtgaagcttgggtttgccatggtaggaaatgtctcagtacacatgcttgtgcctgccctcttaccgatgctgagtgtgttgaatgtgaacgaggcgtgtgggaccatggaggcagaatattcagttgttctttttgccataactttctc

SEQ ID NO: 326084 - DNA, 838 bp, Artificial Sequence
  derived and/or modified sequence
gtccggtccgtctcctagtgtccggaatcggctgtcagcctccctggctgttagtaccttctttcccggagtcctggtccacgagttggatttactgctgtcgcgggtgggcctcacgccattccctgtccctcggccccctgagggaaaatgcctaaaaaaaagactggtgcgaggaagaaggctgagaaccgccgagaacgtgaaaaacaactaagagcatcaagaagcactatagatttagctaaacatccatgtaatgcctcaatggaatgtgacaagtgtcagaggcggcagaagaatagagcattttgctacttttgtaattctgtacagaagttaccaatttgtgcacagtgtgggaaaacaaagtgcatgatgaagtcttcagactgtgtcataaagcatgctggtgtatacagtactggccttgcaatggtgggtgcaatatgtgacttctgtgaagcttgggtttgccatggtaggaaatgtctcagtacacatgcttgtgcctgccctcttaccgatgctgagtgtgttgaatgtgaacgaggcgtgtgggaccatggaggcagaatattcagttgttctttttgccataactttctctgtgaagatgatcaatttgagcatcaagccagctgccaggttttagaggcagaaacatttaaatgtgtttcatgcaatcggcttggtcagcactcatgtctccgttgtaaggcttgtttctgtgatgatcatacaaggagcaaagtgtttaagcaagaaaaaggaaaacagcctccttgtcctaaatgtgggcatgaaactcaggagactaaggaccttagcatgtcaa

SEQ ID NO: 326085 - protein, 119 aa, Artificial Sequence
  derived and/or modified sequence
MRSAEPSVFTRTTAEGVARVRKSKGKFAFLLESTMNEYIEQRKPCDTMKVGGNLDSKGYGVATPKGSSLRNAVNLAVLKLNEQGLLDKLKNKWWYDKGECGSGGGDSKNSCKPCRFETQ

SEQ ID NO: 326086 - protein, 98 aa, Artificial Sequence
  derived and/or modified sequence
MNEYIEQRKPCDTMKVGGNLDSKGYGIATPKGSSLSGVTFKTLICLLWINAVNLAVLKLNEQGLLDKLKNKWWYDKGECGSGGGDSKNPSKSCSIETQ

SEQ ID NO: 326087 - protein, 57 aa, Artificial Sequence
  derived and/or modified sequence
MVQFSTSEFRLTPHIDNLEVANSFAVTNAFCSQFSRGVYAIFGFYDKKSVNTITSFC

SEQ ID NO: 326088 - protein, 48 aa, Artificial Sequence
  derived and/or modified sequence
MQKIMHISVLLSPVLWGLIFGVSSNSIQIGGLFPRGADQEYSAFRVGM

SEQ ID NO: 326089 - DNA, 360 bp, Artificial Sequence
  derived and/or modified sequence
atgcgttcagcagagccatccgtcttcacacgaaccaccgcggagggcgtggccagagttaggaaatcgaagggaaaattcgcctttctcttggagtctactatgaacgaatatattgaacagcggaagccctgtgatacaatgaaggtgggtggtaacctggatagtaaaggttatggggtggcaacccccaaggggagcagcctgcggaatgcagtaaacctggctgttctgaagcttaacgagcagggccttctggacaaactgaagaacaagtggtggtacgataagggtgagtgtggctctggaggcggggacagtaagaatagctgcaaaccttgtcggtttgaaacacaatag

SEQ ID NO: 326090 - DNA, 2193 bp, Artificial Sequence
  derived and/or modified sequence
atggtgcagttttccacctccgagttccggttgaccccgcacatcgataatttagaagtcgccaactcattcgcagtcaccaacgccttctgtagtcaattcagtaggggggtctacgcaattttcggcttttacgataagaagtctgtcaacactattaccagcttttgcgggactctccacgtgtcattcataacccccagctttcccacagatgggacacatccatttgttatccagatgaggcccgatctcaagggtgctctcttaagcctgatcgagtactaccagtgggacaagtttgcatatctgtatgacagtgacagagggctctcgacgctgcaggccgtgttagattccgcagcagaaaagaagtggcaagtaaccgccatcaacgtgggtaatatcaacaatgacaaaaaggacgagatgtataggagcctcttccaggatctggaactgaaaaaagaacggagagtgatcctggattgcgagcgcgacaaagtcaatgatatcgttgatcaagttatcaccattggcaagcatgtgaaaggctaccattatattattgccaacttgggcttcaccgacggagatctgttgaaaatccaattcggcggcgctaatgtctccggattccagatagtcgattatgatgattcactggtgtccaagttcatcgagcgttggtccaccctggaagagaaagagtaccccggagctcacaccaccactatcaagtacacttccgcactaacctatgatgcagtccaagtgatgaccgaggctttcagaaatcttagaaaacagagaatcgagataagccgccgcgggaacgcaggagactgcttagccaatccagctgtgccctggggacaaggcgtcgagatcgaacgcgctttaaagcaggttcaggtggagggcctttcagggaacatcaaattcgaccagaatgggaaaaggatcaactataccatcaacattatggaactcaagaccaacggccctagaaaaatcggctactggagcgaagtcgacaagatggttgtgaccctgaccgaattgcccagcggcaacgacactagtggcttagagaacaagaccgtagtggtcactactatcttggaatctccttatgtaatgatgaaaaaaaaccacgagatgctggaggggaacgagaggtacgagggctattgcgtagacctcgcagctgaaatagcgaagcattgcggattcaagtacaaactgacgattgttggtgacggcaaatacggggccagggatgcagataccaagatttggaatggcatggtgggcgagcttgtgtacgggaaagccgacatcgccattgctcctctgacgattacactggtcagagaggaagtgatcgatttctctaagccttttatgtcactcggcatctctataatgatcaagaagcctcagaagtctaagcctggagtgttcagtttcctagacccgttagcatatgagatctggatgtgcatcgtattcgcttacatcggagtctccgtagtgctgtttctggtctctcgattctctccttatgagtggcataccgaagaatttgaggacggtagagaaacacagtcttcagagagcactaatgaatttgggatttttaatagcctgtggttctctttaggtgccttcatgcagcaggggtgcgatataagtccaaggtcattgtcaggacgaatagtgggcggagtgtggtggttcttcaccctaatcattattagctcatacactgcaaacctcgcagcattccttactgtggaacggatggtgtcacctattgaatccgcggaagacctgtctaaacagactgagatcgcctacggcacactggacagcggcagtactaaggagttttttcgcaggagcaagatcgccgtgttcgataaaatgtggacctatatgcgaagcgcagaaccctcagtattcgtgcgcaccaccgcagagggagtcgctcgggtgaggaaaagcaaagggaaatacgcctacctactcgagtccaccatgaatgagtacatagagcaaagaaaaccctgcgataccatgaaggttggaggaaatttggatagcaaagggtacggcattgccactccaaagggtagtagcttgtctggtgtgaccttcaagaccctcctattcgtctgttgtgggtag

SEQ ID NO: 326091 - DNA, 297 bp, Artificial Sequence
  derived and/or modified sequence
atgaacgaatatattgagcagcggaaaccttgtgatacaatgaaggttggaggtaacctggacagtaaaggatacggaattgcaactcctaagggcagttcgctttctggagtaaccttcaagacactgatttgcctcttgtggattaacgcagttaatcttgcagtactgaaacttaacgagcaaggactgctcgataagctcaaaaataagtggtggtacgacaagggtgaatgcggctctggaggaggagattctaaaaacccgagcaaatcttgcagcatcgaaacccagtag

SEQ ID NO: 326092 - DNA, 438 bp, Artificial Sequence
  derived and/or modified sequence
atggtacaatttagcacctcagagttccgactcactcctcacattgataacctcgaagttgcaaatagtttcgcagtaacgaacgctttttgcagccaattcagtagaggcgtgtacgccatttttggtttctacgacaaaaaaagtgtgaacactattacatccttttgcggcacacttcacgttagctttataacgcctagctttcctacagatggaacccacccgtttgtcatccagatgagaccagacctaaagggtgccctcctcagtcttatcgagtattaccagtgggacaaattcgcttatctgtacgactccgaccggggcctaagcacactgcaggcagtgctcgatagcgccgctgagaagaagtggcaagtaaccgcgattaatgtgggaaatatcaacaacgataaaaaggacgagatgtactag

SEQ ID NO: 326093 - DNA, 174 bp, Artificial Sequence
  derived and/or modified sequence
atggttcaattttcaacctcagagtttaggttaacgccccacatcgacaatcttgaagtggcaaatagcttcgctgtcaccaatgctttctgctcccagttttcacggggagtgtacgccatctttggattttacgataaaaaaagcgtgaatacaataacatccttctgttag

SEQ ID NO: 326094 - DNA, 378 bp, Artificial Sequence
  derived and/or modified sequence
atgcagaagattatgcacatctctgttttactcagtcccgtgctctggggactcattttcggggtttctagcaactcgattcagatcggaggactgtttccccggggcgccgatcaagagtattccgcatttcgggtgggcatggtgcaattttctacgagtgagttcaggctgacgcctcatatcgacaaccttgaagtggcgaactcctttgccgttaccaacgctttttgctcccaattctcaaggggcgtttacgccatcttcggattttatgataaaaaaagtgtgaatactatcactagcttttgtggtacactccatgtgagcttcatcaccccttcattccctacggacgggacgcacccttttgtttag

SEQ ID NO: 326095 - DNA, 2757 bp, Artificial Sequence
  derived and/or modified sequence
attccagatttaaactacctagaatatacatgtttttcttaggatgaagcaaaaggaaaagactatgcctttgatacaatagaagaaaaggtcctctcatttcggatccccaaattttattaattctgccttagcgacattttccagtttgctcagattttcttggggtctgaatgcaaagcttgtgattacatggaaaggtgaaggtttctggccgcctacctcgccttcagactctcatctgggtcttgaccccttggctagcttttggatattccacccccgctgtccgagtccgtaggggggctatttcctaggggcgccgatcaagaatacagtgcatttcgagtagggatggttcagttttccacttcggagttcagactgacaccccacatcgacaatttggaggtggcaaacagcttcgcagtcactaatgctttctgctcccagttttcgagaggagtctatgctatttttggattttatgacaagaagtctgtaaataccatcacatcattttgcggaacactccacgtctccttcatcactcccagcttcccaacagatggcacacatccatttgtcattcagatgagacccgacctcaaaggagctctccttagcttgattgaatactatcaatgggacaagtttgcatacctctatgacagtgacagaggcttatcaacactgcaagctgtgctggattctgctgctgaaaagaaatggcaagtgactgctatcaatgtgggaaacattaacaatgacaagaaagatgagatgtaccgatcactttttcaagatctggagttaaaaaaggaacggcgtgtaattctggactgtgaaagggataaagtaaacgacattgtagaccaggttattaccattggaaaacatgttaaagggtaccactacatcattgcaaatctgggatttactgatggagacctattaaaaatccagtttggaggtgcaaatgtctctggatttcagatagtggactatgatgattcgttggtatctaaatttatagaaagatggtcaacactggaagaaaaagaataccctggagctcacacaacaacaattaagtatacttctgctctgacctatgatgccgttcaagtgatgactgaagccttccgcaacctaaggaagcaaagaattgaaatctcccgaagggggaatgcaggagactgtctggcaaacccagcagtgccctggggacaaggtgtagaaatagaaagggccctcaaacaggttcaggttgaaggtctctcaggaaatataaagtttgaccagaatggaaaaagaataaactatacaattaacatcatggagctcaaaactaatgggccccggaagattggctactggagtgaagtggacaaaatggttgttacccttactgagctcccttctggaaatgacacctctgggcttgagaataagactgttgttgtcaccacaattttggaatctccgtatgttatgatgaagaaaaatcatgaaatgcttgaaggcaatgagcgctatgagggctactgtgttgacctggctgcagaaatcgccaaacattgtgggttcaagtacaagttgacaattgttggtgatggcaagtatggggccagggatgcagacacgaaaatttggaatgggatggttggagaacttgtatatgggaaagctgatattgcaattgctccattaactattacccttgtgagagaagaggtgattgacttctcaaagcccttcatgagcctcgggatatctatcatgatcaagaagcctcagaagtccaaaccaggagtgttttcctttcttgatcctttagcctatgagatctggatgtgcattgtttttgcctacattggggtcagtgtagttttattcctggtcagcagatttagcccctacgagtggcacactgaggagtttgaagatggaagagaaacacaaagtagtgaatcaactaatgaatttgggatttttaatagtctctggttttccttgggtgcctttatgcagcaaggatgcgatatttcgccaagatccctctctgggcgcattgttggaggtgtgtggtggttctttaccctgatcataatctcctcctacacggctaacttagctgccttcctgactgtagagaggatggtgtctcccatcgaaagtgctgaggatctttctaagcaaacagaaattgcttatggaacattagactctggctccactaaagagtttttcaggagatctaaaattgcagtgtttgataaaatgtggacctacatgcggagtgcggagccctctgtgtttgtgaggactacggccgaaggggtggctagagtgcggaagtccaaagggaaatatgcctacttgttggagtccacgatgaacgagtacattgagcaaaggaagccttgcgacaccatgaaagttggtggaaacctggattccaaaggctatggcatcgcaacacctaaaggatcctcattaagtggagtcacattcaagacactgatttgtttgttgtggataaatgcggttaacctcgcagtactaaaactgaatgaacaaggcctgttggacaaattgaaaaacaaatggtggtacgacaaaggagagtgcggcagcgggggaggtgattccaagaaccccagtaaatcttgcagtattgaaactcagtgagcaaggcgtcttagacaagctgaaaaacaaatggtggtacgataaaggtgaatgtggagccaa

SEQ ID NO: 326096 - DNA, 558 bp, Artificial Sequence
  derived and/or modified sequence
agcgcgcgcccctcctttccctcccggggcactgacactgttctcttgcttgctgtttgttctttgcaggggggctatttcctaggggcgccgatcaagaatacagtgcatttcgagtagggatggttcagttttccacttcggagttcagactgacaccccacatcgacaatttggaggtggcaaacagcttcgcagtcactaatgctttctgctcccagttttcgagaggagtctatgctatttttggattttatgacaagaagtctgtaaataccatcacatcattttgcggaacactccacgtctccttcatcactcccagcttcccaacagatggcacacatccatttgtcattcagatgagacccgacctcaaaggagctctccttagcttgattgaatactatcaatgggacaagtttgcatacctctatgacagtgacagaggcttatcaacactgcaagctgtgctggattctgctgctgaaaagaaatggcaagtgactgctatcaatgtgggaaacattaacaatgacaagaaagatgagatgtacc

SEQ ID NO: 326097 - DNA, 429 bp, Artificial Sequence
  derived and/or modified sequence
ttcagccagtcctccggacttctggagcggggacagggcgcagggcatcagcagccaccagcaggacctgggaaatagggattcttctgcctccacttcaggttttagcagcttggtgctaaattgctgtctcaaaatgcagaggatctaatttgcagaggaaaacagccaaagaaggaagaggaggaaaaggaaaaaaaaaggggggggctatttcctaggggcgccgatcaagaatacagtgcatttcgagtagggatggttcagttttccacttcggagttcagactgacaccccacatcgacaatttggaggtggcaaacagcttcgcagtcactaatgctttctgctcccagttttcgagaggagtctatgctatttttggattttatgacaagaagtctgtaaataccatcacatcattttgc

SEQ ID NO: 326098 - DNA, 544 bp, Artificial Sequence
  derived and/or modified sequence
agagaggagagagggagaagagagcgcgagagagggttttagcagcttggtgctaaattgctgtctcaaaatgcagaggatctaatttgcagaggaaaacagccaaagaaggaagaggaggaaaaggaaaaaaaaaggggtatattgtggatgctctacttttcttggaaatgcaaaagattatgcatatttctgtcctcctttctcctgttttatggggactgatttttggtgtctcttctaacagcatacagataggggggctatttcctaggggcgccgatcaagaatacagtgcatttcgagtagggatggttcagttttccacttcggagttcagactgacaccccacatcgacaatttggaggtggcaaacagcttcgcagtcactaatgctttctgctcccagttttcgagaggagtctatgctatttttggattttatgacaagaagtctgtaaataccatcacatcattttgcggaacactccacgtctccttcatcactcccagcttcccaacagatggcacacatccatttgt

SEQ ID NO: 326099 - DNA, 522 bp, Artificial Sequence
  derived and/or modified sequence
cccgtgcgctctgtaactaggcgagtcagcatcacagcccaatggaatatactctaaagatgggattttcatgcaaaatatttaaaagattccatcttgatctcttgtgcggcttaagcatttaaagatataacttggggttctccctggatcctggctacatcccatgaagcccaagtgcacaattttggaatatttcctccacggtgctttgcttgcttgtttgctttcggctgggtcaggttttagcagcttggtgctaaattgctgtctcaaaatgcagaggatctaatttgcagaggaaaacagccaaagaaggaagaggaggaaaaggaaaaaaaaaggggtatattgtggatgctctacttttcttggaaatgcaaaagattatgcatatttctgtcctcctttctcctgttttatggggactgatttttggtgtctcttctaacagcatacagataggggggctatttcctaggggcgccgatcaagaatacagtgcatttcgagtagggatgg

SEQ ID NO: 326100 - DNA, 360 bp, Artificial Sequence
  derived and/or modified sequence
atgaggtctgctgagcccagcgtcttcaccaggaccacagctgagggcgtggcccgggtgaggaagagcaagggcaagtttgccttcctgctggagagcaccatgaatgagtacatcgagcagaggaagccctgtgacaccatgaaggtgggcggcaacctggacagcaagggctatggagtggccacccccaagggcagcagcctgagaaatgctgtgaacctggccgtgctgaagctgaatgagcagggcctgctggacaagctgaagaacaagtggtggtatgacaagggagaatgtggcagcggcggcggggacagcaagaacagctgcaagccctgccgctttgagacccagtag

SEQ ID NO: 326101 - DNA, 2193 bp, Artificial Sequence
  derived and/or modified sequence
atggtgcagttcagcaccagcgagttccggctgaccccccacatcgacaacctggaggtggccaacagctttgctgtgaccaatgccttctgcagccagttcagcagaggagtgtatgccatcttcggcttctatgacaagaagtctgtgaacaccatcaccagcttctgtggcaccctgcacgtgtccttcatcacccccagcttccccacagatggcacccacccctttgtgatccagatgaggccagacctgaagggggccctgctgagcctgattgagtactaccagtgggacaagtttgcctacctgtatgacagcgaccggggcctgagcaccctgcaggccgtgctggacagcgctgctgagaagaagtggcaggtgacagccatcaacgtgggcaacatcaacaatgacaagaaggatgagatgtaccgcagcctcttccaggacctggagctgaagaaggagcggcgggtcatcctggactgtgagcgggacaaggtgaatgacatcgtggaccaggtgatcaccatcggcaagcacgtgaagggctaccactacatcatcgccaacctgggcttcacagatggagacctgctgaagatccagtttggaggagccaacgtgtctggcttccagatcgtggactatgatgacagcctggtgtccaagttcatcgagcgctggagcaccctggaggagaaggagtacccaggggcccacaccaccaccatcaagtacaccagcgccctgacctatgatgctgtgcaggtgatgacagaggccttcaggaacctgaggaagcagagaattgagatcagcagaagaggaaatgctggggactgcctggccaacccagctgtgccctggggccagggcgtggagattgagcgggccctgaagcaggtgcaggtggagggcctgagcggcaacatcaagtttgaccagaatggcaagaggatcaactacaccatcaacatcatggagctgaagaccaacggccccaggaagattggctactggagcgaggtggacaagatggtggtgaccctgacagagctgcccagcggaaatgacaccagcggcctggagaacaagacagtggtggtgaccaccatcctggagagcccctacgtgatgatgaagaagaaccacgagatgctggagggcaatgaaagatatgagggctactgtgtggacctggccgctgagatcgccaagcactgcggcttcaagtacaagctgaccatcgtgggagatggcaagtacggggccagagatgctgacaccaagatctggaatggcatggtgggggagctggtgtatggcaaggctgacatcgccatcgcccccctgaccatcaccctggtgcgggaggaggtgattgacttcagcaagcccttcatgagcctgggcatcagcatcatgatcaagaagccccagaagagcaagccaggagtcttctccttcctggaccccctggcctatgagatctggatgtgcatcgtgtttgcctacatcggcgtgtctgtggtgctcttcctggtgagccgcttcagcccctatgagtggcacacagaggagtttgaagatggccgggagacccagagcagcgagagcaccaatgaatttggcatcttcaacagcctgtggttcagcctgggcgccttcatgcagcagggctgtgacatcagccccaggagcctgagcggccgcatcgtgggcggcgtgtggtggttcttcaccctcatcatcatcagcagctacacagccaacctggccgccttcctgactgtggagaggatggtgagccccattgaatctgctgaggacctgagcaagcagacagaaattgcctacggcaccctggacagcggcagcaccaaggagttcttccgccgcagcaagattgctgtgtttgacaagatgtggacctacatgaggtctgctgagcccagcgtgtttgtgaggaccacagctgagggcgtggcccgggtgaggaagagcaagggcaagtatgcctacctgctggagagcaccatgaatgagtacatcgagcagaggaagccctgtgacaccatgaaggtgggcggcaacctggacagcaagggctacggcatcgccacccccaagggcagcagcctgtctggagtgaccttcaagaccctgctgtttgtgtgctgcggctag

SEQ ID NO: 326102 - DNA, 297 bp, Artificial Sequence
  derived and/or modified sequence
atgaatgagtacatcgagcagaggaagccctgtgacaccatgaaggtgggcggcaacctggacagcaagggctatggaattgccacccccaagggcagcagcctgagcggcgtgaccttcaagaccctcatctgcctgctgtggatcaatgctgtgaacctggccgtgctgaagctgaatgagcagggcctgctggacaagctgaagaacaagtggtggtatgacaagggggagtgtggcagcggcggcggggacagcaagaaccccagcaagagctgcagcattgagacccagtag

SEQ ID NO: 326103 - DNA, 438 bp, Artificial Sequence
  derived and/or modified sequence
atggtgcagttcagcaccagcgagttccggctgaccccccacatcgacaacctggaggtggccaacagctttgctgtgaccaatgccttctgcagccagttcagcagaggagtgtatgccatcttcggcttctatgacaagaagtctgtgaacaccatcaccagcttctgtggcaccctgcacgtgtccttcatcacccccagcttccccacagatggcacccacccctttgtgatccagatgaggccagacctgaagggggccctgctgagcctgattgagtactaccagtgggacaagtttgcctacctgtatgacagcgaccggggcctgagcaccctgcaggccgtgctggacagcgctgctgagaagaagtggcaggtgacagccatcaacgtgggcaacatcaacaatgacaagaaggatgagatgtactag

SEQ ID NO: 326104 - DNA, 174 bp, Artificial Sequence
  derived and/or modified sequence
atggtgcagttcagcaccagcgagttccggctgaccccccacatcgacaacctggaggtggccaacagctttgctgtgaccaatgccttctgcagccagttcagcagaggagtgtatgccatcttcggcttctatgacaagaagtctgtgaacaccatcaccagcttctgctag

SEQ ID NO: 326105 - DNA, 378 bp, Artificial Sequence
  derived and/or modified sequence
atgcagaagatcatgcacatctctgtgctgctgagccctgtgctgtggggcctcatcttcggcgtgagcagcaacagcatccagattggaggcctcttccccagaggagctgaccaggagtacagcgccttccgggtgggcatggtgcagttcagcaccagcgagttccggctgaccccccacatcgacaacctggaggtggccaacagctttgctgtgaccaatgccttctgcagccagttcagccggggcgtgtatgccatcttcggcttctatgacaagaagtctgtgaacaccatcaccagcttctgtggcaccctgcacgtgtccttcatcacccccagcttccccacagatggcacccacccctttgtgtag

SEQ ID NO: 326106 - DNA, 360 bp, Artificial Sequence
  derived and/or modified sequence
atgcggagcgccgagcccagcgtgttcacccggaccaccgccgagggtgtggctcgcgtgcgcaaatctaaaggcaaattcgcttttttgctggaatcaacaatgaatgagtacattgagcagcgcaagccctgtgatacgatgaaagtgggaggaaacctggactctaaagggtatggggtcgccactcccaagggctcgagcctccggaacgccgtcaacctggcagtgctgaagctaaacgagcagggactactcgacaaattaaagaacaagtggtggtacgacaaaggagagtgcggatctgggggaggcgacagtaagaatagttgtaagccctgcagatttgaaactcagtag

SEQ ID NO: 326107 - DNA, 2193 bp, Artificial Sequence
  derived and/or modified sequence
atggtgcagttcagcaccagcgagttccggctgaccccccacatcgacaatctggaggtggccaattcattcgccgtgaccaatgctttttgttcgcagttttcgagaggcgtgtatgccatctttgggttctatgacaagaagtccgttaacacgattaccagcttctgcgggactcttcacgtctctttcataacacccagctttccaaccgatggaactcacccattcgtgattcagatgcgccctgacctgaaaggcgcactactttctctaatcgagtactatcagtgggacaagttcgcgtatctgtacgacagtgatcgcggcctctcaacactccaagccgttctggattcagcagctgagaaaaaatggcaagttacagccataaacgttggtaacatcaacaatgacaaaaaggacgagatgtaccgatccttatttcaggacctcgaactgaaaaaggagcgccgtgtgattctcgattgcgagcgggataaggtgaatgatatagtcgaccaggtaattaccattggcaagcacgtgaaggggtatcattacataattgctaatttgggcttcaccgacggtgatctgttgaaaatacagtttggcggcgccaacgtgtcaggctttcagatcgtggattatgatgattctcttgtgagcaaatttatcgagcggtggtctaccctcgaggagaaagaataccccggggcccatacgacaactatcaaatacacttccgccctcacttacgacgccgtacaggtcatgacggaggccttcaggaatctgcggaagcaaagaatcgaaatcagccggcggggcaatgctggcgattgcctcgcgaacccagcagtgccctggggccagggtgtcgagatcgagcgggcccttaaacaagtacaagtggagggtttatccggaaatattaaatttgaccagaacggcaaacggattaattatacaatcaacatcatggagctgaagaccaacggacctagaaagattgggtattggagcgaagtagataaaatggtggtgactctcaccgagctgcccagcggaaacgacaccagtgggctcgaaaataagacagtagtcgtgacaacaatcctggagtcgccgtatgtaatgatgaaaaaaaatcatgagatgctcgaggggaacgagagatacgagggatactgtgtagacctcgctgccgaaattgctaaacactgcggtttcaagtacaagctcactattgtcggcgacgggaagtatggggctcgggacgcagatactaaaatctggaatgggatggtcggggaactggtctatggcaaagctgacatcgcgatcgctcccctgacaatcactctggtgagagaggaagtcatagatttcagcaagccctttatgagtctgggaattagcatcatgatcaaaaagccacagaaatcgaaacctggggtttttagtttcttggatcccctggcctatgaaatctggatgtgcatagtttttgcttacattggggttagtgttgttctgtttctcgtctcacgcttcagcccatatgaatggcataccgaagagtttgaagatgggcgggagactcaaagctcagaaagcactaacgaattcgggatatttaattccttatggttttcactgggcgcctttatgcagcagggctgcgacatttccccaaggtctctgagtggtcggattgtaggaggcgtgtggtggttttttactctcattattattagctcatatacggctaacctcgccgccttcttgacagtggagaggatggttagtccaatagaatctgcagaagacctgagcaagcaaacagaaatcgcttatggaacacttgactcaggctccacaaaggaattcttccgcaggagcaaaatcgcagtattcgataaaatgtggacgtatatgcgctcagctgagccatccgttttcgtgcgcaccaccgccgaaggcgtggctcgcgtgcgtaaaagcaaagggaagtacgcgtacttgttagaaagcactatgaacgaatacatcgagcagcggaaaccgtgcgatacaatgaaagtcggcgggaacctggactcaaagggctacgggatagcaacacccaagggctcctctctgagcggagtcacatttaagacacttttatttgtttgctgtggctag

SEQ ID NO: 326108 - DNA, 297 bp, Artificial Sequence
  derived and/or modified sequence
atgaacgagtacatcgagcagcggaagccctgcgacaccatgaaggtgggaggcaatctagactctaagggctacggtatcgcgactccaaagggctcaagtctttccggcgttacttttaaaactttgatatgcctattatggataaatgccgtaaacttagcagtgctaaagttaaacgagcaaggtttgcttgacaagctaaagaacaagtggtggtatgacaagggcgaatgcggatctggtggcggcgattccaaaaatcctagtaagtcctgttctatagagactcagtag

SEQ ID NO: 326109 - DNA, 438 bp, Artificial Sequence
  derived and/or modified sequence
atggtgcagttcagcaccagcgagttccggctgaccccccacatcgacaatctagaagtggctaattcttttgcggttacaaatgccttttgcagtcaatttagcagaggggtgtacgccatcttcgggttttatgataagaagtctgtgaacacgattacttccttttgcggtacactccacgtttccttcatcaccccatcgtttcctactgacgggacccatcctttcgtgattcagatgagaccagatctcaagggcgccctgctgtctttgattgaatactaccaatgggacaagtttgcctatctttacgatagcgaccgcggcctctcaactctgcaggccgtactggattcagcagcggagaaaaaatggcaggtgacggccattaatgtgggaaacattaacaacgataagaaagacgagatgtactag

SEQ ID NO: 326110 - DNA, 174 bp, Artificial Sequence
  derived and/or modified sequence
atggtgcagttcagcaccagcgagttccggctgaccccccacatcgacaacctggaggtggcgaatagctttgcagtcaccaatgctttctgttctcagttcagtcggggggtttacgccatctttggattctatgacaagaaaagcgtcaacacaataactagcttttgctag

SEQ ID NO: 326111 - DNA, 378 bp, Artificial Sequence
  derived and/or modified sequence
atgcagaagatcatgcacatcagcgtgctgctgagccccgtgctgtgggggctgattttcggcgtgagctccaatagcatccagatcggtggcctgtttccccggggcgccgaccaggagtactcagcctttagggtcgggatggtgcagttcagcaccagcgagttcagactgaccccacacattgataatctcgaagtcgcgaattcttttgcagtcacaaacgccttttgttctcaatttagcagaggggtgtacgccatcttcgggttctatgacaagaaaagtgttaacactatcacgtctttttgtggcaccctccacgtctcttttatcacccctagcttccccacagacgggacccaccccttcgtctag

SEQ ID NO: 326112 - DNA, 360 bp, Artificial Sequence
  derived and/or modified sequence
atgcggagcgctgagccttcagtgtttacccggacaaccgctgagggggttgctcgggtgcgcaaaagtaaaggtaagttcgcctttctgttggagagtacgatgaatgagtacatcgaacaaaggaagccctgcgatacgatgaaagtcggcggtaacctggattctaaagggtacggcgtggctacacccaaggggagctccttacgaaatgcagttaacctggccgtactaaaactgaatgaacaggggcttttggataagctgaagaacaaatggtggtacgacaagggagagtgcggtagcggcggaggcgacagtaagaactcttgcaagccttgtcggttcgagacgcaatag

SEQ ID NO: 326113 - DNA, 2193 bp, Artificial Sequence
  derived and/or modified sequence
atggtgcaattttcaaccagcgagtttcgactaaccccccacatcgataatctggaagtcgccaactccttcgccgtcactaatgctttttgctctcagttttcccgcggtgtgtacgctatcttcggtttctatgacaaaaagtccgtgaataccattacgagcttttgcggcacacttcacgtgagctttattactcccagtttccccacagacggtacacatccctttgttattcagatgagacccgatctgaagggcgctttgctgagcctgattgagtactaccagtgggacaaatttgcatatctctatgactccgataggggactcagtacccttcaggccgtcctggatagcgccgctgagaagaagtggcaggttaccgcgatcaatgtgggcaacattaacaacgataagaaagacgaaatgtataggagcctcttccaggatttggagttaaagaaagagcggagagtgatcctggattgtgaacgcgacaaggtcaatgacattgtagatcaggtgatcactatcgggaagcacgtaaaaggataccattacattatcgccaacctcgggtttactgacggtgacctgctcaagatacagtttggaggggcaaatgtgtctggcttccagattgtcgactatgacgattccttggtgagtaagttcatcgagaggtggtccacattggaagagaaagagtatccaggagctcacacgaccaccatcaagtacacatctgccctgacttacgacgcagtgcaggttatgaccgaggcatttagaaatctcagaaagcaaagaatcgagattagtcgccgaggcaacgctggggattgcctggctaacccagccgtaccctggggtcagggggtggaaatagagcgggctctcaaacaggtccaggtggaagggttgtccggcaacatcaaatttgaccaaaacggtaaaaggatcaattacactattaacatcatggaactgaaaacaaacggccctcggaaaatcgggtactggtcagaggtagacaagatggttgttacactgacagagttgccatctggtaatgatacaagcggccttgagaataaaacagtggtagttactaccattcttgaatccccttacgtaatgatgaaaaagaatcatgaaatgctcgagggcaacgaaaggtacgagggatactgtgttgacctggctgccgaaatcgccaagcactgcggatttaaatacaagctcaccatcgtgggggacggaaagtatggcgctcgcgatgcggacacaaagatttggaacgggatggtcggggaactcgtttatggaaaagcagatatcgcaatagcccctctgaccatcacactcgtcagggaagaagtcatcgatttcagtaaacccttcatgtccttagggatttcaattatgattaaaaagccgcagaagagcaagccgggagtgttctcctttctagaccctctggcctacgagatttggatgtgtattgtattcgcatatatcggcgtaagcgtagtgttgtttctcgtgagcaggtttagcccctacgagtggcatacagaagagtttgaggatggcagggaaacacagtcttccgaaagcacaaatgagttcgggattttcaatagcctgtggtttagcctgggagcgttcatgcaacagggctgcgatatatccccaaggtcactcagtggtcgaatcgttgggggagtctggtggttcttcaccttgatcattatttcttcatatacagctaatctggcagctttcctgactgtggagcgcatggtgtcaccaatcgaaagcgccgaagatctgtcaaagcagaccgaaatcgcttatggaacactggacagcggaagtacgaaagagttcttccggagatcaaagatcgcggtgttcgacaaaatgtggacatatatgcgcagcgctgagccatcagtgtttgtccggaccaccgccgagggtgtggcacgcgtgaggaagtcgaagggcaagtatgcttatctgctagaaagtaccatgaacgaatacattgagcagcggaagccttgtgacactatgaaagttggagggaatctagacagtaagggctatggaatcgcgacacctaagggctcctcgctgtcgggcgtgactttcaagaccctgctatttgtctgttgtggttag

SEQ ID NO: 326114 - DNA, 297 bp, Artificial Sequence
  derived and/or modified sequence
atgaacgaatatatcgaacagaggaagccctgcgatacgatgaaagtgggcggtaatttggattccaaagggtacgggattgctacacccaaaggatccagcttgagtggcgtcacatttaagacactgatctgtctgctctggattaacgcagtgaatctcgctgtactgaaactgaatgagcagggtcttctggataagctgaaaaataaatggtggtacgataagggagaatgtggcagcgggggaggtgatagcaaaaaccccagtaaatcatgtagcatcgagacccagtag

SEQ ID NO: 326115 - DNA, 438 bp, Artificial Sequence
  derived and/or modified sequence
atggtccagtttagcacctcagagtttagactgacaccacacatcgacaatctggaagttgcgaactcatttgccgtgacaaatgccttctgtagtcaattctcgaggggagtgtacgctatcttcggtttctacgataagaagagcgtgaatacgattacaagtttctgtgggaccctccacgtctcatttatcacaccctcctttcctacagatggaacgcaccctttcgtgatccagatgaggcccgacttgaaaggagctctgctgtctttgatcgagtactatcaatgggacaagtttgcttatttatatgattccgaccgcggactcagcactctacaagctgtgctcgattccgccgcagagaaaaagtggcaggtgaccgctatcaatgtcggcaatattaataatgataaaaaagacgagatgtactag

SEQ ID NO: 326116 - DNA, 174 bp, Artificial Sequence
  derived and/or modified sequence
atggtccaattttcaacatccgaatttaggttgaccccgcacatagataatctggaagtggccaatagctttgcagtcactaacgctttttgcagccaattttctagaggcgtctatgcgatcttcggcttctatgataaaaaatccgtgaacacaataacaagtttttgctag

SEQ ID NO: 326117 - DNA, 378 bp, Artificial Sequence
  derived and/or modified sequence
atgcagaagatcatgcatatatctgtgttgctgagtcctgtgctctggggccttatcttcggcgtaagctccaactctatccaaatcgggggtctgttccctcgcggagccgatcaagagtattcagcctttagggttggaatggtccaattcagtacctcagagtttcgcctcactcctcacattgacaatcttgaggtcgcaaactcattcgcagtcactaacgccttttgttcccagttcagcagaggtgtctatgccatctttggcttctacgataagaagtccgtaaacacaattacctcgttctgtggtacactccacgtgagttttatcaccccaagtttccccaccgatgggactcacccatttgtctag

SEQ ID NO: 326118 - DNA, 360 bp, Artificial Sequence
  derived and/or modified sequence
atgagaagcgccgagcccagcgtgttcaccagaaccaccgccgagggcgtggccagagtgagaaagagcaagggcaagttcgccttcctgctggagagcaccatgaacgagtacatcgagcagagaaagccctgcgacaccatgaaggtgggcggcaacctggacagcaagggctacggcgtggccacccccaagggcagcagcctgagaaacgccgtgaacctggccgtgctgaagctgaacgagcagggcctgctggacaagctgaagaacaagtggtggtacgacaagggcgagtgcggcagcggcggcggcgacagcaagaacagctgcaagccctgcagattcgagacccagtag

SEQ ID NO: 326119 - DNA, 2193 bp, Artificial Sequence
  derived and/or modified sequence
atggtgcagttcagcaccagcgagttcagactgaccccccacatcgacaacctggaggtggccaacagcttcgccgtgaccaacgccttctgcagccagttcagcagaggcgtgtacgccatcttcggcttctacgacaagaagagcgtgaacaccatcaccagcttctgcggcaccctgcacgtgagcttcatcacccccagcttccccaccgacggcacccaccccttcgtgatccagatgagacccgacctgaagggcgccctgctgagcctgatcgagtactaccagtgggacaagttcgcctacctgtacgacagcgacagaggcctgagcaccctgcaggccgtgctggacagcgccgccgagaagaagtggcaggtgaccgccatcaacgtgggcaacatcaacaacgacaagaaggacgagatgtacagaagcctgttccaggacctggagctgaagaaggagagaagagtgatcctggactgcgagagagacaaggtgaacgacatcgtggaccaggtgatcaccatcggcaagcacgtgaagggctaccactacatcatcgccaacctgggcttcaccgacggcgacctgctgaagatccagttcggcggcgccaacgtgagcggcttccagatcgtggactacgacgacagcctggtgagcaagttcatcgagagatggagcaccctggaggagaaggagtaccccggcgcccacaccaccaccatcaagtacaccagcgccctgacctacgacgccgtgcaggtgatgaccgaggccttcagaaacctgagaaagcagagaatcgagatcagcagaagaggcaacgccggcgactgcctggccaaccccgccgtgccctggggccagggcgtggagatcgagagagccctgaagcaggtgcaggtggagggcctgagcggcaacatcaagttcgaccagaacggcaagagaatcaactacaccatcaacatcatggagctgaagaccaacggccccagaaagatcggctactggagcgaggtggacaagatggtggtgaccctgaccgagctgcccagcggcaacgacaccagcggcctggagaacaagaccgtggtggtgaccaccatcctggagagcccctacgtgatgatgaagaagaaccacgagatgctggagggcaacgagagatacgagggctactgcgtggacctggccgccgagatcgccaagcactgcggcttcaagtacaagctgaccatcgtgggcgacggcaagtacggcgccagagacgccgacaccaagatctggaacggcatggtgggcgagctggtgtacggcaaggccgacatcgccatcgcccccctgaccatcaccctggtgagagaggaggtgatcgacttcagcaagcccttcatgagcctgggcatcagcatcatgatcaagaagccccagaagagcaagcccggcgtgttcagcttcctggaccccctggcctacgagatctggatgtgcatcgtgttcgcctacatcggcgtgagcgtggtgctgttcctggtgagcagattcagcccctacgagtggcacaccgaggagttcgaggacggcagagagacccagagcagcgagagcaccaacgagttcggcatcttcaacagcctgtggttcagcctgggcgccttcatgcagcagggctgcgacatcagccccagaagcctgagcggcagaatcgtgggcggcgtgtggtggttcttcaccctgatcatcatcagcagctacaccgccaacctggccgccttcctgaccgtggagagaatggtgagccccatcgagagcgccgaggacctgagcaagcagaccgagatcgcctacggcaccctggacagcggcagcaccaaggagttcttcagaagaagcaagatcgccgtgttcgacaagatgtggacctacatgagaagcgccgagcccagcgtgttcgtgagaaccaccgccgagggcgtggccagagtgagaaagagcaagggcaagtacgcctacctgctggagagcaccatgaacgagtacatcgagcagagaaagccctgcgacaccatgaaggtgggcggcaacctggacagcaagggctacggcatcgccacccccaagggcagcagcctgagcggcgtgaccttcaagaccctgctgttcgtgtgctgcggctag

SEQ ID NO: 326120 - DNA, 297 bp, Artificial Sequence
  derived and/or modified sequence
atgaacgagtacatcgagcagagaaagccctgcgacaccatgaaggtgggcggcaacctggacagcaagggctacggcatcgccacccccaagggcagcagcctgagcggcgtgaccttcaagaccctgatctgcctgctgtggatcaacgccgtgaacctggccgtgctgaagctgaacgagcagggcctgctggacaagctgaagaacaagtggtggtacgacaagggcgagtgcggcagcggcggcggcgacagcaagaaccccagcaagagctgcagcatcgagacccagtag

SEQ ID NO: 326121 - DNA, 438 bp, Artificial Sequence
  derived and/or modified sequence
atggtgcagttcagcaccagcgagttcagactgaccccccacatcgacaacctggaggtggccaacagcttcgccgtgaccaacgccttctgcagccagttcagcagaggcgtgtacgccatcttcggcttctacgacaagaagagcgtgaacaccatcaccagcttctgcggcaccctgcacgtgagcttcatcacccccagcttccccaccgacggcacccaccccttcgtgatccagatgagacccgacctgaagggcgccctgctgagcctgatcgagtactaccagtgggacaagttcgcctacctgtacgacagcgacagaggcctgagcaccctgcaggccgtgctggacagcgccgccgagaagaagtggcaggtgaccgccatcaacgtgggcaacatcaacaacgacaagaaggacgagatgtactag

SEQ ID NO: 326122 - DNA, 174 bp, Artificial Sequence
  derived and/or modified sequence
atggtgcagttcagcaccagcgagttcagactgaccccccacatcgacaacctggaggtggccaacagcttcgccgtgaccaacgccttctgcagccagttcagcagaggcgtgtacgccatcttcggcttctacgacaagaagagcgtgaacaccatcaccagcttctgctag

SEQ ID NO: 326123 - DNA, 378 bp, Artificial Sequence
  derived and/or modified sequence
atgcagaagatcatgcacatcagcgtgctgctgagccccgtgctgtggggcctgatcttcggcgtgagcagcaacagcatccagatcggcggcctgttccccagaggcgccgaccaggagtacagcgccttcagagtgggcatggtgcagttcagcaccagcgagttcagactgaccccccacatcgacaacctggaggtggccaacagcttcgccgtgaccaacgccttctgcagccagttcagcagaggcgtgtacgccatcttcggcttctacgacaagaagagcgtgaacaccatcaccagcttctgcggcaccctgcacgtgagcttcatcacccccagcttccccaccgacggcacccaccccttcgtgtag

SEQ ID NO: 326124 - protein, 62 aa, Artificial Sequence
  derived and/or modified sequence
MYGKIIFVLLLSEIVSISALSTTEVAMHTSTSSSVTKSYISSQTNGERVQLAHHFSEPDFHN

SEQ ID NO: 326125 - protein, 55 aa, Artificial Sequence
  derived and/or modified sequence
MYGKIIFVLLLSGIVSISASSTTGVAMHTSTSSSVTKSYISSQTNGERGQLVHRF

SEQ ID NO: 326126 - DNA, 414 bp, Artificial Sequence
  derived and/or modified sequence
atgcccgttgaaagaatgcgcatgcgcccttggttggaggagcagatcaattcaaataccattcccggcctaaagtggttgaacaaggaaaagaagatttttcagattccctggatgcatgccgcccgacatggatgggacgtcgagaaagatgcccctctatttcggaactgggccattcacacaggaaagcaccagcctggggtagacaagcccgatccaaaaacctggaaggccaattttagatgtgcaatgaatagtctaccagatattgaggaggtcaaggacaagtccattaagaaaggcaacaatgccttcagggtgtatcggatgctgccactgtccgagagacccagtaagaaaggtaaaaaaccaaaaactgaaaaggaagataaggtgaagcacattaagtag

SEQ ID NO: 326127 - DNA, 414 bp, Artificial Sequence
  derived and/or modified sequence
atgcccgtggagagaatgcggatgaggccctggttggaagaacagattaatagcaacacaatccccggcctgaagtggctgaacaaagaaaaaaagatatttcagatcccgtggatgcatgccgcgaggcatggctgggacgtcgagaaagatgcccccctgttcagaaattgggccatccacaccgggaagcaccagcccggagtggataagcctgacccaaaaacttggaaggccaattttcgctgcgccatgaacagtttgcccgacatcgaagaggtgaaggataaatctattaagaaaggtaataacgcctttcgtgtctatagaatgctgcctctctcagaaagaccctccaaaaagggtaaaaaacctaagactgagaaggaggataaggtgaaacatattaaatag

SEQ ID NO: 326128 - DNA, 665 bp, Artificial Sequence
  derived and/or modified sequence
ctctccttgttttgctttcgatctggactgttctcaggcaagccggggagtaacttttagttttgctcctgcgattattcaactgacgggctttcatttccatttcacataccctagcaacacttataccttgcggaattgtattggtagcgtgaaaaaagcacactgagaggggcaaaacacaccttttgaggtctgtggagctcaaaaatgaagtcaaaggtgactgggtgacacaaacagctcagggcaccatgccggtggaaaggatgcgcatgcgcccgtggctggaggagcagataaactccaacacgatcccggggctcaagtggcttaacaaggaaaagaagatttttcagatcccctggatgcatgcggctagacatgggtgggatgtggaaaaagatgcaccactctttagaaactgggcaatccatacaggaaagcatcaaccaggagtagataaacctgatcccaaaacatggaaggcgaatttcagatgcgccatgaattccttgcctgatattgaagaagtcaaggataaaagcataaagaaaggaaataatgccttcagggtctaccgaatgctgcccctatcagaacggccttctaagaaaggaaagaaaccaaagacagaaaaagaagacaaagttaagcacatcaag

SEQ ID NO: 326129 - DNA, 498 bp, Artificial Sequence
  derived and/or modified sequence
gattttaggggaagcaggttctgctgctgttgctgctgctactggggctgctgaggctgcgaggaggaggaggaggaggagggcaccatgccggtggaaaggatgcgcatgcgcccgtggctggaggagcagataaactccaacacgatcccggggctcaagtggcttaacaaggaaaagaagatttttcagatcccctggatgcatgcggctagacatgggtgggatgtggaaaaagatgcaccactctttagaaactgggcaatccatacaggaaagcatcaaccaggagtagataaacctgatcccaaaacatggaaggcgaatttcagatgcgccatgaattccttgcctgatattgaagaagtcaaggataaaagcataaagaaaggaaataatgccttcagggtctaccgaatgctgcccctatcagaacggccttctaagaaaggaaagaaaccaaagacagaaaaagaagacaaagttaagcacatcaag

SEQ ID NO: 326130 - DNA, 414 bp, Artificial Sequence
  derived and/or modified sequence
atgcctgtggagaggatgaggatgaggccctggctggaggagcagatcaacagcaacaccatccctggcctgaagtggctgaacaaggagaagaagatcttccagatcccctggatgcatgctgcccggcacggctgggatgtggagaaggatgcccccctcttcaggaactgggccatccacacaggcaagcaccagcccggggtggacaagccagaccccaagacctggaaggccaacttccgctgtgccatgaacagcctgcctgacatcgaggaggtgaaggacaagagcatcaagaagggcaacaatgccttccgggtgtacaggatgctgcccctgtctgagcggcccagcaagaagggcaagaagcccaagacagagaaggaggacaaggtgaagcacatcaagtag

SEQ ID NO: 326131 - DNA, 414 bp, Artificial Sequence
  derived and/or modified sequence
atgcccgtggagcggatgcggatgcggccctggctggaggagcagataaatagtaacactattcccggcctgaagtggctgaataaagagaaaaagatattccagattccctggatgcatgccgccaggcacgggtgggatgtcgaaaaggacgcaccattatttaggaattgggcaatccataccggaaagcatcagcccggagtagataagccagatcctaaaacatggaaagcgaattttcgctgcgccatgaattcactgcccgatatcgaggaggtgaaggacaaatctatcaaaaaggggaacaacgcctttagagtgtacagaatgttacccctgagtgaaaggcccagtaagaaaggtaaaaagcctaaaaccgagaaagaggataaagtgaagcatattaagtag

SEQ ID NO: 326132 - DNA, 414 bp, Artificial Sequence
  derived and/or modified sequence
atgcccgtggagcggatgcggatgcggccctggctggaggagcagatcaattcgaacacgattccaggcctcaagtggctgaacaaggagaagaagattttccagatcccctggatgcacgccgccaggcacggatgggatgtggagaaggacgctccactcttccggaattgggccattcatactggcaagcaccagcccggggtggacaaaccagacccaaagacctggaaggccaattttcgctgtgcaatgaatagtctccccgacatagaagaagttaaggacaaaagcatcaagaaaggcaataacgcctttagggtttataggatgctcccactgtcagagcgcccttcaaagaaaggaaaaaagccaaagacagaaaaggaggacaaagtgaagcacattaagtag

SEQ ID NO: 326133 - DNA, 414 bp, Artificial Sequence
  derived and/or modified sequence
atgccagttgagcgaatgcggatgaggccgtggttggaggagcagatcaattccaacaccatccctggccttaagtggttgaacaaggagaagaagatttttcaaatcccttggatgcatgctgcgcgtcacggctgggatgtcgaaaaggacgccccactctttagaaactgggctattcacacaggcaagcaccagcctggggtcgataaaccagatcccaagacctggaaagccaatttccgttgcgccatgaactcactgcccgacattgaggaggttaaggacaaatccatcaaaaaaggcaataacgcctttcgagtgtatcgcatgctgcccctttctgaaagaccctccaaaaagggcaagaagcctaagaccgagaaagaagataaggtgaagcacattaagtag

SEQ ID NO: 326134 - DNA, 414 bp, Artificial Sequence
  derived and/or modified sequence
atgccagtggaacgcatgcgaatgcggccatggctcgaggaacaaataaacagcaatacaattccgggtctgaagtggctcaataaggagaaaaagatttttcagatcccttggatgcacgccgctaggcatggctgggacgtcgagaaggatgccccactttttagaaactgggctatccacaccggcaagcatcaaccaggagtggacaagccggacccaaagacctggaaagctaattttaggtgtgctatgaactctttacccgatattgaggaggtgaaagataaaagcatcaagaagggcaacaatgcgttccgcgtgtaccgaatgttgcccctgagtgagcggccttccaagaaagggaagaaacccaagacagaaaaagaagacaaggtcaagcatataaagtag

SEQ ID NO: 326135 - DNA, 414 bp, Artificial Sequence
  derived and/or modified sequence
atgcccgtggagagaatgagaatgagaccctggctggaggagcagatcaacagcaacaccatccccggcctgaagtggctgaacaaggagaagaagatcttccagatcccctggatgcacgccgccagacacggctgggacgtggagaaggacgcccccctgttcagaaactgggccatccacaccggcaagcaccagcccggcgtggacaagcccgaccccaagacctggaaggccaacttcagatgcgccatgaacagcctgcccgacatcgaggaggtgaaggacaagagcatcaagaagggcaacaacgccttcagagtgtacagaatgctgcccctgagcgagagacccagcaagaagggcaagaagcccaagaccgagaaggaggacaaggtgaagcacatcaagtag

SEQ ID NO: 326136 - protein, 988 aa, Artificial Sequence
  derived and/or modified sequence
METKGYHSLPEGLDMERRWGQVSQAVERSSLGPTERTDENNYMEIVNVSCVSGAIPNNSTQGSSKEKQELLPCLQQDNNRPGILTSDIKTELESKELSATVAESMGLYMDSVRDADYSYEQQNQQGSMSPAKIYQNVEQLVKFYKGNGHRPSTLSCVNTPLRSFMSDSGSSVNGGVMRAVVKSPIMCHEKSPSVCSPLNMTSSVCSPAGINSVSSTTASFGSFPVHSPITQGTPLTCSPNVENRGSRSHSPAHASNVGSPLSSPLSSMKSSISSPPSHCSVKSPVSSPNNVTLRSSVSSPANINNSRCSVSSPSNTNNRSTLSSPAASTVGSICSPVNNAFSYTASGTSAGSSTLRDVVPSPDTQEKGAQEVPFPKTEEVESAISNGVTGQLNIVQYIKPEPDGAFSSSCLGGNSKINSDSSFSVPIKQESTKHSCSGTSFKGNPTVNPFPFMDGSYFSFMDDKDYYSLSGILGPPVPGFDGNCEGSGFPVGIKQEPDDGSYYPEASIPSSAIVGVNSGGQSFHYRIGAQGTISLSRSARDQSFQHLSSFPPVNTLVESWKSHGDLSSRRSDGYPVLEYIPENVSSSTLRSVSTGSSRPSKICLVCGDEASGCHYGVVTCGSCKVFFKRAVEGKCSWQHNYLCAGRNDCIIDKIRRKNCPACRLQKCLQAGMNLGARKSKKLGKLKGIHEEQPQQQQPPPPPPPPQSPEEGTTYIAPAKEPSVNTALVPQLSTISRALTPSPVMVLENIEPEIVYAGYDSSKPDTAENLLSTLNRLAGKQMIQVVKWAKVLPGFKNLPLEDQITLIQYSWMCLSSFALSWRSYKHTNSQFLYFAPDLVFNEEKMHQSAMYELCQGMHQISLQFVRLQLTFEEYTIMKVLLLLSTIPKDGLKSQAAFEEMRTNYIKELRKMVTKCPNNSGQSWQRFYQLTKLLDSMHDLVSDLLEFCFYTFRESHALKVEFPAMLVEIISDQLPKVESGNAKPLYFHRK

SEQ ID NO: 326137 - DNA, 2967 bp, Artificial Sequence
  derived and/or modified sequence
atggaaactaaagggtatcactcccttcccgaaggacttgatatggagagacgctgggggcaggtgtcccaggctgtggagcgctcaagcctgggcccaaccgagagaacagacgagaacaattacatggagatagtgaacgtctcgtgcgtcagcggcgcgatacccaacaacagtactcagggatcatcaaaagaaaagcaagagctccttccatgtctccagcaagacaataatcggcctggcattctgacatccgatataaagacagagctagagtcgaaggagctctccgcaacagttgccgaaagtatgggcttatacatggactctgttcgggacgctgattactcttatgaacagcaaaaccagcagggatctatgtctcccgccaaaatctatcagaacgtagagcaacttgtgaagttctacaagggaaatgggcaccgtccatctactttaagctgtgttaacaccccactccgcagcttcatgtccgattcgggatctagtgtaaatggcggcgttatgcgggcagtggtcaagtctccaataatgtgccatgagaaatcccccagcgtctgctctccattgaacatgaccagctctgtgtgctctcccgccggcatcaactcggtcagctctaccactgcctcgtttggaagctttcctgtccattctccaattacccagggaactcccttaacctgcagtccaaatgtcgagaatcgcggatcaaggagtcactcccccgctcatgccagtaacgtcggtagtcctcttagtagccccctgtcctctatgaaaagtagcatcagcagcccaccgagccactgttctgtaaaatcacctgtaagttcccccaataatgtgaccttgcgatctagtgtgtcctctcccgctaatatcaacaactctcggtgcagtgtctcctctccatcaaataccaataacagatcaacactatcttcacctgcggcctcaaccgtgggctcaatctgctctcctgttaacaatgcattctcttatacagctagcgggacatcagccggctccagtacgctccgggacgtggttcctagccctgatacacaggagaagggggctcaggaagtgcctttccccaagacggaggaagtggagtccgcaatcagcaatggtgtgacagggcagctgaatatagtgcaatacatcaaaccagaaccagatggcgcgttctccagctcttgtctcggggggaacagtaaaattaatagtgacagcagcttctcggtgcccatcaaacaggagtctactaagcatagttgctcgggtacatctttcaaggggaatcctacggtcaatcctttccctttcatggatgggtcatacttcagtttcatggatgacaaagactattattctctttccggcatcctgggacctcccgtgcctgggttcgacgggaactgcgagggaagcggttttcccgtgggaatcaaacaggagccagacgatggctcatattatcccgaagccagcattccaagtagtgccatcgtaggcgtgaactccggtggccaatcctttcattataggataggggcccagggcacaatttccttgtccaggagtgcccgggaccagtcattccagcacctctcttccttcccaccagtgaacactctcgttgagtcatggaagtcccatggagacctgagtagtagacggtcagatgggtaccctgttctggagtacattccagagaatgtgtcttccagtacactgagatctgtgagcacaggctccagtcgacccagcaaaatatgcctcgtatgtggagacgaggcatccgggtgccactatggcgtggttacctgtggaagctgcaaggtgtttttcaagagggctgtggagggtaaatgttcatggcagcacaactatctgtgcgccggaagaaatgattgcattatcgataaaatacggagaaaaaactgtccggcttgtcggttgcaaaaatgtctgcaggcagggatgaacttaggagccagaaagtcgaagaagctggggaaactgaaagggattcacgaggagcagcctcagcagcagcagcctccacccccgcctcctccacctcagtccccggaggaagggactacttatattgcccccgcaaaagagccctccgtcaacaccgcgctggtaccacagctatctaccattagtcgcgctctgacaccctcacctgtgatggtgctcgagaacatcgagccggagatcgtctatgcggggtacgattcaagtaaacccgacactgctgagaatctgctatctacgctgaacaggttggccggtaaacagatgattcaggtggttaagtgggcaaaggtcctccctgggtttaagaatctgccactcgaggaccagatcacgcttatacaatactcctggatgtgcctttctagcttcgccctgtcttggcgctcttataaacacactaattcccagtttctttatttcgcaccagatctggtcttcaatgaagagaagatgcaccagtccgcaatgtatgagctgtgtcagggaatgcatcaaatctccctgcagtttgttcggcttcagctcacgttcgaagagtacactataatgaaggtgcttcttcttctgtcaacaattccaaaagacgggcttaaaagtcaggctgccttcgaggagatgcggactaactacataaaggagctgcggaagatggtcacaaagtgtccgaataactctgggcagtcgtggcagaggttctatcaactaaccaagctcttggactcaatgcatgacctcgtcagtgatcttctagagttttgcttctatactttccgcgagagccatgctttaaaagtggagtttccagcaatgctggtggaaattatttcagaccaactccccaaagttgaaagcggaaacgccaaaccactctatttccatcgaaagtag

SEQ ID NO: 326138 - DNA, 2967 bp, Artificial Sequence
  derived and/or modified sequence
atggagaccaaaggctaccactcacttcccgaaggactggatatggaaagacgctgggggcaggtgagccaggccgtcgaaaggagttcgctgggccccaccgagcggacagatgaaaataattacatggaaattgtaaacgtctcatgtgttagcggtgccattcctaataatagcacccagggctcaagcaaagagaagcaggagctcttgccgtgtctccagcaggacaacaacagacctggcattctgactagcgatatcaaaaccgaattggagagtaaggaactgtccgccactgtggccgaaagtatgggcttatatatggacagtgttcgggacgctgactacagttacgaacagcagaatcagcaaggtagcatgtcccctgctaaaatttatcagaacgtcgaacagctagtgaagttctacaaaggaaatgggcacaggccgtcaacactttcctgcgtcaacacaccactgcggtccttcatgtctgattccggctccagtgttaacggaggcgtaatgcgcgctgtggtgaagagccctatcatgtgtcatgaaaaatcaccgagcgtgtgcagccctctgaacatgaccagcagcgtgtgtagtcctgccgggatcaactctgtgtcatctacgaccgcttcttttggctccttcccagtgcactctccgatcacccagggtacgcctcttacatgttcgcccaacgtggagaacagggggtctcggagccacagcccagctcacgcatcaaatgtgggttccccactgtcatcaccactgtccagtatgaagtcttcaatcagctcgcctccctctcattgtagtgttaagtcccccgtctccagccctaataatgttacactgcgatcctccgtgtccagcccagccaatatcaacaattcacgatgctccgtgtctagcccatccaacactaacaatcgatctaccctgtcgtcgcccgcggccagtaccgttgggtcaatctgcagcccagtgaacaatgctttttcctatacggcaagcgggacgagcgcaggaagcagcaccctccgagacgtggtccccagcccagacactcaagagaagggggctcaggaagtgcctttccccaagaccgaggaggtcgaaagtgctatatccaatggggtgaccggccagctgaatattgtgcagtacatcaaaccagagccagacggcgcattctctagtagttgcctcggcggcaactcaaaaatcaatagtgatagttccttctcagtgcctatcaaacaagaatctaccaaacactcatgctccgggacttcttttaagggaaatcctacagtcaaccccttcccattcatggacgggagctatttcagcttcatggatgacaaagactactacagtctgtccggcatcctcggaccgcccgttcccggcttcgatggaaactgcgaggggtcaggcttccctgtgggcataaaacaagaaccggacgatggttcttactatcccgaagcgtccatcccctcttccgccatagtgggcgtcaacagcgggggccagagtttccactacagaattggagcccaggggactatctctctgtctcggagcgctagggaccagagcttccaacacctctcaagctttccccctgtaaatacgctggtggaatcctggaagagccatggagatctatcctccaggcgatccgacggctacccagttctagagtatatcccagagaatgtgtcttcttccactttgcgctccgtgtctacaggcagctcccggcccagcaagatatgcctcgtctgtggcgatgaggcttcgggctgccactacggagtggttacatgcggctcgtgcaaagtgtttttcaagagggctgtggagggcaagtgctcgtggcagcataactacctgtgtgctggacgcaacgattgtataattgataagatccggcggaagaattgccctgcttgcaggttacagaagtgcctgcaggctggcatgaacctaggtgccaggaagagtaagaagctcggtaaactgaaaggtattcatgaggagcagccgcagcagcaacagccccctccccccccccctcctcctcagtcaccagaggagggaaccacatacatagctccggcaaaagaaccttcagtgaataccgctctggttccccagctgagcaccatctctcgcgccctaacgccttcgccagttatggtgctcgaaaatatcgagcccgaaatagtgtatgctggatacgattcctccaaacccgacactgccgagaacctcctttccacactgaaccggcttgcaggaaaacagatgattcaggtggtcaagtgggctaaggtcctccccggctttaagaaccttccactggaggaccagatcacactcatccagtattcatggatgtgcttatcatcttttgccttgtcttggagaagctacaagcatacaaattcgcaattcctttactttgctccagacttggtgttcaatgaagaaaagatgcaccagtccgccatgtacgagctttgccaaggtatgcaccagatttcattacaattcgtgcgtttacagttgacctttgaggaatatacgatcatgaaggtgctgctgctactatcaacaatccccaaagacggactgaagagtcaggccgcgtttgaagagatgaggaccaactacattaaggaactaaggaaaatggttaccaaatgccccaataacagtggccaatcttggcagaggttttatcaactgaccaagctgctagattcgatgcacgacctggtgagcgatctccttgagttctgtttttacacatttagagagagccacgctctcaaggtggagttccccgccatgctggttgagatcatctccgatcagctccctaaggttgaaagtggcaacgcgaaacccctttactttcaccgcaagtag

SEQ ID NO: 326139 - DNA, 2967 bp, Artificial Sequence
  derived and/or modified sequence
atggagaccaagggctaccacagcctgcctgagggcctggacatggagcggcgctggggccaggtgtcccaggccgtggagaggagcagcctgggccccacagagaggacagatgagaacaactacatggagatcgtgaatgtgtcctgtgtgtctggggccatccccaacaacagcacccagggcagcagcaaggagaagcaggagctgctgccctgcctgcagcaggacaacaacagacctggcatcctgaccagtgacatcaagacagagctggagagcaaggagctgagcgccaccgtggccgagagcatgggcctgtacatggattctgtgagagatgctgactacagctatgagcagcagaaccagcagggctccatgagccctgccaagatctaccagaatgtggagcagctggtgaagttctacaagggaaatggccaccggcccagcaccctgagctgtgtgaacacccccctgcgctccttcatgtctgacagcggcagctctgtgaatggaggagtgatgagagctgtggtgaagagccccatcatgtgccacgagaagagccccagcgtgtgcagccccctgaacatgaccagctctgtgtgcagccctgctggcatcaacagcgtgagcagcaccacagccagctttggcagcttccctgtgcacagccccatcacccagggcacccccctgacctgcagccccaacgtggagaacagaggcagccgcagccacagccctgcccacgccagcaatgtgggcagccccctgagcagccccctgagctccatgaagagcagcatcagcagcccccccagccactgcagcgtgaagagccctgtgagcagccccaacaacgtgaccctgcggagctctgtgagcagccctgccaacatcaacaacagccgctgcagcgtgagcagccccagcaacaccaacaacagaagcaccctgagcagccctgctgccagcacagtgggcagcatctgcagccctgtgaacaatgccttctcctacacagccagcggcaccagcgctggcagcagcaccctgagagatgtggtgcccagcccagacacccaggagaagggggcccaggaggtgcccttccccaagacagaggaggtggagagcgccatcagcaatggagtgacaggccagctgaacatcgtgcagtacatcaagccagagccagatggagccttcagcagcagctgcctgggcggcaacagcaagatcaacagcgacagcagcttctctgtgcccatcaagcaggagagcaccaagcacagctgcagcggcaccagcttcaagggcaaccccaccgtgaaccccttccccttcatggatggcagctacttctccttcatggatgacaaggactactacagcctgagcggcatcctgggcccccctgtgcccggctttgatggcaactgtgagggcagcggcttccctgtgggcatcaagcaggagccagatgatggcagctactacccagaggccagcatccccagcagcgccatcgtgggcgtgaacagcggcggccagagcttccactacagaattggagcccagggcaccatcagcctgagccgcagcgcccgggaccagagcttccagcacctgagcagcttcccccctgtgaacaccctggtggagagctggaagagccatggagacctgagcagcagaagaagtgatggctaccctgtgctggagtacatcccagaaaatgtgagcagcagcaccctgcggtctgtgtccacaggcagcagccggcccagcaagatctgcctggtgtgtggagatgaggccagcggctgccactatggagtggtgacctgtggcagctgcaaggtgttcttcaagagagctgtggagggcaagtgctcctggcagcacaactacctgtgtgccggcagaaatgactgcatcatcgacaagatccggaggaagaactgcccagcctgccgcctgcagaagtgcctgcaggccggcatgaacctgggcgccaggaagagcaagaagctgggcaagctgaagggcatccacgaggagcagccccagcagcagcagcccccacctcctcctcctccaccccagagccctgaggagggcaccacctacatcgccccagccaaggagcccagcgtgaacacagccctggtgccccagctgagcaccatcagccgggccctgacccccagccctgtgatggtgctggagaacatcgagcctgagatcgtgtatgccggctatgacagcagcaagccagacacagctgagaacctgctgagcaccctgaaccggctggccggcaagcagatgatccaggtggtgaagtgggccaaggtgctgcccggcttcaagaacctgcccctggaggaccagatcaccctcatccagtacagctggatgtgcctgagcagctttgccctgtcctggaggagctacaagcacaccaacagccagttcctgtactttgccccagacctggtgttcaatgaggagaagatgcaccagagcgccatgtatgagctgtgccagggcatgcaccagatcagcctgcagtttgtgcggctgcagctgacctttgaggagtacaccatcatgaaggtgctgctgctgctgagcaccatccccaaggatggcctgaagagccaggccgcctttgaggagatgaggaccaactacatcaaggagctgaggaagatggtgaccaagtgccccaacaacagcggccagagctggcagcgcttctaccagctgaccaagctgctggacagcatgcatgacctggtgtctgacctgctggagttctgcttctacaccttccgggagagccacgccctgaaggtggagttccctgccatgctggtggagatcatcagtgaccagctgcccaaggtggagagcggaaatgccaagcccctgtacttccacaggaagtag

SEQ ID NO: 326140 - DNA, 2967 bp, Artificial Sequence
  derived and/or modified sequence
atggagaccaagggctaccacagcctgcccgagggcctggacatggagcggagatggggacaagtgtcgcaggcggtggagaggtctagtcttggaccaactgaaagaacagatgagaacaattatatggagatcgtaaatgtgtcttgtgtttcgggcgcaatccctaataactcaacacagggttccagtaaagaaaaacaggaacttctgccatgtcttcagcaagacaataatcgcccgggaatcctgactagcgacatcaagaccgaactggagtctaaagaattatccgccacagtggcggagtccatgggcctctatatggactcagtgcgagacgccgactactcatatgagcaacagaaccagcaggggtcaatgtctccagcaaagatttaccaaaacgtagaacagctggtaaagttttacaagggcaatgggcatcggccaagcaccctcagctgcgtgaacactccacttcggagcttcatgagtgatagcggcagctcagtgaatggcggcgtgatgagagcggtggtgaaatcccccatcatgtgccatgaaaagagcccatctgtatgttctcctctgaacatgactagctccgtgtgctcaccagcagggattaatagcgtgagttctaccactgcttcattcggttcatttccggttcattctcctatcacccaggggacacctctgacctgctcccccaacgtcgagaaccgtggttcccgcagccattcccccgctcacgctagtaacgttggatctccgctgagcagtccactgtcttcaatgaagagctcgatctcgagcccccctagtcattgttccgtgaaatcaccagtctcatctcccaataatgtgaccctccgctccagcgtgagctcccctgccaatataaacaacagtcggtgcagcgtatcgtcaccctccaatacaaataaccgatctacgctgtcctccccggctgcatctaccgtcgggtccatttgtagcccggtgaataacgctttctcctatactgcttccgggacatcggctggaagttctaccctgcgcgatgtcgtacctagccccgatacacaggagaaaggcgcccaggaagttccttttcctaaaacagaggaggtcgaaagtgcaatctcgaatggcgttactgggcagctgaacatagtgcaatacataaaacctgagcccgatggcgccttctctagcagctgcctcggaggtaacagcaaaattaattcggattcctctttttctgtgccaatcaagcaggagtccacaaaacactcctgtagtggtacaagttttaaggggaatcccacagtgaatccctttcccttcatggatggaagttatttttcttttatggacgacaaagactattactctctgtcggggattcttggtccacccgtccctggctttgacggaaattgtgagggatcaggctttcctgtgggaatcaagcaggagcccgatgacggctcctactatcccgaggcttccattcccagctctgcgatcgttggagtgaacagtggaggccaaagcttccactatagaatcggggcccaaggtacgatctccctttcaagatccgctcgcgaccagagcttccagcacctaagttctttcccccccgtgaacacacttgtggaatcatggaagagccatggtgacctctcatctcgacggtcagacggctatcccgtgctcgagtatattcccgaaaacgtatcctccagtacgctgagatccgtatctacaggaagcagcaggccttcaaagatctgtctggtgtgtggcgacgaagcctcaggctgccactatggagtggttacctgcggaagctgcaaggtgttttttaagagagcggtagagggcaagtgctcttggcagcacaactatctgtgtgctggacgtaatgattgcattattgacaagatcaggagaaagaactgccctgcctgccggctccaaaagtgccttcaggccggaatgaacctgggagcacgcaagtccaagaaacttgggaagttaaaggggattcacgaagaacagccccagcagcagcagccccctccgccgcctccccctccacaaagccccgaggagggcacgacgtacatcgcaccggctaaggaaccttctgtgaatacggccttggtaccacagttgagcacgatctccagagctctgacgcccagccccgttatggtactggaaaatattgagcctgaaatcgtgtacgcaggttatgactcctctaaacctgatacagctgagaacctgctaagcaccctgaatagactggccgggaaacagatgatccaagtggtgaaatgggctaaggttctcccgggctttaaaaacctccctctggaagaccaaatcactctgatacagtattcttggatgtgcctctcttcgttcgcgctgtcatggaggagttataagcacacaaactctcagtttctctactttgcaccagatctcgtcttcaacgaggagaagatgcaccagtctgccatgtatgaactgtgccagggcatgcatcagatttccctgcagtttgtgcgactacagctgactttcgaggaatatacaattatgaaagttttgctactcctctccaccatcccgaaggacggcctgaaatctcaagccgcattcgaagagatgagaacgaactatataaaagagctgagaaagatggtcacgaagtgccctaacaattccggacagagctggcaacgcttctaccagctgacaaagctgctggatagcatgcatgatctggtcagcgacttactcgaattttgcttttacacctttagagaatctcacgccctcaaggttgaatttcccgccatgctggtggagattattagtgaccagctccctaaagtggagtccggaaatgccaaaccactttatttccatcggaagtag

SEQ ID NO: 326141 - DNA, 2967 bp, Artificial Sequence
  derived and/or modified sequence
atggagaccaagggctaccacagcctgcccgagggcctggacatggagagacggtggggtcaggtaagccaggctgtcgaacggagctctctgggcccaacggagagaacggacgaaaacaactacatggaaattgtcaacgtctcctgtgtgagtggggccattcccaacaattccactcaaggctcttcgaaagagaagcaggagctgctaccctgcttacagcaggataacaataggccaggcatactgacatcagacattaaaaccgagctggagagcaaggaactgagcgcaactgttgccgagtctatgggcctctatatggacagcgtacgcgatgctgattattcctacgaacaacagaatcagcagggatctatgagccccgccaagatatatcaaaatgtggagcagctagttaagttctacaagggaaatgggcacagaccgagtacattgtcgtgcgtaaacacgccgctccggtcattcatgagcgactctggtagtagcgtcaacggcggtgtaatgcgcgcggtcgtgaagtctccaattatgtgtcacgagaagtctcctagtgtgtgcagcccactcaatatgacatccagtgtctgcagccctgccggcatcaattcggtgagctccaccacagccagttttggtagttttcccgttcatagccctattacccagggcacccctcttacttgctcccccaatgtggagaatcggggatcccgcagccactcaccagcccacgccagcaatgtaggaagccccctgtcatctcctctatcctctatgaagagttccatctcttctcctccctcacactgctcagtcaagtcacctgtctcatctcctaacaacgtcactcttcgtagctccgtctcaagtccagctaacatcaacaacagcaggtgctccgtgagcagtccatctaacacaaataaccgcagtactcttagttcccccgctgcctcgactgttgggtcaatctgttccccagtgaataatgccttttcctacaccgcctcgggaacctccgctgggtcctcaaccctgagggacgttgtgccttcgcctgatacacaagagaagggtgcacaggaggttccgtttcctaagaccgaagaagtcgaatctgccatatccaatggagttacagggcagttgaacatcgtgcagtacatcaaacctgaacctgacggcgccttttctagttcttgcctggggggaaactcaaagattaacagcgattctagcttcagtgtaccgatcaagcaggaaagcaccaagcacagctgctcaggcacttcatttaagggcaaccctacagtgaatccttttccttttatggatggtagttactttagctttatggatgacaaggattactattctctgtccggaatcctcgggcctcccgtgccgggattcgacgggaattgcgaggggtctggcttccccgtggggatcaagcaggagcctgatgatggaagttattatccagaggcaagcatccctagctcagcaattgtgggagtgaacagcgggggacagtcctttcattatcgaattggcgcgcagggcaccatatcactgtctagatccgctagggaccagtccttccaacacctgtcctcttttccccctgtcaataccctcgttgagtcctggaaatcacacggagacctttccagtaggcggtccgacggctatccagtgttagaatatatacctgagaatgtcagcagctctaccctcagaagcgtgtcaaccgggagctcaagaccttctaagatttgcttagtgtgcggggacgaagcatccggatgccactacggcgtggtgacatgtggaagttgcaaggtgttcttcaaacgagcagttgagggaaagtgtagctggcagcacaactatctttgcgccgggcgaaacgactgcatcattgacaaaatccggagaaagaactgccctgcgtgccggcttcagaaatgcctgcaggccggcatgaaccttggagcacgtaaatctaagaaacttggaaagctgaagggcattcacgaagaacagcctcagcagcaacagcctcctcccccccccccacctccacagtcacccgaagaaggtacaacatacattgccccagccaaggaaccttcggtaaacactgccctcgtgcctcagttgtcgactatttctagggccctcacccctagtccagtcatggtgttggaaaacattgaacccgaaatcgtttacgccgggtacgactcatctaagccagacaccgctgaaaatctcctcagcactctgaacagactagcagggaagcagatgatacaagtggtgaaatgggctaaagtactgcccggatttaaaaatctcccactcgaagaccaaataacgcttatacaatacagttggatgtgcctgagctccttcgctcttagctggcgcagttataaacacacaaattcacagtttctctacttcgccccggatttagtgtttaacgaggaaaagatgcaccagagcgcaatgtacgagctatgtcaagggatgcaccagataagcctgcagttcgtgagactacagctgacttttgaggagtacactatcatgaaggtgttgctactactctccacaatacctaaggacggcctgaagtctcaggcagccttcgaagagatgcgaacaaactacatcaaagagctcaggaagatggtcactaaatgccccaacaactctggacagagttggcagcggttttatcaattaacaaagctactggactcgatgcatgatctggtctcagacctgcttgagttctgtttttacacctttcgcgagagccatgctctgaaggtagaattccccgccatgctagtcgaaatcatttccgaccaacttccgaaagtcgagtcagggaatgctaaacccttgtatttccatcgcaaatag

SEQ ID NO: 326142 - DNA, 5909 bp, Artificial Sequence
  derived and/or modified sequence
aaaagggccagccctccagctggcccactccccctccgggctttcgcccgccctctctccctcccttttttgcccgccctggccctgcccctgcccctgccccctcctctcagcccctccgcgcccggggtgtcattgggcccgggagacgggagccaacttcaggctgctcagaggaagcccgtgcagtcagtcacctgggtgcaagagcgttgctgcctcgggctctcccgctgcagggagagcggcactcgctggcctggatgtggttggatttaggggggctccgcagcaggggtttcgtggcggtggcaagcgctgcaacaggtagacggcgagagacggaccccggccgaggcagcgatggagaccaaaggctaccacagtctccctgaaggtctagatatggaaagacggtggggtcaagtttctcaggctgtggagcgttcttccctgggacctacagagaggaccgatgagaataactacatggagattgtcaacgtaagctgtgtttccggtgctattccaaacaacagtactcaaggaagcagcaaagaaaaacaagaactactcccttgccttcagcaagacaataatcggcctgggattttaacatctgatattaaaactgagctggaatctaaggaactttcagcaactgtagctgagtccatgggtttatatatggattctgtaagagatgctgactattcctatgagcagcagaaccaacaaggaagcatgagtccagctaagatttatcagaatgttgaacagctggtgaaattttacaaaggaaatggccatcgtccttccactctaagttgtgtgaacacgcccttgagatcatttatgtctgactctgggagctccgtgaatggtggcgtcatgcgcgccgttgttaaaagccctatcatgtgtcatgagaaaagcccgtctgtttgcagccctctgaacatgacatcttcggtttgcagccctgctggaatcaactctgtgtcctccaccacagccagctttggcagttttccagtgcacagcccaatcacccagggaactcctctgacatgctcccctaatgttgaaaatcgaggctccaggtcgcacagccctgcacatgctagcaatgtgggctctcctctctcaagtccgttaagtagcatgaaatcctcaatttccagccctccaagtcactgcagtgtaaaatctccagtctccagtcccaataatgtcactctgagatcctctgtgtctagccctgcaaatattaacaactcaaggtgctctgtttccagcccttcgaacactaataacagatccacgctttccagtccggcagccagtactgtgggatctatctgtagccctgtaaacaatgccttcagctacactgcttctggcacctctgctggatccagtacattgcgggatgtggttcccagtccagacacgcaggagaaaggtgctcaagaggtcccttttcctaagactgaggaagtagagagtgccatctcaaatggtgtgactggccagcttaatattgtccagtacataaaaccagaaccagatggagcttttagcagctcatgtctaggaggaaatagcaaaataaattcggattcttcattctcagtaccaataaagcaagaatcaaccaagcattcatgttcaggcacctcttttaaagggaatccaacagtaaacccgtttccatttatggatggctcgtatttttcctttatggatgataaagactattattccctatcaggaattttaggaccacctgtgcccggctttgatggtaactgtgaaggcagcggattcccagtgggtattaaacaagaaccagatgatgggagctattacccagaggccagcatcccttcctctgctattgttggggtgaattcaggtggacagtccttccactacaggattggtgctcaaggtacaatatctttatcacgatcggctagagaccaatctttccaacacctgagttcctttcctcctgtcaatactttagtggagtcatggaaatcacacggcgacctgtcgtctagaagaagtgatgggtatccggtcttagaatacattccagaaaatgtatcaagctctactttacgaagtgtttctactggatcttcaagaccttcaaaaatatgtttggtgtgtggggatgaggcttcaggatgccattatggggtagtcacctgtggcagctgcaaagttttcttcaaaagagcagtggaaggtaaatgttcatggcaacacaactatttatgtgctggaagaaatgattgcatcattgataagattcgacgaaagaattgtcctgcttgcagacttcagaaatgtcttcaagctggaatgaatttaggagcacgaaagtcaaagaagttgggaaagttaaaagggattcacgaggagcagccacagcagcagcagcccccacccccacccccacccccgcaaagcccagaggaagggacaacgtacatcgctcctgcaaaagaaccctcggtcaacacagcactggttcctcagctctccacaatctcacgagcgctcacaccttcccccgttatggtccttgaaaacattgaacctgaaattgtatatgcaggctatgacagctcaaaaccagatacagccgaaaatctgctctccacgctcaaccgcttagcaggcaaacagatgatccaagtcgtgaagtgggcaaaggtacttccaggatttaaaaacttgcctcttgaggaccaaattaccctaatccagtattcttggatgtgtctatcatcatttgccttgagctggagatcgtacaaacatacgaacagccaatttctctattttgcaccagacctagtctttaatgaagagaagatgcatcagtctgccatgtatgaactatgccaggggatgcaccaaatcagccttcagttcgttcgactgcagctcacctttgaagaatacaccatcatgaaagttttgctgctactaagcacaattccaaaggatggcctcaaaagccaggctgcatttgaagaaatgaggacaaattacatcaaagaactgaggaagatggtaactaagtgtcccaacaattctgggcagagctggcagaggttctaccaactgaccaagctgctggactccatgcatgacctggtgagcgacctgctggaattctgcttctacaccttccgagagtcccatgcgctgaaggtagagttccccgcaatgctggtggagatcatcagcgaccagctgcccaaggtggagtcggggaacgccaagccgctctacttccaccggaagtgactgcccgctgcccagaagaactttgccttaagtttccctgtgttgttccacacccagaaggacccaagaaaacctgtttttaacatgtgatggttgattcacacttgttcaacagtttctcaagtttaaagtcatgtcagaggtttggagccgggaaagctgtttttccgtggatttggcgagaccagagcagtctgaaggattccccacctccaatcccccagcgcttagaaacatgttcctgttcctcgggatgaaaagccatatctagtcaataactctgattttgatattttcacagatggaagaagttttaactatgccgtgtagtttctggtatcgttcgcttgttttaaaagggttcaaggactaacgaacgttttaaagcttacccttggtttgcacataaaacgtatagtcaatatggggcattaatattcttttgttattaaaaaaacacaaaaaaataataaaaaaatatatacagattcctgttgtgtaataacagaactcgtggcgtggggcagcagctgcctctgagccctcgctcgtccacggtcttctgcatcactggtatacacactcgttagcgtccatttcttatttaattagaatggataagatgatgttaaatgccttggtttgatttctagtatctattgtgttggctttacaaataattttttgcagtcttttgctgtgctgtacattactgtatgtataaattatgaaggacctgaaataaggtataaggatcttttgtaaatgagacacatacaaaaaaaatctttaatggttaataggatgaatgggaaagtatttttgaaagaattctattttgctggagactatttaagtactatctttgtctaaacaaggtaatttttttttgtaaagtgcaatgtcctgcatgcataatgaaccgtttacagtgtatttaagaaagggaaagctgtgccttttttagcttcatatctaatttaccattattttacagtctctgttgtaaataaccacactgaaacctcttcggttgtcttgaaacctttctactttttctgtactttttgttttgttcttggtctcccgcttggggcatttgtgggactccagcacgttttctggcttctgcttcatcctgctccatcggggaatgacacactgcggtgtctgcagctcctggaaggtgtcatttgacaacacatgtgggagaggaggtccttggagtgctgcagctttgggaaagctgcctcgtttcccttttcctctagaagcagaaccagctctacgagagtgagactgggaacttgatggctcagagagcatcttttcctcccattttagaaaatcagattttctcctgtgggaaaaaaaaattccatgcactctctctctgttaaagatcagctattcccttctgatcttggaaagaggttctgcactcctggaaccggtcacaggaacgcacagatcatggcaggatgcgctgggacggcccatcttggcaaggttcagtctgaatggcatggagaccgggagatagaggggttttagatttttaaaaggtaggttttaaaaataagttttatacataaacagttttggagaaaaattacagatcatataagcaagacagtggcactaaaatgtttaattcattaatctgtttgtttggcactgatgcaatgtatggcttttctcttgccccaaatcacaaacatatgtatctttggggaaactaacaatatgattgcactaaataaactactttgaatagaggccaaattaatcttttaaaaatgatgataatcatcaggtttactcagtgaaatcatattaattattttccaaaatctaaaagctgtagctggagaagcccatggccacgaggaagcagcaattaattagatcaacacttttctccagggttcaccatgcaggcaacattaccttgtctttcaaaagacacctgccttatgcaaggggaaacctgtgaaagctgcactcagagggaggagtttttcttacataatttgcaatttcaggaatttaatttataggcagatctttaaatacagtcaacttacggtgcacagtaatatgaaagccacactttgaaggtaataaatacacagcatgcagactgggagttgctagcaaacaaatggcttacttacaaaagcagcttttagttcagacttagtttttataaaatgggaattctgacttacttaaccaggtttgggatggagatggtctgcatcagctttttgtattaacaaagttactggctctttgtgtgtctccaggtaactttgcttgattaaacagcaaagccatattctaaattcactgttgaatgcctgtcccagtccaaattgtctgtctgctcttatttttgtaccatattgctcttaaaaatcttggtttggtacagttcataattcaccaaaagttcatataatttaaagaaacactaaattagtttaaaatgaagcaatttatatctttatgcaaaaacatatgtctgtctttgcaaaggactgtaagcagattacaataaatcctttactttaatc

SEQ ID NO: 326143 - DNA, 2967 bp, Artificial Sequence
  derived and/or modified sequence
atggagaccaaaggctaccacagtctccctgaaggtctagatatggaaagacggtggggtcaagtttctcaggctgtggagcgttcttccctgggacctacagagaggaccgatgagaataactacatggagattgtcaacgtaagctgtgtttccggtgctattccaaacaacagtactcaaggaagcagcaaagaaaaacaagaactactcccttgccttcagcaagacaataatcggcctgggattttaacatctgatattaaaactgagctggaatctaaggaactttcagcaactgtagctgagtccatgggtttatatatggattctgtaagagatgctgactattcctatgagcagcagaaccaacaaggaagcatgagtccagctaagatttatcagaatgttgaacagctggtgaaattttacaaaggaaatggccatcgtccttccactctaagttgtgtgaacacgcccttgagatcatttatgtctgactctgggagctccgtgaatggtggcgtcatgcgcgccgttgttaaaagccctatcatgtgtcatgagaaaagcccgtctgtttgcagccctctgaacatgacatcttcggtttgcagccctgctggaatcaactctgtgtcctccaccacagccagctttggcagttttccagtgcacagcccaatcacccagggaactcctctgacatgctcccctaatgttgaaaatcgaggctccaggtcgcacagccctgcacatgctagcaatgtgggctctcctctctcaagtccgttaagtagcatgaaatcctcaatttccagccctccaagtcactgcagtgtaaaatctccagtctccagtcccaataatgtcactctgagatcctctgtgtctagccctgcaaatattaacaactcaaggtgctctgtttccagcccttcgaacactaataacagatccacgctttccagtccggcagccagtactgtgggatctatctgtagccctgtaaacaatgccttcagctacactgcttctggcacctctgctggatccagtacattgcgggatgtggttcccagtccagacacgcaggagaaaggtgctcaagaggtcccttttcctaagactgaggaagtagagagtgccatctcaaatggtgtgactggccagcttaatattgtccagtacataaaaccagaaccagatggagcttttagcagctcatgtctaggaggaaatagcaaaataaattcggattcttcattctcagtaccaataaagcaagaatcaaccaagcattcatgttcaggcacctcttttaaagggaatccaacagtaaacccgtttccatttatggatggctcgtatttttcctttatggatgataaagactattattccctatcaggaattttaggaccacctgtgcccggctttgatggtaactgtgaaggcagcggattcccagtgggtattaaacaagaaccagatgatgggagctattacccagaggccagcatcccttcctctgctattgttggggtgaattcaggtggacagtccttccactacaggattggtgctcaaggtacaatatctttatcacgatcggctagagaccaatctttccaacacctgagttcctttcctcctgtcaatactttagtggagtcatggaaatcacacggcgacctgtcgtctagaagaagtgatgggtatccggtcttagaatacattccagaaaatgtatcaagctctactttacgaagtgtttctactggatcttcaagaccttcaaaaatatgtttggtgtgtggggatgaggcttcaggatgccattatggggtagtcacctgtggcagctgcaaagttttcttcaaaagagcagtggaaggtaaatgttcatggcaacacaactatttatgtgctggaagaaatgattgcatcattgataagattcgacgaaagaattgtcctgcttgcagacttcagaaatgtcttcaagctggaatgaatttaggagcacgaaagtcaaagaagttgggaaagttaaaagggattcacgaggagcagccacagcagcagcagcccccacccccacccccacccccgcaaagcccagaggaagggacaacgtacatcgctcctgcaaaagaaccctcggtcaacacagcactggttcctcagctctccacaatctcacgagcgctcacaccttcccccgttatggtccttgaaaacattgaacctgaaattgtatatgcaggctatgacagctcaaaaccagatacagccgaaaatctgctctccacgctcaaccgcttagcaggcaaacagatgatccaagtcgtgaagtgggcaaaggtacttccaggatttaaaaacttgcctcttgaggaccaaattaccctaatccagtattcttggatgtgtctatcatcatttgccttgagctggagatcgtacaaacatacgaacagccaatttctctattttgcaccagacctagtctttaatgaagagaagatgcatcagtctgccatgtatgaactatgccaggggatgcaccaaatcagccttcagttcgttcgactgcagctcacctttgaagaatacaccatcatgaaagttttgctgctactaagcacaattccaaaggatggcctcaaaagccaggctgcatttgaagaaatgaggacaaattacatcaaagaactgaggaagatggtaactaagtgtcccaacaattctgggcagagctggcagaggttctaccaactgaccaagctgctggactccatgcatgacctggtgagcgacctgctggaattctgcttctacaccttccgagagtcccatgcgctgaaggtagagttccccgcaatgctggtggagatcatcagcgaccagctgcccaaggtggagtcggggaacgccaagccgctctacttccaccggaagtga

SEQ ID NO: 326144 - DNA, 2967 bp, Artificial Sequence
  derived and/or modified sequence
atggagacgaaaggttaccatagcctgcctgagggcttggatatggaaagacgctgggggcaggtttcacaggcggtagaacgatcgagtctcggccctactgagcgaactgacgaaaataactatatggagattgtcaacgtctcttgcgtaagcggcgctattcccaacaattccacacagggctcaagtaaagagaaacaggagctcctgccttgtttgcaacaggacaataatcggccagggattctgaccagcgacataaaaaccgagctcgagtctaaggagctatccgcgactgtggccgaaagtatgggactgtatatggattccgtgagggacgctgactactcctacgagcagcagaaccagcagggaagtatgtctcctgccaaaatttaccagaacgttgagcagctggttaaattttataagggcaatggacacaggccgtcaacactaagctgcgtcaacactcctttgcgctcttttatgtctgattcaggcagttccgtgaacggaggcgtgatgcgagcagtagtcaagtccccaatcatgtgccacgagaaatctcctagtgtgtgctctccattgaatatgacctcctcagtatgttctccagccggtattaacagcgtcagttctaccactgcaagcttcggttccttccctgtgcattcccccattacacagggaactccccttacgtgctcgccaaatgtcgagaaccgcggatcgcgaagccattcccctgcgcacgcgtctaatgtgggcagcccacttagctctcccctcagctcaatgaagtcttccatttctagtcctccatcccactgtagcgtgaagagtcctgtctccagcccaaacaatgtaacactcaggtctagcgtctcaagtcccgcaaatatcaacaacagccgctgttccgtatcctccccgtccaacaccaacaatcgctccacactttctagccctgctgcctctacagtcgggagcatatgttctcccgtcaataacgcattttcatacactgcctctggcacctccgctggctccagcaccctccgcgatgtggtgcccagtcccgatacacaggagaagggcgctcaggaggttccttttccaaagacggaggaagtcgaatctgccattagcaatggggttactggccagcttaatattgtgcagtatatcaagccggaaccagatggggctttcagctcttcctgcctcggcggtaattccaagattaacagcgactcatcatttagtgtaccgatcaagcaggagagcactaagcacagctgctccggcacaagcttcaaaggtaacccaaccgtgaatccattcccatttatggacgggagctatttcagcttcatggatgataaagactattactctctgtccggcattctgggaccccctgtgcctggcttcgacggtaactgcgaggggtcaggttttcctgtcggaatcaagcaggagccagatgacggctcatattatcccgaggcatcaatcccttcatctgccatcgtcggagtgaattcggggggacagtcgtttcattataggatcggcgcacagggaaccatatcactctcgcggagtgctcgggatcagtcctttcagcacctcagttcattccctcccgttaacactctcgtggaatcctggaagtcccatggagatctctcttctcgtagaagcgacggttacccagtccttgagtacatccccgaaaacgtttccagcagtactctgcggtctgtgtcaaccggaagctcgcgacctagtaagatctgcctggtctgtggcgatgaagcgtccggctgccactacggcgtcgtgacgtgtgggagctgcaaagtcttcttcaagagagcagtggaagggaaatgcagctggcagcacaattatctttgcgccggtcggaacgattgtataatcgataaaattagaaggaaaaactgtccagcttgtagattacaaaaatgtcttcaagctggaatgaatctgggggctcgcaagtctaagaagctgggcaagctaaaaggcatacacgaggagcagccacagcagcagcaacctcccccacccccaccacctcctcaatcacccgaggagggaacgacttacatcgcgcctgctaaggagccttcagtcaacacggccctggtcccacagcttagtaccatttcgcgcgctttgaccccatccccggtaatggtcctggagaacattgaacccgaaatcgtgtacgccggttacgattcttcaaagcccgatacagccgaaaacctattgtccacactcaaccggttagctggcaagcaaatgattcaggtggtaaagtgggccaaggtcctaccaggattcaagaacctgcctctggaggatcagataacactgattcagtacagctggatgtgcctctcatcatttgccctgtcctggcgatcatataagcatactaatagccaattcctgtattttgccccagacctcgtgtttaatgaggagaagatgcatcagtccgccatgtatgagctgtgccagggcatgcaccagatctctctgcagtttgtgaggctccagctcacgtttgaggagtacactattatgaaggttctgttactgctgtctactattccgaaagatggactcaagtcgcaggccgcatttgaggaaatgaggaccaactacattaaagaactgaggaagatggtgactaagtgccccaataactccggccagtcatggcagcgcttttaccaattaactaagttattagattcaatgcacgacctggtgtccgacctgctcgaattctgcttctataccttcagggagtcccacgcactgaaggtagaatttcctgccatgctcgtggagatcatctccgatcagctaccgaaggtggagagcggcaatgcaaaacccttgtatttccatcgcaaatag

SEQ ID NO: 326145 - DNA, 2967 bp, Artificial Sequence
  derived and/or modified sequence
atggaaactaagggttatcattctctgcctgaggggctggacatggagcgacgctggggtcaggtttctcaggccgtggaacgctcctccctcggcccaaccgagcgcacagatgaaaacaactatatggaaatcgtgaacgtgagttgcgtttctggcgctatcccaaataactctacacagggatcttccaaagaaaagcaagagcttcttccctgcctgcaacaggataacaaccgaccgggtattctaacctcagacattaaaacggagctcgagtccaaggagttgtccgctaccgtagccgagagcatgggcttgtatatggatagcgtgagagacgcagattactcttatgaacagcagaatcagcagggctccatgtctcccgcaaagatctaccagaatgttgagcagctggtgaagttttacaagggcaacggccacaggccatccacgttgagctgcgtgaacactcccctgaggagctttatgtcagacagcggatctagcgttaacggtggggtgatgcgggcagtcgtgaaaagcccgattatgtgtcacgagaagagtccctccgtttgctcacctttgaacatgacctctagtgtgtgtagcccggctggaataaacagcgtgagctcaaccacagcgtctttcggctcgtttcccgtgcacagcccgattactcaggggaccccacttacatgttcaccgaacgttgaaaacaggggctccaggtctcactctccggcacacgcgtctaatgtcggatcccccctgtcaagcccactgagtagcatgaaatcctcaataagctccccaccttcacactgcagcgttaagtcgccagtgtcaagtcccaataacgtaacactccggtcatctgtctcatcccctgccaacatcaacaattctcgatgtagcgtgtcctcccccagcaatacgaacaacagatcaaccctgagcagccccgctgcaagtacggtcggcagtatatgctccccagtcaacaacgcattctcctacacagcatcagggacatctgctggcagtagtacactgcgagacgtggtgcctagcccggatactcaagaaaagggcgctcaggaggtgccttttcccaaaacagaggaagttgagtcggcgatatcaaatggcgtgactggccaattgaacatagtgcagtacatcaagcccgagccggacggggcattcagtagcagctgccttggcggaaactcaaagataaatagcgattcgtctttttctgtccccataaaacaagagagcacaaaacattcctgcagcgggacatctttcaaagggaaccctactgtgaatccttttccgtttatggatggttcctacttctcattcatggacgataaggactattacagtctgagtggtatcctggggcctccagtgcctggctttgatgggaactgcgaaggcagcggtttccctgttgggattaaacaagagcctgacgatggatcatattaccccgaagccagtattccctcctccgccatcgtgggtgtgaacagcggtggtcagtcttttcattatagaattggtgcacagggcaccatctcactgtcaagaagtgctcgtgaccagagcttccagcacctctcttctttccctccagttaataccttggtagagtcttggaaatcgcacggggacctcagttccagaaggtccgatgggtatccagtcctagagtacatcccagaaaacgtctctagctccaccctacggagcgtatctacaggcagctctcggccaagtaaaatttgcctcgtgtgcggcgatgaggcctcaggttgtcactatggagtcgttacctgcggttcatgtaaggtcttttttaagagagccgtggagggaaaatgctcctggcaacacaattatttgtgcgcgggtcgcaacgattgcatcatagataagatcagaagaaagaactgtcccgcttgtcgcctccagaagtgtctacaggccggaatgaaccttggggctcgaaaatctaaaaagttgggcaagctcaagggcattcacgaagagcagccacagcaacagcagccaccgcctccaccaccccctccccagtctccagaagaaggcaccacatacattgccccagccaaggagccttctgtgaataccgccctggtgccacaacttagcactattagcagagcgttgactcctagcccagttatggtgctagagaatattgagcctgagattgtgtatgccggttacgattcctcgaagcccgataccgcggaaaacctgctttcaaccctaaacaggctggcaggcaagcagatgatacaggttgtgaaatgggccaaagttttgccaggcttcaagaatttgcccttggaagaccaaatcacgcttatccagtactcctggatgtgcttgtctagctttgccctgtcttggaggtcatacaaacacaccaattctcagttcttatatttcgctcctgacctggtgtttaatgaggaaaagatgcatcagtccgcaatgtacgagctgtgccagggtatgcaccagatcagtctgcagttcgtaaggctgcagctcacatttgaagaatataccataatgaaggttttgctgctgctttcaacaattccaaaagacgggctgaaatcacaggccgctttcgaggaaatgagaacaaactacataaaagagctgagaaagatggtcactaagtgtcctaataactccgggcagtcctggcaaagattctatcagcttactaagctgctggactcaatgcatgatctcgtgagtgatctgctggagttttgcttttacacattcagagaatcacatgccctgaaggttgagtttcccgctatgctggtcgagataattagcgatcagctgcctaaagtcgagagtgggaacgctaagcccctgtatttccaccgcaaatag

SEQ ID NO: 326146 - DNA, 2967 bp, Artificial Sequence
  derived and/or modified sequence
atggagaccaagggctaccacagcctgcccgagggcctggacatggagagaagatggggccaggtgagccaggccgtggagagaagcagcctgggccccaccgagagaaccgacgagaacaactacatggagatcgtgaacgtgagctgcgtgagcggcgccatccccaacaacagcacccagggcagcagcaaggagaagcaggagctgctgccctgcctgcagcaggacaacaacagacccggcatcctgaccagcgacatcaagaccgagctggagagcaaggagctgagcgccaccgtggccgagagcatgggcctgtacatggacagcgtgagagacgccgactacagctacgagcagcagaaccagcagggcagcatgagccccgccaagatctaccagaacgtggagcagctggtgaagttctacaagggcaacggccacagacccagcaccctgagctgcgtgaacacccccctgagaagcttcatgagcgacagcggcagcagcgtgaacggcggcgtgatgagagccgtggtgaagagccccatcatgtgccacgagaagagccccagcgtgtgcagccccctgaacatgaccagcagcgtgtgcagccccgccggcatcaacagcgtgagcagcaccaccgccagcttcggcagcttccccgtgcacagccccatcacccagggcacccccctgacctgcagccccaacgtggagaacagaggcagcagaagccacagccccgcccacgccagcaacgtgggcagccccctgagcagccccctgagcagcatgaagagcagcatcagcagcccccccagccactgcagcgtgaagagccccgtgagcagccccaacaacgtgaccctgagaagcagcgtgagcagccccgccaacatcaacaacagcagatgcagcgtgagcagccccagcaacaccaacaacagaagcaccctgagcagccccgccgccagcaccgtgggcagcatctgcagccccgtgaacaacgccttcagctacaccgccagcggcaccagcgccggcagcagcaccctgagagacgtggtgcccagccccgacacccaggagaagggcgcccaggaggtgcccttccccaagaccgaggaggtggagagcgccatcagcaacggcgtgaccggccagctgaacatcgtgcagtacatcaagcccgagcccgacggcgccttcagcagcagctgcctgggcggcaacagcaagatcaacagcgacagcagcttcagcgtgcccatcaagcaggagagcaccaagcacagctgcagcggcaccagcttcaagggcaaccccaccgtgaaccccttccccttcatggacggcagctacttcagcttcatggacgacaaggactactacagcctgagcggcatcctgggcccccccgtgcccggcttcgacggcaactgcgagggcagcggcttccccgtgggcatcaagcaggagcccgacgacggcagctactaccccgaggccagcatccccagcagcgccatcgtgggcgtgaacagcggcggccagagcttccactacagaatcggcgcccagggcaccatcagcctgagcagaagcgccagagaccagagcttccagcacctgagcagcttcccccccgtgaacaccctggtggagagctggaagagccacggcgacctgagcagcagaagaagcgacggctaccccgtgctggagtacatccccgagaacgtgagcagcagcaccctgagaagcgtgagcaccggcagcagcagacccagcaagatctgcctggtgtgcggcgacgaggccagcggctgccactacggcgtggtgacctgcggcagctgcaaggtgttcttcaagagagccgtggagggcaagtgcagctggcagcacaactacctgtgcgccggcagaaacgactgcatcatcgacaagatcagaagaaagaactgccccgcctgcagactgcagaagtgcctgcaggccggcatgaacctgggcgccagaaagagcaagaagctgggcaagctgaagggcatccacgaggagcagccccagcagcagcagcccccccccccccccccccccccccagagccccgaggagggcaccacctacatcgcccccgccaaggagcccagcgtgaacaccgccctggtgccccagctgagcaccatcagcagagccctgacccccagccccgtgatggtgctggagaacatcgagcccgagatcgtgtacgccggctacgacagcagcaagcccgacaccgccgagaacctgctgagcaccctgaacagactggccggcaagcagatgatccaggtggtgaagtgggccaaggtgctgcccggcttcaagaacctgcccctggaggaccagatcaccctgatccagtacagctggatgtgcctgagcagcttcgccctgagctggagaagctacaagcacaccaacagccagttcctgtacttcgcccccgacctggtgttcaacgaggagaagatgcaccagagcgccatgtacgagctgtgccagggcatgcaccagatcagcctgcagttcgtgagactgcagctgaccttcgaggagtacaccatcatgaaggtgctgctgctgctgagcaccatccccaaggacggcctgaagagccaggccgccttcgaggagatgagaaccaactacatcaaggagctgagaaagatggtgaccaagtgccccaacaacagcggccagagctggcagagattctaccagctgaccaagctgctggacagcatgcacgacctggtgagcgacctgctggagttctgcttctacaccttcagagagagccacgccctgaaggtggagttccccgccatgctggtggagatcatcagcgaccagctgcccaaggtggagagcggcaacgccaagcccctgtacttccacagaaagtag

SEQ ID NO: 326147 - protein, 968 aa, Artificial Sequence
  derived and/or modified sequence
MAEDDPYLGRPEQMFHLDPSLTHTIFNPEVFQPQMALPTDGPYLQILEQPKQRGFRFRYVCEGPSHGGLPGASSEKNKKSYPQVKICNYVGPAKVIVQLVTNGKNIHLHAHSLVGKHCEDGICTVTAGPKDMVVGFANLGILHVTKKKVFETLEARMTEACIRGYNPGLLVHPDLAYLQAEGGGDRQLGDREKELIRQAALQQTKEMDLSVVRLMFTAFLPDSTGSFTRRLEPVVSDAIYDSKAPNASNLKIVRMDRTAGCVTGGEEIYLLCDKVQKDDIQIRFYEEEENGGVWEGFGDFSPTDVHRQFAIVFKTPKYKDINITKPASVFVQLRRKSDLETSEPKPFLYYPEIKDKEEVQRKRQKLMPNFSDSFGGGSGAGAGGGGMFGSGGGGGGTGSTGPGYSFPHYGFPTYGGITFHPGTTKSNAGMKHGTMDTESKKDPEGCDKSDDKNTVNLFGKVIETTEQDQEPSEATVGNGEVTLTYATGTKEESAGVQDNLFLEKAMQLAKRHANALFDYAVTGDVKMLLAVQRHLTAVQDENGDSVLHLAIIHLHSQLVRDLLEVTSGLISDDIINMRNDLYQTPLHLAVITKQEDVVEDLLRAGADLSLLDRLGNSVLHLAAKEGHDKVLSILLKHKKAALLLDHPNGDGLNAIHLAMMSNSLPCLLLLVAAGADVNAQEQKSGRTALHLAVEHDNISLAGCLLLEGDAHVDSTTYDGTTPLHIAAGRGSTRLAALLKAAGADPLVENFEPLYDLDDSWENAGEDEGVVPGTTPLDMATSWQVFDILNGKPYEPEFTSDDLLAQGDMKQLAEDVKLQLYKLLEIPDPDKNWATLAQKLGLGILNNAFRLSPAPSKTLMDNYEVSGGTVRELVEALRQMGYTEAIEVIQAASSPVKTTSQAHSLPLSPASTRQQIDELRDSDSVCDSGVETSFRKLSFTESLTSGASLLTLNKMPHDYGQEGPLEGKI

SEQ ID NO: 326148 - protein, 74 aa, Artificial Sequence
  derived and/or modified sequence
MKRTTSFRMAEDDPYLGRPEQMFHLDPSLTHTIFNPEVFQPQMALPTDGPYLQILEQPKQRGFRFRYVCEGPSH

SEQ ID NO: 326149 - DNA, 225 bp, Artificial Sequence
  derived and/or modified sequence
atgaagagaaccaccagcttcagaatggccgaggacgacccctacctgggcagacccgagcagatgttccacctggaccccagcctgacccacaccatcttcaaccccgaggtgttccagccccagatggccctgcccaccgacggcccctacctgcagatcctggagcagcccaagcagagaggcttcagattcagatacgtgtgcgagggccccagccactag

SEQ ID NO: 326150 - DNA, 225 bp, Artificial Sequence
  derived and/or modified sequence
atgaagcgcacaacatcctttagaatggcagaggatgacccatacctgggccggccagaacagatgttccatctcgacccatcacttacacacaccatttttaatcccgaggtttttcagcctcaaatggcgctgcctacagacggcccttatcttcaaatactggagcaaccaaagcagcgaggatttagatttagatatgtttgtgagggacccagtcactag

SEQ ID NO: 326151 - DNA, 225 bp, Artificial Sequence
  derived and/or modified sequence
atgaagaggaccaccagcttcaggatggctgaagatgacccctacctgggccggcctgagcagatgttccacctggaccccagcctgacccacaccatcttcaaccctgaggtgttccagccccagatggccctgcccacagatggcccctacctgcagatcctggagcagcccaagcagaggggcttccgcttccgctacgtgtgtgagggccccagccactag

SEQ ID NO: 326152 - DNA, 225 bp, Artificial Sequence
  derived and/or modified sequence
atgaagcggaccaccagcttccggatggccgaggacgacccctacctgggcaggccggaacaaatgtttcatctggacccttctcttacgcacaccatctttaatcctgaagtctttcaaccccagatggcccttcccaccgatgggccttatcttcagattctcgaacaaccaaagcagaggggattcaggtttagatatgtttgcgagggccccagccattag

SEQ ID NO: 326153 - DNA, 3693 bp, Artificial Sequence
  derived and/or modified sequence
gagagagtgagcgagacagaaagagagagaagtgcaccagcgagccggggcaggaagaggaggtttcgccaccggagcggcccggcgacgcgctgacagcttcccctgcccttcccgtcggtcgggccgccagccgccgcagccctcggcctgcacgcagccaccggccccgctcccggagcccagcgccgccgaggccgcagccgcccggccagtaaggcggcgccgccgcccggccaccgcgcgccctgcgcttccctccgcccgcgctgcggccatggcgcggcgctgactggcctggcccggccccgccgcgctcccgctcgccccgacccgcactcgggcccgcccgggctccggcctgccgccgcctcttccttctccagccggcaggcccgcgccgcttaggagggagagcccacccgcgccaggaggccgaacgcggactcgccacccggcttcagaatggcagaagatgatccatatttgggaaggcctgaacaaatgtttcatttggatccttctttgactcatacaatatttaatccagaagtatttcaaccacagatggcactgccaacagatggcccataccttcaaatattagagcaacctaaacagagaggatttcgtttccgttatgtatgtgaaggcccatcccatggtggactacctggtgcctctagtgaaaagaacaagaagtcttaccctcaggtcaaaatctgcaactatgtgggaccagcaaaggttattgttcagttggtcacaaatggaaaaaatatccacctgcatgcccacagcctggtgggaaaacactgtgaggatgggatctgcactgtaactgctggacccaaggacatggtggtcggcttcgcaaacctgggtatacttcatgtgacaaagaaaaaagtatttgaaacactggaagcacgaatgacagaggcgtgtataaggggctataatcctggactcttggtgcaccctgaccttgcctatttgcaagcagaaggtggaggggaccggcagctgggagatcgggaaaaagagctaatccgccaagcagctctgcagcagaccaaggagatggacctcagcgtggtgcggctcatgtttacagcttttcttccggatagcactggcagcttcacaaggcgcctggaacccgtggtatcagacgccatctatgacagtaaagcccccaatgcatccaacttgaaaattgtaagaatggacaggacagctggatgtgtgactggaggggaggaaatttatcttctttgtgacaaagttcagaaagatgacatccagattcgattttatgaagaggaagaaaatggtggagtctgggaaggatttggagatttttcccccacagatgttcatagacaatttgccattgtcttcaaaactccaaagtataaagatattaatattacaaaaccagcctctgtgtttgtccagcttcggaggaaatctgacttggaaactagtgaaccaaaacctttcctctactatcctgaaatcaaagataaagaagaagtgcagaggaaacgtcagaagctcatgcccaatttttcggatagtttcggcggtggtagtggtgctggagctggaggcggaggcatgtttggtagtggcggtggaggagggggcactggaagtacaggtccagggtatagcttcccacactatggatttcctacttatggtgggattactttccatcctggaactactaaatctaatgctgggatgaagcatggaaccatggacactgaatctaaaaaggaccctgaaggttgtgacaaaagtgatgacaaaaacactgtaaacctctttgggaaagttattgaaaccacagagcaagatcaggagcccagcgaggccaccgttgggaatggtgaggtcactctaacgtatgcaacaggaacaaaagaagagagtgctggagttcaggataacctctttctagagaaggctatgcagcttgcaaagaggcatgccaatgcccttttcgactacgcggtgacaggagacgtgaagatgctgctggccgtccagcgccatctcactgctgtgcaggatgagaatggggacagtgtcttacacttagcaatcatccaccttcattctcaacttgtgagggatctactagaagtcacatctggtttgatttctgatgacattatcaacatgagaaatgatctgtaccagacgcccttgcacttggcagtgatcactaagcaggaagatgtggtggaggatttgctgagggctggggccgacctgagccttctggaccgcttgggtaactctgttttgcacctagctgccaaagaaggacatgataaagttctcagtatcttactcaagcacaaaaaggcagcactacttcttgaccaccccaacggggacggtctgaatgccattcatctagccatgatgagcaatagcctgccatgtttgctgctgctggtggccgctggggctgacgtcaatgctcaggagcagaagtccgggcgcacagcactgcacctggctgtggagcacgacaacatctcattggcaggctgcctgctcctggagggtgatgcccatgtggacagtactacctacgatggaaccacacccctgcatatagcagctgggagagggtccaccaggctggcagctcttctcaaagcagcaggagcagatcccctggtggagaactttgagcctctctatgacctggatgactcttgggaaaatgcaggagaggatgaaggagttgtgcctggaaccacgcctctagatatggccaccagctggcaggtatttgacatattaaatgggaaaccatatgagccagagtttacatctgatgatttactagcacaaggagacatgaaacagctggctgaagatgtgaagctgcagctgtataagttactagaaattcctgatccagacaaaaactgggctactctggcgcagaaattaggtctggggatacttaataatgccttccggctgagtcctgctccttccaaaacacttatggacaactatgaggtctctgggggtacagtcagagagctggtggaggccctgagacaaatgggctacaccgaagcaattgaagtgatccaggcagcctccagcccagtgaagaccacctctcaggcccactcgctgcctctctcgcctgcctccacaaggcagcaaatagacgagctccgagacagtgacagtgtctgcgacagcggcgtggagacatccttccgcaaactcagctttaccgagtctctgaccagtggtgcctcactgctaactctcaacaaaatgccccatgattatgggcaggaaggacctctagaaggcaaaatttagcctgctgacaatttcccacaccgtgtaaaccaaagccctaaaattccactgcgttgtccacaagacagaagctgaagtgcatccaaaggtgctcagagagccggcccgcctgaatcattctcgatttaactcgagaccttttcaacttggcttcctttcttggttcataaatgaattttagtttggttcacttacagatagtatctagcaatcacaacactggctgagcggatgcatctggggatgaggttgcttactaagctttgccagctgctgctggatcacagctgctttctgttgtcattgctgttgtccctctgc

SEQ ID NO: 326154 - DNA, 3707 bp, Artificial Sequence
  derived and/or modified sequence
gctaaccgctgggctagaccgtgggaggaggttgacagtagctgagaggcacatgggattagcgacagcggggaaagacacatccggacctcgcaggggctagtcggccgaagggccgcggccgcccggcggtcatttctcttcacgtccctccgcggggcgggaacgcgaaccggaggggaactcttacaaacttttaaaatccccaaccccagccccacctgggggatggtgagaaggttggagtgcgctgcggcgcggaggagagagcttcagaatggcagaagatgatccatatttgggaaggcctgaacaaatgtttcatttggatccttctttgactcatacaatatttaatccagaagtatttcaaccacagatggcactgccaacagatggcccataccttcaaatattagagcaacctaaacagagaggatttcgtttccgttatgtatgtgaaggcccatcccatggtggactacctggtgcctctagtgaaaagaacaagaagtcttaccctcaggtcaaaatctgcaactatgtgggaccagcaaaggttattgttcagttggtcacaaatggaaaaaatatccacctgcatgcccacagcctggtgggaaaacactgtgaggatgggatctgcactgtaactgctggacccaaggacatggtggtcggcttcgcaaacctgggtatacttcatgtgacaaagaaaaaagtatttgaaacactggaagcacgaatgacagaggcgtgtataaggggctataatcctggactcttggtgcaccctgaccttgcctatttgcaagcagaaggtggaggggaccggcagctgggagatcgggaaaaagagctaatccgccaagcagctctgcagcagaccaaggagatggacctcagcgtggtgcggctcatgtttacagcttttcttccggatagcactggcagcttcacaaggcgcctggaacccgtggtatcagacgccatctatgacagtaaagcccccaatgcatccaacttgaaaattgtaagaatggacaggacagctggatgtgtgactggaggggaggaaatttatcttctttgtgacaaagttcagaaagatgacatccagattcgattttatgaagaggaagaaaatggtggagtctgggaaggatttggagatttttcccccacagatgttcatagacaatttgccattgtcttcaaaactccaaagtataaagatattaatattacaaaaccagcctctgtgtttgtccagcttcggaggaaatctgacttggaaactagtgaaccaaaacctttcctctactatcctgaaatcaaagataaagaagaagtgcagaggaaacgtcagaagctcatgcccaatttttcggatagtttcggcggtggtagtggtgctggagctggaggcggaggcatgtttggtagtggcggtggaggagggggcactggaagtacaggtccagggtatagcttcccacactatggatttcctacttatggtgggattactttccatcctggaactactaaatctaatgctgggatgaagcatggaaccatggacactgaatctaaaaaggaccctgaaggttgtgacaaaagtgatgacaaaaacactgtaaacctctttgggaaagttattgaaaccacagagcaagatcaggagcccagcgaggccaccgttgggaatggtgaggtcactctaacgtatgcaacaggaacaaaagaagagagtgctggagttcaggataacctctttctagagaaggctatgcagcttgcaaagaggcatgccaatgcccttttcgactacgcggtgacaggagacgtgaagatgctgctggccgtccagcgccatctcactgctgtgcaggatgagaatggggacagtgtcttacacttagcaatcatccaccttcattctcaacttgtgagggatctactagaagtcacatctggtttgatttctgatgacattatcaacatgagaaatgatctgtaccagacgcccttgcacttggcagtgatcactaagcaggaagatgtggtggaggatttgctgagggctggggccgacctgagccttctggaccgcttgggtaactctgttttgcacctagctgccaaagaaggacatgataaagttctcagtatcttactcaagcacaaaaaggcagcactacttcttgaccaccccaacggggacggtctgaatgccattcatctagccatgatgagcaatagcctgccatgtttgctgctgctggtggccgctggggctgacgtcaatgctcaggagcagaagtccgggcgcacagcactgcacctggctgtggagcacgacaacatctcattggcaggctgcctgctcctggagggtgatgcccatgtggacagtactacctacgatggaaccacacccctgcatatagcagctgggagagggtccaccaggctggcagctcttctcaaagcagcaggagcagatcccctggtggagaactttgagcctctctatgacctggatgactcttgggaaaatgcaggagaggatgaaggagttgtgcctggaaccacgcctctagatatggccaccagctggcaggtatttgacatattaaatgggaaaccatatgagccagagtttacatctgatgatttactagcacaaggagacatgaaacagctggctgaagatgtgaagctgcagctgtataagttactagaaattcctgatccagacaaaaactgggctactctggcgcagaaattaggtctggggatacttaataatgccttccggctgagtcctgctccttccaaaacacttatggacaactatgaggtctctgggggtacagtcagagagctggtggaggccctgagacaaatgggctacaccgaagcaattgaagtgatccaggcagcctccagcccagtgaagaccacctctcaggcccactcgctgcctctctcgcctgcctccacaaggcagcaaatagacgagctccgagacagtgacagtgtctgcgacagcggcgtggagacatccttccgcaaactcagctttaccgagtctctgaccagtggtgcctcactgctaactctcaacaaaatgccccatgattatgggcaggaaggacctctagaaggcaaaatttagcctgctgacaatttcccacaccgtgtaaaccaaagccctaaaattccactgcgttgtccacaagacagaagctgaagtgcatccaaaggtgctcagagagccggcccgcctgaatcattctcgatttaactcgagaccttttcaacttggcttcctttcttggttcataaatgaattttagtttggttcacttacagatagtatctagcaatcacaacactggctgagcggatgcatctggggatgaggttgcttactaagctttgccagctgctgctggatcacagctgctttctgttgtcattgctgttgtccctctgctacgttcctattgtcattaaaggtatcacggtcgccacctggcattccttctgaccacagcatcattttgcattcaaattaagggttaagaaaagagatattttaaaatgagagtcacttgatgtgccattttaaaaaaaaaggcatattgctttttctaatgtggttatttctctgatttgcaaaaaaaaaaaaaaaaaaa

SEQ ID NO: 326155 - DNA, 609 bp, Artificial Sequence
  derived and/or modified sequence
ggccgccagccgccgcagccctcggcctgcacgcagccaccggccccgctcccggagcccagcgccgccgaggccgcagccgcccggccagtaaggcggcgccgccgcccggccaccgcgcgccctgcgcttccctccgcccgcgctgcggccatggcgcggcgctgactggcctggcccggccccgccgcgctcccgctcgccccgacccgcactcgggcccgcccgggctccggcctgccgccgcctcttccttctccagccggcaggcccgcgccgcttaggagggagagcccacccgcgccaggaggccgaacgcggactcgccacccggaaggaacacaacgtcctacatcaagaaaaaagacagaagcatatcttggagatatgaaaagaaccaccagcttcagaatggcagaagatgatccatatttgggaaggcctgaacaaatgtttcatttggatccttctttgactcatacaatatttaatccagaagtatttcaaccacagatggcactgccaacagatggcccataccttcaaatattagagcaacctaaacagagaggatttcgtttccgttatgtatgtgaaggcccatcccat

SEQ ID NO: 326156 - DNA, 225 bp, Artificial Sequence
  derived and/or modified sequence
atgaagaggacgaccagctttcgaatggcagaggatgatccatacctgggcaggcctgagcagatgttccaccttgaccctagcctgacacatacgatatttaatccggaggtgtttcagccccagatggcactgcctaccgacggcccatatctccagattttagaacagcctaagcagaggggttttcgatttcgctatgtctgcgaggggccttctcactag

SEQ ID NO: 326157 - DNA, 438 bp, Artificial Sequence
  derived and/or modified sequence
atggccgaggacgacccctacctgggcagacccgagcagatgttccacctggaccccagcctgacccacaccatcttcaaccccgaggtgttccagccccagatggccctgcccaccgccgacggcccctacctgcagatcctggagcagcccaagcagagaggcttcagattcagatacgtgtgcgagggccccagccacggcggcctgcccggcgccagcagcgagaagaacaagaagagctacccccaggtgaagatctgcaactacgtgggccccgccaaggtgatcgtgcagctggtgaccaacggcaagaacatccacctgcacgcccacagcctggtgggcaagcactgcgaggacggcatctgcaccgtgaccgccggccccaaggacatggtggtgggcttcgccaacctgggcatcctgcacgtgtag

SEQ ID NO: 326158 - DNA, 438 bp, Artificial Sequence
  derived and/or modified sequence
atggccgaggatgacccgtacctcggtcgtcctgagcagatgtttcatctggatccctcgctcacacacacgatcttcaacccagaggtctttcagccccagatggccctgcccaccgccgacggaccttatttgcagatcctggagcagccaaagcaacgaggattcaggtttcgatacgtttgtgagggccctagtcacggggggcttccaggtgcttcaagcgagaaaaataaaaagagctatccccaggtgaaaatttgcaactatgtcggcccggctaaggtgatcgtgcaattagtcactaatggcaagaacattcacctacatgcccattctctagtggggaagcactgtgaagacggaatctgcacagtgaccgcagggccaaaagacatggtggtaggatttgcaaatctggggatcctgcacgtctag

SEQ ID NO: 326159 - DNA, 438 bp, Artificial Sequence
  derived and/or modified sequence
atggctgaagatgacccctacctgggccggcctgagcagatgttccacctggaccccagcctgacccacaccatcttcaaccctgaggtgttccagccccagatggccctgcccacagcagatggcccctacctgcagatcctggagcagcccaagcagaggggcttccgcttccgctacgtgtgtgagggccccagccatggaggcctgcccggggccagcagcgagaagaacaagaagagctacccccaggtgaagatctgcaactacgtgggccctgccaaggtgattgtgcagctggtgaccaacgggaagaacatccacctgcacgcccacagcctggtgggcaagcactgtgaagatggcatctgcaccgtgacagctggccccaaggacatggtggtgggctttgccaacctgggcatcctgcacgtgtag

SEQ ID NO: 326160 - DNA, 438 bp, Artificial Sequence
  derived and/or modified sequence
atggccgaggacgacccctacctgggccggcccgagcagatgttccatttggacccttcccttacccataccattttcaacccggaggtctttcagccgcagatggccttaccgactgcggatggcccctacctccagattttagaacaacctaaacagcgcggcttcagatttagatacgtgtgcgagggcccctctcacggaggcctcccaggtgccagttccgaaaagaacaagaagagctaccctcaggtgaagatctgtaattacgtgggacccgcgaaagtaattgtgcagcttgtgacgaatgggaagaatatccatctgcacgcccacagtcttgtgggtaaacactgtgaagatggtatttgcaccgttaccgcaggtcctaaggatatggttgttggcttcgcaaacttgggcatactgcatgtatag

SEQ ID NO: 326161 - DNA, 557 bp, Artificial Sequence
  derived and/or modified sequence
ggacaaacttgaacacaaaggaacacacgttatatgtacatttaatactggaaccgaaaagctgcttgcagtgaaaagcaaaccacttctaaactctttgagactttttaaagaagcttcagaatggcagaagatgatccatatttgggaaggcctgaacaaatgtttcatttggatccttctttgactcatacaatatttaatccagaagtatttcaaccacagatggcactgccaacagcagatggcccataccttcaaatattagagcaacctaaacagagaggatttcgtttccgttatgtatgtgaaggcccatcccatggtggactacctggtgcctctagtgaaaagaacaagaagtcttaccctcaggtcaaaatctgcaactatgtgggaccagcaaaggttattgttcagttggtcacaaatggaaaaaatatccacctgcatgcccacagcctggtgggaaaacactgtgaggatgggatctgcactgtaactgctggacccaaggacatggtggtcggcttcgcaaacctgggtatacttcatgt

SEQ ID NO: 326162 - DNA, 438 bp, Artificial Sequence
  derived and/or modified sequence
atggccgaggatgacccctacctggggaggcctgaacagatgttccatcttgacccctcactcacccatactatctttaaccccgaggtcttccagcctcagatggcactgcccacagctgacgggccatacctacagatcctggaacagcccaagcagagaggctttcggttccgttacgtctgtgaaggtccaagccacggaggactgcctggcgctagcagcgaaaagaacaagaagagctacccacaggttaaaatctgcaactacgttgggcctgccaaggtcatcgttcagttggttaccaatggaaaaaatatccatctccatgctcactcactggtgggtaaacattgtgaggacggcatttgtaccgtgacggccggacccaaggacatggtagtgggtttcgcaaatctgggaattcttcatgtgtag

SEQ ID NO: 326163 - DNA, 1843 bp, Artificial Sequence
  derived and/or modified sequence
agcgatcgcgctgggccgcgctcccgggagcccagggcctgcagcggccggggcgccccgaggtctgctcattgtgtttttcaggaaaaaggaagggaaagggtgttacaaggaaaggctatcggtaacaactgacctgccacaaagttagaagaaaggattgattcaagaaagactataatatggatttagagctcgacgagtattataacaagacacttgccacagagaataatactgctgccactcggaattctgatttcccagtctgggatgactataaaagcagtgtagatgacttacagtattttctgattgggctctatacatttgtaagtcttcttggctttatggggaatctacttattttaatggctctcatgaaaaagcgtaatcagaagactacggtaaacttcctcataggcaatctggccttttctgatatcttggttgtgctgttttgctcacctttcacactgacgtctgtcttgctggatcagtggatgtttggcaaagtcatgtgccatattatgccttttcttcaatgtgtgtcagttttggtttcaactttaattttaatatcaattgccattgtcaggtatcatatgataaaacatcccatatctaataatttaacagcaaaccatggctactttctgatagctactgtctggacactaggttttgccatctgttctccccttccagtgtttcacagtcttgtggaacttcaagaaacatttggttcagcattgctgagcagcaggtatttatgtgttgagtcatggccatctgattcatacagaattgcctttactatctctttattgctagttcagtatattctgcccttagtttgtcttactgtaagtcatacaagtgtctgcagaagtataagctgtggattgtccaacaaagaaaacagacttgaagaaaatgagatgatcaacttaactcttcatccatccaaaaagagtgggcctcaggtgaaactctctggcagccataaatggagttattcattcatcaaaaaacacagaagaagatatagcaagaagacagcatgtgtgttacctgctccagaaagaccttctcaagagaaccactccagaatacttccagaaaactttggctctgtaagaagtcagctctcttcatccagtaagttcataccaggggtccccacttgctttgagataaaacctgaagaaaattcagatgttcatgaattgagagtaaaacgttctgttacaagaataaaaaagagatctcgaagtgttttctacagactgaccatactgatattagtatttgctgttagttggatgccactacaccttttccatgtggtaactgattttaatgacaatcttatttcaaataggcatttcaagttggtgtattgcatttgtcatttgttgggcatgatgtcctgttgtcttaatccaattctatatgggtttcttaataatgggattaaagctgatttagtgtcccttatacactgtcttcatatgtaataattctcactgtttaccaaggaaagaacaaatgctggggtcatataaaatatatttatgataactatttacatataataaatagaaattttgttaacatggaatttaatttatgtgaaagagttctggattcaaatgtcagttcataatatatggaagataattttatgtgttatagtaggattaatttatttagttgtgcagtcagtgtcaatccaatctgtaatttcactttagaaggttgtattaccttccacttccatgttgtcttataaacaaatgaattgtattttttgttgaaagtaaaagttatatctaaccaa

SEQ ID NO: 326164 - DNA, 1418 bp, Artificial Sequence
  derived and/or modified sequence
gtaatgtttttttggttgctgacaaatgtctttttattccaagcaggactataatatggatttagagctcgacgagtattataacaagacacttgccacagagaataatactgctgccactcggaattctgatttcccagtctgggatgactataaaagcagtgtagatgacttacagtattttctgattgggctctatacatttgtaagtcttcttggctttatggggaatctacttattttaatggctctcatgaaaaagcgtaatcagaagactacggtaaacttcctcataggcaatctggccttttctgatatcttggttgtgctgttttgctcacctttcacactgacgtctgtcttgctggatcagtggatgtttggcaaagtcatgtgccatattatgccttttcttcaatgtgtgtcagttttggtttcaactttaattttaatatcaattgccattgtcaggtatcatatgataaaacatcccatatctaataatttaacagcaaaccatggctactttctgatagctactgtctggacactaggttttgccatctgttctccccttccagtgtttcacagtcttgtggaacttcaagaaacatttggttcagcattgctgagcagcaggtatttatgtgttgagtcatggccatctgattcatacagaattgcctttactatctctttattgctagttcagtatattctgcccttagtttgtcttactgtaagtcatacaagtgtctgcagaagtataagctgtggattgtccaacaaagaaaacagacttgaagaaaatgagatgatcaacttaactcttcatccatccaaaaagagtgggcctcaggtgaaactctctggcagccataaatggagttattcattcatcaaaaaacacagaagaagatatagcaagaagacagcatgtgtgttacctgctccagaaagaccttctcaagagaaccactccagaatacttccagaaaactttggctctgtaagaagtcagctctcttcatccagtaagttcataccaggggtccccacttgctttgagataaaacctgaagaaaattcagatgttcatgaattgagagtaaaacgttctgttacaagaataaaaaagagatctcgaagtgttttctacagactgaccatactgatattagtatttgctgttagttggatgccactacaccttttccatgtggtaactgattttaatgacaatcttatttcaaataggcatttcaagttggtgtattgcatttgtcatttgttgggcatgatgtcctgttgtcttaatccaattctatatgggtttcttaataatgggattaaagctgatttagtgtcccttatacactgtcttcatatgtaataattctcactgtttaccaaggaaa

SEQ ID NO: 326165 - DNA, 3183 bp, Artificial Sequence
  derived and/or modified sequence
ccctgggagcccgcacccgtctctggtgccagggcgttgtcgggggtcccaagagagcggggtggggaaggtgaagggagcgcggctggaaaaatggggattagggtggcggaacaggcacttgtcaggagtgaagagacagcggagagggtactgggctgaattctttcgtgccgagcaggtccctccggttcccaactcacccgggtggagcaggcgcgggccgaacccgggaggagagtgtcggggatccgcgaaggagcctcctggggatggggcgggggatggacaaagcgctgcccccggctggacgcgctctggctgcagcccggctggcatccggagctgggaacagcagcccgcggggtgcccgggtcagggctcaaccctagcgggtctctggcgaggccgggggcgcagcccgcggggcgccactcaggccgtccagctgccgcgcggtccagcgctgacccgagcccgggaggcagctgcgctctaaggtttgcgctcctgtttgcgaggtgtcttcatataacaaatgcgagcaataacaaacatccatagaactcgaattccagaaacgggaattcttttttccaagttcacagacctttagttaatcttttaaaggaactgaggcgttgtgttggaccaaagccaaaacgattttaccttagaccatggaaaatagcctaaggctctttcagcagaattttgcagtccgaatgcaattttagatttcagatttctcaagggaagagaaactctgctgttagaatttggaagggagggtggtgcatgcctgtgtgtttgtcagctgagcagagctgtatttatctttccaattcaaattgtgccagattctggctttaagaacaaaccatgggaatatttgagaacatggaatcatgctgctgttccacgatcacagcaaaacagacaatagttgatattgtatcattgcaggaggaaaaagaattacatatattttattcttttgtgtgattgtcatcctttgtgaaaagaatgatgtgtattttcataaagcaaaaaattattcaaacaaagaaaccttatttaaatgtacaagtcagacttttaatatcctttgaattccctgcagttcctcctattattcttgagaactatctactttcttaaaatacttaaaatctattcagaaggtttcatttgtctaggtgtcagatatagaagagtttataagaaaattccagtaaacctttaaaaagatattattttttataagttgccatagtttaataaagaacttttatttttcacactttttactcagagattaaagttctgtgtttcagcctggaaattctgatggtgggagatacaactaatacaaaagagaatgagtaaatatagtaattaggtctgctcattgtgtttttcaggaaaaaggaagggaaagggtgttacaaggaaaggctatcggtaacaactgacctgccacaaagttagaagaaaggattgattcaagaaagactataatatggatttagagctcgacgagtattataacaagacacttgccacagagaataatactgctgccactcggaattctgatttcccagtctgggatgactataaaagcagtgtagatgacttacagtattttctgattgggctctatacatttgtaagtcttcttggctttatggggaatctacttattttaatggctctcatgaaaaagcgtaatcagaagactacggtaaacttcctcataggcaatctggccttttctgatatcttggttgtgctgttttgctcacctttcacactgacgtctgtcttgctggatcagtggatgtttggcaaagtcatgtgccatattatgccttttcttcaatgtgtgtcagttttggtttcaactttaattttaatatcaattgccattgtcaggtatcatatgataaaacatcccatatctaataatttaacagcaaaccatggctactttctgatagctactgtctggacactaggttttgccatctgttctccccttccagtgtttcacagtcttgtggaacttcaagaaacatttggttcagcattgctgagcagcaggtatttatgtgttgagtcatggccatctgattcatacagaattgcctttactatctctttattgctagttcagtatattctgcccttagtttgtcttactgtaagtcatacaagtgtctgcagaagtataagctgtggattgtccaacaaagaaaacagacttgaagaaaatgagatgatcaacttaactcttcatccatccaaaaagagtgggcctcaggtgaaactctctggcagccataaatggagttattcattcatcaaaaaacacagaagaagatatagcaagaagacagcatgtgtgttacctgctccagaaagaccttctcaagagaaccactccagaatacttccagaaaactttggctctgtaagaagtcagctctcttcatccagtaagttcataccaggggtccccacttgctttgagataaaacctgaagaaaattcagatgttcatgaattgagagtaaaacgttctgttacaagaataaaaaagagatctcgaagtgttttctacagactgaccatactgatattagtatttgctgttagttggatgccactacaccttttccatgtggtaactgattttaatgacaatcttatttcaaataggcatttcaagttggtgtattgcatttgtcatttgttgggcatgatgtcctgttgtcttaatccaattctatatgggtttcttaataatgggattaaagctgatttagtgtcccttatacactgtcttcatatgtaataattctcactgtttaccaaggaaagaacaaatgctggggtcatataaaatatatttatgataactatttacatataataaatagaaattttgttaacatggaatttaatttatgtgaaagagttctggattcaaatgtcagttcataatatatggaagataattttatgtgttatagtaggattaatttatttagttgtgcagtcagtgtcaatccaatctgtaatttcactttagaaggttgtattaccttccacttccatgttgtcttataaacaaatgaattgtattttttgttgaaagtaaaagttatatctaaccaa

SEQ ID NO: 326166 - protein, 445 aa, Artificial Sequence
  derived and/or modified sequence
MDLELDEYYNKTLATENNTAATRNSDFPVWDDYKSSVDDLQYFLIGLYTFVSLLGFMGNLLILMALMKKRNQKTTVNFLIGNLAFSDILVVLFCSPFTLTSVLLDQWMFGKVMCHIMPFLQCVSVLVSTLILISIAIVRYHMIKHPISNNLTANHGYFLIATVWTLGFAICSPLPVFHSLVELQETFGSALLSSRYLCVESWPSDSYRIAFTISLLLVQYILPLVCLTVSHTSVCRSISCGLSNKENRLEENEMINLTLHPSKKSGPQVKLSGSHKWSYSFIKKHRRRYSKKTACVLPAPERPSQENHSRILPENFGSVRSQLSSSSKFIPGVPTCFEIKPEENSDVHELRVKRSVTRIKKRSRSVFYRLTILILVFAVSWMPLHLFHVVTDFNDNLISNRHFKLVYCICHLLGMMSCCLNPILYGFLNNGIKADLVSLIHCLHM

SEQ ID NO: 326167 - protein, 261 aa, Artificial Sequence
  derived and/or modified sequence
MELLQVTILFLLPSICSSNSTGVLEAANNSLVVTTTKPSITTPNTESLQKNVVTPTTGTTPKGTITNELLKMSLMSTATFLTSKDEGLKATTTDVRKNDSIISNVTVTSVTLPNAVSTLQSSKPKTETQSSIKTTEIPGSVLQPDASPSKTGTLTSIPVTIPENTSQSQVIGTEGGKNASTSATSRSYSSIILPVVIALIVITLSVFVLVGLYRMCWKADPGTPENGNDQPQSDKESVKLLTVKTISHESGEHSAQGKTKN

SEQ ID NO: 326168 - protein, 178 aa, Artificial Sequence
  derived and/or modified sequence
MELLQVTILFLLPSICSSNSTGVLEAANNSLVVTTTKPSITTPNTESLQKNVVTPTTGTTPKGTITNELLKMSLMSTATFLTSKDEGLKATTTDVRKNDSIISNVTVTSVTLPNAVSTLQSSKPKTETQSSIKTTEIPGTPENGNDQPQSDKESVKLLTVKTISHESGEHSAQGKTKN

SEQ ID NO: 326169 - DNA, 786 bp, Artificial Sequence
  derived and/or modified sequence
atggaattgctgcaggtcacaatcttatttttactgcctagcatttgtagctcaaattcaacaggtgtgctggaggcggcaaataatagcctggttgtgaccaccactaagcccagcatcacaacgcccaacaccgagtccctacagaagaacgtagtaacgccaacaactgggacaacccctaaaggcacaataacgaatgagctcctaaaaatgtctctcatgtctacggccacattcctgaccagcaaagatgaaggcctcaaggccaccacaacagatgttcgaaaaaacgactccattatttccaacgttacagtcacctctgtgactttacccaacgctgtttcaaccctccagtcttccaagccaaagaccgagacccagtcctctatcaaaaccacagagataccaggtagcgtcttacagccggacgcatcaccgtccaaaacgggcacactgacctcaattccagtgaccatccccgaaaatacctctcagtcacaggtaattgggaccgaaggtgggaagaatgcttccaccagcgccacatcccggtcttatagttccataatcctacccgtagtcatcgctttgatcgtgattaccctgagtgtgtttgtgctggtggggttgtatagaatgtgctggaaagccgaccctggcacccccgagaatggcaacgatcaaccgcagagcgataaggagtcggtgaaactgcttacagtgaaaaccataagccacgagtccggcgagcacagcgcccagggaaagacaaagaattag

SEQ ID NO: 326170 - DNA, 786 bp, Artificial Sequence
  derived and/or modified sequence
atggagctcctccaagtaacaatccttttcctgctgccaagcatctgttcatctaactctaccggggttttggaggccgccaacaacagtctggtagtcactaccaccaaaccatctatcaccacccctaacaccgagagcttgcaaaagaatgtcgtaacaccaacgacaggcactacccctaagggcaccattactaacgagttgttgaagatgtccctaatgtccacagctacctttctcacttctaaggacgaaggcttgaaagctactactaccgatgtccgcaaaaatgatagcatcatctcgaacgtcacagtgacatccgtgacgctgcctaacgccgtttccaccctccagagttccaagccgaagacagagacgcaatcatctattaaaactaccgagattcccgggagtgtcctgcagcccgatgcttcaccatccaaaacgggtacactcacctctatacccgtgaccattccagagaatacaagtcagtcacaagtgattggcacggaaggcgggaaaaacgcttcaacatctgcaaccagtaggagctactcttcaatcattctccccgtagtcatcgcactcatcgtcatcactctcagcgtgtttgtgttagtcggactgtatcgcatgtgctggaaggccgacccggggacaccagagaatggaaacgaccagccccagtccgataaggaaagcgtgaaactcctcacagtaaaaactatctctcacgaaagcggtgaacacagcgcccagggtaagaccaagaattag

SEQ ID NO: 326171 - DNA, 786 bp, Artificial Sequence
  derived and/or modified sequence
atggagcttctccaggttaccatcctgttcctcctaccttctatttgctcctcaaacagcacgggagtcctcgaagccgcaaacaattccctggtggtcactaccactaagccaagcattactacaccaaatacagaatcactccagaagaatgtcgtaacccccaccaccggtactacacccaagggcaccattacaaatgaactgttaaagatgagcctcatgagcactgccaccttcttgacttccaaagatgagggtctcaaggcaacgacaactgacgtgagaaagaacgattccatcatcagcaacgtaacggtgaccagcgtcactcttccgaatgccgtctcaactcttcagtccagcaagcctaaaacagaaacacagtcaagcataaagactactgaaattccaggaagtgtgctccagccagatgcgtctcctagtaaaaccggtacactgacatcaatccctgttactatccccgaaaacacctctcagagtcaggttattggaaccgaagggggcaaaaatgccagcaccagcgcgactagccgatcgtactccagcattatactgcccgtggttatagcactaattgttatcaccctgtctgtgttcgtgctggtgggattgtataggatgtgttggaaagctgaccccggaactcccgagaatggaaatgatcagcctcagtctgacaaagaatctgtgaagctcctgaccgtaaaaactataagtcatgaatctggggaacactcagcccaaggcaaaaccaagaattag

SEQ ID NO: 326172 - DNA, 4037 bp, Artificial Sequence
  derived and/or modified sequence
gggagtgtgtgtatttcctcccgttctttatcagagcccccaaaataagtaggaatgggcagtggctattcacattcactacaccttttccatttgctaataaggccctgccaggctgggagggaattgtccctgcctgcttctggagaaagaagatattgacaccatctacgggcaccatggaactgcttcaagtgaccattctttttcttctgcccagtatttgcagcagtaacagcacaggtgttttagaggcagctaataattcacttgttgttactacaacaaaaccatctataacaacaccaaacacagaatcattacagaaaaatgttgtcacaccaacaactggaacaactcctaaaggaacaatcaccaatgaattacttaaaatgtctctgatgtcaacagctacttttttaacaagtaaagatgaaggattgaaagccacaaccactgatgtcaggaagaatgactccatcatttcaaacgtaacagtaacaagtgttacacttccaaatgctgtttcaacattacaaagttccaaacccaagactgaaactcagagttcaattaaaacaacagaaataccaggtagtgttctacaaccagatgcatcaccttctaaaactggtacattaacctcaataccagttacaattccagaaaacacctcacagtctcaagtaataggcactgagggtggaaaaaatgcaagcacttcagcaaccagccggtcttattccagtattattttgccggtggttattgctttgattgtaataacactttcagtatttgttctggtgggtttgtaccgaatgtgctggaaggcagatccgggcacaccagaaaatggaaatgatcaacctcagtctgataaagagagcgtgaagcttcttaccgttaagacaatttctcatgagtctggtgagcactctgcacaaggaaaaaccaagaactgacagcttgaggaattctctccacacctaggcaataattacgcttaatcttcagcttctatgcaccaagcgtggaaaaggagaaagtcctgcagaatcaatcccgacttccatacctgctgctggactgtaccagacgtctgtcccagtaaagtgatgtccagctgacatgcaataatttgatggaatcaaaaagaaccccggggctctcctgttctctcacatttaaaaattccattactccatttacaggagcgttcctaggaaaaggaattttaggaggagaatttgtgagcagtgaatctgacagcccaggaggtgggctcgctgataggcatgactttccttaatgtttaaagttttccgggccaagaatttttatccatgaagactttcctacttttctcagtgttcttatattacctactgttagtatttattgtttaccactatgttaatgcagggaaaagttgcacgtgtattattaaatattaggtagaaatcataccatgctactttgtacatataagtattttattcctgctttcgtgttacttttaataaataactactgtactcaatactctaaaaatactataacatgactgtgaaaatggcaatgttattgtcttcctataattatgaatatttttggatggattattagaatacatgaactcactaatgaaaggcatttgtaataagtcagaaagggacatacgattcacatatcagactgttagggggagagtaatttatcagttctttggtctttctatttgtcattcatactatgtgatgaagatgtaagtgcaagggcatttataacactatactgcattcattaagataataggatcatgatttttcattaactcatttgattgatattatctccatgcattttttatttcttttagaaatgtaattatttgctctagcaatcattgctaacctctagtttgtagaaaatcaacactttataaatacataattatgatattatttttcattgtatcactgttctaaaaataccatatgattatagctgccactccatcaggagcaaattcttctgttaaaagctaactgatcaaccttgaccacttttttgacatgtgagatcaaagtgtcaagttggctgaggttttttggaaagctttagaactaataagctgctggtggcagctttgtaacgtatgattatctaagctgattttgatgctaaattatcttagtgatctaaggggcagtttagtgaagatggaatcttgtatttaaaatagccttttaaaatttgttttgtggtgatgtattttgacaacttccatctttaggagttatataatcaccttgattttagtttcctgatgtttggactatttataatcaaggacaccaagcaagcataagcatatctatatttctgactggtgtctctttgagaaggatgggaagtagaaaaaaaaaaaagaaagaaaggaaaggaagagaggagagaagaaggcagggatctccactatgtatgttttcactttagaactgttgagcccatgcttaattttaatctagaagtctttaaatggtgagacagtgactggagcatgccaatcagagagcatttgtcttcagaaaaaaaaaaaatctgagtttgagactagcctggccaacatgttgaaaccccatatctactaaaaatacaaaaattagcctggtgtggtggcgcacgcctgtagtcccagctactctggagcctgaggaacgtgaatcgcttgaacccagaagacagaggttgcagtgagctgagatggcactattgcactccagcctgggtgacacagcaagactctgtctcaaaaaaaaaaaaaaaaaaaaggaaaaaaaagaaagaaagaaagtcccagcacacctagataatttaccgagctcttcagcaaaaaccatgttacatacagcatattccaaagaaatgaactcttctgcaatttaaattataagtaatatgttattttggatcctagagaaaccattttctctacatttcatgagcatggttagaaaagagtttacaagaattaggaagagggaacaattttaatggtcagaaaagaataaaatttattctagttcaagaagtgcacacaaagaatatgcattaatctaacaactatgagattaaatctttcaaaaaggtcaaaggaggattgagaagtttacagagatgtccacggcattttatatcaatctcaaaggtaaggtctgcatttttataaaccaacttaaacttctgttgagataggatattttgttttcaagccaaaattaccattaatcaaatatgttttaattatctgatttagatgatctactttttatgcctggcttactgtaagttttttattctgatacacagttcaaacatcattgcaacaaagaagtgcctgtatttagatcaaaggcaagactttctatgtgtttgttttgcataataatatgaatataatttaagtctatcaatagtcaaaacataaacaaaagctaattaactggcactgttgtcacctgagactaagtggatgttgttggctgacatacaggctcagccagcagagaaagaattctgaattccccttgctgaactgaactattctgttacatatggttgacaaatctgtgtgttatttcttttctacctaccatatttaaatttatgagtatcaaccgaggacatagtcaaaccttcgatgatgaacattcctgattttttgcctgattattctctgttgagctctacttgtggtcattcaagattttatgatgttgaaaggaaaagtgaatatgacctttaaaaattgtattttgggtgatgatagtctcaccactataaaactgtcaattattgcctaatgttaaagatatccatcattgtgattaattaaacctataatgagtattcttaatggagaattcttaatggatggattatcccctgatcttttctttaaaatttctctgcacacacaggacttctcattttccaataaatgggtgtactctgccccaatttctagggaa

SEQ ID NO: 326173 - DNA, 786 bp, Artificial Sequence
  derived and/or modified sequence
atggagctgctgcaggtgaccatcctgttcctgctgcccagcatctgcagcagcaacagcaccggcgtgctggaggccgccaacaacagcctggtggtgaccaccaccaagcccagcatcaccacccccaacaccgagagcctgcagaagaacgtggtgacccccaccaccggcaccacccccaagggcaccatcaccaacgagctgctgaagatgagcctgatgagcaccgccaccttcctgaccagcaaggacgagggcctgaaggccaccaccaccgacgtgagaaagaacgacagcatcatcagcaacgtgaccgtgaccagcgtgaccctgcccaacgccgtgagcaccctgcagagcagcaagcccaagaccgagacccagagcagcatcaagaccaccgagatccccggcagcgtgctgcagcccgacgccagccccagcaagaccggcaccctgaccagcatccccgtgaccatccccgagaacaccagccagagccaggtgatcggcaccgagggcggcaagaacgccagcaccagcgccaccagcagaagctacagcagcatcatcctgcccgtggtgatcgccctgatcgtgatcaccctgagcgtgttcgtgctggtgggcctgtacagaatgtgctggaaggccgaccccggcacccccgagaacggcaacgaccagccccagagcgacaaggagagcgtgaagctgctgaccgtgaagaccatcagccacgagagcggcgagcacagcgcccagggcaagaccaagaactag

SEQ ID NO: 326174 - DNA, 786 bp, Artificial Sequence
  derived and/or modified sequence
atggaacttctgcaggtgactatcctgtttctgttgccatccatttgttcctctaatagcacaggtgtgctggaagccgcaaataattccctcgtggttacgactaccaaaccctctattacaactcccaacaccgagtccttgcaaaagaacgttgtgactcccactacgggaacaactccaaagggaacaattaccaatgagctgcttaagatgtctttgatgagcacggctaccttcttgacaagcaaggatgagggtctgaaggccactacgacagatgtgagaaaaaacgactctatcatttccaacgtcaccgttacatccgtgactttgcccaacgccgtcagtactctgcaaagttctaagccaaagacggaaactcagagttccattaagacaaccgaaatcccagggagcgtcctgcagcctgacgcgtcgccctccaagacggggacgttgaccagcatcccagtgactattcctgagaatacgtcacagtctcaagtcattgggacagaggggggtaaaaatgcttctaccagtgcgaccagtcgtagctactcctctatcatcctgcctgtggtcatcgcgttgatcgttataacacttagtgtgttcgtgcttgtgggactctataggatgtgttggaaggccgaccccggtacacctgaaaacggaaatgaccagccccagtcagacaaggaatccgtgaagcttctgacagtcaaaactatatcacacgaaagtggggagcactcggcccagggaaagaccaaaaattag

SEQ ID NO: 326175 - DNA, 786 bp, Artificial Sequence
  derived and/or modified sequence
atggagctgctgcaggtgaccatcctcttcctgctgcccagcatctgcagcagcaacagcactggagtgctggaggccgccaacaacagcctggtggtgaccaccaccaagcccagcatcaccacccccaacacagagagcctgcagaagaatgtggtgacccccaccaccggcaccacccccaagggcaccatcaccaatgagctgctgaagatgagcctgatgagcacagccaccttcctgaccagcaaggatgagggcctgaaggccaccaccacagatgtgaggaagaatgacagcatcatcagcaatgtgacagtgacctctgtgaccctgcccaatgctgtgtccaccctgcagagcagcaagcccaagacagagacccagagcagcatcaagaccacagagatccctggctctgtgctgcagccagatgccagccccagcaagacaggcaccctgaccagcatccctgtgaccatccctgagaacaccagccagagccaggtgattggaacagaaggaggcaagaatgccagcaccagcgccaccagccgcagctacagcagcatcatcctgcctgtggtgattgccctgattgtcatcaccctgtctgtgtttgtgctggtgggcctgtacaggatgtgctggaaggctgaccccggcaccccagaaaatggaaatgaccagccccagagcgacaaggagagcgtgaagctgctgactgtgaagaccatcagccatgagagcggggagcacagcgcccagggcaagaccaagaactag

SEQ ID NO: 326176 - DNA, 786 bp, Artificial Sequence
  derived and/or modified sequence
atggagctgctgcaggtgaccatcctgttcctgctgcccagcatctgtagcagcaactccacaggagtgcttgaggctgccaacaacagtctggtcgtcaccacgacaaagcctagcattacgacacctaacactgagtccctgcagaaaaacgtagtcacgcccactaccgggactacacctaaaggcacaatcacaaatgaactgcttaagatgtctttaatgtcaacagccactttcctgacatctaaagacgaaggcctcaaggccaccacaaccgacgtgcggaaaaacgactctattattagcaatgtgactgtcacctctgttactctgccgaatgctgtgagcacattacagagtagcaaacccaagactgagacgcagtcaagcatcaaaactaccgagatccctggctccgtcctgcagcctgatgcgagcccgagcaagaccggaaccctgaccagcatccccgtcactatccccgaaaatactagccagtcccaggtaattggcactgaaggcggcaaaaacgcttccacaagtgctactagtcgcagctattcttctatcattctgcctgttgttatcgccctcatagttataaccctgagcgtgtttgtgttggttgggctttatagaatgtgctggaaagctgatcccggcacccctgagaatggtaatgatcagccccaatctgacaaggaatctgtcaaattacttaccgtcaagaccatatctcatgaatcgggagagcacagcgcccagggaaagaccaagaactag

SEQ ID NO: 326177 - RNA, 786 nt, Artificial Sequence
  derived and/or modified sequence
auggagcuccuccaaguaacaauccuuuuccugcugccaagcaucuguucaucuaacucuaccgggguuuuggaggccgccaacaacagucugguagucacuaccaccaaaccaucuaucaccaccccuaacaccgagagcuugcaaaagaaugucguaacaccaacgacaggcacuaccccuaagggcaccauuacuaacgaguuguugaagaugucccuaauguccacagcuaccuuucucacuucuaaggacgaaggcuugaaagcuacuacuaccgauguccgcaaaaaugauagcaucaucucgaacgucacagugacauccgugacgcugccuaacgccguuuccacccuccagaguuccaagccgaagacagagacgcaaucaucuauuaaaacuaccgagauucccgggaguguccugcagcccgaugcuucaccauccaaaacggguacacucaccucuauacccgugaccauuccagagaauacaagucagucacaagugauuggcacggaaggcgggaaaaacgcuucaacaucugcaaccaguaggagcuacucuucaaucauucuccccguagucaucgcacucaucgucaucacucucagcguguuuguguuagucggacuguaucgcaugugcuggaaggccgacccggggacaccagagaauggaaacgaccagccccaguccgauaaggaaagcgugaaacuccucacaguaaaaacuaucucucacgaaagcggugaacacagcgcccaggguaagaccaagaauuag

SEQ ID NO: 326178 - RNA, 786 nt, Artificial Sequence
  derived and/or modified sequence
auggagcuucuccagguuaccauccuguuccuccuaccuucuauuugcuccucaaacagcacgggaguccucgaagccgcaaacaauucccugguggucacuaccacuaagccaagcauuacuacaccaaauacagaaucacuccagaagaaugucguaacccccaccaccgguacuacacccaagggcaccauuacaaaugaacuguuaaagaugagccucaugagcacugccaccuucuugacuuccaaagaugagggucucaaggcaacgacaacugacgugagaaagaacgauuccaucaucagcaacguaacggugaccagcgucacucuuccgaaugccgucucaacucuucaguccagcaagccuaaaacagaaacacagucaagcauaaagacuacugaaauuccaggaagugugcuccagccagaugcgucuccuaguaaaaccgguacacugacaucaaucccuguuacuauccccgaaaacaccucucagagucagguuauuggaaccgaagggggcaaaaaugccagcaccagcgcgacuagccgaucguacuccagcauuauacugcccgugguuauagcacuaauuguuaucacccugucuguguucgugcuggugggauuguauaggauguguuggaaagcugaccccggaacucccgagaauggaaaugaucagccucagucugacaaagaaucugugaagcuccugaccguaaaaacuauaagucaugaaucuggggaacacucagcccaaggcaaaaccaagaauuag

SEQ ID NO: 326179 - protein, 386 aa, Artificial Sequence
  derived and/or modified sequence
MSQLSTTMSRCAKDLFGFAIMFFIIFLAYAQLAYLVFGTQVDDFSTFQECIFTQFRIILGDINFAEIEEANRVLGPIYFTTFVFFMFFILLNMFLAIINDTYSEVKSDLAQQKAEMELSDLIRKGYHKALVKLKLKKNTVDDISESLRQGGGKLNFDELRQDLKGKGHTDAEIEAIFTKYDQDGDQELTEHEHQQMRDDLEKEREDLDLDHSSLPRPMSSRSFPRSLDDSEEDDDEDSGHSSRRRGSISSGVSYEEFQVLVRRVDRMEHSIGSIVSKIDAVIVKLEIMERAKLKRREVLGRLLDGVAEDERLGRDSEIHREQMERLVREELERWESDDAASQISHGLGTPVGLNGQPRPRSSRPSSSQSTEGMEGAGGNGSSNVHV

SEQ ID NO: 326180 - DNA, 1161 bp, Artificial Sequence
  derived and/or modified sequence
atgagtcagctctctaccacgatgtcccgctgtgccaaagatctgtttggtttcgctattatgttcttcattatctttctcgcctatgcacagctcgcatatctcgtgttcggcactcaggtggatgatttttccactttccaggaatgcatcttcacgcagtttagaataatactcggcgatataaactttgccgagatagaggaagctaatcgggtcctgggcccgatctacttcacaacttttgtgttttttatgtttttcatcttactgaatatgtttctcgccatcattaatgacacttattccgaggtgaaaagcgacctggctcagcagaaagccgaaatggagctcagcgaccttattaggaagggctatcacaaagctctggtcaagctgaaactgaagaagaacacagttgacgacatttccgaaagcctgcgtcagggtggagggaaactgaattttgacgaattgcgtcaggacctcaaaggtaagggtcacaccgatgccgaaatcgaagccatattcaccaagtacgaccaggacggtgaccaagaactcaccgaacacgaacatcagcagatgcgggacgatctcgagaaggagcgtgaggaccttgatcttgaccacagttcgctgccgagacccatgtcatcccgatccttcccacggtccctggacgactctgaggaagacgatgacgaagactccgggcacagctcaaggaggagaggatccataagtagcggggtgtcatatgaggagtttcaagtgctcgttcgtcgtgtggaccgcatggagcacagtataggttctatagtgagtaaaattgacgccgtcatagtaaagctagaaatcatggaaagagcaaagctcaaacgacgagaggttctgggccgacttttagatggtgtggctgaggacgagcgcctaggtcgggatagcgagatccaccgcgaacagatggagcgactcgtgagggaagagcttgagagatgggagagtgatgatgcagcatcccagatatcccatggtctgggcaccccggtggggcttaatgggcaaccaaggcctcgaagttccagaccttcgagttctcaatccaccgagggcatggagggcgccggagggaatgggtcctcaaatgtacacgtctag

SEQ ID NO: 326181 - DNA, 1161 bp, Artificial Sequence
  derived and/or modified sequence
atgtctcagctgtcaactaccatgtctagatgtgccaaggacctgtttggctttgcaatcatgtttttcatcattttcttagcctacgcacagttggcttatttggtgttcggaactcaggtggatgattttagcactttccaagagtgtattttcacacagtttcggattattctgggggacatcaatttcgccgaaatagaagaggcaaatagggtgcttggtcctatttacttcacaacctttgtattttttatgttctttatacttctgaacatgttcctcgccatcatcaatgacacatattccgaggtgaaaagcgacctggcgcagcagaaggcggagatggagttatctgacttgatacggaagggttaccacaaggccctcgtgaaactgaaattgaagaaaaacaccgtcgacgatatctctgagtcactaagacagggtggagggaagctgaatttcgacgaattaagacaagacctaaagggtaagggacataccgatgcagagatagaggcaatcttcaccaagtatgatcaagacggcgatcaggagctgactgaacatgagcatcagcagatgcgggacgatctcgaaaaagagcgcgaggatctcgaccttgaccactcctcattgcctcgccctatgagctcgcgctccttcccccggagtctcgacgactctgaagaagatgatgacgaagactcgggccactcttctcgtcgtagagggtcaataagcagtggcgtttcctatgaggagtttcaggtcttggtccgccgtgtggaccgaatggaacatagcattgggagcattgtgtccaaaatcgacgccgtgatagtcaagctggagattatggagcgggccaagctgaaacgacgagaggtactaggcaggctactcgacggggtggcagaggatgagcgcctcggcagagattccgaaatacaccgcgagcagatggaacgtttggtgcgcgaggaactcgagaggtgggaaagtgatgacgccgcctctcagattagccacgggcttggcaccccggtggggctgaatggacaaccgagaccgaggagcagccgcccatcgagttcacaaagcaccgagggcatggagggcgctggcgggaatggatcatcgaacgtgcacgtgtag

SEQ ID NO: 326182 - DNA, 1161 bp, Artificial Sequence
  derived and/or modified sequence
atgagccagctgagcaccaccatgagccgctgtgccaaggacctgtttggatttgccatcatgttcttcatcatcttcctggcctatgcccagctggcctacctggtgtttggcacccaggtggatgacttcagcaccttccaggagtgcatcttcacccagttccgcatcatcctgggggacatcaactttgctgagattgaggaggccaacagagtgctgggccccatctacttcaccacctttgtgttcttcatgttcttcatcctgctgaacatgttcctggccatcatcaatgacacctacagcgaggtgaagagtgacctggcccagcagaaggccgagatggagctgagtgacctgatcaggaagggctaccacaaggccctggtgaagctgaagctgaagaagaacacagtggatgacatcagcgagagcctgcggcagggcggcggcaagctgaactttgatgagctgcggcaggacctgaagggcaagggccacacagatgctgagattgaggccatcttcaccaagtatgaccaggatggagaccaggagctgacagaacatgagcaccagcagatgagagatgacctggagaaggagcgggaggacctggacctggaccacagcagcctgccccggcccatgagcagccgctccttccccaggagcctggatgacagcgaggaggatgatgatgaggacagcggccacagcagcagaagaagaggcagcatcagcagcggcgtgtcctatgaggagttccaggtgctggtgcggcgggtggacaggatggagcacagcatcggcagcatcgtgtccaagattgatgctgtgattgtgaagctggagatcatggagcgggccaagctgaagagaagagaggtgctgggccgcctgctggatggagtggccgaggatgagcggctgggccgggacagcgagatccaccgggagcagatggagcggctggtgcgggaggagctggagcgctgggagagtgatgatgctgccagccagatcagccacggcctgggcacccctgtgggcctgaatggccagccccggcccaggagcagccggcccagcagcagccagagcacagagggcatggagggcgctggaggaaatggcagcagcaatgtgcacgtgtag

SEQ ID NO: 326183 - DNA, 1161 bp, Artificial Sequence
  derived and/or modified sequence
atgagccagctgagcaccaccatgagccggtgcgccaaggacctgtttgggtttgcaattatgtttttcatcatctttttagcctacgcacaactggcttacctggttttcggaacccaagtggatgatttttctacattccaagaatgcattttcactcagttccggataattttaggcgacattaattttgcagaaatcgaagaggcgaaccgcgtgttgggccccatctattttactacatttgtattcttcatgttttttatcctgctgaacatgttcctagccattatcaacgacacatactctgaagtaaagtccgatctggctcagcagaaagcagaaatggagctatctgacttaatccgaaagggttaccataaagcgctggtgaaactgaaacttaaaaagaatacagtggacgacatttcagaatcactacggcagggcggtggaaaactgaatttcgatgagcttaggcaggaccttaagggaaaaggacacacagacgcagagatagaggcaatcttcacaaagtacgaccaagacggggaccaggaattgacagagcacgagcaccagcagatgagggacgatctggagaaggagcgggaagatctggacctggaccattcctccttacccagaccgatgagcagccgatctttccctagatccttggacgacagcgaggaagacgatgacgaagatagtggccactcctctcgacggagaggcagcatctctagcggagtgtcatatgaggagttccaggtccttgtacggagggtcgaccgcatggaacactctatcggaagcatcgtgtccaagatcgatgccgtgatcgtgaagctcgagattatggaaagggccaagcttaagcggagggaggttctgggcaggctgctggacggggtggccgaggacgagcgacttgggagggactccgagatacaccgtgaacagatggaaaggctggtgcgggaggaactggaacggtgggaatcagatgatgccgcgtcccagatttcccatgggctcggaacccccgtggggctcaatggacaaccgcgcccgagaagctctcgtccctccagctcgcaatctaccgaggggatggagggtgcaggagggaacggaagttccaatgtgcacgtatag

SEQ ID NO: 326184 - DNA, 1161 bp, Artificial Sequence
  derived and/or modified sequence
atgagccagctgagcaccaccatgagccggtgcgccaaggacctgtttgggtttgcgattatgtttttcatcattttcctcgcctacgctcaactggcgtatctggttttcggaacccaggttgatgacttctccactttccaggaatgtattttcacccaattccgcatcatactgggggacatcaacttcgctgagattgaagaagccaacagggtactagggcccatctactttaccacctttgtgttttttatgtttttcattctactgaatatgttcctcgccattatcaacgatacatacagtgaagttaagtcagatcttgcacagcaaaaagccgaaatggagctcagcgacctgatccggaaaggataccataaagccctcgtgaagctgaagcttaaaaaaaatacagtcgacgatatatccgagtctctgcgccagggaggcggcaagctgaacttcgacgagttgaggcaggatctgaaaggcaaaggccacaccgacgccgaaatagaggcaattttcaccaagtatgaccaggacggcgaccaagagctcacagagcacgaacaccagcagatgcgcgacgacctcgaaaaagagcgtgaggatttagacctggaccactccagcctcccgcgcccgatgagctccaggagtttcccacgttcccttgatgactcggaagaggacgatgacgaagactctggtcactcttcgcggagacgcggaagcatttcttccggcgtgtcctatgaagagttccaggtcctcgtcaggagggtggacagaatggagcactcaattggatccatcgtatcaaagatcgacgcagttatcgttaaattggagatcatggaaagggcaaagcttaaacgtcgggaagttctgggccggctgctcgatggcgtcgcagaagacgagaggctggggagagatagtgaaattcatcgtgaacagatggaacgcctcgtgcgggaggagttggagaggtgggagtccgacgacgcggcctcccagatttcccacgggttggggaccccagtgggcttgaacgggcagcctagaccgcggtcctcaaggcccagctcatctcaatctacggagggtatggagggcgccggagggaatggatcctcaaatgtgcacgtctag

SEQ ID NO: 326185 - DNA, 1222 bp, Artificial Sequence
  derived and/or modified sequence
atgtcttctctctcttacagctcttcaaattcatcaattttaacaggaccatgagccagctctcgacaaccatgtctcgatgtgccaaagacctgtttggctttgctattatgttcttcattattttcctagcgtatgctcagttggcataccttgtctttggcactcaggtcgatgacttcagtactttccaagagtgtatcttcactcaattccgtatcattttgggcgatatcaactttgcagagattgaggaagctaatcgagttttgggaccaatttatttcactacatttgtgttctttatgttcttcattcttttgaatatgtttttggctatcatcaatgatacttactctgaagtgaaatctgacttggcacagcagaaagctgaaatggaactctcagatcttatcagaaagggctaccataaagctttggtcaaactaaaactgaaaaaaaataccgtggatgacatttcagagagtctgcggcaaggaggaggcaagttaaactttgacgaacttcgacaagatctcaaagggaagggccatactgatgcagagattgaggcaatattcacaaagtacgaccaagatggagaccaagaactgaccgaacatgaacatcagcagatgagagacgacttggagaaagagagggaggacctggatttggatcacagttctttaccacgtcccatgagcagccgaagtttccctcgaagcctggatgactctgaggaggatgacgatgaagatagcggacatagctccagaaggaggggaagcatttctagtggcgtttcttacgaagagtttcaagtcctggtgagacgagtggaccggatggagcattccatcggcagcatagtgtccaagattgacgccgtgatcgtgaagctagagattatggagcgagccaaactgaagaggagggaggtgctgggaaggctgttggatggggtggccgaggatgaaaggctgggtcgtgacagtgaaatccatagggaacagatggaacggctagtacgtgaagagttggaacgctgggaatccgatgatgcagcttcccagatcagtcatggtttaggcacgccagtgggactaaatggtcaacctcgccccagaagctcccgcccatcttcctcccaatctacagaaggcatggaaggtgcaggtggaaatgggagttctaatgtccacgtatgatatgtgtgttt

SEQ ID NO: 326186 - DNA, 1720 bp, Artificial Sequence
  derived and/or modified sequence
aatggtagtagccactggggaatcattgcaacttatagtggagctggctattatctggatttgtcaagaacaagagaggaaacagctgcacaagttgctagcctcaagaaaaatgtctggctggaccgaggaaccagggcaacttttattgacttctcagtgtacaacgccaacattaacctgttctgtgtggtcagctgtcagtggtagctataggaattaacatatacagaacatcaaatgtggaggtgctactacagtttctggaagatcaaaatactttccccaactttgagcatctggcatattggcagatacagttcaacaatatagctgctgtcacagtattttttgtctggattaagctcttcaaattcatcaattttaacaggaccatgagccagctctcgacaaccatgtctcgatgtgccaaagacctgtttggctttgctattatgttcttcattattttcctagcgtatgctcagttggcataccttgtctttggcactcaggtcgatgacttcagtactttccaagagtgtatcttcactcaattccgtatcattttgggcgatatcaactttgcagagattgaggaagctaatcgagttttgggaccaatttatttcactacatttgtgttctttatgttcttcattcttttgaatatgtttttggctatcatcaatgatacttactctgaagtgaaatctgacttggcacagcagaaagctgaaatggaactctcagatcttatcagaaagggctaccataaagctttggtcaaactaaaactgaaaaaaaataccgtggatgacatttcagagagtctgcggcaaggaggaggcaagttaaactttgacgaacttcgacaagatctcaaagggaagggccatactgatgcagagattgaggcaatattcacaaagtacgaccaagatggagaccaagaactgaccgaacatgaacatcagcagatgagagacgacttggagaaagagagggaggacctggatttggatcacagttctttaccacgtcccatgagcagccgaagtttccctcgaagcctggatgactctgaggaggatgacgatgaagatagcggacatagctccagaaggaggggaagcatttctagtggcgtttcttacgaagagtttcaagtcctggtgagacgagtggaccggatggagcattccatcggcagcatagtgtccaagattgacgccgtgatcgtgaagctagagattatggagcgagccaaactgaagaggagggaggtgctgggaaggctgttggatggggtggccgaggatgaaaggctgggtcgtgacagtgaaatccatagggaacagatggaacggctagtacgtgaagagttggaacgctgggaatccgatgatgcagcttcccagatcagtcatggtttaggcacgccagtgggactaaatggtcaacctcgccccagaagctcccgcccatcttcctcccaatctacagaaggcatggaaggtgcaggtggaaatgggagttctaatgtccacgtatgatatgtgtgtttcagtatgtgtgtttctaataagtgaggaagtggctgtcctgaattgctgtaacaagcacactatttatatgccctgaccaccataggatgctagtctttgtgaccgattgctaatcttctgcactttaatttattttatataaactttaccca

SEQ ID NO: 326187 - DNA, 1161 bp, Artificial Sequence
  derived and/or modified sequence
atgagtcagctctccactaccatgagtcgctgcgctaaggatctgttcggcttcgcaataatgttttttatcattttccttgcatacgcacagctggcatacctcgtgttcgggacgcaggtggatgacttttccacgtttcaagaatgcatttttacccagttcagaatcattcttggtgatatcaatttcgctgagattgaggaagccaaccgggtactggggcctatatattttaccacattcgtattctttatgttttttatcctcctgaatatgtttttagccatcataaacgatacttatagcgaggttaaatcagacctcgcccagcaaaaggcggaaatggaattgtctgatctcattcggaagggataccacaaagccctagttaaactcaaacttaagaagaacactgtcgatgatatcagcgagagtctgcggcagggaggaggcaagcttaatttcgacgaactgaggcaagatctgaaaggcaagggtcacacagacgctgagattgaggctatatttaccaaatatgatcaggatggcgatcaagagcttaccgagcacgaacatcagcaaatgcgagatgacctagaaaaagaaagagaggatttggacctggaccactcctccctgccaagaccaatgtctagtcgcagcttcccacgcagcctggatgactccgaggaggatgatgatgaggacagcggccactcttcacgccgtcgcggaagcattagctcaggggtctcgtatgaagagttccaagtcctcgtgcggagggtcgatagaatggaacactctatcggaagtattgtgagcaaaatagacgccgtgattgtgaaactggagataatggagagggccaagctgaaaagacgagaagtccttggcagactcctggatggggtggcagaggacgaacgcctaggcagggatagtgaaattcaccgagagcagatggagcgtctcgttcgggaggagctggaaagatgggaatcagatgatgcagcgagccagatttctcatggacttggcacacccgtggggctcaacggacagcctcggccacggagctcccgcccatcttcttcccagtccaccgagggtatggaaggcgcaggcggaaatggatcctcaaatgtacatgtctag

SEQ ID NO: 326188 - DNA, 1161 bp, Artificial Sequence
  derived and/or modified sequence
atgagccagttgtcaaccactatgagtcggtgcgccaaggatcttttcgggtttgcaattatgtttttcatcattttccttgcctatgcccagcttgcatatttggtcttcggaacccaggtggatgacttctctacattccaggagtgtattttcactcaattcaggattattctcggcgatataaactttgcggagattgaggaggctaatagagtgctcggacctatctatttcactacattcgtgttttttatgttttttattctgctcaacatgttcctggctattattaatgatacctatagcgaggtaaagtcagatctcgctcaacagaaggcggaaatggaactctcagacttgattaggaagggatatcataaggcactggtcaaactgaagctaaaaaaaaacaccgtggacgatatcagtgaatccctgagacaaggcggagggaagttgaatttcgatgagctccgccaggacctaaagggtaaaggccacacagatgccgaaatagaggccatattcaccaaatacgaccaggatggagaccaagaactcaccgagcacgagcaccagcagatgcgagacgatctggagaaagaacgggaagatctcgacttagaccattcatcactgcctcggccaatgtcctccaggtcctttcctcgaagcttggatgactctgaggaggacgatgatgaagactcaggacatagttctcggagaaggggctccatctcctctggagtctcctacgaagagttccaggtgctggtgcgtcgggtggatcgcatggagcatagcattggctctatcgtctcaaaaatcgacgccgtgatcgtcaaactggagattatggaacgggcaaaacttaagagacgagaggtcttgggaagactgctcgacggagtcgccgaggatgagaggctaggcagggacagcgaaatacaccgcgagcagatggaaagactggtacgcgaggaactggaaagatgggaatctgacgatgcagccagccagatcagccacggactcgggacccccgtggggctcaacggacagcccagacccaggagctccaggccatctagcagtcagtctacagagggtatggagggggcagggggtaatgggtccagtaacgtgcacgtttag

SEQ ID NO: 326189 - DNA, 1161 bp, Artificial Sequence
  derived and/or modified sequence
atgagccagctgagcaccaccatgagcagatgcgccaaggacctgttcggcttcgccatcatgttcttcatcatcttcctggcctacgcccagctggcctacctggtgttcggcacccaggtggacgacttcagcaccttccaggagtgcatcttcacccagttcagaatcatcctgggcgacatcaacttcgccgagatcgaggaggccaacagagtgctgggccccatctacttcaccaccttcgtgttcttcatgttcttcatcctgctgaacatgttcctggccatcatcaacgacacctacagcgaggtgaagagcgacctggcccagcagaaggccgagatggagctgagcgacctgatcagaaagggctaccacaaggccctggtgaagctgaagctgaagaagaacaccgtggacgacatcagcgagagcctgagacagggcggcggcaagctgaacttcgacgagctgagacaggacctgaagggcaagggccacaccgacgccgagatcgaggccatcttcaccaagtacgaccaggacggcgaccaggagctgaccgagcacgagcaccagcagatgagagacgacctggagaaggagagagaggacctggacctggaccacagcagcctgcccagacccatgagcagcagaagcttccccagaagcctggacgacagcgaggaggacgacgacgaggacagcggccacagcagcagaagaagaggcagcatcagcagcggcgtgagctacgaggagttccaggtgctggtgagaagagtggacagaatggagcacagcatcggcagcatcgtgagcaagatcgacgccgtgatcgtgaagctggagatcatggagagagccaagctgaagagaagagaggtgctgggcagactgctggacggcgtggccgaggacgagagactgggcagagacagcgagatccacagagagcagatggagagactggtgagagaggagctggagagatgggagagcgacgacgccgccagccagatcagccacggcctgggcacccccgtgggcctgaacggccagcccagacccagaagcagcagacccagcagcagccagagcaccgagggcatggagggcgccggcggcaacggcagcagcaacgtgcacgtgtag

SEQ ID NO: 326190 - protein, 753 aa, Artificial Sequence
  derived and/or modified sequence
MGSGTSTQHHFAFQNAERAFKAAALIQRWYRRYVARLEMRRRCTWSIFQSIEYAGQQDQVKLHDFFSYLMDHFIPSSHNDRDFLTRIFTEDRFAQDSEMKKCSDYESIEVPDSYTGPRLSFPLLPDHATALVEAFRLKQQLHARYVLNLLYETKKHLVQLPNINRVSTCYSEEITVCGDLHGQLDDLIFIFYKNGLPSPERSYVFNGDFVDRGKDSVEILMILFAFMLVYPKEFHLNRGNHEDHMVNLRYGFTKEVMNKYKVHGKEILRTLQDVFCWLPLATLIDEKVLILHGGVSDITDLELLDKIERSKIVSTMRCKTRQKSEKQMEEKRRANQKSSAQGPIPWFLPESRSLPSSPLRLGSYKAQKTSRSSSIPCSGSLDGRELSRQVRSSVELELERCRQQAGLLVTGEKEEPSRSASEADSEAGELRKPTQEEWRQVVDILWSDPMAQEGCKANTIRGGGCYFGPDVTQQLLQKYNMQFLIRSHECKPEGYEFCHNRKVLTIFSASNYYEVGSNRGAYVKLGPALTPHIVQYQANKVTHTLTMRQRISRVEESALRALREKLFAHSSDLLSEFKKHDADKVGLITLSDWAAAVESVLHLGLPWRMLRPQLVNSSADNMLEYKSWLKNLAKEQLSRENIQSSLLETLYRNRSNLETIFRIIDSDHSGFISLDEFRQTWKLFSSHMNIDITDDCICDLARSIDFNKDGHIDINEFLEAFRLVEKSCPEGDASECPQATNAKDSGCSSPGAH

SEQ ID NO: 326191 - protein, 598 aa, Artificial Sequence
  derived and/or modified sequence
MGSGTSTQHHFAFQNAERAFKAAALIQRWYRRYVARLEMRRRCTWSIFQSIEYAGQQDQVKLHDFFSYLMDHFIPSSHNDRDFLTRIFTEDRFAQDSEMKKCSDYESIEVPDSYTGPRLSFPLLPDHATALVEAFRLKQQLHARYVLNLLYETKKHLVQLPNINRVSTCYSEEITVCGDLHGQLDDLIFIFYKNGLPSPERSYVFNGDFVDRGKDSVEILMILFAFMLVYPKEFHLNRGNHEDHMVNLRYGFTKEVMNKYKVHGKEILRTLQDVFCWLPLATLIDEKVLILHGGVSDITDLELLDKIERSKIVSTMRCKTRQKSEKQMEEKRRANQKSSAQGPIPWFLPESRSLPSSPLRLGSYKAQKTSRSSSIPCSGSLDGRELSRQVRSSVELELERCRQQAGLLVTGEKEEPSRSASEADSEAGELRKPTQEEWRQVVDILWSDPMAQEGCKANTIRGGGCYFGPDVTQQLLQKYNMQFLIRSHECKPEGYEFCHNRKVLTIFSASNYYEVGSNRGAYVKLGPALTPHIVQYQANKVTHTLTMRQRISRVEESALRALREKLFAHSSDLLSEFKKHDADKVGLASSQLCYYQQK

SEQ ID NO: 326192 - DNA, 2262 bp, Artificial Sequence
  derived and/or modified sequence
atgggttctggaacttccactcagcaccatttcgccttccagaacgctgagagggccttcaaggctgcggccctgattcaacgctggtacagaaggtatgtagctagactagagatgcgtcggagatgtacctggagtatttttcagagtattgagtacgctggccagcaggatcaggtgaagctacacgacttcttttcttatcttatggatcatttcatccccagtagccataacgatcgagactttcttacaaggatcttcaccgaggataggttcgctcaagattccgaaatgaagaaatgttccgactacgaaagcatagaggtacctgactcctacactggccctcggttgtccttccccctcctccctgatcacgcaaccgccttagtggaagccttccgactgaaacagcagctgcatgctcgttatgtcttgaatttgctatacgaaacaaagaaacatctagtccaattacctaatatcaaccgcgtgtccacgtgctactcggaagagatcacagtgtgtggggaccttcacggccagctggacgatctgatatttattttctacaagaatggtctgcccagccccgagagatcatacgtgttcaacggcgatttcgtcgacaggggtaaggactcggttgagattctcatgatactgtttgctttcatgctggtgtatccaaaggagtttcaccttaacagaggaaatcacgaagatcacatggtaaacctacgatatggcttcacaaaagaagtgatgaacaagtataaggttcatgggaaagagattctgagaaccctgcaggacgtgttttgctggctgcccctggccactctcatcgatgagaaggtgctaatactccacggaggcgtttccgacattactgacctggagttgttagataaaatagagagaagtaaaatcgtctcgacgatgaggtgcaagacgcgacagaaaagtgagaagcagatggaggagaaacgccgggctaatcagaagagcagtgctcaggggcccattccctggttcctgcctgagtctaggagtctgccgagctctcccttacgactgggtagttacaaggcccagaagacatccaggagcagtagcatcccatgttctggctcacttgacggtagggagctgtccaggcaggtccgttcaagcgtggagcttgaactggagcgctgccgccagcaggctgggctgctggtgaccggggaaaaggaggagcctagccgtagtgcatctgaggccgactctgaagctggagaactgcggaagcctactcaggaggaatggcgacaagtcgtggacattctgtggagtgacccaatggcccaggagggatgtaaggccaacaccatacgaggtggtggctgctacttcggtcccgacgtgactcagcaactactgcaaaagtacaacatgcagttcctgataaggagccacgaatgtaaaccggaggggtatgagttttgccataatcgcaaagtcctgacgatcttctcagcttccaattattacgaggtgggctctaaccgaggcgcctacgtcaaactcggccccgctctaacacctcatatcgtacagtaccaggccaataaggtaacacacacattaactatgcgtcagagaatcagtcgggtggaggaatctgcactcagagcactaagagagaagctgtttgcacacagctcggatttgctatcggagtttaaaaagcatgatgccgacaaagtggggttaattactctgtctgactgggcagcggctgtcgagtcagttctccacctcggcctgccttggaggatgctgcgtccccagctggtgaattcctccgcagacaatatgcttgagtataaatcctggcttaagaacctcgccaaggagcaactgtcgcgggagaatatccagagttctctactggaaacactctatcgaaacaggagcaatttggagactatttttagaattatagacagcgatcacagtgggtttatatctcttgatgagtttaggcagacttggaaactatttagttcccacatgaatatagacatcactgacgactgcatttgtgatttggcccggtctatcgattttaataaagacgggcacattgatattaacgaattcctggaagccttccggctggtggagaaatcatgtcctgaaggggacgcctccgaatgcccccaggccacaaacgccaaagattccggatgcagctcaccaggcgcccattag

SEQ ID NO: 326193 - DNA, 1797 bp, Artificial Sequence
  derived and/or modified sequence
atgggcagcggcacgtccactcagcaccactttgcgttccagaacgccgagcgtgcttttaaagctgccgcattgatccagcgctggtacaggcggtacgttgctcgtctggaaatgcgccgcaggtgtacatggagcatctttcagtcaatagagtacgctgggcaacaggaccaggtgaagctacacgacttcttttcctatctgatggaccatttcattccaagctcccataacgaccgggacttcttgacaaggatattcactgaggaccgttttgctcaggattcggaaatgaaaaagtgctcggactacgagtccatcgaggtgcccgacagctatactggccccagactgtcatttccactgttgcctgatcacgccaccgccctggtggaggccttcagactgaaacaacagctgcatgcacgatacgtgctcaacctcctgtacgagacaaaaaaacacctggttcaactgcctaatatcaacagggtcagtacctgttattcagaggaaattaccgtgtgcggcgaccttcatgggcagctggatgatctgatcttcattttctacaaaaatggactgccaagccctgaaagaagctacgtattcaatggagactttgtggaccgtggaaaagactctgtggagatcttaatgattctttttgccttcatgttggtgtacccaaaagagttccaccttaatcggggaaatcacgaggatcatatggtgaatctgagatatgggttcacgaaagaagtgatgaacaagtataaagtccacggtaaggagatcctccggacactccaggacgtgttttgctggttaccgttagcgaccttaatcgatgagaaggtgttaattttgcacgggggggtcagtgatataaccgatctggaactgctggataagatcgagcggtccaagatcgtgtccacaatgcggtgcaagacgaggcaaaagagtgagaagcagatggaggaaaagcgccgcgccaatcagaaaagctcggcacagggccccataccgtggtttctgcctgagagcagaagcctcccatcaagccccctgcgtctcgggagctacaaagcacaaaagacgagccggtcttctagtatcccttgttcgggatcactggatggtagagagctgtccaggcaggtgcgaagctctgtggagctggagctggagcggtgtcgccagcaagctggtctcttggtgactggcgagaaagaggaacccagcaggtctgcaagcgaagcagacagtgaagccggtgagctgcgcaagcccacccaggaggaatggagacaggtggtggacatcttgtggagtgaccctatggctcaggagggctgcaaggctaatacaatcaggggtggcggatgctactttgggcccgacgtgactcagcaactcttgcaaaaatacaatatgcaattcctgattaggtcccacgagtgcaaacctgaggggtatgagttctgccataaccgtaaggtcctcactattttctcagcgagtaattattatgaagttggctctaataggggggcttatgtgaaactgggcccagctttgactcctcacatcgtccagtaccaggcaaataaagtgacacatacactgaccatgcggcagaggatcagtcgggtggaagagtccgcactgcgggccctccgggaaaagctatttgcacattcttcagacctcctgtccgagtttaagaagcacgacgcagataaagtggggctggccagttctcagctgtgttactaccaacagaagtag

SEQ ID NO: 326194 - DNA, 2262 bp, Artificial Sequence
  derived and/or modified sequence
atgggcagcggcaccagcacccagcaccactttgccttccagaatgctgagcgggccttcaaggctgctgccctgatccagcgctggtacagaagatatgtggcccggctggagatgagaagacgctgcacctggagcatcttccagagcattgaatatgccggccagcaggaccaggtgaagctgcatgacttcttctcctacctgatggaccacttcatccccagcagccacaatgaccgggacttcctgacccgcatcttcacagaggacagatttgcccaggacagcgagatgaagaagtgcagcgactatgagagcattgaggtgcctgacagctacacaggcccccggctgtccttccccctgctgcctgaccacgccacagccctggtggaggccttccggctgaagcagcagctgcacgcccgctacgtgctgaacctgctgtatgagaccaagaagcacctggtgcagctgcccaacatcaacagagtgtccacctgctacagcgaggagatcaccgtgtgtggggacctgcacggccagctggatgacctgatcttcatcttctacaagaatggcctgcccagccctgagaggagctatgtgttcaacggggactttgtggaccggggcaaggacagcgtggagatcctgatgatcctgtttgccttcatgctggtgtaccccaaggagttccacctgaacagaggcaaccacgaggaccacatggtgaacctgcgctatggcttcaccaaggaggtgatgaacaagtacaaggtgcacggcaaggagatcctgcggaccctgcaggatgtgttctgctggctgcccctggccaccctgattgatgagaaggtgctgatcctgcacggcggcgtgtctgacatcacagacctggagctgctggacaagattgaaagaagcaagatcgtgtccaccatgcgctgcaagacccggcagaagtctgagaagcagatggaggagaagaggcgggccaaccagaagagcagcgcccagggccccatcccctggttcctgcctgagagccgcagcctgcccagcagccccctgcggctgggcagctacaaggcccagaagaccagccgcagcagcagcatcccctgcagcggcagcctggatggccgggagctgagccggcaggtgcgcagctctgtggagctggagctggagcgctgccggcagcaggccggcctgctggtgactggagagaaggaggagcccagccgcagcgccagcgaggccgacagcgaggccggggagctgaggaagcccacccaggaggagtggaggcaggtggtggacatcctgtggagcgaccccatggcccaggagggctgcaaggccaacaccatccggggcggcggctgctactttggaccagatgtgacccagcagctgctgcagaagtacaacatgcagttcctgatccgcagccatgagtgcaagccagagggctatgagttctgccacaacaggaaggtgctgaccatcttcagcgccagcaactactatgaggtgggcagcaacagaggagcctacgtgaagctgggccctgccctgaccccccacatcgtgcagtaccaggccaacaaggtgacccacaccctgaccatgaggcagaggatcagccgggtggaggagagcgccctgcgggccctgcgggagaagctgtttgcccacagcagtgacctgctgtctgagttcaagaagcatgatgctgacaaggtgggcctcatcaccctgagtgactgggccgctgctgtggagagcgtgctgcacctgggcctgccctggaggatgctgcggccccagctggtgaacagcagcgctgacaacatgctggagtacaagtcctggctgaagaacctggccaaggagcagctgagccgggagaacatccagagcagcctgctggagaccctgtacagaaacagaagcaacctggagaccatcttccgcatcatcgacagcgaccacagcggcttcatcagcctggatgagttccggcagacctggaagctgttcagcagccacatgaacatcgacatcacagatgactgcatctgtgacctggcccggagcattgacttcaacaaggatggccacatcgacatcaatgagttcctggaggccttccggctggtggagaagagctgcccagaaggagatgcctctgaatgtccccaggccaccaatgccaaggacagcggctgcagcagccctggggcccactag

SEQ ID NO: 326195 - DNA, 1797 bp, Artificial Sequence
  derived and/or modified sequence
atgggcagcggcaccagcacccagcaccactttgccttccagaatgctgagcgggccttcaaggctgctgccctgatccagcgctggtacagaagatatgtggcccggctggagatgagaagacgctgcacctggagcatcttccagagcattgaatatgccggccagcaggaccaggtgaagctgcatgacttcttctcctacctgatggaccacttcatccccagcagccacaatgaccgggacttcctgacccgcatcttcacagaggacagatttgcccaggacagcgagatgaagaagtgcagcgactatgagagcattgaggtgcctgacagctacacaggcccccggctgtccttccccctgctgcctgaccacgccacagccctggtggaggccttccggctgaagcagcagctgcacgcccgctacgtgctgaacctgctgtatgagaccaagaagcacctggtgcagctgcccaacatcaacagagtgtccacctgctacagcgaggagatcaccgtgtgtggggacctgcacggccagctggatgacctgatcttcatcttctacaagaatggcctgcccagccctgagaggagctatgtgttcaacggggactttgtggaccggggcaaggacagcgtggagatcctgatgatcctgtttgccttcatgctggtgtaccccaaggagttccacctgaacagaggcaaccacgaggaccacatggtgaacctgcgctatggcttcaccaaggaggtgatgaacaagtacaaggtgcacggcaaggagatcctgcggaccctgcaggatgtgttctgctggctgcccctggccaccctgattgatgagaaggtgctgatcctgcacggcggcgtgtctgacatcacagacctggagctgctggacaagattgaaagaagcaagatcgtgtccaccatgcgctgcaagacccggcagaagtctgagaagcagatggaggagaagaggcgggccaaccagaagagcagcgcccagggccccatcccctggttcctgcctgagagccgcagcctgcccagcagccccctgcggctgggcagctacaaggcccagaagaccagccgcagcagcagcatcccctgcagcggcagcctggatggccgggagctgagccggcaggtgcgcagctctgtggagctggagctggagcgctgccggcagcaggccggcctgctggtgactggagagaaggaggagcccagccgcagcgccagcgaggccgacagcgaggccggggagctgaggaagcccacccaggaggagtggaggcaggtggtggacatcctgtggagcgaccccatggcccaggagggctgcaaggccaacaccatccggggcggcggctgctactttggaccagatgtgacccagcagctgctgcagaagtacaacatgcagttcctgatccgcagccatgagtgcaagccagagggctatgagttctgccacaacaggaaggtgctgaccatcttcagcgccagcaactactatgaggtgggcagcaacagaggagcctacgtgaagctgggccctgccctgaccccccacatcgtgcagtaccaggccaacaaggtgacccacaccctgaccatgaggcagaggatcagccgggtggaggagagcgccctgcgggccctgcgggagaagctgtttgcccacagcagtgacctgctgtctgagttcaagaagcatgatgctgacaaggtgggcctggccagcagccagctgtgctactaccagcagaagtag

SEQ ID NO: 326196 - DNA, 2262 bp, Artificial Sequence
  derived and/or modified sequence
atgggcagcggcaccagcacccagcaccacttcgccttccagaacgctgagagagcgtttaaagctgccgccctgatccaacggtggtataggaggtatgttgcccggctagagatgcgtagacgttgtacttggtccattttccaatcgattgagtatgccggtcagcaagaccaagttaaactgcatgattttttctcttatctcatggatcacttcattccgtcatcccataacgacagagattttttgacccgcatttttaccgaagacagatttgctcaggattcggaaatgaaaaaatgctctgattacgagtccatcgaagtgccggatagctataccggacctagactctccttccccctgctacctgaccatgccactgcccttgtggaggccttcagactgaaacagcagctgcacgcacgatatgtgctaaatcttttgtatgagaccaagaaacacctggtgcaattgccaaatataaatagagtgagtacctgctacagcgaggagatcactgtttgcggggatttacatggacagctcgatgatctgatttttattttctacaaaaacgggctgccaagcccagagagatcatacgtcttcaacggagatttcgtcgacagaggtaaggatagtgtggagatactgatgatcttgttcgctttcatgctcgtctatcctaaagagttccacttgaatcgcggcaaccacgaagaccacatggtgaacttgcggtacgggtttaccaaggaggtaatgaataagtacaaagtacatggcaaggaaatcctgcggactctccaggacgtcttttgctggttgcctctcgcgaccttgatagatgagaaagtgctgatccttcatgggggtgtgagcgatattacagatttggagctacttgacaagatagaaagatctaaaatcgtgtctacaatgcggtgtaagaccaggcaaaagagtgaaaaacaaatggaggagaaacgcagagctaatcagaagagcagcgcccagggccctattccttggtttctacctgagtctcgttcactcccatcttctccattgaggttgggcagctataaagcgcagaaaactagccgctcctcctctataccgtgcagtggtagccttgacggacgggagctgagcaggcaggtgaggagctccgtggagttggaacttgaacgatgccgccagcaagcagggctcctggtcacaggcgagaaagaggaaccgtctcggtccgcctcagaagcagatagtgaggcgggggaactgcgtaagcctacacaagaagagtggcgccaggtcgtggacatactgtggtctgatcccatggcccaggagggctgtaaggccaataccatcagaggcggaggttgttattttgggccagatgtaacccagcagctcttgcagaaatacaacatgcagttcctgataaggagccacgagtgcaagcccgaaggctatgagttctgccataaccggaaagtgttaaccatcttctccgcaagcaattactacgaagtgggctcaaatcgcggggcatatgttaaactgggaccagcccttacaccgcacattgtgcagtaccaggcgaataaagtcacccacactttgacaatgcgacaacgaatcagtagggttgaggaaagtgctctgagagcacttcgggaaaaactgttcgcccacagcagcgatctactttccgagtttaaaaagcacgatgcagacaaggtgggcttgatcaccctgagcgattgggctgcagcagtggagtctgtcctgcacctaggcctgccttggagaatgctgcgtccccagctggtgaactcttctgccgacaacatgttggagtacaaatcatggcttaagaacctggccaaggagcagctgtcaagggaaaatatccagtcaagtctattagagacgctctacaggaaccggagcaatctcgagacaatatttcgaatcatcgacagcgaccattctgggttcatctcactggacgaattcaggcagacttggaaactcttcagctcacacatgaacattgatattacagacgattgcatctgtgacctagctagaagtatcgattttaacaaagacggacacattgacataaatgagttcttagaagccttcagattggtggagaagagttgccccgaaggagacgcaagtgaatgcccccaggccaccaacgctaaggactccggctgtagctctccaggggcacattag

SEQ ID NO: 326197 - DNA, 1797 bp, Artificial Sequence
  derived and/or modified sequence
atgggcagcggcaccagcacccagcaccacttcgccttccagaacgcggagagagcctttaaagccgccgcgctgattcaacggtggtatcgcagatacgtcgcccggctggaaatgcggaggcggtgcacgtggagcatcttccagagtatcgagtacgccggccaacaggaccaggtcaaactccacgatttttttagctacctgatggaccatttcatcccatcatcacataatgaccgggattttcttacacgtatcttcaccgaggataggttcgcccaggactcggaaatgaagaagtgctccgactatgagtccattgaggtccccgactcttatacaggacccagactttcttttccgctgttacctgaccacgcaaccgccttggttgaggcctttcgtctgaagcagcagctacatgctcggtacgtgctcaatctgctatatgagacaaagaagcacctggtgcagcttcccaacataaacagagtgagcacatgttattcagaggagatcaccgtttgcggtgatctgcatgggcagctcgatgacctcattttcattttttataagaatgggctgccgtcccctgaacggagctatgtgtttaacggcgacttcgtggacagaggtaaagactcagttgagattttaatgattctcttcgcgtttatgctggtctatcccaaggagttccacctgaatcgcggaaatcatgaggaccatatggtcaacctgcggtacggtttcaccaaagaggtgatgaataaatacaaggttcatggtaaggagattctgagaacgctgcaggacgtcttttgctggctgcccctggctacattgatagatgagaaagtgttgatcctgcatggaggggtgtccgacatcaccgatctcgaactgctcgacaagatagaaaggagcaaaattgtctctacgatgcgttgtaagacacggcagaagtcagaaaagcagatggaggaaaaaaggagggcaaatcagaagtcatccgctcaggggcccataccctggttcttgcccgagagtcgcagcctgccttcaagcccactcagactgggcagctacaaagctcagaagacttcccgcagcagctcgatcccttgtagtggaagcttggatggtagagaactaagtcgtcaggtgcggtctagcgtggagttggagctcgagagatgccggcagcaggccgggctgctcgtgaccggagagaaagaggaaccatctcggagtgccagtgaggctgacagcgaggccggcgaacttaggaagcctactcaggaagaatggcggcaggtcgttgatatcctctggtctgacccgatggctcaggaagggtgcaaagcaaacacaatccgcgggggcgggtgctactttggccccgatgtcacgcagcaactattgcagaaatacaacatgcagtttctaatcagatcacatgaatgcaaaccagaaggctatgaattttgccacaacagaaaagtccttacaatttttagcgcttctaactattacgaagtgggctcaaatagaggagcttacgttaaactcggcccagcgctgacaccccatatcgtacagtatcaggccaataaggtgactcacactctcaccatgagacagagaatttcgcgagtggaggagtccgccctgcgcgctctccgggagaagctatttgcacatagttcagatctgctgtcagaattcaagaagcatgacgcagacaaagtgggccttgcaagctcccaactatgttactatcagcagaagtag

SEQ ID NO: 326198 - DNA, 2262 bp, Artificial Sequence
  derived and/or modified sequence
atgggcagcgggacctctactcaacaccacttcgctttccagaacgccgagcgggctttcaaagccgctgcgctgatccagcgttggtacagacggtacgtggcgaggctggaaatgagacgcaggtgcacatggtcaatttttcaaagcattgaatatgcagggcagcaagatcaggttaagctgcacgacttcttctcctacctgatggatcattttattccctctagccataacgaccgagacttcctgacccgcatcttcactgaggacagatttgcccaggatagcgagatgaaaaagtgcagtgattacgagagtatcgaggtgccggactcatataccggtcctcgcctctcctttccactgcttcccgatcatgctaccgctctggtggaagccttcagattgaagcaacaactacatgctcggtacgttcttaacctgctatacgaaactaaaaaacacttggttcagctccccaacattaatcgggtttccacgtgctacagcgaggagattacagtttgtggggacctccatggacagctggatgatctgatcttcattttttataagaacggcctcccttctcccgagcgaagttacgtattcaacggcgattttgtcgatcggggaaaggacagcgtcgaaatcctgatgatcctctttgcctttatgctagtttatccaaaagagttccaccttaaccgaggaaatcatgaagatcacatggtcaatcttcgttacggctttacaaaagaagtcatgaacaaatacaaggttcatggaaaagaaattctgcgcaccctccaagatgttttctgctggctgcccctggctacactgattgatgaaaaggtcttaatcttgcatgggggtgtgtcagacattactgatctcgagctcttggacaagatcgagcggtctaagattgtgtccacgatgagatgtaaaacccgccagaaatccgaaaagcagatggaagagaaaagacgcgcaaatcagaagtccagcgcacaggggcctatcccctggttcttgcccgaaagtcggagtctaccctcctcgccgctcagactgggatcctataaggcccagaagactagtcgttcgtccagcataccttgtagcggctcactggacggacgcgagttatcgcggcaagtgcgtagtagcgttgaacttgaactagagcggtgccggcagcaggctggactgttagtgacgggggaaaaggaggaacccagtcgtagcgctagtgaggcagatagcgaggccggagaattgcgcaagcctactcaggaagagtggcgacaggtcgtggatattttgtggtccgatcccatggcccaggaagggtgtaaagccaataccatccgcggaggaggatgctattttggccctgacgtgactcagcagttgttgcagaagtacaacatgcaatttcttatccggtcccatgagtgcaagcccgagggatacgaattctgccacaacaggaaggttttaacgattttcagtgcctccaactattatgaggtaggcagcaatcggggagcatatgtgaaactaggtccagccttgactccccacattgtgcagtaccaggcgaacaaggttacacacactcttaccatgcgccagagaatcagtcgggtcgaggagtctgctcttcgagccctgagggagaagctgttcgctcatagctcagatttgctttctgagttcaaaaagcacgatgcggataaggtgggattgattactctttctgattgggcggcagctgtcgaatctgtcctgcaccttgggctgccgtggcgcatgttacgaccacagctggtgaacagtagcgcagacaatatgcttgagtataagtcttggctgaagaacttggcaaaggagcagctttcccgagagaacatacagagctcgctgctggaaacactttatcgcaacagatctaatctagaaactatatttcgaatcattgacagcgaccactccgggttcatatcgctggatgagttccggcaaacatggaagcttttctcctcccatatgaacatagacattactgatgactgcatctgcgacttggcccgttcaatcgacttcaacaaagatgggcacatcgatatcaacgagttcctggaagctttccgcctggttgaaaagtcctgcccagagggcgatgcatccgagtgtccccaggcgactaatgctaaagatagtggctgttcaagccctggcgctcactag

SEQ ID NO: 326199 - DNA, 1797 bp, Artificial Sequence
  derived and/or modified sequence
atggggtctggaaccagcactcaacatcacttcgcatttcagaacgcagagagagctttcaaggccgctgcactcattcagcgctggtaccgccgttacgtcgctcgcctagaaatgcgtaggcgatgtacctggagcatttttcagtccatagagtacgccggtcaacaagatcaagtgaaacttcacgacttcttctcctacttgatggatcattttatccccagtagtcacaatgaccgcgacttcctaaccaggatcttcactgaggaccggttcgcccaagactctgaaatgaaaaaatgtagcgactacgaatctatcgaggtgccggatagctacacgggtccccgtctctctttcccactcctaccagatcacgccactgctctggtagaggcttttcgtctcaaacagcagcttcatgctcggtacgttctcaacctgctctacgagaccaagaaacacttggtgcagctgcctaatattaaccgggtctccacctgctattcagaagagataactgtctgcggagatttacatggccaattagatgatcttatctttatcttctataaaaacggactcccctcgccagagcgatcctacgtcttcaacggcgatttcgtggaccggggaaaggattctgtggaaatattgatgattctcttcgcctttatgctggtgtatcctaaggaatttcatctgaatcggggaaaccatgaagaccatatggtgaatttgcggtatggattcacaaaggaggtgatgaataagtacaaagtacacggaaaagagatattaaggacgttacaagatgtcttctgctggctgccattagccactctcatcgatgagaaagtgctaattctgcacgggggtgtgtcagacatcaccgatcttgaactgctggacaagatcgagagatctaagattgtaagcaccatgcgctgcaaaacccggcagaaatccgagaagcagatggaagagaagaggagggcaaaccagaaatcaagtgctcagggacccatcccttggtttctgcctgaatcacggtctcttccttcttcacccctccgtttaggcagctacaaggcccaaaagaccagccggagctcatctattccttgttctggaagcctggacggtagagagctttcaaggcaggtgagaagcagcgtcgaactagagctcgagagatgccgccagcaggcaggcctcctcgtgactggggaaaaggaagagccatccagaagtgcttcggaggcggactccgaggcaggcgagctacgtaagcctacccaagaggaatggaggcaagtggtggatatcctgtggagcgatccaatggcacaggaggggtgcaaggcgaacacgattcgcggaggagggtgctactttggccctgatgtgactcagcaactgctgcagaagtataacatgcagtttctgatcagatcccacgagtgtaaacccgaagggtatgagttctgccataatcggaaggtattgactattttcagtgcttcaaattactacgaggtggggagcaaccggggagcctatgtgaagttggggccagcccttacaccccacatcgtccagtatcaggctaataaggtgacccacacactcaccatgcggcagcggatcagccgcgtcgaagagtccgctctgcgtgcactgagagaaaaacttttcgcccattcaagtgatttgctgagcgaatttaagaagcacgacgccgacaaggtcggcctcgcatcgtcccaattgtgttactaccagcaaaaatag

SEQ ID NO: 326200 - DNA, 3414 bp, Artificial Sequence
  derived and/or modified sequence
gggggcctgatctgactgacgtcagggggtgcctactccttcgaggcaagaagcctgaactttccttcctgtcactgtgaatacttggccagggctgtgaatgtcaccattgcttttcaggaagaagacatggcagactagggctgcaccttctttatgggctctgtaggtctgaaagaaatcagatcagcctgggatccctcagccaactctgaagacaggatggggatcacgcctgcatgttaaagagatttctgccttgttgtgtctcatggtaaataaaaaacccagcaaagaagcaaacagctcactgtcctctggatctgctgcgtcctgcaggagcattgcgcttaaactatgggaagcggcacctccacccaacatcattttgctttccagaatgcagagagagccttcaaggcagcagccctgatccagagatggtaccggcgctacgtggcccgcctggagatgaggcggcgttgcacctggagcatcttccagtctatagaatatgctgggcagcaagaccaagtcaagctccatgacttcttcagctatctcatggatcacttcatccccagcagccacaacgacagggacttcctgacccgcatattcactgaggacagattcgcccaggactccgagatgaagaaatgcagtgactatgaatccatagaggtacccgacagttacacggggccacgcctctccttcccactcctgcctgaccatgcaactgccctggtagaagcattcagactgaaacaacagctccatgctcgctacgtcttgaaccttttgtatgaaaccaagaaacatctggtacagctgccaaacatcaaccgggtctcaacctgttacagtgaggagatcacagtgtgtggagacttacatggccaattggatgacttaatctttatattttataagaatggcctcccgtcgccagaacggtcatatgtgttcaacggtgactttgtggatcgaggcaaggattcagtagagatcctgatgattctttttgccttcatgctggtttaccccaaagagttccatcttaacagaggaaaccatgaggaccatatggtgaacttacgatatggcttcaccaaggaagtgatgaataaatacaaggtacacgggaaggaaatactaagaaccctgcaagatgttttctgttggcttccactggccactctgatagatgagaaagttctaattcttcatggtggggtgtcagacataactgatctggagcttttggacaaaatagagaggagcaagatagtttccaccatgaggtgcaaaacgagacagaagagtgagaagcagatggaggagaagagaagagccaaccagaagagctctgcacagggacccatcccatggtttctccccgaaagccgctctcttccctcttcgccccttcggcttggctcctacaaggcccagaaaaccagcaggtcctccagcatcccctgcagcggttccctggacgggcgggagctctcccggcaggtgcggagctccgtggaactggagctagagcggtgccggcagcaagcaggcctcctggtgaccggagagaaagaggagccctcccgctcagcctcagaagcagactctgaagccggagagctgcggaagcccactcaggaggagtggaggcaggttgtagatatcctgtggagtgatcccatggctcaagagggctgcaaggccaacactattcgaggaggaggctgttattttgggcctgatgtgacacaacagttgctacaaaaatacaacatgcaattcctgatccgttcacatgaatgcaaacctgaaggctatgaattctgtcacaaccgcaaggtattaacaatcttttctgcctccaactactatgaagttggcagcaacagaggggcctatgtcaaactggggccagccctgaccccacatattgtgcagtatcaagctaacaaggtgacccacacactcaccatgaggcaaaggattagcagagtggaggagtcggctctgagagctctgagggagaagctgtttgctcattcttcagatcttctcagtgaatttaagaagcatgatgcagataaagtcggtttaatcaccttgagtgactgggcagcagcggtggagtctgtgttgcacctaggactgccatggcggatgctgaggccacagctggtgaacagctcagcagacaacatgctggagtacaagtcttggctgaagaacttggccaaggaacaactgagtcgcgagaacatacaatcaagtttgctggaaacattgtatcgaaaccgatccaacctagagaccatttttaggatcatagacagtgatcattcagggttcatctcactggacgagttcaggcagacctggaagctgttcagctctcacatgaatatcgacattacagatgactgcatctgtgaccttgctcggagcattgatttcaacaaagatggccacattgatatcaatgagttcctggaggccttccgccttgtggagaaatcctgcccagagggcgatgcctcagaatgcccacaagctacaaatgctaaagacagtggctgcagcagtccaggtgcacactaagaacagcctggtcttcatcacccaaagtgcctcataggcaatgctcagcttctcactagactatctcccttattctccatgtgaaactttatgctgaaaatttacctatccatatgcatcagaatcacctgtgtatttcagtgtggaggggtgggttggggtgttgtgtatgtatgtgttttaagtatatgagtgccccaaccccacctcacaatcttcacaaagtagaacttaggtatagtgttttcaaattctaaagtccacttcagttaagaaccactgacaatgtaactctctcattgttttcattttatacgtttttttgagatggagtttctctcttgttgcccaggctggagtgcattggcgcgatctcggctcaccgcaaagtccgcctcccaggcgattctcctgcctcagcctcctgagtagctgggattacaggcatgcaccaccacaccaggctaattttgtatttttagtagacacagggtttctccatgttggtcaggctggtcttgaactcccaacctcaggtgatccaccctcctcagcctcccaaagtgctgggattacaggcatgagccaccgcacccagcctattttatactttttatttattgtctttaacaatgtctattggtaaaggaaagttatttttaaaaattgtattgtaattccatgacccaagcatatggattttcttcattatttactttttcttacttgttactgtagtgtttatataattttatgttctacttttaaaaaaataaattaatatctaattgtaaa

SEQ ID NO: 326201 - DNA, 2154 bp, Artificial Sequence
  derived and/or modified sequence
gggggcctgatctgactgacgtcagggggtgcctactccttcgaggcaagaagcctgaactttccttcctgtcactgtgaatacttggccagggctgtgaatgtcaccattgcttttcaggaagaagacatggcagactagggctgcaccttctttatgggctctgtaggtctgaaagaaatcagatcagcctgggatccctcagccaactctgaagacaggatggggatcacgcctgcatgttaaagagatttctgccttgttgtgtctcatggtaaataaaaaacccagcaaagaagcaaacagctcactgtcctctggatctgctgcgtcctgcaggagcattgcgcttaaactatgggaagcggcacctccacccaacatcattttgctttccagaatgcagagagagccttcaaggcagcagccctgatccagagatggtaccggcgctacgtggcccgcctggagatgaggcggcgttgcacctggagcatcttccagtctatagaatatgctgggcagcaagaccaagtcaagctccatgacttcttcagctatctcatggatcacttcatccccagcagccacaacgacagggacttcctgacccgcatattcactgaggacagattcgcccaggactccgagatgaagaaatgcagtgactatgaatccatagaggtacccgacagttacacggggccacgcctctccttcccactcctgcctgaccatgcaactgccctggtagaagcattcagactgaaacaacagctccatgctcgctacgtcttgaaccttttgtatgaaaccaagaaacatctggtacagctgccaaacatcaaccgggtctcaacctgttacagtgaggagatcacagtgtgtggagacttacatggccaattggatgacttaatctttatattttataagaatggcctcccgtcgccagaacggtcatatgtgttcaacggtgactttgtggatcgaggcaaggattcagtagagatcctgatgattctttttgccttcatgctggtttaccccaaagagttccatcttaacagaggaaaccatgaggaccatatggtgaacttacgatatggcttcaccaaggaagtgatgaataaatacaaggtacacgggaaggaaatactaagaaccctgcaagatgttttctgttggcttccactggccactctgatagatgagaaagttctaattcttcatggtggggtgtcagacataactgatctggagcttttggacaaaatagagaggagcaagatagtttccaccatgaggtgcaaaacgagacagaagagtgagaagcagatggaggagaagagaagagccaaccagaagagctctgcacagggacccatcccatggtttctccccgaaagccgctctcttccctcttcgccccttcggcttggctcctacaaggcccagaaaaccagcaggtcctccagcatcccctgcagcggttccctggacgggcgggagctctcccggcaggtgcggagctccgtggaactggagctagagcggtgccggcagcaagcaggcctcctggtgaccggagagaaagaggagccctcccgctcagcctcagaagcagactctgaagccggagagctgcggaagcccactcaggaggagtggaggcaggttgtagatatcctgtggagtgatcccatggctcaagagggctgcaaggccaacactattcgaggaggaggctgttattttgggcctgatgtgacacaacagttgctacaaaaatacaacatgcaattcctgatccgttcacatgaatgcaaacctgaaggctatgaattctgtcacaaccgcaaggtattaacaatcttttctgcctccaactactatgaagttggcagcaacagaggggcctatgtcaaactggggccagccctgaccccacatattgtgcagtatcaagctaacaaggtgacccacacactcaccatgaggcaaaggattagcagagtggaggagtcggctctgagagctctgagggagaagctgtttgctcattcttcagatcttctcagtgaatttaagaagcatgatgcagataaagtcggcctagcttccagccaactctgctactatcaacaaaaatag

SEQ ID NO: 326202 - DNA, 2262 bp, Artificial Sequence
  derived and/or modified sequence
atgggcagcggcaccagcacccagcaccacttcgccttccagaacgccgagagagccttcaaggccgccgccctgatccagagatggtacagaagatacgtggccagactggagatgagaagaagatgcacctggagcatcttccagagcatcgagtacgccggccagcaggaccaggtgaagctgcacgacttcttcagctacctgatggaccacttcatccccagcagccacaacgacagagacttcctgaccagaatcttcaccgaggacagattcgcccaggacagcgagatgaagaagtgcagcgactacgagagcatcgaggtgcccgacagctacaccggccccagactgagcttccccctgctgcccgaccacgccaccgccctggtggaggccttcagactgaagcagcagctgcacgccagatacgtgctgaacctgctgtacgagaccaagaagcacctggtgcagctgcccaacatcaacagagtgagcacctgctacagcgaggagatcaccgtgtgcggcgacctgcacggccagctggacgacctgatcttcatcttctacaagaacggcctgcccagccccgagagaagctacgtgttcaacggcgacttcgtggacagaggcaaggacagcgtggagatcctgatgatcctgttcgccttcatgctggtgtaccccaaggagttccacctgaacagaggcaaccacgaggaccacatggtgaacctgagatacggcttcaccaaggaggtgatgaacaagtacaaggtgcacggcaaggagatcctgagaaccctgcaggacgtgttctgctggctgcccctggccaccctgatcgacgagaaggtgctgatcctgcacggcggcgtgagcgacatcaccgacctggagctgctggacaagatcgagagaagcaagatcgtgagcaccatgagatgcaagaccagacagaagagcgagaagcagatggaggagaagagaagagccaaccagaagagcagcgcccagggccccatcccctggttcctgcccgagagcagaagcctgcccagcagccccctgagactgggcagctacaaggcccagaagaccagcagaagcagcagcatcccctgcagcggcagcctggacggcagagagctgagcagacaggtgagaagcagcgtggagctggagctggagagatgcagacagcaggccggcctgctggtgaccggcgagaaggaggagcccagcagaagcgccagcgaggccgacagcgaggccggcgagctgagaaagcccacccaggaggagtggagacaggtggtggacatcctgtggagcgaccccatggcccaggagggctgcaaggccaacaccatcagaggcggcggctgctacttcggccccgacgtgacccagcagctgctgcagaagtacaacatgcagttcctgatcagaagccacgagtgcaagcccgagggctacgagttctgccacaacagaaaggtgctgaccatcttcagcgccagcaactactacgaggtgggcagcaacagaggcgcctacgtgaagctgggccccgccctgaccccccacatcgtgcagtaccaggccaacaaggtgacccacaccctgaccatgagacagagaatcagcagagtggaggagagcgccctgagagccctgagagagaagctgttcgcccacagcagcgacctgctgagcgagttcaagaagcacgacgccgacaaggtgggcctgatcaccctgagcgactgggccgccgccgtggagagcgtgctgcacctgggcctgccctggagaatgctgagaccccagctggtgaacagcagcgccgacaacatgctggagtacaagagctggctgaagaacctggccaaggagcagctgagcagagagaacatccagagcagcctgctggagaccctgtacagaaacagaagcaacctggagaccatcttcagaatcatcgacagcgaccacagcggcttcatcagcctggacgagttcagacagacctggaagctgttcagcagccacatgaacatcgacatcaccgacgactgcatctgcgacctggccagaagcatcgacttcaacaaggacggccacatcgacatcaacgagttcctggaggccttcagactggtggagaagagctgccccgagggcgacgccagcgagtgcccccaggccaccaacgccaaggacagcggctgcagcagccccggcgcccactag

SEQ ID NO: 326203 - DNA, 1797 bp, Artificial Sequence
  derived and/or modified sequence
atgggcagcggcaccagcacccagcaccacttcgccttccagaacgccgagagagccttcaaggccgccgccctgatccagagatggtacagaagatacgtggccagactggagatgagaagaagatgcacctggagcatcttccagagcatcgagtacgccggccagcaggaccaggtgaagctgcacgacttcttcagctacctgatggaccacttcatccccagcagccacaacgacagagacttcctgaccagaatcttcaccgaggacagattcgcccaggacagcgagatgaagaagtgcagcgactacgagagcatcgaggtgcccgacagctacaccggccccagactgagcttccccctgctgcccgaccacgccaccgccctggtggaggccttcagactgaagcagcagctgcacgccagatacgtgctgaacctgctgtacgagaccaagaagcacctggtgcagctgcccaacatcaacagagtgagcacctgctacagcgaggagatcaccgtgtgcggcgacctgcacggccagctggacgacctgatcttcatcttctacaagaacggcctgcccagccccgagagaagctacgtgttcaacggcgacttcgtggacagaggcaaggacagcgtggagatcctgatgatcctgttcgccttcatgctggtgtaccccaaggagttccacctgaacagaggcaaccacgaggaccacatggtgaacctgagatacggcttcaccaaggaggtgatgaacaagtacaaggtgcacggcaaggagatcctgagaaccctgcaggacgtgttctgctggctgcccctggccaccctgatcgacgagaaggtgctgatcctgcacggcggcgtgagcgacatcaccgacctggagctgctggacaagatcgagagaagcaagatcgtgagcaccatgagatgcaagaccagacagaagagcgagaagcagatggaggagaagagaagagccaaccagaagagcagcgcccagggccccatcccctggttcctgcccgagagcagaagcctgcccagcagccccctgagactgggcagctacaaggcccagaagaccagcagaagcagcagcatcccctgcagcggcagcctggacggcagagagctgagcagacaggtgagaagcagcgtggagctggagctggagagatgcagacagcaggccggcctgctggtgaccggcgagaaggaggagcccagcagaagcgccagcgaggccgacagcgaggccggcgagctgagaaagcccacccaggaggagtggagacaggtggtggacatcctgtggagcgaccccatggcccaggagggctgcaaggccaacaccatcagaggcggcggctgctacttcggccccgacgtgacccagcagctgctgcagaagtacaacatgcagttcctgatcagaagccacgagtgcaagcccgagggctacgagttctgccacaacagaaaggtgctgaccatcttcagcgccagcaactactacgaggtgggcagcaacagaggcgcctacgtgaagctgggccccgccctgaccccccacatcgtgcagtaccaggccaacaaggtgacccacaccctgaccatgagacagagaatcagcagagtggaggagagcgccctgagagccctgagagagaagctgttcgcccacagcagcgacctgctgagcgagttcaagaagcacgacgccgacaaggtgggcctggccagcagccagctgtgctactaccagcagaagtag

SEQ ID NO: 326204 - protein, 110 aa, Artificial Sequence
  derived and/or modified sequence
MEQDRTNHVEGNRLSPFLIPSPPICQTEPLATKLQNGSPLPERAHPEVNGDTKWHSFKSYYGIPCMKGSQNSRVSPDFTQESRGYSKCLQNGGIKRTVSEPSLSGLLQIK

SEQ ID NO: 326205 - protein, 637 aa, Artificial Sequence
  derived and/or modified sequence
MEQDRTNHVEGNRLSPFLIPSPPICQTEPLATKLQNGSPLPERAHPEVNGDTKWHSFKSYYGIPCMKGSQNSRVSPDFTQESRGYSKCLQNGGIKRTVSEPSLSGLLQIKKLKQDQKANGERRNFGVSQERNPGESSQPNVSDLSDKKESVSSVAQENAVKDFTSFSTHNCSGPENPELQILNEQEGKSANYHDKNIVLLKNKAVLMPNGATVSASSVEHTHGELLEKTLSQYYPDCVSIAVQKTTSHINAINSQATNELSCEITHPSHTSGQINSAQTSNSELPPKPAAVVSEACDADDADNASKLAAMLNTCSFQKPEQLQQQKSVFEICPSPAENNIQGTTKLASGEEFCSGSSSNLQAPGGSSERYLKQNEMNGAYFKQSSVFTKDSFSATTTPPPPSQLLLSPPPPLPQVPQLPSEGKSTLNGGVLEEHHHYPNQSNTTLLREVKIEGKPEAPPSQSPNPSTHVCSPSPMLSERPQNNCVNRNDIQTAGTMTVPLCSEKTRPMSEHLKHNPPIFGSSGELQDNCQQLMRNKEQEILKGRDKEQTRDLVPPTQHYLKPGWIELKAPRFHQAESHLKRNEASLPSILQYQPNLSNQMTSKQYTGNSNMPGGLPRQAYTQKTTQLSTSHKCTKLK

SEQ ID NO: 326206 - protein, 709 aa, Artificial Sequence
  derived and/or modified sequence
MSPCGRKMGEGRQQRRAPVGKLLLLPGRRDTPHGRSGSSGARTQRSLLWLLVHVWLWAASGSSAQLFNLTLSVDEGLPPDTLVGDIRAGLPAAQQQEGSGFFLSEDSDDSPLLDDFHVHPDTGIIRTARRLDRERRDHYSFVAATLLGAVVQVEIRVNDVNDHSPRFPLDSLQLDVSELSPPGTAFRLPVAHDPDAGLFSTQGYTLVQPSDLPKDPAGPFFQLRYRTPGPLPSPLLPGSSSPLEPLDLVLLRRLDREEAAAHRLQIEAWDGGRPRRTGLLSVELRVLDENDNPPVFEQDEYRAAVREDAQPGAEVCRVRATDRDLGPNGFVRYSVRARQVPGAGSGGGALGDAAYFAVEELSGVVRVWRPLDREAQAWHQLVVEARDGGAEPEVATVRVSIAVLDVNDNRPAIHVLFLTEGGVARVSEGARPGDYVARVSVSDADGDWEKEDEATGELGVGLGDGSISLSLEGGEGDFALLPGGPPGVFFLCVEGPLDRESRDLYELLLVATDAGSPPLSTEETLLLRVADLNDQPPLFSQQHYKASVSEAAAPGTVVMWVSASDADEAGSDHAWLRYTVVQLSAPCNLGSLQSKMVHTAECGPSFAIDSESGAISTIRTLDREVQEAVELKVVAQDLGEPPLSATCLVSITVDDVNDNEPIFWRQVYNATIAEHAPVGHCFLQLISAQVAFVKIKQKQKEIQEKQNLA

SEQ ID NO: 326207 - protein, 702 aa, Artificial Sequence
  derived and/or modified sequence
MGEGRQQRRAPVGKLLLLPGRRDTPHGRSGSSGARTQRSLLWLLVHVWLWAASGSSAQLFNLTLSVDEGLPPDTLVGDIRAGLPAAQQQEGSGFFLSEDSDDSPLLDDFHVHPDTGIIRTARRLDRERRDHYSFVAATLLGAVVQVEIRVNDVNDHSPRFPLDSLQLDVSELSPPGTAFRLPVAHDPDAGLFSTQGYTLVQPSDLPKDPAGPFFQLRYRTPGPLPSPLLPGSSSPLEPLDLVLLRRLDREEAAAHRLQIEAWDGGRPRRTGLLSVELRVLDENDNPPVFEQDEYRAAVREDAQPGAEVCRVRATDRDLGPNGFVRYSVRARQVPGAGSGGGALGDAAYFAVEELSGVVRVWRPLDREAQAWHQLVVEARDGGAEPEVATVRVSIAVLDVNDNRPAIHVLFLTEGGVARVSEGARPGDYVARVSVSDADGDWEKEDEATGELGVGLGDGSISLSLEGGEGDFALLPGGPPGVFFLCVEGPLDRESRDLYELLLVATDAGSPPLSTEETLLLRVADLNDQPPLFSQQHYKASVSEAAAPGTVVMWVSASDADEAGSDHAWLRYTVVQLSAPCNLGSLQSKMVHTAECGPSFAIDSESGAISTIRTLDREVQEAVELKVVAQDLGEPPLSATCLVSITVDDVNDNEPIFWRQVYNATIAEHAPVGHCFLQLISAQVAFVKIKQKQKEIQEKQNLA

SEQ ID NO: 326208 - DNA, 2130 bp, Artificial Sequence
  derived and/or modified sequence
atgtcaccttgtggccggaagatgggcgaaggacggcagcagcgcagggcccctgtggggaagttgctgcttcttcctgggaggagagataccccccacggccgttcaggatcgtcaggcgctcgcacccagcgctccttgctgtggctgctggtgcacgtgtggctctgggcagccagcggtagctcagcccagttgtttaatctgacgctgtctgtggacgaagggcttcctcctgacacactggtcggggacatcagggccggcctgcccgctgcacaacagcaggagggaagtggcttcttcctgtctgaagacagtgacgactcacctttgctggacgacttccacgttcaccccgataccgggattatcagaactgcccgtagactggatcgcgagcgccgggatcactactctttcgtcgctgcaactctgctgggcgccgtggtacaggtggagatcagggtgaacgacgtcaatgatcattccccccgattcccgttagattctctccagcttgacgtctcggagctgtcccctccaggaactgcattccgactgccggtggcccacgatccagatgcaggcttgtttagcacacagggctacacgctcgttcagccgagtgacctacctaaggaccccgccggtccgttctttcagctgcggtatagaaccccaggaccccttccctctccacttctcccggggtcctcctcaccattagagccgttggatttggttttgctgcgccgcctagatcgggaggaagcggccgcccacagactgcagattgaggcctgggacggtggaagaccaaggagaaccggactgcttagcgtcgaacttagggtgctggatgagaatgataacccacccgtgttcgaacaggatgagtaccgggccgctgtgagagaggacgcccagccgggagctgaggtgtgcagggtccgagctactgaccgtgacctagggccaaacgggtttgtccgatattctgtcagagcccgccaggttcctggggctggctccggagggggggccctgggggatgcagcctacttcgctgttgaagaactgtccggagtggttagagtatggcgccctctggatagagaggctcaggcctggcatcagctcgtggtcgaagcgagggatggcggggctgagcctgaggtggctacagtgagggttagtatcgctgtgttagatgtgaatgacaacaggcctgcgattcacgtgcttttcctgaccgagggtggcgttgcgagagtgtccgaaggagccaggcctggtgattatgtcgcgcgagtctcagtttcagacgcagacggcgattgggagaaggaagatgaagccaccggagaactcggcgtgggcctcggggacggctcgatctcactttcactggagggaggggagggggactttgctttgttaccaggcgggccaccaggagtgttttttctgtgtgtcgaaggacctttggaccgagaatcccgagatctgtatgagcttctgctcgtggcaacagacgctggcagtcctccattgagcaccgaggaaaccttgttgctacgggtcgccgatctgaacgaccagccccccttgttttcacaacagcattataaggcaagcgtgtcagaggctgcggcccccggcaccgtagtcatgtgggtgtctgcctccgacgcagatgaggccggcagcgaccatgcatggctccggtatactgtggtgcagctgagcgctccatgtaatctaggttccctgcagtcaaagatggtccatactgcggagtgtggaccgtccttcgcaattgacagtgagagcggggcgatctccaccataaggaccttagatcgagaggttcaggaagctgtcgagctcaaagtggtggctcaggatctgggggagccacccttgtccgctacgtgtcttgtttccataaccgtggacgatgtgaacgataatgagcccatcttttggcggcaagtctataatgcgacaattgctgaacatgctcccgtaggccattgcttcctgcagctcatctctgctcaggtggcctttgtcaaaatcaagcagaaacagaaagagatacaagagaaacagaacctcgcatag

SEQ ID NO: 326209 - DNA, 2109 bp, Artificial Sequence
  derived and/or modified sequence
atgggggaagggagacagcagaggagggctcccgtaggcaagcttctcctgctgcccggaaggagagataccccccatggcaggagtggctcctccggtgctcgtacccagaggtccttactatggctgttagtacatgtttggctttgggctgcgtctggttcaagcgcccagctattcaacctgactcttagtgtcgacgaggggctcccgccagatacacttgtgggggacattcgcgccgggttgccagccgcccagcagcaggaagggtctgggttttttctctcagaagacagtgacgactccccactgctcgacgatttccacgtgcatccagatactggaatcatcaggacggcaaggcgcttggaccgggaaagacgcgaccattactcctttgtggcagccacactgctcggtgccgtggtgcaagtggaaataagagttaacgacgttaacgaccactctcccagatttccgctggacagtctacagcttgatgtctccgagttatccccccctgggaccgctttcaggctgccagtggcccatgaccccgacgcgggattgttcagcacccaggggtatacattggtgcaaccttctgatctgcctaaggaccccgccgggcccttttttcagctgaggtaccgcacacccgggccactgcccagcccgttactacctgggagttcttccccacttgaacctctggacctcgtgctgctcagacgcctagacagggaagaggctgctgcccatcgcctgcagatcgaggcctgggatgggggccggccccgacgcaccgggttgcttagcgttgaacttagggtgttagatgagaacgataaccctcctgtgtttgaacaggacgagtatagggccgcagttcgggaagacgcccagccaggggccgaggtttgccgcgtccgggcgacggaccgcgacttaggccctaatggcttcgtgaggtatagcgtcagggccaggcaggtcccaggagccgggtccggcgggggggctctgggcgatgccgcttactttgctgtcgaggagctgagcggggttgtgcgcgtctggcgccccttggatcgcgaagcccaggcctggcatcagctggtggtcgaggcccgcgatgggggggctgagccagaggtggcaaccgtgcgcgtcagcattgccgtgttggatgtgaatgacaacagaccagctattcacgtcctgtttctgacagagggaggcgtagctagggttagcgaaggtgcgcgccctggggattacgttgcccgtgtctcggtgagtgacgccgatggtgattgggagaaggaggacgaagctaccggcgaacttggggtggggctcggtgatggcagcatcagcctgtccctggagggcggagaaggagactttgccctcctgccgggcggcccccctggcgtcttctttctgtgtgtcgaagggcccttggacagagagtctagggatctgtacgagctgcttttggtggcaacagacgccggcagtccccccctaagtaccgaagagactctactacttagggtcgcggacctgaacgatcagccccccctgttctcacagcagcattataaagccagtgtttccgaagcagcagcccccggaaccgtggtaatgtgggtgtctgcttctgacgccgatgaagccggctccgaccacgcatggctgcgatacaccgtcgttcagctcagtgctccatgtaatctaggtagcctgcaatcaaaaatggtgcataccgcagaatgcgggccgtcgtttgccattgacagtgaatccggcgccatttctaccataaggacactggacagagaagtgcaagaggccgtcgaactcaaagtggttgcacaagacttgggtgaaccacccctttcggccacatgtctggtaagtataactgtcgatgatgtgaacgataatgagcccattttctggcggcaggtgtacaacgccacaattgccgaacacgccccagtggggcattgtttcctgcagctgatcagcgcacaggttgcatttgtgaagatcaaacagaaacagaaggaaatccaagaaaaacagaacctggcgtag

SEQ ID NO: 326210 - DNA, 2130 bp, Artificial Sequence
  derived and/or modified sequence
atgagcccctgtggcaggaagatgggagagggccggcagcagaggcgggcccctgtgggcaagctgctgctgctgcccggccggcgggacacccctcatggccgcagcggcagcagcggggcccggacccagaggagcctgctgtggctgctggtgcacgtgtggctgtgggccgccagcggcagcagcgcccagctgttcaacctgaccctgtctgtggatgagggcctgcccccagacaccctggtgggggacatccgggccggcctgcctgctgcccagcagcaggagggcagcggcttcttcctgtctgaagattctgatgacagccccctgctggatgacttccacgtgcacccagacaccggcatcatcagaacagcccggcggctggaccgggagcggcgggaccactacagctttgtggccgccaccctgctgggcgctgtggtgcaggtggagatccgggtgaatgatgtgaatgaccacagcccccgcttccccctggacagcctgcagctggatgtgtctgagctgagccccccaggcacagccttccggctgcctgtggcccatgaccctgatgctggcctcttcagcacccagggctacaccctggtgcagcccagcgacctgcccaaggaccctgctggccccttcttccagctgcgctaccgcaccccaggccccctgcccagccccctgctgcccggcagcagcagccccctggagcccctggacctggtgctgctgcggcggctggaccgggaggaggccgccgcccaccggctgcagatcgaggcctgggatggcggccggcccaggagaacaggcctgctgtctgtggagctgcgggtgctggatgaaaatgacaacccccctgtgtttgagcaggatgagtacagagctgctgtgagagaagatgcccagcctggagctgaggtgtgccgggtgcgggccacagaccgggacctgggccccaacggctttgtgcgctacagcgtgcgggcccggcaggtgcctggagctggcagcggcggcggggccctgggagatgctgcctactttgctgtggaggagctgagcggcgtggtgcgggtgtggaggcccctggaccgggaggcccaggcctggcaccagctggtggtggaggccagagatggaggagctgagcctgaggtggccaccgtgcgggtgtccattgctgtgctggatgtgaatgacaacagacctgccatccacgtgctcttcctgacagaaggaggagtggcccgggtgtctgagggcgcccggcctggggactatgtggcccgggtgtctgtgtctgatgctgatggagactgggagaaggaggatgaggccactggagagctgggcgtgggcctgggagatggcagcatcagcctgagcctggagggcggggagggggactttgccctgctgcccggcggccccccaggagtcttcttcctgtgtgtggagggccccctggaccgggagagccgggacctgtatgagctgctgctggtggccacagatgctggcagcccccccctgagcacagaggagaccctgctgctgcgggtggccgacctgaatgaccagcccccactcttcagccagcagcactacaaggcctctgtgtctgaggccgccgcccctggcaccgtggtgatgtgggtgtctgccagtgatgctgatgaagctggcagtgaccacgcctggctgcgctacacagtggtgcagctgagcgccccctgcaacctgggcagcctgcagagcaagatggtgcacacagcagaatgtggccccagctttgccatcgacagcgagagcggggccatcagcaccatccgcaccctggaccgggaggtgcaggaggccgtggagctgaaggtggtggcccaggacctgggggagccccccctgagcgccacctgcctggtgtccatcaccgtggatgatgtgaatgacaatgagcccatcttctggaggcaggtgtacaatgccaccatcgccgagcacgcccctgtgggccactgcttcctgcagctgatcagcgcccaggtggcctttgtgaagatcaagcagaagcagaaggagatccaggagaagcagaacctggcctag

SEQ ID NO: 326211 - DNA, 2109 bp, Artificial Sequence
  derived and/or modified sequence
atgggagagggccggcagcagaggcgggcccctgtgggcaagctgctgctgctgcctggaagaagagacaccccccacggccgcagcggcagcagcggggcccggacccagaggagcctgctgtggctgctggtgcacgtgtggctgtgggccgccagcggcagcagcgcccagctgttcaacctgaccctgtctgtggatgagggcctgcccccagacaccctggtgggggacatccgggccggcctgcctgctgcccagcagcaggagggcagcggcttcttcctgtctgaggacagtgatgacagccccctgctggatgacttccacgtgcacccagacaccggcatcatcagaacagcccggcggctggaccgggagcggcgggaccactacagctttgtggccgccaccctgctgggcgctgtggtgcaggtggagatccgggtgaatgatgtgaatgaccacagcccccgcttccccctggacagcctgcagctggatgtgtctgagctgagccccccaggcacagccttccggctgcctgtggcccatgaccctgatgctggcctcttcagcacccagggctacaccctggtgcagcccagcgacctgcccaaggaccctgctggccccttcttccagctgcgctaccgcaccccaggccccctgcccagccccctgctgcccggcagcagcagccccctggagcccctggacctggtgctgctgcggcggctggaccgggaggaggccgccgcccaccggctgcagatcgaggcctgggatggcggccggcccaggagaacaggcctgctgtctgtggagctgcgggtgctggatgaaaatgacaacccccctgtgtttgagcaggatgagtacagagctgctgtgcgggaggatgcccagcccggggctgaggtgtgccgggtgcgggccacagaccgggacctgggccccaatggatttgtgcgctacagcgtgcgggcccggcaggtgcctggggccggcagcggcggcggggccctgggagatgctgcctactttgctgtggaggagctgtctggagtggtgcgggtgtggaggcccctggaccgggaggcccaggcctggcaccagctggtggtggaggccagagatggcggcgctgagcctgaggtggccaccgtgcgggtgtccattgctgtgctggatgtgaatgacaacagacctgccatccacgtgctcttcctgacagagggcggcgtggcccgggtgtctgagggcgcccggcctggggactatgtggcccgggtgtctgtgtctgatgctgatggagactgggagaaggaggatgaggccaccggggagctgggcgtgggcctgggagatggcagcatcagcctgagcctggagggcggggagggggactttgccctgctgcccggcggccccccaggagtcttcttcctgtgtgtggagggccccctggaccgggagagccgggacctgtatgagctgctgctggtggccacagatgctggcagcccccccctgagcacagaggagaccctgctgctgcgggtggccgacctgaatgaccagcccccactcttcagccagcagcactacaaggcctctgtgtctgaggccgccgcccctggcaccgtggtgatgtgggtgtctgccagtgatgctgatgaggccggcagtgaccacgcctggctgcgctacacagtggtgcagctgagcgccccctgcaacctgggcagcctgcagagcaagatggtgcacacagcagaatgtggccccagctttgccattgattctgagagcggggccatcagcaccatccgcaccctggaccgggaggtgcaggaggccgtggagctgaaggtggtggcccaggacctgggggagccccccctgagcgccacctgcctggtgtccatcaccgtggatgatgtgaatgacaatgagcccatcttctggaggcaggtgtacaatgccaccatcgccgagcacgcccctgtgggccactgcttcctgcagctgatcagcgcccaggtggcctttgtgaagatcaagcagaagcagaaggagatccaggagaagcagaacctggcctag

SEQ ID NO: 326212 - DNA, 2130 bp, Artificial Sequence
  derived and/or modified sequence
atgagcccctgcggccggaagatgggcgagggccggcagcagcggagggcaccagtggggaagctgttgctgcttcccggacgtagagacacgcctcacgggaggtccggtagcagcggcgcaaggacgcaacgttcccttctctggctgctggtacacgtttggctgtgggcagcttccggctccagcgcccagcttttcaaccttaccctgagtgtggacgaaggactgcccccagacacacttgtgggggacataagggcaggattgcccgcagcccagcagcaggaaggctccggcttcttcttgtccgaggatagcgatgattcccctctactggatgacttccacgtacacccagacacaggaatcattagaacggcccggagactcgaccgcgagcggagggaccattactcctttgtggctgcgaccttgctcggcgccgtggtgcaagtggaaatacgggtgaacgatgtcaatgaccattcaccccgcttccctcttgattcgctccagctggatgtctccgaacttagccccccaggaacagcatttcgcttgccagttgcgcacgacccggatgcgggcttgttctcgacccaggggtacacattggtgcagcccagtgatctgcccaaggatcctgccgggccattttttcagcttcgctaccgtaccccgggcccccttccttctccgctgctgcccgggtcgtcatcccctctggagcctctggatctagtcctgctgaggcgcctggatcgggaggaggcagctgcccaccgactgcaaatcgaggcttgggatggaggccggcctaggcggacaggtcttctgagtgttgaactccgtgtcctggatgagaacgacaatcctcctgtgtttgaacaggacgaataccgcgctgctgtgcgggaggatgctcagcccggtgcggaggtgtgtagggtgagggcaacagatagagacctgggccccaatggtttcgttcggtactctgtacgagcccgacaggtgcccggagccgggagtgggggcggggcactgggagacgcagcgtatttcgccgttgaggaactgagcggtgtggtccgagtttggaggcctctggaccgcgaggctcaggcatggcaccagttggtagtagaagcgcgggacggcggcgccgagccagaagtggctactgtgagggtgtcgattgccgtcttagacgtgaatgacaaccgacctgctattcatgtgctgtttctcacagagggaggggtggcccgggtctcagagggtgcccgcccaggggattacgtggctagggtctcagtttcagatgcagatggcgactgggaaaaagaggatgaggccacgggggaactcggagtgggcttgggcgacggatccattagtctcagtctcgagggaggggagggggactttgctctcctccccgggggcccccctggggtgttcttcctttgtgtcgaggggcccctggatagggaatcacgggatctgtacgagttattgttggttgccactgatgctggaagtccaccactgagtacagaggagactctgctgctacgagtggccgacctgaatgatcagccacctctgttcagtcagcagcactacaaagcaagcgtgtccgaagctgccgccccagggaccgttgtgatgtgggtcagtgcgtccgacgctgacgaagccggaagtgaccatgcctggctgcgttacaccgtcgtgcagctgtctgctccgtgtaatctcggtagcctccagagcaagatggtgcacaccgcagagtgcggacccagcttcgctattgacagtgaatcaggagcgatttctaccattcggacgctggacagggaggtccaggaagcggtggaattaaaggtggtggctcaggacctgggagaacctcccttgagtgctacttgcctcgtcagcatcactgtagacgatgtcaatgataatgaacccatcttttggaggcaggtgtataatgccaccattgctgaacacgcacccgtcggccattgtttcttgcagctgatttccgcccaggtagcatttgtgaagattaagcagaagcagaaggaaattcaggagaagcaaaatctggcatag

SEQ ID NO: 326213 - DNA, 2109 bp, Artificial Sequence
  derived and/or modified sequence
atgggcgagggccggcagcagcggcgggcccccgtgggcaagctgcttctgctccccggcaggcgcgataccccacacggacggtctgggagcagcggggcccggacccagaggtcactcctgtggctcctcgtgcatgtgtggctttgggccgcctctgggtccagtgctcagctctttaacctcacattaagtgtggatgagggacttcctcccgacacattggtgggcgacatcagggcaggacttcctgcagctcaacagcaggaggggagtggattctttctttctgaggactcagacgatagcccgttactggatgattttcacgtgcatccagacacaggaatcattagaaccgccagaaggctggaccgtgagcgcagagatcattattcatttgtagcggccaccctcctgggagccgtggtacaagtggagatcagagttaacgacgtcaatgaccactcacctcgctttcccctggacagcctgcagctcgacgttagcgagctgtcccccccaggcaccgctttcagacttcccgtagctcacgatccggatgccggcctgttcagcacccaaggttacactttggttcagcctagtgatctgccaaaagaccccgccgggcctttttttcagttgcgctataggactcccggccccctgccgagtcctctgctccctggctccagcagtcccctggagcccctcgacctcgtgttgttgcgtcgactcgatcgggaggaagctgccgcacacaggctccagatcgaagcctgggatggcgggagacccagacggacgggtcttctgagtgtggagctgcgagtgcttgacgaaaacgataacccacctgtatttgaacaggatgaatacagagcggccgtccgtgaggatgctcaacctggcgcggaggtctgccgcgtccgggccactgatcgggatctcggcccaaatgggtttgtgagatattcagtcagggcccggcaagtcccgggagccgggtcgggaggtggtgccctgggagatgccgcgtacttcgccgtcgaggagctgtcaggggtagtgcgcgtgtggagaccactggaccgagaggcccaggcctggcaccagctcgtcgtcgaggccagagacggcggagctgagcctgaagttgcaaccgttagggtctcaattgcagtccttgatgtgaacgataacagaccggccatacatgtactgttccttaccgagggtggcgtggccagagtaagtgaaggcgcccgccctggagactatgtggccagagtgtcagtgagcgacgctgacggcgattgggagaaagaggatgaagctactggcgagctgggcgtcggactaggcgatggcagtatttctctgtccctggagggcggcgagggggactttgccctcctgcctgggggccctcccggagtgtttttcctctgcgtcgagggccctttggatcgtgaatccagggacttatatgaattgttgttggtcgccacagatgcaggatcaccccccctaagcaccgaggaaacgctgctgttacgtgtcgccgatttaaatgatcaacctcctctgtttagccagcaacattacaaagcctccgtttcagaagcagccgcaccggggaccgtggttatgtgggtcagtgcctcagacgccgatgaagcagggtctgatcatgcctggctgcgctataccgttgtgcagctgagtgccccctgtaacctcggatccttgcagtctaaaatggtgcacactgcagagtgtggcccttcctttgccatcgacagtgagagtggagccataagtaccattaggaccctggaccgagaggtgcaggaagcagtcgaattgaaagttgtcgcccaggacctgggtgagccaccactctcggccacctgcctcgtgtcaatcacagtggacgatgtcaatgacaacgagccgatcttctggcgccaagtctataacgcaaccattgctgagcacgctcctgttggccactgcttcctgcagctgattagtgcccaggtggcgtttgttaaaattaaacagaaacagaaggagatccaggaaaaacagaacttggcatag

SEQ ID NO: 326214 - DNA, 2130 bp, Artificial Sequence
  derived and/or modified sequence
atgagcccttgtggacgaaaaatgggcgaaggccgtcagcagagacgcgcacctgtcggtaaattactgctgctccctgggagaagggacacaccacatggtcggtctggttccagcggcgcacgaacacagcggtcccttctatggctgctggtccacgtttggctctgggctgcatctgggagctccgcccaattatttaatctgaccctcagtgtcgacgagggactgccacccgacacgctcgtgggagacattagggctggcctgcctgctgcacagcagcaggaaggctccggcttttttctaagcgaagacagcgacgacagtccacttctggatgattttcacgttcatcctgacactggtattatcagaactgcccgacgcttagacagagagagacgggatcactatagtttcgttgctgctacgttgttgggcgctgtggtacaggtagagatccgggtcaacgacgttaatgaccacagtcctcgttttccacttgatagtcttcagctggatgtgtcagaactgtctccgcctgggacagcatttagactgccggtggcacacgaccccgatgccggactgttcagcacgcagggctacaccctggtgcaaccgtccgacctgccgaaggacccagccggacctttctttcagctgaggtaccgtacaccaggaccactgccatccccactgttgccagggagcagctctcccttagagcctctggatttggtcctcttgcgcagactcgatcgcgaggaggccgctgcccaccgtctgcagatcgaggcttgggatggaggccgtcctaggcgaaccggccttctgtcagtggagctgcgagttctggacgaaaatgacaacccccctgtgttcgagcaggacgaatacagagctgccgtacgggaggatgcccagcctggcgcagaagtgtgccgcgtcagggctacagatagagatctgggtcccaacggattcgtcagatatagcgtaagagccaggcaggtgccaggcgctgggtccggcggaggcgctctgggcgatgcagcctacttcgctgttgaggagctgagcggggtggtgagggtttggagaccgctggatagggaagcccaggcctggcatcagctggtggtggaggctcgggatggcggagccgaaccagaggttgccacggtgcgggtttccatcgcggtgctcgacgtgaacgataatcggccagctattcacgtgctgttcctgaccgagggtggcgtggcacgggttagcgagggagctagaccaggtgactatgtagccagggtttctgtttcagatgctgacggcgactgggagaaggaagatgaggccactggagaattgggggtaggcctcggtgatggctcaattagcctgagcctggaaggtggagagggggatttcgcgctgctccccggaggccctccaggggtgttcttcctgtgcgtcgaaggccctctcgatagggagtccagggatctttatgagcttctcctggtggccacagacgcagggagtcctcccctgagtactgaggagactctgttgctgagagtcgcagacctaaatgaccagccaccacttttctcacagcagcattacaaggcttcggtgagtgaggccgcagccccaggcactgtggtcatgtgggtctctgctagcgatgcagacgaagccggaagcgatcacgcctggcttcgctatacagtcgtgcagctttcagctccctgtaatctcggttcactgcaaagcaagatggtacacacagcagagtgtggaccatcatttgccattgactctgagtctggtgccattagcacaattaggaccttagacagggaagtgcaggaggccgtggagctcaaggtggtggcccaggacttgggggaacctcccctctcagccacatgcttagtttcgattacagtggacgatgtaaacgataacgaacctatattctggaggcaggtttacaatgcaactatcgccgaacatgctccagtgggccactgtttcctgcagctgatttctgcccaagtagccttcgttaaaatcaagcagaaacagaaagagatccaggaaaagcaaaaccttgcctag

SEQ ID NO: 326215 - DNA, 2109 bp, Artificial Sequence
  derived and/or modified sequence
atgggggaaggcaggcagcaaaggcgggctcccgtcgggaaattactcctgctgcccggaaggcgtgacacgcctcacggcaggtcgggcagcagtggggctagaactcagcgttctttgctgtggctacttgtacatgtctggctctgggccgcttctggatcctccgctcaactgttcaatctgactctgagtgtcgacgaaggcttgcctcctgatactttggtgggggatatcagagcgggtctgccagccgctcagcagcaggaaggctccgggttctttctttcagaagattctgacgacagtccacttctggacgacttccacgtgcaccccgacactgggattattcgcactgccaggcggttggaccgagaaagaagagaccattactcattcgtcgccgctactctcctcggggctgtcgtgcaggtagagatccgtgtcaatgatgtaaacgaccattcaccccgttttcctcttgactccttacagttagatgtgtctgagttgagccctcctggaactgcctttcgcctgcccgttgcccacgatccggacgcaggcctcttctcaactcaaggttatacactagtgcagccctccgacctgccaaaagatccagctggtccttttttccagcttcgctaccggactcccggtcctctcccctctcctttattaccgggaagcagttcacctctggagccgctggacctggtattgttgaggcgtctcgatcgcgaagaggctgccgctcatcggctgcaaatagaagcctgggatggcggaagaccccgtagaacgggactgctgagtgtggaactgagggtgttggacgagaacgataatccaccagtctttgagcaggacgaatatcgcgctgccgtgcgcgaagacgcacagcctggtgcggaagtctgtagagttcgcgctaccgatagggatctcggccctaatggcttcgttcgctactcagtgcgcgcaagacaggtgcccggagccggatctggcggtggggctctaggtgatgcagcctattttgccgtggaagaactcagcggagtcgtgagggtctggcgcccactcgatcgggaagcgcaggcctggcatcaactcgtggtagaagcacgggatgggggtgctgagccagaagtggctactgtgagagtgagtattgctgttcttgatgtcaatgacaaccggcctgccattcacgtgctctttcttacagagggtggggtcgcgagggtgtccgaaggcgctcgcccaggcgattacgtggcacgggtgagtgtgtccgacgcagacggagattgggagaaagaggacgaggctaccggggaactaggagtgggcctcggtgacgggtcaatctcactttccctggagggcggagagggggattttgccctactgccaggtgggcctcccggagtgttttttctttgcgttgagggtccactggaccgtgagtcccgagatctatacgaactgctgctggtagcaactgacgctggaagcccccctctgtccaccgaagagaccctgctcctgcgcgtggctgacctcaacgaccagccaccattgtttagtcagcagcactacaaagcctccgtttccgaggccgcagctcccggaaccgtggtgatgtgggtgagtgccagtgacgctgatgaggctggttctgaccatgcctggctgagatataccgtggtccagctctccgccccttgtaatcttgggagcttgcagagcaaaatggttcatacagccgaatgtggaccatcatttgctattgatagcgaaagtggcgctatcagcacgattcgaacccttgatagagaggtgcaggaagccgtggagctcaaggtggtggcacaggatctaggagagccacctcttagtgccacatgtctggtcagcatcaccgtggatgacgttaatgataacgagcctatcttttggcgccaggtgtataatgctaccatcgcagaacatgccccagtgggtcactgcttcctccagctcatatctgcccaggtcgcttttgtcaaaattaagcagaagcagaaggagattcaggaaaagcagaatctggcctag

SEQ ID NO: 326216 - DNA, 2553 bp, Artificial Sequence
  derived and/or modified sequence
agatccccatcctctccttgtgtgtgcgcgcttcatataatctcctcctttttggcaaaagaaataatgcacctgactttaccaggggggaacaaccagccgagtagaacaaggaacagatgtaaagggaataaaaggagagagaaaaagagatgagattcgtttaaagaaatccaggggcagaagaggtggctgccgcggcagaggcagctagagcttacttccctgtctgcgtgagctgcaggcagaggacgctttcaccagttgcagatgtaacctcgggaattcctgggccgtcggtttgtttgccaaacaaagtcttttcttctctggctcagacactgaagaggctcctggatttttctgcgatcctgccacaagctggcagttacccgagagccttcccaaggagctggaggagaaatgagcccttgtgggcggaagatgggcgaagggcgtcagcagcggcgggctccggtcgggaagctccttctgctccccgggaggagagatacaccccatgggcggtcaggcagcagcggcgccaggacgcagcgctccctgctctggctcttggtgcacgtgtggctgtgggcggcctcgggctcctctgcccagttgttcaacctcaccctttccgtagatgaggggcttcccccggacacgctggtaggtgacatccgcgccgggctgccggccgcgcagcagcaggaggggagcggcttctttctgtcggaggactccgatgactccccgctgctggacgacttccacgtgcacccggacaccggcatcatccgcactgcgcggcgcctggaccgcgagcggcgggaccactacagcttcgtcgccgccacgctgctgggcgctgtggtgcaggtggagattcgcgtcaacgacgtgaatgaccactcgccccgctttcccctcgactccctgcaactcgacgtctccgagctcagcccgccagggaccgccttccgcctgccagttgcccacgatccggacgccggactgttcagcactcagggctacaccctggtgcaaccgtccgacctgcccaaggaccccgcaggcccgttcttccagttgcgctaccggactccggggccactaccgtcaccgcttttgccaggctcctcgtcacccctggagcctctagatctggtgctgctgcggcgcttggaccgagaggaggcggcggcgcaccggctgcagatcgaggcatgggacggcggccgaccccggcgcaccggcctcctgagcgtggagctgcgcgtgctggatgagaacgacaacccgccggtctttgagcaggacgagtaccgcgccgcggtgcgcgaggacgcccagccgggcgccgaggtctgtcgcgtgcgcgccaccgaccgcgacctggggcccaatggcttcgtgcgctacagcgtccgcgcccggcaagtgcctggggcgggtagcggcggcggggcactgggcgacgcggcctacttcgcggtggaggagctgagcggcgtggtgcgagtgtggagacctctggaccgcgaggcacaggcctggcaccagttggtggtggaggcccgcgatggaggcgccgagcctgaggttgccacggtgcgcgtgtccatcgccgtgctggacgtgaatgacaaccggccagcaattcacgtgctctttctcacagagggaggcgtcgcccgtgtctctgaaggcgcccgaccgggcgactacgtggctcgcgtctcggtgtctgacgcggacggtgactgggagaaggaagatgaggccacaggggagcttggtgtgggtcttggagacgggagcatctctctgtccttggaaggcggagagggagacttcgcgttgctacccggcggccccccaggggtatttttcctttgcgtggaggggcccctggacagagagagccgcgatctgtatgagttactactggtggccacggacgcggggtccccgccgctgagcacggaggagacgctgctactccgggtcgctgacctcaatgaccaaccacctctcttcagccaacagcattacaaggcctcagtgtccgaggccgcggcccctggcactgtagtcatgtgggtcagcgcctccgatgccgacgaggcaggcagtgatcacgcctggctgcgctacactgtagtccaactctcggctccctgcaatctcggctccctgcaatcaaagatggtccacaccgcagagtgtggaccatcttttgccattgattccgaaagcggtgcgatcagcactatccggactctagaccgagaggtccaggaggcggtggagctgaaagtggtggcccaggacctcggagagcccccactctctgccacctgcctggtgagcatcaccgtagatgatgtgaatgacaatgagcccatcttctggaggcaggtgtacaatgccaccattgcagagcatgccccggttggacactgctttctgcagcttatatctgctcaagttgcctttgtcaaaatcaaacaaaaacaaaaggaaatacaggaaaaacaaaatcttgcctag

SEQ ID NO: 326217 - DNA, 2109 bp, Artificial Sequence
  derived and/or modified sequence
atgggcgaagggcgtcagcagcggcgggctccggtcgggaagctccttctgctccccgggaggagagatacaccccatgggcggtcaggcagcagcggcgccaggacgcagcgctccctgctctggctcttggtgcacgtgtggctgtgggcggcctcgggctcctctgcccagttgttcaacctcaccctttccgtagatgaggggcttcccccggacacgctggtaggtgacatccgcgccgggctgccggccgcgcagcagcaggaggggagcggcttctttctgtcggaggactccgatgactccccgctgctggacgacttccacgtgcacccggacaccggcatcatccgcactgcgcggcgcctggaccgcgagcggcgggaccactacagcttcgtcgccgccacgctgctgggcgctgtggtgcaggtggagattcgcgtcaacgacgtgaatgaccactcgccccgctttcccctcgactccctgcaactcgacgtctccgagctcagcccgccagggaccgccttccgcctgccagttgcccacgatccggacgccggactgttcagcactcagggctacaccctggtgcaaccgtccgacctgcccaaggaccccgcaggcccgttcttccagttgcgctaccggactccggggccactaccgtcaccgcttttgccaggctcctcgtcacccctggagcctctagatctggtgctgctgcggcgcttggaccgagaggaggcggcggcgcaccggctgcagatcgaggcatgggacggcggccgaccccggcgcaccggcctcctgagcgtggagctgcgcgtgctggatgagaacgacaacccgccggtctttgagcaggacgagtaccgcgccgcggtgcgcgaggacgcccagccgggcgccgaggtctgtcgcgtgcgcgccaccgaccgcgacctggggcccaatggcttcgtgcgctacagcgtccgcgcccggcaagtgcctggggcgggtagcggcggcggggcactgggcgacgcggcctacttcgcggtggaggagctgagcggcgtggtgcgagtgtggagacctctggaccgcgaggcacaggcctggcaccagttggtggtggaggcccgcgatggaggcgccgagcctgaggttgccacggtgcgcgtgtccatcgccgtgctggacgtgaatgacaaccggccagcaattcacgtgctctttctcacagagggaggcgtcgcccgtgtctctgaaggcgcccgaccgggcgactacgtggctcgcgtctcggtgtctgacgcggacggtgactgggagaaggaagatgaggccacaggggagcttggtgtgggtcttggagacgggagcatctctctgtccttggaaggcggagagggagacttcgcgttgctacccggcggccccccaggggtatttttcctttgcgtggaggggcccctggacagagagagccgcgatctgtatgagttactactggtggccacggacgcggggtccccgccgctgagcacggaggagacgctgctactccgggtcgctgacctcaatgaccaaccacctctcttcagccaacagcattacaaggcctcagtgtccgaggccgcggcccctggcactgtagtcatgtgggtcagcgcctccgatgccgacgaggcaggcagtgatcacgcctggctgcgctacactgtagtccaactctcggctccctgcaatctcggctccctgcaatcaaagatggtccacaccgcagagtgtggaccatcttttgccattgattccgaaagcggtgcgatcagcactatccggactctagaccgagaggtccaggaggcggtggagctgaaagtggtggcccaggacctcggagagcccccactctctgccacctgcctggtgagcatcaccgtagatgatgtgaatgacaatgagcccatcttctggaggcaggtgtacaatgccaccattgcagagcatgccccggttggacactgctttctgcagcttatatctgctcaagttgcctttgtcaaaatcaaacaaaaacaaaaggaaatacaggaaaaacaaaatcttgcctag

SEQ ID NO: 326218 - DNA, 2130 bp, Artificial Sequence
  derived and/or modified sequence
atgagcccctgcggcagaaagatgggcgagggcagacagcagagaagagcccccgtgggcaagctgctgctgctgcccggcagaagagacaccccccacggcagaagcggcagcagcggcgccagaacccagagaagcctgctgtggctgctggtgcacgtgtggctgtgggccgccagcggcagcagcgcccagctgttcaacctgaccctgagcgtggacgagggcctgccccccgacaccctggtgggcgacatcagagccggcctgcccgccgcccagcagcaggagggcagcggcttcttcctgagcgaggacagcgacgacagccccctgctggacgacttccacgtgcaccccgacaccggcatcatcagaaccgccagaagactggacagagagagaagagaccactacagcttcgtggccgccaccctgctgggcgccgtggtgcaggtggagatcagagtgaacgacgtgaacgaccacagccccagattccccctggacagcctgcagctggacgtgagcgagctgagcccccccggcaccgccttcagactgcccgtggcccacgaccccgacgccggcctgttcagcacccagggctacaccctggtgcagcccagcgacctgcccaaggaccccgccggccccttcttccagctgagatacagaacccccggccccctgcccagccccctgctgcccggcagcagcagccccctggagcccctggacctggtgctgctgagaagactggacagagaggaggccgccgcccacagactgcagatcgaggcctgggacggcggcagacccagaagaaccggcctgctgagcgtggagctgagagtgctggacgagaacgacaacccccccgtgttcgagcaggacgagtacagagccgccgtgagagaggacgcccagcccggcgccgaggtgtgcagagtgagagccaccgacagagacctgggccccaacggcttcgtgagatacagcgtgagagccagacaggtgcccggcgccggcagcggcggcggcgccctgggcgacgccgcctacttcgccgtggaggagctgagcggcgtggtgagagtgtggagacccctggacagagaggcccaggcctggcaccagctggtggtggaggccagagacggcggcgccgagcccgaggtggccaccgtgagagtgagcatcgccgtgctggacgtgaacgacaacagacccgccatccacgtgctgttcctgaccgagggcggcgtggccagagtgagcgagggcgccagacccggcgactacgtggccagagtgagcgtgagcgacgccgacggcgactgggagaaggaggacgaggccaccggcgagctgggcgtgggcctgggcgacggcagcatcagcctgagcctggagggcggcgagggcgacttcgccctgctgcccggcggcccccccggcgtgttcttcctgtgcgtggagggccccctggacagagagagcagagacctgtacgagctgctgctggtggccaccgacgccggcagcccccccctgagcaccgaggagaccctgctgctgagagtggccgacctgaacgaccagccccccctgttcagccagcagcactacaaggccagcgtgagcgaggccgccgcccccggcaccgtggtgatgtgggtgagcgccagcgacgccgacgaggccggcagcgaccacgcctggctgagatacaccgtggtgcagctgagcgccccctgcaacctgggcagcctgcagagcaagatggtgcacaccgccgagtgcggccccagcttcgccatcgacagcgagagcggcgccatcagcaccatcagaaccctggacagagaggtgcaggaggccgtggagctgaaggtggtggcccaggacctgggcgagccccccctgagcgccacctgcctggtgagcatcaccgtggacgacgtgaacgacaacgagcccatcttctggagacaggtgtacaacgccaccatcgccgagcacgcccccgtgggccactgcttcctgcagctgatcagcgcccaggtggccttcgtgaagatcaagcagaagcagaaggagatccaggagaagcagaacctggcctag

SEQ ID NO: 326219 - DNA, 2109 bp, Artificial Sequence
  derived and/or modified sequence
atgggcgagggcagacagcagagaagagcccccgtgggcaagctgctgctgctgcccggcagaagagacaccccccacggcagaagcggcagcagcggcgccagaacccagagaagcctgctgtggctgctggtgcacgtgtggctgtgggccgccagcggcagcagcgcccagctgttcaacctgaccctgagcgtggacgagggcctgccccccgacaccctggtgggcgacatcagagccggcctgcccgccgcccagcagcaggagggcagcggcttcttcctgagcgaggacagcgacgacagccccctgctggacgacttccacgtgcaccccgacaccggcatcatcagaaccgccagaagactggacagagagagaagagaccactacagcttcgtggccgccaccctgctgggcgccgtggtgcaggtggagatcagagtgaacgacgtgaacgaccacagccccagattccccctggacagcctgcagctggacgtgagcgagctgagcccccccggcaccgccttcagactgcccgtggcccacgaccccgacgccggcctgttcagcacccagggctacaccctggtgcagcccagcgacctgcccaaggaccccgccggccccttcttccagctgagatacagaacccccggccccctgcccagccccctgctgcccggcagcagcagccccctggagcccctggacctggtgctgctgagaagactggacagagaggaggccgccgcccacagactgcagatcgaggcctgggacggcggcagacccagaagaaccggcctgctgagcgtggagctgagagtgctggacgagaacgacaacccccccgtgttcgagcaggacgagtacagagccgccgtgagagaggacgcccagcccggcgccgaggtgtgcagagtgagagccaccgacagagacctgggccccaacggcttcgtgagatacagcgtgagagccagacaggtgcccggcgccggcagcggcggcggcgccctgggcgacgccgcctacttcgccgtggaggagctgagcggcgtggtgagagtgtggagacccctggacagagaggcccaggcctggcaccagctggtggtggaggccagagacggcggcgccgagcccgaggtggccaccgtgagagtgagcatcgccgtgctggacgtgaacgacaacagacccgccatccacgtgctgttcctgaccgagggcggcgtggccagagtgagcgagggcgccagacccggcgactacgtggccagagtgagcgtgagcgacgccgacggcgactgggagaaggaggacgaggccaccggcgagctgggcgtgggcctgggcgacggcagcatcagcctgagcctggagggcggcgagggcgacttcgccctgctgcccggcggcccccccggcgtgttcttcctgtgcgtggagggccccctggacagagagagcagagacctgtacgagctgctgctggtggccaccgacgccggcagcccccccctgagcaccgaggagaccctgctgctgagagtggccgacctgaacgaccagccccccctgttcagccagcagcactacaaggccagcgtgagcgaggccgccgcccccggcaccgtggtgatgtgggtgagcgccagcgacgccgacgaggccggcagcgaccacgcctggctgagatacaccgtggtgcagctgagcgccccctgcaacctgggcagcctgcagagcaagatggtgcacaccgccgagtgcggccccagcttcgccatcgacagcgagagcggcgccatcagcaccatcagaaccctggacagagaggtgcaggaggccgtggagctgaaggtggtggcccaggacctgggcgagccccccctgagcgccacctgcctggtgagcatcaccgtggacgacgtgaacgacaacgagcccatcttctggagacaggtgtacaacgccaccatcgccgagcacgcccccgtgggccactgcttcctgcagctgatcagcgcccaggtggccttcgtgaagatcaagcagaagcagaaggagatccaggagaagcagaacctggcctag

SEQ ID NO: 326220 - protein, 138 aa, Artificial Sequence
  derived and/or modified sequence
DVLSKEATKRKINLNISYEINEVSVKHTLKLIHPKLEYQLLLAKKVQLIDALKELQIHEGNTNFLIPEYHCILEEADHLQEEYKKQPAHLERLYGMITDLFIDKFKFKGTNVKTKVPLLLEILDSYDQNALISFFDAA

SEQ ID NO: 326221 - DNA, 417 bp, Artificial Sequence
  derived and/or modified sequence
gacgtgctgtcaaaggaggccacaaaaaggaagattaacctgaacatctcctacgaaatcaatgaggtctcagtcaagcacaccttgaagctcattcatccaaagcttgaataccaactgctgctggccaagaaggtacagttgatcgacgctctcaaggaactgcagatccacgaaggcaacactaatttcctgattcccgagtaccattgtattctggaggaggctgatcatttgcaagaagaatacaagaagcagcctgcccatcttgagaggctctacggcatgatcactgatctctttatcgacaagtttaagtttaaggggactaacgtgaaaacaaaagtgcctctgctgctcgagatcctcgattcctatgatcagaatgcactgatatccttcttcgatgcagcttag

SEQ ID NO: 326222 - DNA, 417 bp, Artificial Sequence
  derived and/or modified sequence
gatgtgctgagcaaggaggccaccaagaggaagatcaacctgaacatctcctatgagatcaatgaggtgtctgtgaagcacaccctgaagctgatccaccccaagctggagtaccagctgctgctggccaagaaggtgcagctgattgatgccctgaaggagctgcagatccacgagggcaacaccaacttcctgatccctgagtaccactgcatcctggaggaggccgaccacctgcaggaggagtacaagaagcagcctgcccacctggagcggctgtatggcatgatcacagacctcttcatcgacaagttcaagttcaagggcaccaacgtgaagaccaaggtgcccctgctgctggagatcctggacagctatgaccagaatgccctgatctccttctttgatgctgcctag

SEQ ID NO: 326223 - DNA, 417 bp, Artificial Sequence
  derived and/or modified sequence
gacgtgctgagcaaggaggccaccaagcggaagatcaacctgaacatcagctatgaaattaacgaagtgtcagttaagcatactctgaagctgattcaccccaaactggaatatcagctgctgcttgctaagaaggtgcagctgattgacgccctcaaagagctgcagatacatgaaggcaacaccaattttctgatccccgagtatcactgcatactcgaagaggctgatcacctgcaagaggagtataaaaaacagcctgcccacttggaaaggctttacggcatgataactgatctgttcatcgacaaatttaagttcaagggcactaatgtgaagacaaaagtgcctctgctactcgaaatcctggacagctacgaccagaacgctctaatctccttcttcgacgctgcatag

SEQ ID NO: 326224 - DNA, 417 bp, Artificial Sequence
  derived and/or modified sequence
gacgtactgtcaaaggaagctacaaaacggaagattaaccttaatatctcttatgagattaacgaggtgtctgtgaagcataccctgaagctcatccaccctaagctggaataccaactgctgttggctaaaaaagtgcagctgattgatgcactgaaggaactgcagatacatgaggggaatactaatttcttaattccagaatatcattgtattctggaggaggccgaccatttacaggaggagtataaaaaacagcctgcccacttggagaggctgtacggcatgattaccgaccttttcatcgacaaattcaaattcaagggtacgaatgtcaaaactaaggtacccctgcttctggagattctggattcatatgaccagaacgcgctgatcagcttttttgacgctgcctag

SEQ ID NO: 326225 - DNA, 734 bp, Artificial Sequence
  derived and/or modified sequence
gatgtgctttctaaagaagctacaaaaaggaaaattaacctcaacatatcatacgagataaatgaagtatcagtcaaacacactttaaagctaatccacccaaagctggagtaccagttgcttttggctaagaaagtgcagttaattgatgctttaaaagaattacagattcatgagggaaatacgaactttctgataccagaatatcactgtattctagaagaggcagatcacctacaggaagaatacaaaaagcaacctgcacatcttgaaagactctatggcatgatcactgatcttttcatagataaatttaagtttaaaggcaccaatgtaaaaactaaagtaccccttctattggaaattctggacagttatgaccaaaatgcattgatttcattcttcgatgcagcatgacatacaaataagtgttttatgactctgctgcagtttgtggaaatgctggacttggctcagtgctataaattgtagccaggaaataagaagagcttacacagagtcgggggatcttaattagacatgctgtaaccagtggagctattcagcgtgcttcaagtgaagagtgcagaaatagtgatgccatcttagattttcctacactagtatcttctagatctctttttatcatatatgacattaaggctacagaagttttgtgcattaatcttaattcatatttattaatttcaagggaatattgaaaggttttaaaa

SEQ ID NO: 326226 - DNA, 417 bp, Artificial Sequence
  derived and/or modified sequence
gacgtgctgagcaaggaggccaccaagagaaagatcaacctgaacatcagctacgagatcaacgaggtgagcgtgaagcacaccctgaagctgatccaccccaagctggagtaccagctgctgctggccaagaaggtgcagctgatcgacgccctgaaggagctgcagatccacgagggcaacaccaacttcctgatccccgagtaccactgcatcctggaggaggccgaccacctgcaggaggagtacaagaagcagcccgcccacctggagagactgtacggcatgatcaccgacctgttcatcgacaagttcaagttcaagggcaccaacgtgaagaccaaggtgcccctgctgctggagatcctggacagctacgaccagaacgccctgatcagcttcttcgacgccgcctag

SEQ ID NO: 326227 - protein, 707 aa, Artificial Sequence
  derived and/or modified sequence
MNQELLSVGSKRRRTGGSLRGNPSSSQVDEEQMNRVVEEEQQQQLRQQEEEHTARNGEVVGVEPRPGGQNDSQQGQLEENNNRFISVDEDSSGNQEEQEEDEEHAGEQDEEDEEEEEMDQESDDFDQSDDSSREDEHTHTNSVTNSSSIVDLPVHQLSSPFYTKTTKMKRKLDHGSEVRSFSLGKKPCKVSEYTSTTGLVPCSATPTTFGDLRAANGQGQQRRRITSVQPPTGLQEWLKMFQSWSGPEKLLALDELIDSCEPTQVKHMMQVIEPQFQRDFISLLPKELALYVLSFLEPKDLLQAAQTCRYWRILAEDNLLWREKCKEEGIDEPLHIKRRKVIKPGFIHSPWKSAYIRQHRIDTNWRRGELKSPKVLKGHDDHVITCLQFCGNRIVSGSDDNTLKVWSAVTGKCLRTLVGHTGGVWSSQMRDNIIISGSTDRTLKVWNAETGECIHTLYGHTSTVRCMHLHEKRVVSGSRDATLRVWDIETGQCLHVLMGHVAAVRCVQYDGRRVVSGAYDFMVKVWDPETETCLHTLQGHTNRVYSLQFDGIHVVSGSLDTSIRVWDVETGNCIHTLTGHQSLTSGMELKDNILVSGNADSTVKIWDIKTGQCLQTLQGPNKHQSAVTCLQFNKNFVITSSDDGTVKLWDLKTGEFIRNLVTLESGGSGGVVWRIRASNTKLVCAVGSRNGTEETKLLVLDFDVDMK

SEQ ID NO: 326228 - protein, 531 aa, Artificial Sequence
  derived and/or modified sequence
MLFFKCISLLLIWLIPGQSTTGLVPCSATPTTFGDLRAANGQGQQRRRITSVQPPTGLQEWLKMFQSWSGPEKLLALDELIDSCEPTQVKHMMQVIEPQFQRDFISLLPKELALYVLSFLEPKDLLQAAQTCRYWRILAEDNLLWREKCKEEGIDEPLHIKRRKVIKPGFIHSPWKSAYIRQHRIDTNWRRGELKSPKVLKGHDDHVITCLQFCGNRIVSGSDDNTLKVWSAVTGKCLRTLVGHTGGVWSSQMRDNIIISGSTDRTLKVWNAETGECIHTLYGHTSTVRCMHLHEKRVVSGSRDATLRVWDIETGQCLHVLMGHVAAVRCVQYDGRRVVSGAYDFMVKVWDPETETCLHTLQGHTNRVYSLQFDGIHVVSGSLDTSIRVWDVETGNCIHTLTGHQSLTSGMELKDNILVSGNADSTVKIWDIKTGQCLQTLQGPNKHQSAVTCLQFNKNFVITSSDDGTVKLWDLKTGEFIRNLVTLESGGSGGVVWRIRASNTKLVCAVGSRNGTEETKLLVLDFDVDMK

SEQ ID NO: 326229 - DNA, 3896 bp, Artificial Sequence
  derived and/or modified sequence
ccttccgcagctgccgcttcagtccgaaggaggaagggaaccaacccactttctcggcgccgcggctcttttctaaaagtaatgtgaaaacctttgcatcttctgatagtctagccaaggtccaagaagtagcaagctggcttttggaaatgaatcaggaactgctctctgtgggcagcaaaagacgacgaactggaggctctctgagaggtaacccttcctcaagccaggtagatgaagaacagatgaatcgtgtggtagaggaggaacagcaacagcaactcagacaacaagaggaggagcacactgcaaggaatggtgaagttgttggagtagaacctagacctggaggccaaaatgattcccagcaaggacagttggaagaaaacaataatagatttatttcggtagatgaggactcctcaggaaaccaagaagaacaagaggaagatgaagaacatgctggtgaacaagatgaggaggatgaggaggaggaggagatggaccaggagagtgacgattttgatcagtctgatgatagtagcagagaagatgaacatacacatactaacagtgtcacgaactccagtagtattgtggacctgcccgttcaccaactctcctccccattctatacaaaaacaacaaaaatgaaaagaaagttggaccatggttctgaggtccgctctttttctttgggaaagaaaccatgcaaagtctcagaatatacaagtaccactgggcttgtaccatgttcagcaacaccaacaacttttggggacctcagagcagccaatggccaagggcaacaacgacgccgaattacatctgtccagccacctacaggcctccaggaatggctaaaaatgtttcagagctggagtggaccagagaaattgcttgctttagatgaactcattgatagttgtgaaccaacacaagtaaaacatatgatgcaagtgatagaaccccagtttcaacgagacttcatttcattgctccctaaagagttggcactctatgtgctttcattcctggaacccaaagacctgctacaagcagctcagacatgtcgctactggagaattttggctgaagacaaccttctctggagagagaaatgcaaagaagaggggattgatgaaccattgcacatcaagagaagaaaagtaataaaaccaggtttcatacacagtccatggaaaagtgcatacatcagacagcacagaattgatactaactggaggcgaggagaactcaaatctcctaaggtgctgaaaggacatgatgatcatgtgatcacatgcttacagttttgtggtaaccgaatagttagtggttctgatgacaacactttaaaagtttggtcagcagtcacaggcaaatgtctgagaacattagtgggacatacaggtggagtatggtcatcacaaatgagagacaacatcatcattagtggatctacagatcggacactcaaagtgtggaatgcagagactggagaatgtatacacaccttatatgggcatacttccactgtgcgttgtatgcatcttcatgaaaaaagagttgttagcggttctcgagatgccactcttagggtttgggatattgagacaggccagtgtttacatgttttgatgggtcatgttgcagcagtccgctgtgttcaatatgatggcaggagggttgttagtggagcatatgattttatggtaaaggtgtgggatccagagactgaaacctgtctacacacgttgcaggggcatactaatagagtctattcattacagtttgatggtatccatgtggtgagtggatctcttgatacatcaatccgtgtttgggatgtggagacagggaattgcattcacacgttaacagggcaccagtcgttaacaagtggaatggaactcaaagacaatattcttgtctctgggaatgcagattctacagttaaaatctgggatatcaaaacaggacagtgtttacaaacattgcaaggtcccaacaagcatcagagtgctgtgacctgtttacagttcaacaagaactttgtaattaccagctcagatgatggaactgtaaaactatgggacttgaaaacgggtgaatttattcgaaacctagtcacattggagagtggggggagtgggggagttgtgtggcggatcagagcctcaaacacaaagctggtgtgtgcagttgggagtcggaatgggactgaagaaaccaagctgctggtgctggactttgatgtggacatgaagtgaagagcagaaaagatgaatttgtccaattgtgtagacgatatactccctgcccttccccctgcaaaaagaaaaaaagaaaagaaaaagaaaaaaatcccttgttctcagtggtgcaggatgttggcttggggcaacagattgaaaagacctacagactaagaaggaaaagaagaagagatgacaaaccataactgacaagagaggcgtctgctgtctcatcacataaaaggcttcacttttgactgagggcagctttgcaaaatgagactttctaaatcaaaccaggtgcaattatttctttattttcttctccagtggtcattgggcagtgttaatgctgaaacatcattacagattctgctagcctgttcttttaccactgacagctagacacctagaaaggaactgcaataatatcaaaacaagtactggttgactttctaattagagagcatctgcaacaaaaagtcatttttctggagtggaaaagcttaaaaaaattactgtgaattgtttttgtacagttatcatgaaaagcttttttttttttttttttgccaaccattgccaatgtcaatcaatcacagtattagcctctgttaatctatttactgttgcttccatatacattcttcaatgcatatgttgctcaaaggtggcaagttgtcctgggttctgtgagtcctgagatggatttaattcttgatgctggtgctagaagtaggtcttcaaatatgggattgttgtcccaaccctgtactgtactcccagtggccaaacttatttatgctgctaaatgaaagaaagaaaaaagcaaattatttttttttattttttttctgctgtgacgttttagtcccagactgaattccaaatttgctctagtttggttatggaaaaaagactttttgccactgaaacttgagccatctgtgcctctaagaggctgagaatggaagagtttcagataataaagagtgaagtttgcctgcaagtaaagaattgagagtgtgtgcaaagcttattttcttttatctgggcaaaaattaaaacacattccttggaacagagctattacttgcctgttctgtggagaaacttttctttttgagggctgtggtgaatggatgaacgtacatcgtaaaactgacaaaatattttaaaaatatataaaacacaaaattaaaataaagttgctggtcagtcttagtgttttacagtatttgggaaaacaactgttacagttttattgctctgagtaactgacaaagcagaaactattcagtttttgtagtaaaggcgtcacatgcaaacaaacaaaatgaatgaaacagtcaaatggtttgcctcattctccaagagccacaactcaagctgaactgtgaaagtggtttaacactgtatcctaggcgatcttttttcctccttctgtttatttttttgtttgttttatttatagtctgatttaaaacaatcagattcaagttggttaattttagttatgtaacaacctgacatgatggaggaaaacaacctttaaagggattgtgtctatggtttgattcacttagaaattttattttcttataacttaagtgcaataaaatgtgttttttcatgtta

SEQ ID NO: 326230 - DNA, 2124 bp, Artificial Sequence
  derived and/or modified sequence
atgaatcaagagttattgagcgtgggaagcaaaaggcggcgaacgggaggatctctgagggggaatcctagctcgagtcaggtagatgaagagcaaatgaacagggtcgtggaagaggagcagcagcaacagcttaggcaacaagaagaagagcacacagccaggaatggtgaagtggtaggtgtggagcctaggcccggagggcaaaatgactctcagcaggggcagctcgaagaaaacaacaaccgcttcatctccgtagatgaggatagcagtggaaaccaggaagagcaagaagaggacgaggaacatgccggggagcaggacgaggaagacgaggaggaagaggaaatggaccaggaaagcgatgacttcgaccagagtgatgactccagccgagaggatgagcacactcacacaaattcagtgacaaatagtagtagcatcgttgatctgccagtccaccagttgtctagtccattttacactaaaactactaagatgaagaggaaattggaccacggatcagaggtccgaagtttttctcttggcaagaagccatgtaaagtcagcgaatacacaagcaccaccggactggtgccatgctccgccacccccactacttttggggatttaagggccgctaacgggcagggacagcagaggaggcggatcacctctgtgcagccgccaacaggactacaggaatggcttaaaatgtttcagtcctggagcgggcccgaaaagttgctcgccttagacgaactgattgattcttgcgaacccacccaggtgaagcatatgatgcaggtgatagagccccaattccaaagagacttcatctctcttctcccaaaagagttggcactctatgtcctcagttttctagaacccaaggatctgctccaggcagcacaaacatgcaggtactggcgcattctagccgaggacaacctattgtggagggagaaatgcaaagaagagggcatcgatgagccgctccacatcaaaaggcgaaaagtgattaagcccggattcattcattctccctggaagagtgcttacatccgccagcacagaatcgacaccaactggcggagaggagagttgaagtctccgaaagtcctcaagggtcacgatgaccacgttattacttgcctccagttttgtggcaaccggatcgtttctggaagtgacgacaacaccctcaaagtatggagcgctgtgacggggaaatgcttgcgcactcttgtggggcacactggtggggtgtggtccagtcagatgagagacaatatcattatttccggcagcaccgaccggaccctgaaagtttggaatgctgagaccggagaatgtatccacaccctttatggtcacacatcaactgttagatgtatgcacctgcacgagaaaagggtggtcagcggaagtcgagacgctacactgagagtctgggatatcgagactggccagtgcctgcatgtgctaatggggcacgtggccgccgttcggtgcgtccaatatgacggacgcagggtagttagcggagcctacgactttatggtgaaggtctgggacccagagactgagacatgtctgcacaccttgcagggccacacaaatagagtgtattcactgcaattcgatggaatccatgtggtgtctgggtctcttgatactagcatccgcgtctgggacgtggagaccggaaattgcattcatacccttacgggtcatcagagtctcacgagtggaatggagctgaaagacaatatcctcgtgtctggaaatgccgatagcacagtcaaaatctgggatattaagaccggccagtgtctgcaaactctgcaagggcccaacaaacaccagtctgccgtgacatgtctgcagttcaacaaaaattttgtgatcacctcaagtgacgacggcacagtaaaactgtgggacctgaagaccggagaattcattcgcaaccttgtcaccctggagagtggaggaagcggcggtgtcgtctggcggatccgggcctctaacacaaagctagtgtgcgccgtcggcagcagaaacggcacggaggaaactaagctgctggttcttgatttcgacgtggatatgaagtag

SEQ ID NO: 326231 - DNA, 2124 bp, Artificial Sequence
  derived and/or modified sequence
atgaaccaggagctgctgtctgtgggcagcaagagaagaagaactggaggcagcctgcggggcaaccccagcagcagccaggtggatgaggagcagatgaacagagtggtggaggaggagcagcagcagcagctgcggcagcaggaggaggagcacacagccagaaatggagaggtggtgggcgtggagcccaggcctgggggccagaatgacagccagcagggccagctggaggagaacaacaaccgcttcatctctgtggatgaggacagcagcggcaaccaggaggagcaggaggaggatgaggagcacgccggggagcaggatgaagaagatgaggaggaggaggagatggaccaggagagtgatgactttgaccagagtgatgacagcagccgggaggatgagcacacccacaccaacagcgtgaccaacagcagcagcatcgtggacctgcctgtgcaccagctgagcagccccttctacaccaagaccaccaagatgaagaggaagctggaccacggcagcgaggtgcgctccttcagcctgggcaagaagccctgcaaggtgtctgagtacaccagcaccaccggcctggtgccctgcagcgccacccccaccacctttggagacctgcgggccgccaacggccagggccagcagaggcggcgcatcacctctgtgcagccccccaccggcctgcaggagtggctgaagatgttccagagctggagcggccctgagaagctgctggccctggatgagctgattgacagctgtgagcccacccaggtgaagcacatgatgcaggtgattgagccccagttccagagggacttcatcagcctgctgcccaaggagctggccctgtatgtgctgtccttcctggagcccaaggacctgctgcaggccgcccagacctgccgctactggaggatcctggccgaggacaacctgctgtggagggagaagtgcaaggaggagggcattgatgagcccctgcacatcaagaggaggaaggtgatcaagccaggcttcatccacagcccctggaagagcgcctacatccggcagcacagaattgacaccaactggaggagaggagagctgaagagccccaaggtgctgaagggccatgatgaccacgtgatcacctgcctgcagttctgtggcaaccgcatcgtgtctggcagtgatgacaacaccctgaaggtgtggagcgctgtgacaggcaagtgcctgcggaccctggtgggccacactggaggagtgtggagcagccagatgagggacaacatcatcatcagcggcagcacagacaggaccctgaaggtgtggaatgctgagaccggggagtgcatccacaccctgtatggccacaccagcacagtgcgctgcatgcacctgcacgagaagagggtggtgtctggcagcagagatgccaccctgcgggtgtgggacatcgagaccggccagtgcctgcacgtgctgatgggccacgtggccgctgtgcgctgtgtgcagtatgatggccggcgggtggtgtctggggcctatgacttcatggtgaaggtgtgggaccctgagacagagacctgcctgcacaccctgcagggccacaccaacagagtgtacagcctgcagtttgatggcatccacgtggtgtctggcagcctggacaccagcatccgggtgtgggatgtggagaccggcaactgcatccacaccctgaccggccaccagagcctgaccagcggcatggagctgaaggacaacatcctggtgtctggaaatgctgacagcacagtgaagatctgggacatcaagacaggccagtgcctgcagaccctgcagggccccaacaagcaccagagcgctgtgacctgcctgcagttcaacaagaacttcgtcatcaccagcagtgatgatggcaccgtgaagctgtgggacctgaagacaggagagttcatccggaacctggtgaccctggagagcggcggcagcggcggcgtggtgtggaggatccgggccagcaacaccaagctggtgtgtgctgtgggcagcagaaatggaacagaggagaccaagctgctggtgctggactttgatgtggacatgaagtag

SEQ ID NO: 326232 - DNA, 2124 bp, Artificial Sequence
  derived and/or modified sequence
atgaaccaggagctgctgagcgtgggcagcaagcggcggcggaccggcggctcacttagaggcaacccatcttccagccaggtcgacgaggaacagatgaatcgggtggtcgaagaggagcaacaacagcagcttcggcagcaagaagaggaacacactgctcggaatggtgaggtggttggagtggagccacgacctggaggtcaaaacgactcacagcaggggcagcttgaagagaataacaacaggttcatatcagtcgacgaggattcttccgggaatcaggaagagcaggaggaagatgaggagcacgccggcgaacaggacgaggaggatgaggaggaggaggagatggatcaggagagtgatgacttcgatcagagcgacgattccagtcgtgaagacgaacatacgcacacaaatagcgtgacaaactcatcctctatcgttgacctacctgtccaccagctgtccagtcccttctatactaagactactaaaatgaaacgtaaactggatcatggctccgaagtgaggtcattctcccttggcaagaaaccatgtaaggtaagtgaatatacctccacaactgggttggttccctgttccgctactccaacaacctttggggacctgcgcgcggcaaacggccagggccagcagaggcgcaggatcacatccgtgcagccccctacaggactgcaggagtggttaaagatgttccagtcctggtctggtcctgagaagcttctggctctcgatgaactcattgattcttgtgagccaacccaggtaaagcacatgatgcaagtgatagagccacagttccaaagggacttcataagtctcctacccaaggagcttgcactctacgtgctgagctttctggaacctaaggatctgttacaggccgcccaaacatgccgttactggcgcattctggctgaagataaccttctgtggcgagagaaatgcaaggaagaagggattgacgaacccctgcacatcaagaggcgcaaggtgataaagccaggattcatacacagcccatggaagagcgcatatatcagacagcaccgcattgacaccaattggcggcggggagagctgaagagccccaaagtcctcaaaggccatgacgatcacgttatcacgtgcttacagttttgtggcaatcggatagtgtccggctcagacgataacaccttgaaagtgtggtctgcagtgacagggaaatgtcttcggaccctggtcgggcataccggcggagtctggtcctctcagatgcgggataatatcataatctcggggagtaccgaccggaccctgaaagtctggaacgcggaaactggcgagtgcatccatacattgtacgggcatacttcgaccgttagatgcatgcacctacacgagaaaagggtcgtatctgggagccgcgacgccacgctgagggtttgggacatcgagaccggccaatgtctccacgtccttatgggacatgtggcagccgtgcgctgtgtgcaatatgacgggcgccgcgtagtgagtggagcatacgactttatggtcaaagtctgggaccccgagaccgagacttgtttacatactttgcagggccacactaatcgggtgtattcccttcagtttgatgggatacacgtagtgtccggtagcctggacacttccatccgcgtttgggacgtggaaacagggaactgcattcacaccctaacagggcatcagagtttaacgtctgggatggagctcaaagacaatattctggtgtctgggaacgccgacagtacagtgaaaatttgggacattaagacgggccagtgcctccagacattgcagggcccgaacaaacaccagtcagctgttacatgtctgcagttcaataaaaatttcgtgatcacctcttcagacgacggcactgtgaaactttgggacttaaaaaccggtgagttcattcgaaatctcgttacactggagtcgggtgggtccggcggtgtggtctggaggatccgggcatctaatacaaaactggtgtgtgcagtcgggagcaggaatggcaccgaggaaacgaaactcctcgtcctggattttgacgtcgacatgaaatag

SEQ ID NO: 326233 - DNA, 2124 bp, Artificial Sequence
  derived and/or modified sequence
atgaatcaggaattgctttcagtgggcagtaaaagacggcgtaccggcggttcactgcgaggcaatccatcctcatcacaagtggatgaagaacaaatgaaccgtgtggtggaagaggagcagcagcaacaattgcgtcagcaagaagaggaacatactgctcgcaatggagaggtagtgggcgtggaacccagaccaggtggacagaatgactcacaacagggacagctcgaggaaaataataaccggtttatcagcgtagatgaggactccagtggtaatcaggaagagcaggaagaggacgaagaacatgcaggggaacaggacgaggaagacgaagaggaagaggagatggatcaggagtccgacgacttcgatcaatccgacgactcatcgagagaggatgaacatacccacacgaattcagtaactaacagttcaagtatcgtggatcttcccgtacaccagctttcaagcccattctacactaagaccactaaaatgaaacgaaaactcgaccacggatctgaggttaggagtttctccctggggaagaagccatgcaaagtcagcgaatacacctccactaccggcttagttccctgctcagccacaccaactacctttggggatctgcgcgctgcaaacggccaggggcagcaaagaagacgtatcacgtctgtgcaaccaccaactggcctgcaggagtggctgaaaatgttccagagctggagcggacctgaaaagttgctcgcattagatgaactaatagacagctgcgagcccacacaagtgaaacacatgatgcaagttatcgagcctcagttccaacgcgactttatctccttgctgcctaaggaactggctctgtacgttcttagcttccttgaaccaaaagacctgctgcaagcagcccagacatgcagatactggcggatactggcagaggacaatctgctttggagagaaaagtgtaaagaggaggggatcgacgaaccgctacatatcaagagacggaaggtgatcaagccagggtttattcatagtccctggaagagcgcttacataagacaacaccgtattgacaccaattggcgtcggggagaacttaagtctcctaaagtgcttaaaggacatgacgatcacgtgatcacctgtctgcaattttgcggcaatcgtattgttagcggtagtgatgataataccctgaaggtctggagtgcggttacaggcaagtgtcttcgcacactagtggggcatactgggggtgtatggtccagtcagatgcgcgacaacattataatctctggatcaactgacagaaccctgaaggtgtggaatgcagaaaccggagagtgcatccacacactgtacggacacacctccactgtccggtgtatgcacttgcacgagaagcgggtggtatccggcagcagggacgccacgctgagggtgtgggacatagaaaccggccagtgtctgcacgttttaatggggcatgtcgccgcagtgagatgcgttcagtacgatggtaggagggtcgtgtctggtgcatacgatttcatggttaaggtctgggacccagaaactgaaacctgccttcacacactccaagggcacactaaccgagtgtactcacttcagtttgatggcattcacgtggtgtcgggctctttggatacatctatcagagtttgggatgttgagacaggaaattgcatacataccctgactggtcaccagagcctgacctctggaatggaactgaaggacaacatcctggtatctggcaatgctgactcaacagtgaagatctgggatattaaaaccggacaatgcctacagacattacagggccctaacaaacatcagagcgctgtgacttgtctccagttcaacaaaaactttgtcatcacctcaagtgacgacggcacggtgaagctgtgggacctgaaaaccggcgaattcattaggaaccttgtaaccctggaatctggaggctccggcggagttgtgtggagaattcgagcgagcaatacaaaactggtatgcgccgtcggctcgcgaaacgggacagaggagactaagctgcttgttctggattttgacgtagacatgaaatag

SEQ ID NO: 326234 - DNA, 2124 bp, Artificial Sequence
  derived and/or modified sequence
atgaaccaggagctgctgagcgtgggcagcaagagaagaagaaccggcggcagcctgagaggcaaccccagcagcagccaggtggacgaggagcagatgaacagagtggtggaggaggagcagcagcagcagctgagacagcaggaggaggagcacaccgccagaaacggcgaggtggtgggcgtggagcccagacccggcggccagaacgacagccagcagggccagctggaggagaacaacaacagattcatcagcgtggacgaggacagcagcggcaaccaggaggagcaggaggaggacgaggagcacgccggcgagcaggacgaggaggacgaggaggaggaggagatggaccaggagagcgacgacttcgaccagagcgacgacagcagcagagaggacgagcacacccacaccaacagcgtgaccaacagcagcagcatcgtggacctgcccgtgcaccagctgagcagccccttctacaccaagaccaccaagatgaagagaaagctggaccacggcagcgaggtgagaagcttcagcctgggcaagaagccctgcaaggtgagcgagtacaccagcaccaccggcctggtgccctgcagcgccacccccaccaccttcggcgacctgagagccgccaacggccagggccagcagagaagaagaatcaccagcgtgcagccccccaccggcctgcaggagtggctgaagatgttccagagctggagcggccccgagaagctgctggccctggacgagctgatcgacagctgcgagcccacccaggtgaagcacatgatgcaggtgatcgagccccagttccagagagacttcatcagcctgctgcccaaggagctggccctgtacgtgctgagcttcctggagcccaaggacctgctgcaggccgcccagacctgcagatactggagaatcctggccgaggacaacctgctgtggagagagaagtgcaaggaggagggcatcgacgagcccctgcacatcaagagaagaaaggtgatcaagcccggcttcatccacagcccctggaagagcgcctacatcagacagcacagaatcgacaccaactggagaagaggcgagctgaagagccccaaggtgctgaagggccacgacgaccacgtgatcacctgcctgcagttctgcggcaacagaatcgtgagcggcagcgacgacaacaccctgaaggtgtggagcgccgtgaccggcaagtgcctgagaaccctggtgggccacaccggcggcgtgtggagcagccagatgagagacaacatcatcatcagcggcagcaccgacagaaccctgaaggtgtggaacgccgagaccggcgagtgcatccacaccctgtacggccacaccagcaccgtgagatgcatgcacctgcacgagaagagagtggtgagcggcagcagagacgccaccctgagagtgtgggacatcgagaccggccagtgcctgcacgtgctgatgggccacgtggccgccgtgagatgcgtgcagtacgacggcagaagagtggtgagcggcgcctacgacttcatggtgaaggtgtgggaccccgagaccgagacctgcctgcacaccctgcagggccacaccaacagagtgtacagcctgcagttcgacggcatccacgtggtgagcggcagcctggacaccagcatcagagtgtgggacgtggagaccggcaactgcatccacaccctgaccggccaccagagcctgaccagcggcatggagctgaaggacaacatcctggtgagcggcaacgccgacagcaccgtgaagatctgggacatcaagaccggccagtgcctgcagaccctgcagggccccaacaagcaccagagcgccgtgacctgcctgcagttcaacaagaacttcgtgatcaccagcagcgacgacggcaccgtgaagctgtgggacctgaagaccggcgagttcatcagaaacctggtgaccctggagagcggcggcagcggcggcgtggtgtggagaatcagagccagcaacaccaagctggtgtgcgccgtgggcagcagaaacggcaccgaggagaccaagctgctggtgctggacttcgacgtggacatgaagtag

SEQ ID NO: 326235 - protein, 589 aa, Artificial Sequence
  derived and/or modified sequence
MSKPGKPTLNHGLVPVDLKSAKEPLPHQTVMKIFSISIIAQGLPFCRRRMKRKLDHGSEVRSFSLGKKPCKVSEYTSTTGLVPCSATPTTFGDLRAANGQGQQRRRITSVQPPTGLQEWLKMFQSWSGPEKLLALDELIDSCEPTQVKHMMQVIEPQFQRDFISLLPKELALYVLSFLEPKDLLQAAQTCRYWRILAEDNLLWREKCKEEGIDEPLHIKRRKVIKPGFIHSPWKSAYIRQHRIDTNWRRGELKSPKVLKGHDDHVITCLQFCGNRIVSGSDDNTLKVWSAVTGKCLRTLVGHTGGVWSSQMRDNIIISGSTDRTLKVWNAETGECIHTLYGHTSTVRCMHLHEKRVVSGSRDATLRVWDIETGQCLHVLMGHVAAVRCVQYDGRRVVSGAYDFMVKVWDPETETCLHTLQGHTNRVYSLQFDGIHVVSGSLDTSIRVWDVETGNCIHTLTGHQSLTSGMELKDNILVSGNADSTVKIWDIKTGQCLQTLQGPNKHQSAVTCLQFNKNFVITSSDDGTVKLWDLKTGEFIRNLVTLESGGSGGVVWRIRASNTKLVCAVGSRNGTEETKLLVLDFDVDMK

SEQ ID NO: 326236 - DNA, 3570 bp, Artificial Sequence
  derived and/or modified sequence
agacaggtcaggacatttggtaggggaaggttgaaagacaaaagcagcaggccttgggttctcagccttttaaaaactattattaaatatatatttttaaaatttagtggttagagcttttagtaatgtgcctgtattacatgtagagagtattcgtcaaccaagaggagttttaaaatgtcaaaaccgggaaaacctactctaaaccatggcttggttcctgttgatcttaaaagtgcaaaagagcctctaccacatcaaactgtgatgaagatatttagcattagcatcattgcccaaggcctccctttttgtcgaagacggatgaaaagaaagttggaccatggttctgaggtccgctctttttctttgggaaagaaaccatgcaaagtctcagaatatacaagtaccactgggcttgtaccatgttcagcaacaccaacaacttttggggacctcagagcagccaatggccaagggcaacaacgacgccgaattacatctgtccagccacctacaggcctccaggaatggctaaaaatgtttcagagctggagtggaccagagaaattgcttgctttagatgaactcattgatagttgtgaaccaacacaagtaaaacatatgatgcaagtgatagaaccccagtttcaacgagacttcatttcattgctccctaaagagttggcactctatgtgctttcattcctggaacccaaagacctgctacaagcagctcagacatgtcgctactggagaattttggctgaagacaaccttctctggagagagaaatgcaaagaagaggggattgatgaaccattgcacatcaagagaagaaaagtaataaaaccaggtttcatacacagtccatggaaaagtgcatacatcagacagcacagaattgatactaactggaggcgaggagaactcaaatctcctaaggtgctgaaaggacatgatgatcatgtgatcacatgcttacagttttgtggtaaccgaatagttagtggttctgatgacaacactttaaaagtttggtcagcagtcacaggcaaatgtctgagaacattagtgggacatacaggtggagtatggtcatcacaaatgagagacaacatcatcattagtggatctacagatcggacactcaaagtgtggaatgcagagactggagaatgtatacacaccttatatgggcatacttccactgtgcgttgtatgcatcttcatgaaaaaagagttgttagcggttctcgagatgccactcttagggtttgggatattgagacaggccagtgtttacatgttttgatgggtcatgttgcagcagtccgctgtgttcaatatgatggcaggagggttgttagtggagcatatgattttatggtaaaggtgtgggatccagagactgaaacctgtctacacacgttgcaggggcatactaatagagtctattcattacagtttgatggtatccatgtggtgagtggatctcttgatacatcaatccgtgtttgggatgtggagacagggaattgcattcacacgttaacagggcaccagtcgttaacaagtggaatggaactcaaagacaatattcttgtctctgggaatgcagattctacagttaaaatctgggatatcaaaacaggacagtgtttacaaacattgcaaggtcccaacaagcatcagagtgctgtgacctgtttacagttcaacaagaactttgtaattaccagctcagatgatggaactgtaaaactatgggacttgaaaacgggtgaatttattcgaaacctagtcacattggagagtggggggagtgggggagttgtgtggcggatcagagcctcaaacacaaagctggtgtgtgcagttgggagtcggaatgggactgaagaaaccaagctgctggtgctggactttgatgtggacatgaagtgaagagcagaaaagatgaatttgtccaattgtgtagacgatatactccctgcccttccccctgcaaaaagaaaaaaagaaaagaaaaagaaaaaaatcccttgttctcagtggtgcaggatgttggcttggggcaacagattgaaaagacctacagactaagaaggaaaagaagaagagatgacaaaccataactgacaagagaggcgtctgctgtctcatcacataaaaggcttcacttttgactgagggcagctttgcaaaatgagactttctaaatcaaaccaggtgcaattatttctttattttcttctccagtggtcattgggcagtgttaatgctgaaacatcattacagattctgctagcctgttcttttaccactgacagctagacacctagaaaggaactgcaataatatcaaaacaagtactggttgactttctaattagagagcatctgcaacaaaaagtcatttttctggagtggaaaagcttaaaaaaattactgtgaattgtttttgtacagttatcatgaaaagcttttttttttttttttttgccaaccattgccaatgtcaatcaatcacagtattagcctctgttaatctatttactgttgcttccatatacattcttcaatgcatatgttgctcaaaggtggcaagttgtcctgggttctgtgagtcctgagatggatttaattcttgatgctggtgctagaagtaggtcttcaaatatgggattgttgtcccaaccctgtactgtactcccagtggccaaacttatttatgctgctaaatgaaagaaagaaaaaagcaaattatttttttttattttttttctgctgtgacgttttagtcccagactgaattccaaatttgctctagtttggttatggaaaaaagactttttgccactgaaacttgagccatctgtgcctctaagaggctgagaatggaagagtttcagataataaagagtgaagtttgcctgcaagtaaagaattgagagtgtgtgcaaagcttattttcttttatctgggcaaaaattaaaacacattccttggaacagagctattacttgcctgttctgtggagaaacttttctttttgagggctgtggtgaatggatgaacgtacatcgtaaaactgacaaaatattttaaaaatatataaaacacaaaattaaaataaagttgctggtcagtcttagtgttttacagtatttgggaaaacaactgttacagttttattgctctgagtaactgacaaagcagaaactattcagtttttgtagtaaaggcgtcacatgcaaacaaacaaaatgaatgaaacagtcaaatggtttgcctcattctccaagagccacaactcaagctgaactgtgaaagtggtttaacactgtatcctaggcgatcttttttcctccttctgtttatttttttgtttgttttatttatagtctgatttaaaacaatcagattcaagttggttaattttagttatgtaacaacctgacatgatggaggaaaacaacctttaaagggattgtgtctatggtttgattcacttagaaattttattttcttataacttaagtgcaataaaatgtgttttttcatgtta

SEQ ID NO: 326237 - DNA, 1770 bp, Artificial Sequence
  derived and/or modified sequence
atgtcaaagccaggtaaaccaaccttgaatcacggcctcgttccggtcgacttaaagtccgcaaaggaacccctcccccaccagaccgtgatgaagattttttctatatctatcatcgctcagggattacccttctgccgcaggcgcatgaagcgcaaactggaccacggatcggaagtcagatctttctcgttaggtaaaaaaccttgcaaagtctcagaatacacctctacaactgggttggtgccctgtagtgccacaccgaccactttcggggacctacgggccgctaacggccaaggccagcagcggagacggatcacctcggttcaacctcctacgggtctgcaggagtggttgaagatgttccaatcttggagcggtcctgaaaagctgctcgctctggacgaattgatcgactcttgcgagcccacccaagtcaaacatatgatgcaagtcattgaaccacaattccagcgagatttcatttcactgctgcccaaggaattagcactgtatgtgttatcctttctggaacctaaagatttgctgcaggcagctcagacctgccgatattggaggatcctggcagaggataacttactttggagagagaaatgcaaagaagagggcatcgatgaacccctgcacatcaaacgtcgcaaggtaattaaacccggttttattcactccccatggaaatctgcatacattcggcagcaccggatagacaccaattggcgtcggggcgaacttaaaagccctaaggtactcaaaggccacgatgatcacgtgattacatgtctacagttctgcggaaatcgaatcgtctctgggtccgacgacaacaccctgaaggtgtggagcgctgttacgggcaagtgccttcgtacacttgtgggacataccggcggggtgtggtctagccaaatgcgcgacaacatcatcattagtggctccactgaccggaccctgaaagtatggaacgctgaaaccggggagtgtattcacacattgtatggacacacatctaccgtcaggtgcatgcatttacatgagaaaagggtggtcagtgggtcacgtgacgccacactgagggtgtgggacatagagacagggcagtgtctccacgtactcatgggccacgtggcagcggtgcggtgcgtgcaatatgacggccggagggtggtcagtggcgcctatgatttcatggtcaaggtctgggacccagagacagaaacctgtctgcacacccttcagggccacacaaaccgggtgtactcactgcaatttgacggtatccatgtcgtttccggtagccttgatacctccattcgggtctgggacgtagagaccggcaactgtattcatacccttacgggacaccaatcattgacaagcgggatggaactgaaagataacatcctcgtttccggcaacgcggactccacagtgaagatatgggacattaagactgggcagtgcttgcagacgctgcagggtccaaataaacaccagagtgcagtcacgtgtcttcagtttaacaagaacttcgtcatcacctcctccgacgacggaaccgttaagttatgggacctgaagacaggcgaatttataaggaatctggtgactttggaatcaggcggcagcggcggtgtcgtgtggcgtattcgtgcctcgaatacaaagttagtgtgtgccgtggggagtcggaacggcactgaggagactaaacttctggtgctcgactttgacgtggatatgaagtag

SEQ ID NO: 326238 - DNA, 1770 bp, Artificial Sequence
  derived and/or modified sequence
atgagcaagccaggcaagcccaccctgaaccacggcctggtgcctgtggacctgaagagcgccaaggagcccctgccccaccagacagtgatgaagatcttcagcatcagcatcatcgcccagggcctgcccttctgcagaagaaggatgaagaggaagctggaccacggcagcgaggtgcgctccttcagcctgggcaagaagccctgcaaggtgtctgagtacaccagcaccaccggcctggtgccctgcagcgccacccccaccacctttggagacctgcgggccgccaacggccagggccagcagaggcggcgcatcacctctgtgcagccccccaccggcctgcaggagtggctgaagatgttccagagctggagcggccctgagaagctgctggccctggatgagctgattgacagctgtgagcccacccaggtgaagcacatgatgcaggtgattgagccccagttccagagggacttcatcagcctgctgcccaaggagctggccctgtatgtgctgtccttcctggagcccaaggacctgctgcaggccgcccagacctgccgctactggaggatcctggccgaggacaacctgctgtggagggagaagtgcaaggaggagggcattgatgagcccctgcacatcaagaggaggaaggtgatcaagccaggcttcatccacagcccctggaagagcgcctacatccggcagcacagaattgacaccaactggaggagaggagagctgaagagccccaaggtgctgaagggccatgatgaccacgtgatcacctgcctgcagttctgtggcaaccgcatcgtgtctggcagtgatgacaacaccctgaaggtgtggagcgctgtgacaggcaagtgcctgcggaccctggtgggccacactggaggagtgtggagcagccagatgagggacaacatcatcatcagcggcagcacagacaggaccctgaaggtgtggaatgctgagaccggggagtgcatccacaccctgtatggccacaccagcacagtgcgctgcatgcacctgcacgagaagagggtggtgtctggcagcagagatgccaccctgcgggtgtgggacatcgagaccggccagtgcctgcacgtgctgatgggccacgtggccgctgtgcgctgtgtgcagtatgatggccggcgggtggtgtctggggcctatgacttcatggtgaaggtgtgggaccctgagacagagacctgcctgcacaccctgcagggccacaccaacagagtgtacagcctgcagtttgatggcatccacgtggtgtctggcagcctggacaccagcatccgggtgtgggatgtggagaccggcaactgcatccacaccctgaccggccaccagagcctgaccagcggcatggagctgaaggacaacatcctggtgtctggaaatgctgacagcacagtgaagatctgggacatcaagacaggccagtgcctgcagaccctgcagggccccaacaagcaccagagcgctgtgacctgcctgcagttcaacaagaacttcgtcatcaccagcagtgatgatggcaccgtgaagctgtgggacctgaagacaggagagttcatccggaacctggtgaccctggagagcggcggcagcggcggcgtggtgtggaggatccgggccagcaacaccaagctggtgtgtgctgtgggcagcagaaatggaacagaggagaccaagctgctggtgctggactttgatgtggacatgaagtag

SEQ ID NO: 326239 - DNA, 1770 bp, Artificial Sequence
  derived and/or modified sequence
atgagcaagcccggcaagcccaccctgaaccacggcctggtgcccgtggatctgaaatccgctaaagagcccctgcctcaccaaacagtgatgaagatcttcagcatttcaataatagcacaggggctcccattctgcaggaggcgtatgaaaagaaaacttgaccatggctccgaggtgcgttccttcagtctcggaaagaagccctgtaaagtgtcagaatatacttctacaactggcctggtgccctgcagtgccacacctaccacattcggtgatctgcgagcagccaatggacagggccaacaaagacggcggataacctcagttcagccaccgacaggcctccaggagtggttaaaaatgttccagtcttggtctggaccagaaaagcttctggcactcgatgagctgatcgatagctgcgagcccacccaagtgaagcatatgatgcaggtcattgagccacagtttcaacgtgactttattagcctactccccaaggagctggcactatatgtgttgagctttctggaacctaaggatcttctgcaggccgctcagacttgtcgatattggcgcatccttgccgaagacaacttgctatggcgggaaaagtgcaaggaagaaggaattgatgaacccctccacattaaaagaaggaaggttattaagcctggatttatccattctccatggaagtccgcatatatcagacagcaccgtatcgacacgaattggcgacgcggtgagctcaaaagcccaaaggtactgaagggtcacgatgatcatgtgatcacttgtcttcagttctgtggcaatagaatcgtcagtggctcagacgacaacaccttaaaggtctggtcggctgtgacaggtaagtgtcttcgaacacttgtgggccacaccgggggggtttggagtagccagatgagggataatattatcataagcgggagtaccgatcggaccctaaaagtctggaacgccgagacaggggaatgtatccacaccctctacgggcacacaagtactgtaaggtgtatgcacttgcacgagaaaagagttgttagtggttcaagagacgctacgctccgggtctgggatatcgaaaccgggcagtgcctccacgtgctcatgggccacgtagccgccgtccggtgtgttcaatatgacggcagaagggtggtcagcggtgcctatgactttatggttaaagtgtgggatcccgaaaccgaaacatgtctgcatacattgcaagggcacacaaaccgtgtctacagcctgcaattcgacgggatacatgtggtatccggttcccttgacaccagtattagggtgtgggacgtggagaccggaaactgtattcacaccttgaccggacatcagtcgctgacatcaggcatggaattaaaggacaatattctcgtctccgggaacgcagattcgaccgtgaaaatatgggatatcaagactggccagtgcctacagaccttacaagggccgaataaacaccagtccgcagtcacttgtctacagtttaataagaatttcgtcatcacgtccagcgacgacggcactgtgaagttatgggacctgaaaaccggtgagttcatcagaaacctcgttaccctagaaagtggcggctctggcggcgttgtctggagaatccgggcttctaatacgaaacttgtctgcgcggttggctcccgaaacggtaccgaggaaacaaaacttctggttcttgacttcgacgtcgatatgaagtag

SEQ ID NO: 326240 - DNA, 1770 bp, Artificial Sequence
  derived and/or modified sequence
atgtctaagccgggaaagccgaccctaaatcacggcttggtaccagtggacttgaaaagcgctaaggaaccgttacctcatcagacagtgatgaaaattttctcgatctccataatcgcacaaggtctacccttttgtaggagaaggatgaaacggaagttggaccacgggagcgaggtcaggtcttttagcttggggaagaaaccctgcaaggtttccgagtatacctccaccaccggcctcgttccatgctctgctacaccaacgaccttcggcgatctgcgcgctgccaatgggcaagggcaacagagacgccgtatcacctcagtccaacccccaaccggtctgcaagagtggctgaagatgttccagagttggtctgggcctgagaaactgctggccttagatgagctcatcgattcttgtgaacccacgcaggttaagcatatgatgcaggtgatcgaacctcagttccagagggacttcataagtctcctccctaaggagttggcactatacgtcctatcattcctcgaaccgaaagacctgctccaggctgctcagacatgcagatattggagaattctcgctgaagacaatctcttgtggcgggagaaatgcaaggaggagggcattgacgagcccctgcacatcaagcgcaggaaggtgattaagccaggttttattcattccccttggaagagcgcctacatccgacaacacagaatagataccaactggcgaagaggagagttgaagtcacccaaagttttaaaggggcatgacgaccatgtcataacctgtctgcagttctgcggaaatcgaatcgtctctggtagcgatgataacaccctcaaagtctggtctgccgtgactggcaaatgcctgcgtactctcgtcgggcataccggaggcgtgtggtccagccaaatgagggataatatcataatcagtggctctacagatcggactctgaaggtatggaatgccgagacaggagaatgcatccacactctttatggccacacgagtactgtgaggtgcatgcacctccacgaaaagagagtggtcagcggatccagagatgcaactctgagggtgtgggacattgagaccggtcagtgcctgcatgtactgatgggtcatgtggctgcggtgagatgtgtgcagtatgatggtcggagagttgtgtctggcgcttatgacttcatggtcaaagtgtgggatccggaaaccgagacttgcctgcacacgctacaaggtcatacaaaccgtgtgtacagtctgcagtttgacggcattcacgtggtgtcagggtccttagacaccagtatccgggtctgggacgtagaaacaggaaactgtatccacactctgacaggacaccagtcactcacttctgggatggagcttaaggacaatatcctcgttagtgggaacgcagatagtactgtgaaaatctgggatatcaagaccggtcaatgtctgcagactctccagggccctaacaagcaccagagtgctgtgacctgcctgcagttcaacaagaattttgtaattacctcatctgacgatgggactgtgaagctctgggacctaaagactggggagttcattcgtaacttagtgacactcgagtccgggggatcagggggtgtggtatggagaatacgcgctagcaatactaaactcgtgtgtgctgtcggctctcggaacggcacagaggaaacaaagctactggttctggatttcgacgtcgacatgaaatag

SEQ ID NO: 326241 - DNA, 1770 bp, Artificial Sequence
  derived and/or modified sequence
atgagcaagcccggcaagcccaccctgaaccacggcctggtgcccgtggacctgaagagcgccaaggagcccctgccccaccagaccgtgatgaagatcttcagcatcagcatcatcgcccagggcctgcccttctgcagaagaagaatgaagagaaagctggaccacggcagcgaggtgagaagcttcagcctgggcaagaagccctgcaaggtgagcgagtacaccagcaccaccggcctggtgccctgcagcgccacccccaccaccttcggcgacctgagagccgccaacggccagggccagcagagaagaagaatcaccagcgtgcagccccccaccggcctgcaggagtggctgaagatgttccagagctggagcggccccgagaagctgctggccctggacgagctgatcgacagctgcgagcccacccaggtgaagcacatgatgcaggtgatcgagccccagttccagagagacttcatcagcctgctgcccaaggagctggccctgtacgtgctgagcttcctggagcccaaggacctgctgcaggccgcccagacctgcagatactggagaatcctggccgaggacaacctgctgtggagagagaagtgcaaggaggagggcatcgacgagcccctgcacatcaagagaagaaaggtgatcaagcccggcttcatccacagcccctggaagagcgcctacatcagacagcacagaatcgacaccaactggagaagaggcgagctgaagagccccaaggtgctgaagggccacgacgaccacgtgatcacctgcctgcagttctgcggcaacagaatcgtgagcggcagcgacgacaacaccctgaaggtgtggagcgccgtgaccggcaagtgcctgagaaccctggtgggccacaccggcggcgtgtggagcagccagatgagagacaacatcatcatcagcggcagcaccgacagaaccctgaaggtgtggaacgccgagaccggcgagtgcatccacaccctgtacggccacaccagcaccgtgagatgcatgcacctgcacgagaagagagtggtgagcggcagcagagacgccaccctgagagtgtgggacatcgagaccggccagtgcctgcacgtgctgatgggccacgtggccgccgtgagatgcgtgcagtacgacggcagaagagtggtgagcggcgcctacgacttcatggtgaaggtgtgggaccccgagaccgagacctgcctgcacaccctgcagggccacaccaacagagtgtacagcctgcagttcgacggcatccacgtggtgagcggcagcctggacaccagcatcagagtgtgggacgtggagaccggcaactgcatccacaccctgaccggccaccagagcctgaccagcggcatggagctgaaggacaacatcctggtgagcggcaacgccgacagcaccgtgaagatctgggacatcaagaccggccagtgcctgcagaccctgcagggccccaacaagcaccagagcgccgtgacctgcctgcagttcaacaagaacttcgtgatcaccagcagcgacgacggcaccgtgaagctgtgggacctgaagaccggcgagttcatcagaaacctggtgaccctggagagcggcggcagcggcggcgtggtgtggagaatcagagccagcaacaccaagctggtgtgcgccgtgggcagcagaaacggcaccgaggagaccaagctgctggtgctggacttcgacgtggacatgaagtag

SEQ ID NO: 326242 - DNA, 1735 bp, Artificial Sequence
  derived and/or modified sequence
attttgcttttcccttctagtcatgataaagtatttcttggatgagaaatttgcatttaatgttaaactaactgttaatgctattttttaaatgtatcagtcttctattaatatggctgataccaggacaaagtaccactgggcttgtaccatgttcagcaacaccaacaacttttggggacctcagagcagccaatggccaagggcaacaacgacgccgaattacatctgtccagccacctacaggcctccaggaatggctaaaaatgtttcagagctggagtggaccagagaaattgcttgctttagatgaactcattgatagttgtgaaccaacacaagtaaaacatatgatgcaagtgatagaaccccagtttcaacgagacttcatttcattgctccctaaagagttggcactctatgtgctttcattcctggaacccaaagacctgctacaagcagctcagacatgtcgctactggagaattttggctgaagacaaccttctctggagagagaaatgcaaagaagaggggattgatgaaccattgcacatcaagagaagaaaagtaataaaaccaggtttcatacacagtccatggaaaagtgcatacatcagacagcacagaattgatactaactggaggcgaggagaactcaaatctcctaaggtgctgaaaggacatgatgatcatgtgatcacatgcttacagttttgtggtaaccgaatagttagtggttctgatgacaacactttaaaagtttggtcagcagtcacaggcaaatgtctgagaacattagtgggacatacaggtggagtatggtcatcacaaatgagagacaacatcatcattagtggatctacagatcggacactcaaagtgtggaatgcagagactggagaatgtatacacaccttatatgggcatacttccactgtgcgttgtatgcatcttcatgaaaaaagagttgttagcggttctcgagatgccactcttagggtttgggatattgagacaggccagtgtttacatgttttgatgggtcatgttgcagcagtccgctgtgttcaatatgatggcaggagggttgttagtggagcatatgattttatggtaaaggtgtgggatccagagactgaaacctgtctacacacgttgcaggggcatactaatagagtctattcattacagtttgatggtatccatgtggtgagtggatctcttgatacatcaatccgtgtttgggatgtggagacagggaattgcattcacacgttaacagggcaccagtcgttaacaagtggaatggaactcaaagacaatattcttgtctctgggaatgcagattctacagttaaaatctgggatatcaaaacaggacagtgtttacaaacattgcaaggtcccaacaagcatcagagtgctgtgacctgtttacagttcaacaagaactttgtaattaccagctcagatgatggaactgtaaaactatgggacttgaaaacgggtgaatttattcgaaacctagtcacattggagagtggggggagtgggggagttgtgtggcggatcagagcctcaaacacaaagctggtgtgtgcagttgggagtcggaatgggactgaagaaaccaagctgctggtgctggactttgatgtggacatgaagtgaagagcagaaaagatgaatttgtccaattgtgtagacgatatactccctgcccttccccctgc

SEQ ID NO: 326243 - DNA, 1596 bp, Artificial Sequence
  derived and/or modified sequence
atgcttttctttaagtgtatttctctgctgcttatttggctgattcccggacagtctactacagggctggtgccttgtagcgccactccaactacattcggagatctaagggctgccaacgggcagggtcagcaaagaaggcggatcacatctgtccaaccaccaactggtctgcaggagtggctgaaaatgttccagtcatggagcgggcccgagaaactgctggccctggacgaattgattgactcctgcgagccaacgcaggtgaaacacatgatgcaagtcatcgagccccagtttcagagagacttcatctcccttttaccaaaggagctggccctctatgtgctgtcttttctcgagcctaaagatcttctccaggccgctcagacctgccgatactggcgcatcttggccgaagacaatttgctgtggagagagaagtgcaaggaggagggaatcgatgagcccttgcacatcaaacggcggaaagtcatcaagcctggctttatccacagcccatggaaatccgcttacatacgccagcaccgcatcgacacgaactggcgacgtggagagttaaaatcaccgaaagtgctcaaaggccatgacgaccatgtaatcacgtgccttcagttctgtgggaaccgtatcgtctccggctcagacgacaatactctgaaggtgtggagcgccgtcaccggaaagtgcttgagaaccctggtgggccacactggcggcgtttggtcctcccagatgagagacaacatcatcatcagtggcagcactgacaggacattgaaggtgtggaacgccgagactggcgagtgcattcacacgctatacgggcacaccagcacagtgaggtgcatgcacctccacgaaaaaagagtggtgtccgggtcccgggacgccacgttgcgagtatgggatattgagacgggccagtgcctgcacgtcttgatgggccatgtagcagctgtgaggtgtgtgcagtatgacgggaggcgggtcgtgagcggagcctatgatttcatggtcaaggtttgggatcctgagactgaaacttgcctccatacactgcagggccacactaatagggtctattcactgcagttcgacgggatacatgtggtttcagggagtctggatacgtccattagagtttgggatgtcgaaaccggtaactgtatacatactctgaccggccaccagtcgctcacctccggcatggagctgaaggataatatcttagtgtccggcaacgcagacagcaccgtgaagatatgggatattaagacaggccagtgtctccaaactctccaagggccaaacaaacaccagtctgctgttacctgtttacagttcaataagaattttgtcattacgagcagcgacgatggaaccgtcaagctgtgggacctgaagaccggggagtttattcgtaacctggtcactttggaatcaggaggctctggaggagttgtctggaggatcagggcttctaacacaaagcttgtctgcgctgtggggagtcgtaacggaaccgaagaaaccaagctcctggtgcttgacttcgacgtcgatatgaagtag

SEQ ID NO: 326244 - DNA, 1596 bp, Artificial Sequence
  derived and/or modified sequence
atgctgttcttcaagtgcatcagcctgctgctgatctggctgatccctggccagagcaccaccggcctggtgccctgcagcgccacccccaccacctttggagacctgcgggccgccaacggccagggccagcagaggcggcgcatcacctctgtgcagccccccaccggcctgcaggagtggctgaagatgttccagagctggagcggccctgagaagctgctggccctggatgagctgattgacagctgtgagcccacccaggtgaagcacatgatgcaggtgattgagccccagttccagagggacttcatcagcctgctgcccaaggagctggccctgtatgtgctgtccttcctggagcccaaggacctgctgcaggccgcccagacctgccgctactggaggatcctggccgaggacaacctgctgtggagggagaagtgcaaggaggagggcattgatgagcccctgcacatcaagaggaggaaggtgatcaagccaggcttcatccacagcccctggaagagcgcctacatccggcagcacagaattgacaccaactggaggagaggagagctgaagagccccaaggtgctgaagggccatgatgaccacgtgatcacctgcctgcagttctgtggcaaccgcatcgtgtctggcagtgatgacaacaccctgaaggtgtggagcgctgtgacaggcaagtgcctgcggaccctggtgggccacactggaggagtgtggagcagccagatgagggacaacatcatcatcagcggcagcacagacaggaccctgaaggtgtggaatgctgagaccggggagtgcatccacaccctgtatggccacaccagcacagtgcgctgcatgcacctgcacgagaagagggtggtgtctggcagcagagatgccaccctgcgggtgtgggacatcgagaccggccagtgcctgcacgtgctgatgggccacgtggccgctgtgcgctgtgtgcagtatgatggccggcgggtggtgtctggggcctatgacttcatggtgaaggtgtgggaccctgagacagagacctgcctgcacaccctgcagggccacaccaacagagtgtacagcctgcagtttgatggcatccacgtggtgtctggcagcctggacaccagcatccgggtgtgggatgtggagaccggcaactgcatccacaccctgaccggccaccagagcctgaccagcggcatggagctgaaggacaacatcctggtgtctggaaatgctgacagcacagtgaagatctgggacatcaagacaggccagtgcctgcagaccctgcagggccccaacaagcaccagagcgctgtgacctgcctgcagttcaacaagaacttcgtcatcaccagcagtgatgatggcaccgtgaagctgtgggacctgaagacaggagagttcatccggaacctggtgaccctggagagcggcggcagcggcggcgtggtgtggaggatccgggccagcaacaccaagctggtgtgtgctgtgggcagcagaaatggaacagaggagaccaagctgctggtgctggactttgatgtggacatgaagtag

SEQ ID NO: 326245 - DNA, 1596 bp, Artificial Sequence
  derived and/or modified sequence
atgctgttcttcaagtgcatcagcctgctgctgatctggctgatcccagggcagtccactacaggacttgttccttgcagtgctacgccgactaccttcggagatctgcgcgccgccaacggtcagggtcagcagagaaggaggattacatcggtgcagccccccacaggcctgcaggagtggttgaaaatgttccagagctggagcggcccggaaaaacttttggccctcgatgagcttattgatagctgtgagccgacccaggtgaaacatatgatgcaagtcatcgagccccaatttcagcgggatttcatctctctgcttcccaaggagcttgcgctgtatgtgctgtcattcctggagcctaaggatcttctgcaggccgcgcagacatgccgttattggcggatactcgccgaagacaacttactgtggcgtgagaaatgtaaagaggaggggattgacgaacccttgcatattaaacgcaggaaggtcatcaagccaggttttattcatagcccctggaaaagcgcttatatccgccaacatcgcattgataccaattggcggagaggcgaacttaagtcacccaaggtgctcaagggccacgacgaccacgtgattacgtgcctgcagttttgtggaaaccgaattgtctcggggtccgacgataacactctcaaggtgtggtcagccgtcacaggcaaatgtctgcgcactctggtgggccatactggaggcgtctggtcttcgcaaatgcgagataatataatcatttcggggtctactgacagaaccctcaaagtatggaacgccgaaacaggggaatgtattcacactctgtacggtcatacctccacagttcggtgcatgcacctgcacgaaaagagagtggtgtcaggctcacgagacgctaccctgcgcgtatgggatatagagactgggcagtgtctgcatgtactcatgggccacgtcgccgcggtgcgttgcgttcaatatgacgggaggcgggtggtgtcaggcgcttatgacttcatggttaaggtgtgggatcctgaaaccgagacatgtctgcacacgctgcagggccacacgaatagggtgtacagtttacaattcgatggaatacacgtggtgtccggcagccttgatactagcattagggtgtgggatgtggagacaggcaattgtatccacaccttaacaggtcatcagtcacttacgagtggaatggagttgaaagataatatcctggtcagcggtaacgcagattcgaccgtcaagatctgggacataaagacaggacagtgcctacaaactctgcaaggaccaaataagcaccaaagcgccgttacttgtctgcagtttaataaaaacttcgttattaccagttctgatgatggaacggtcaagttgtgggacctgaagacaggggaatttattaggaatttggtgacacttgaatctggtggcagcggcggcgtcgtttggcgaattagggcaagcaataccaagctggtatgtgccgttgggtcccggaacgggacggaggagactaaattgctggtgctagactttgatgtggatatgaagtag

SEQ ID NO: 326246 - DNA, 1596 bp, Artificial Sequence
  derived and/or modified sequence
atgctgttttttaaatgcatttcccttcttcttatctggttgattcccggtcaatccaccaccggactagtcccatgctccgctacaccgacgacattcggagatttacgcgcagccaacggccagggccagcagagacggagaatcaccagcgtgcagcctcccactggcctgcaggaatggctgaagatgttccagagttggagcggccctgaaaaactcttggccctggacgagttgattgactcttgcgagccaacacaagtgaagcatatgatgcaggttattgaaccccagttccagagggactttatctctctgcttcctaaagaactagcattatatgtgctttcctttctggagccaaaggacctgctccaggctgcacaaacctgtaggtattggcgtattctggcggaggacaacctcctgtggcgagagaagtgtaaagaggaggggattgacgaaccactacacatcaaacgaaggaaagtcattaagccaggttttatacatagcccatggaagagcgcgtatataaggcaacacaggatcgacacaaactggagaaggggcgaactcaagagcccaaaggtcctgaaggggcacgacgaccatgtgataacttgtctgcagttctgcggaaatcgaatcgtaagtggcagtgacgacaacacactgaaggtatggtctgccgtgactgggaaatgcctccggactctggtgggacacactggtggcgtttggtcctctcagatgagagataacattatcattagcggcagcaccgatagaacacttaaagtgtggaacgcagagactggggagtgcatccacaccttgtacggtcacacctccactgtccggtgtatgcatttgcatgagaagcgcgtggtctcaggcagtagagatgccacccttagggtgtgggatatcgagactggccagtgcctgcacgtactgatgggacacgtggccgcagttcggtgcgtacagtatgacgggaggcgtgtggttagcggggcttacgatttcatggtcaaggtgtgggaccccgagacagagacttgtctccacacactgcagggacataccaatcgagtgtatagtttgcaattcgacgggatccacgtcgtgtctgggtcattggatacctctattagagtctgggatgtagagacaggcaactgcatccacaccctgactggccatcagtccttgacgtccggcatggaactgaaagataacatcctagtgagcgggaacgcggatagtaccgtgaaaatctgggacatcaaaacggggcaatgcttgcagaccctgcagggacccaacaaacaccagagcgccgttacatgtctgcagtttaataaaaacttcgtcatcacttcctcagatgatggaacagtgaaactgtgggatctcaaaaccggcgagtttatccgcaatctcgtaaccctggaatcaggaggctccggcggagtcgtctggcgaattagggcaagtaacactaaactagtatgcgccgttggatcccgtaatggcacagaagagaccaaactcctggtcttagactttgacgtagacatgaaatag

SEQ ID NO: 326247 - DNA, 1596 bp, Artificial Sequence
  derived and/or modified sequence
atgctgttcttcaagtgcatcagcctgctgctgatctggctgatccccggccagagcaccaccggcctggtgccctgcagcgccacccccaccaccttcggcgacctgagagccgccaacggccagggccagcagagaagaagaatcaccagcgtgcagccccccaccggcctgcaggagtggctgaagatgttccagagctggagcggccccgagaagctgctggccctggacgagctgatcgacagctgcgagcccacccaggtgaagcacatgatgcaggtgatcgagccccagttccagagagacttcatcagcctgctgcccaaggagctggccctgtacgtgctgagcttcctggagcccaaggacctgctgcaggccgcccagacctgcagatactggagaatcctggccgaggacaacctgctgtggagagagaagtgcaaggaggagggcatcgacgagcccctgcacatcaagagaagaaaggtgatcaagcccggcttcatccacagcccctggaagagcgcctacatcagacagcacagaatcgacaccaactggagaagaggcgagctgaagagccccaaggtgctgaagggccacgacgaccacgtgatcacctgcctgcagttctgcggcaacagaatcgtgagcggcagcgacgacaacaccctgaaggtgtggagcgccgtgaccggcaagtgcctgagaaccctggtgggccacaccggcggcgtgtggagcagccagatgagagacaacatcatcatcagcggcagcaccgacagaaccctgaaggtgtggaacgccgagaccggcgagtgcatccacaccctgtacggccacaccagcaccgtgagatgcatgcacctgcacgagaagagagtggtgagcggcagcagagacgccaccctgagagtgtgggacatcgagaccggccagtgcctgcacgtgctgatgggccacgtggccgccgtgagatgcgtgcagtacgacggcagaagagtggtgagcggcgcctacgacttcatggtgaaggtgtgggaccccgagaccgagacctgcctgcacaccctgcagggccacaccaacagagtgtacagcctgcagttcgacggcatccacgtggtgagcggcagcctggacaccagcatcagagtgtgggacgtggagaccggcaactgcatccacaccctgaccggccaccagagcctgaccagcggcatggagctgaaggacaacatcctggtgagcggcaacgccgacagcaccgtgaagatctgggacatcaagaccggccagtgcctgcagaccctgcagggccccaacaagcaccagagcgccgtgacctgcctgcagttcaacaagaacttcgtgatcaccagcagcgacgacggcaccgtgaagctgtgggacctgaagaccggcgagttcatcagaaacctggtgaccctggagagcggcggcagcggcggcgtggtgtggagaatcagagccagcaacaccaagctggtgtgcgccgtgggcagcagaaacggcaccgaggagaccaagctgctggtgctggacttcgacgtggacatgaagtag

SEQ ID NO: 326248 - DNA, 2288 bp, Artificial Sequence
  derived and/or modified sequence
gatgcatcagaagctgctgaagagcgcgcattacatcgagctgggcagctaccagtactggccggtcctggtgccccgtggcatccgcctgtacacctacgagcagatccccgggtccctcaaggacaacccgtacatcaccgacggctaccgggcctacctgccgtccaggctgtgtatcaaaagtttgtttattttatctaatgagacagtaaacatctggagtcatttgctgggtttctttctcttcttcaccctgggaatatatgacatgacatctgtgttaccttcagcaagtgcgtccagagaagattttgtaatttgttctatttgtcttttctgcttccaggtctgtatgctttgctctgtgggctatcatcttttttcctgccatcggtcagaaaaaacatgtcgaagatggatggcattagattatgcaggaatttctattggaatactgggctgctatgtctcaggagtattttacgcattttattgtaataactactggcgtcaggtgtacttgatcacagtgcttgctatgatcctggcagtgttctttgcgcagattcatcccaattacctcacgcagcaatggcaaaggctccgttctatcatcttttgttctgtttcgggatatggagtgattcctactcttcactgggtttggctcaatggaggaattggtgctcctattgtacaggactttgcaccccgtgtaattgtgatgtatatgattgctcttcttgctttcctattctacatttccaaagtcccagagcggtactttccaggacaactaaactacctcggatcaagccaccaaatatggcatatccttgcagtagtgatgttatattggtggcatcagtcaacagtgtatgtcatgcagtacagacatagcaagccttgtcctgactatgtttcacatttgtgaattagaatcaggaacgaagattcagggaatgtctgtcacatcttatggcatcccacctggacagaatatccgatttgaagattgtgattgacttccgtaaaactgtacaactctccatttggcaggagttaatgccgagaatccatcagaagtatctactgtttagaaggaaatggagcagcaccaaatgggtctaattcgactggttgggactgttgggactgatgtggagtgatgctttgcaccacaagttctgtaaagggcacggcaccaaaatcatccattttcaatacatctgcactatggaatgacccatgtagtgaattttgtcttggccgccctggcaggacagtattgtgatcagcacggatgtcgctcaggccctgatgtggagggtgccatgacaggtctggagaatggaagggcttggcaccgaaggggtccaacaggctctcctcaggttgtaagacattccccctatctttcccatcagtcagtgcaacactaatgttctccttggagtctgagatggttaaaaattcattgctactttgagagtctcggcggcccacttttttgtgcctgcgagccctctctggagtgcgataggtaggcttcaaagtcttctttgtgctagttggcgtgccatgatgccgcttcccattacttttggacatatcctgctttgtgcgcctttggcgagaggacagtttctgtaagctgcgctgtttgactttttgctgctggctccccgttatttcatcaaagggcacaagcccaaaaaggtcctcattgctttcacttttacttgttgatgtgaggaagggctgaaatggagtggagccaaatacatctacacttttgggataaccagggatagtatgtgcctcaggccccactgcatggcattcttgtacattcaccttcttgctaaaaggcgcctttgtgaatacatcaaattcctcctgctccagtcctgcagcaggaaacctgtgttgagggaggttcttttcattcttttcttgctggggctgttgagcacgcactgcaaagaaggggacagcgccaaatacatcaaactcctgtttgggagtctccactgcaacatcagaggataattgggctgaggtgaggagtattgtattaagatcttgggttggtccactgccagatctgtctctgtagacagagctcatgtcactgtactttgctttagcctgctcataatcagaatcagagctatgtttctcctcttcttcctcatcttcagaatccatgaggagaggcctatgacccagattttctggttcagtatcatcatcattaaaatctccttgttccccctgaagaa

SEQ ID NO: 326249 - DNA, 3486 bp, Artificial Sequence
  derived and/or modified sequence
atgaagaaattctcgcggatgccgaagagcgagggcggctccggggggggggcagcgggcgggggggcagggggtgcaggggcaggcgccggctgtggctccggaggttcctccgtcggggtacgcgtgttcgcagtcggccggcaccaagtgacccttgaagagagcttagctgaagggggtttttccaccgtgtttcttgttcgcacgcacgggggcatccgctgtgcactcaaaagaatgtatgtaaataatatgccagacctaaacgtttgtaaacgcgagattaccattatgaaggaactctctggccataagaacatcgtcggatacctcgactgtgccgtgaattctatttcagacaatgtctgggaggtgctgatcctgatggagtactgtagggcagggcaggtggttaatcaaatgaacaaaaaactgcaaaccggatttactgagcctgaggtgctccagatcttctgcgacacctgcgaggccgttgcaaggcttcaccagtgcaagacaccaataatccacagggacctgaaggttgagaatatactgttaaacgatggtgggaattacgtgctctgcgacttcggcagcgcgacaaataaattcctaaatccccagaaagatggcgtgaacgtggtggaagaagaaataaagaaatatacaaccctgagttatcgggcgccagagatgataaacctgtatggtgggaaacctattactaccaaggccgacatttgggctttgggctgcctcctctacaaactctgcttctttaccctaccgtttggcgagagccaggtcgccatctgcgatggcaatttcactattcctgataactcccgctatagccgtaatatccattgcctgattcgattcatgcttgaaccagaccccgagcaccggccagatatttttcaagtgagctacttcgcatttaaattcgcaaaaaaagactgtccagtttcaaacataaataactcttccatcccctccgcccttcctgagcccatgactgcctccgaggccgccgcacgaaaaagccagatcaaagccagaattaccgataccattggccctactgaaacatccattgcaccacgacagagaccaaaggccaattcggcaactaccgcaacaccctctgtactcactatccagtctagcgctacaccagtcaaggtcctagcacctggggaatttggcaaccaccgccctaagggagccctgagacctggtaacggaccagagatcctattaggccagggccctccacaacagccccctcaacagcaccgtgttcttcagcagttgcagcaaggagactggagactgcagcaactgcatctacagcacaggcatccacaccagcagcaacaacagcagcaacagcagcagcaacaacagcagcagcaacagcagcagcagcagcagcagcagcagcaacagcaccaccaccaccatcaccaccatctgctgcaggatgcatacatgcagcaatatcaacatgcaacccaacagcagcaaatgctccaacagcagttccttatgcactccgtttatcagcctcaaccgtccgcctcacagtatccgactatgatgccgcagtatcagcaggccttcttccaacaacaaatgctcgcgcagcatcagccctctcaacagcaggcttcgccggagtacctgactagccctcaggagttctcccctgctctggtgtcctacaccagttccctgcccgctcaagtaggcaccattatggatagcagctattccgccaaccggtctgtggctgataaggaggcaattgccaatttcaccaatcagaaaaacatttctaaccccccagatatgtccgggtggaacccgtttggagaagataacttttccaagcttactgaagaagaactcctcgacagggaattcgacctgctgcggtctaaccggctggaggaacgagccagttccgacaaaaacgttgacagtctctctgccccccacaaccaccccccagaagatcctttcggctctgtgcctttcatctcacatagcggctctcccgagaagaaggccgagcattcgtccataaatcaggaaaatggcacagctaatcccattaaaaatggcaagacctccccagccagtaaggaccagagaacaggaaaaaaaaccagtgtccagggccaggtgcagaagggtaacgacgagagcgaatcagacttcgaatccgatccacctagtccaaagagcagcgaagaagaggaacaggatgatgaggaagtgctgcaaggagagcaaggcgattttaacgatgacgacaccgaaccagaaaacctgggccacagaccgttgttgatggacagcgaagatgaggaagaagaagagaaacactccagcgactctgattatgaacaagccaaagcaaagtactctgacatgagctcagtatatcgcgatcggagcgggtctggcccaacgcaggaccttaatactattctgcttaccagcgcccaactcagctctgatgttgcggtcgaaacgcccaagcaggaatttgacgtgttcggcgcggttccgttcttcgccgtgagggcccagcagccacagcaggaaaaaaacgaaaaaaacctgccacagcaccgttttcctgccgccggtctcgagcaggaagagttcgacgtattcactaaagcccctttcagtaaaaaagtgaatgttcaagagtgccacgccgtggggcctgaagctcatacaatccctgggtacccgaagagcgttgatgtgtttggttctaccccatttcagccgttcctgacaagcacatccaagagcgaaagtaatgaggacttattcggactggttcctttcgacgaaattacaggaagccagcagcaaaaggtgaagcagaggtcactgcagaagctttcatctagacagaggcggaccaagcaggatatgtccaaatcaaacggcaagcggcatcacggaacacctaccagtaccaaaaagacgctgaagcctacctatcgaacaccagagagagcaaggaggcacaaaaaagtggggcggcgcgactcccagtcttccaacgaatttctgacgatctctgactccaaggagaacatttcagtcgccctgactgatggaaaagatcgggggaacgttcttcagccagaagagtctttactagatccattcggagctaagcccttccatagccccgatctctcatggcaccccccacaccaggggctttccgacattagagctgatcataatactgtgctgcccggacgacctcgacaaaacagtcttcacgggtctttccacagcgcggacgtgttgaagatggacgatttcggagctgtgccattcacagagctggtcgtccagagcatcactccacaccagagccagcagagccagcctgtggaattggaccctttcggggctgcccctttcccctcaaaacagtag

SEQ ID NO: 326250 - DNA, 3486 bp, Artificial Sequence
  derived and/or modified sequence
atgaagaagttcagcaggatgcccaagtctgagggcggcagcggcggcggcgctgctgggggcggggccggcggggccggggccggggccggctgcggcagcggcggcagctctgtgggcgtgcgggtgtttgctgtgggccgccaccaggtgaccctggaggagagcctggccgagggcggcttcagcaccgtcttcctggtgaggacccatggaggcatccgctgtgccctgaagaggatgtatgtgaacaacatgccagacctgaatgtgtgcaagcgggagatcaccatcatgaaggagctgagcggccacaagaacatcgtgggctacctggactgtgctgtgaacagcatcagtgacaacgtgtgggaggtgctgatcctgatggagtactgcagagctggccaggtggtgaaccagatgaacaagaagctgcagacaggcttcacagagcctgaggtgctgcagatcttctgtgacacctgtgaggccgtggcccggctgcaccagtgcaagacccccatcatccaccgggacctgaaggtggagaacatcctgctgaatgatggcggcaactacgtgctgtgtgactttggaagtgccaccaacaagttcctgaacccccagaaggatggagtgaatgtggtggaggaggagatcaagaagtacaccaccctgagctaccgggcccctgagatgatcaacctgtatggaggcaagcccatcaccaccaaggctgacatctgggccctgggctgcctgctgtacaagctgtgcttcttcaccctgccctttggagagagccaggtggccatctgtgatggcaacttcaccatcccagacaacagccgctacagcaggaacatccactgcctgatccgcttcatgctggagccagaccctgagcacaggccagacatcttccaggtgtcctactttgccttcaagtttgccaagaaggactgccctgtgagcaacatcaacaacagcagcatccccagcgccctgcctgagcccatgacagccagcgaggccgccgccaggaagagccagatcaaggcccgcatcacagacaccatcggccccacagagaccagcatcgccccccggcagaggcccaaggccaacagcgccaccacagccaccccatctgtgctgaccatccagagcagcgccacccctgtgaaggtgctggcccctggagaatttggaaaccaccggcccaagggggccctgcggcctggaaatggacctgagatcctgctgggccagggccccccccagcagcccccccagcagcaccgggtgctgcagcagctgcagcagggcgactggaggctgcagcagctgcacctgcagcaccgccacccccaccagcagcagcagcagcagcagcagcagcagcagcagcagcagcagcagcagcagcagcagcagcagcagcagcagcagcagcaccaccaccaccaccaccaccacctgctgcaggatgcctacatgcagcagtaccagcacgccacccagcagcagcagatgctgcagcagcagttcctgatgcacagcgtgtaccagccccagcccagcgccagccagtaccccaccatgatgccccagtaccagcaggccttcttccagcagcagatgctggcccagcaccagcccagccagcagcaggccagccctgagtacctgaccagcccccaggagttctccccagccctggtgtcctacaccagcagcctgcctgcccaggtgggcaccatcatggacagcagctacagcgccaacagatctgtggccgacaaggaggccatcgccaacttcaccaaccagaagaacatcagcaaccccccagacatgagcggctggaacccctttggagaggacaacttcagcaagctgacagaggaggagctgctggaccgggagtttgacctgctgcggagcaaccggctggaggagcgggccagcagtgacaagaatgtggacagcctgagcgccccccacaaccaccccccagaggaccccttcggctctgtgcccttcatcagccacagcggcagccctgagaagaaggccgagcacagcagcatcaaccaggagaatggaacagccaaccccatcaagaatggcaagaccagccctgccagcaaggaccagaggacaggcaagaagacctctgtgcagggccaggtgcagaagggaaatgatgagagcgagagtgactttgaaagtgacccccccagccccaagagcagcgaggaggaggagcaggatgatgaggaggtgctgcagggcgagcagggcgacttcaatgatgatgacacagagcctgagaacctgggccaccggcccctgctgatggattctgaagatgaggaggaggaggagaagcacagcagtgacagcgactatgagcaggccaaggccaagtacagcgacatgagctctgtgtacagagacaggagcggcagcggccccacccaggacctgaacaccatcctgctgaccagcgcccagctgagcagtgatgtggccgtggagacccccaagcaggagtttgatgtgtttggagctgtgcccttctttgctgtgcgggcccagcagccccagcaggagaagaatgagaagaacctgccccagcaccgcttccctgctgctggcctggagcaggaggagtttgatgtgttcaccaaggcccccttcagcaagaaggtgaatgtgcaggagtgccacgctgtgggccctgaggcccacaccatccctggctaccccaagtctgtggatgtgtttggcagcacccccttccagcccttcctgaccagcaccagcaagtctgagagcaatgaagacctgtttggcctggtgccctttgatgagatcaccggcagccagcagcagaaggtgaagcagaggagcctgcagaagctgagcagccggcagaggaggaccaagcaggacatgagcaagagcaatggcaagaggcaccacggcacccccaccagcaccaagaagaccctgaagcccacctaccgcaccccagagcgggcccggcggcacaagaaggtgggccggcgggacagccagagcagcaatgagttcctgaccatcagtgacagcaaagaaaacatctctgtggccctgacagatggcaaggacagaggaaatgtgctgcagcctgaggagagcctgctggacccctttggagccaagcccttccacagcccagacctgtcctggcaccccccccaccagggcctgagtgacatccgggctgaccacaacacagtgctgcccggccggccccggcagaacagcctgcacggcagcttccacagcgcagatgtgctgaagatggatgactttggagctgtgcccttcacagagctggtggtgcagagcatcaccccccaccagagccagcagagccagcctgtggagctggacccctttggagctgcccccttccccagcaagcagtag

SEQ ID NO: 326251 - DNA, 3486 bp, Artificial Sequence
  derived and/or modified sequence
atgaagaagttcagccggatgcccaagagcgagggcggcagcggcggaggggccgctggaggaggggccggtggagcaggggcaggcgccggctgcggtagcggtggttcctctgtaggggtgcgagtctttgctgtgggccgccaccaagtcaccctagaggagtctctggctgaaggagggtttagtacagtgtttctggtaaggactcacggcggtattaggtgcgccttaaagcgcatgtacgttaataacatgccagaccttaacgtttgcaagcgggagatcacaatcatgaaggaactatccggtcacaaaaacatagttgggtatctggactgtgccgtcaattccatctctgataatgtctgggaagttcttatactcatggaatactgtcgggccggccaggtggtaaaccagatgaacaagaagttacagaccgggtttactgagcccgaggttctacagattttttgcgacacatgtgaggctgtggctcgcctacatcagtgcaaaactccaatcatccatcgagacctcaaggtggagaatatcctgctgaacgacggcggaaattacgtgctatgcgactttggatcagccacaaataaatttctcaatccacagaaggatggggtgaatgtagtggaggaggagatcaagaagtatacaaccctgtcttatcgtgcaccagagatgatcaacctgtatggtggcaagccaattacgacaaaggcggacatctgggcattgggctgcctgctttataagttgtgtttctttaccctgccttttggggaatctcaggttgcaatctgtgacggaaactttactattcccgacaacagtcgatacagcaggaacatccattgccttattaggttcatgcttgagccggaccccgaacatcgaccagacatctttcaggtgagctatttcgcttttaagtttgccaagaaagactgccccgtcagtaacataaacaattccagtatcccttccgccctgccggagccaatgacagccagcgaagccgcggctcggaagtcacagataaaggcgcgcataacggataccatcgggccaacagagacttcaattgcccccagacagcgacccaaggcaaatagtgctaccactgccacacccagcgttctgacaattcagtcaagcgctacacctgtaaaggtgctcgccccgggtgagttcggaaaccataggcctaaaggcgcactgcgccccggcaatggtccagagatactcctgggccagggacccccccagcagcctccacagcagcaccgcgtactgcaacagctgcaacagggagactggcggcttcaacagttgcacctgcagcataggcatccacatcagcaacaacagcaacagcagcagcagcaacagcaacaacagcaacaacagcagcagcaacagcagcaacagcagcagcaacatcatcatcaccaccaccaccacctgctgcaggacgcatatatgcagcagtatcagcatgcaactcagcagcagcagatgttgcagcagcagtttctgatgcactctgtgtatcagccacagccatctgcaagccagtaccccacaatgatgccgcaataccaacaagctttttttcagcaacaaatgctcgctcagcaccaacctagccaacagcaggcctctccagaatatttgacatccccacaagagtttagccctgccttggtgagctatacatcgtcgctgccagcacaagtcggcactatcatggactcttcttactcagctaacaggagcgtggccgacaaagaagcgatcgctaattttacaaatcagaaaaacatttccaatcctccggacatgtccggctggaacccgttcggcgaggataatttcagcaagcttacggaggaagagcttttagacagggagttcgacctactgagatctaatcgccttgaagagagagcgagctccgacaaaaacgttgacagtctgagtgctccacacaatcatcccccggaggacccattcggctcagtacctttcatctcccacagcgggtctccggaaaaaaaagcagagcactcatctatcaaccaggaaaacggcacggccaatccaattaagaacggcaaaacatcgcccgctagcaaagaccagcgaacagggaaaaagacttcggtccaaggacaggtccagaagggaaatgatgagtccgaatctgacttcgagagcgatcccccctcccccaaatcaagcgaagaagaagagcaggacgatgaggaagtgctccaaggggagcagggtgactttaatgacgacgataccgaacccgagaacctcggccatagacccctactcatggactctgaagacgaagaggaagaggagaagcattctagtgatagcgattacgagcaagccaaggcgaaatattctgacatgtcatccgtctacagggataggagcgggtctggacccacccaagatctgaacaccatcctcctgacctcagcccagttgagcagcgacgtcgcagtggaaactcccaagcaggagtttgacgttttcggtgcagtcccttttttcgccgttagggcccagcagccacagcaggagaagaatgagaaaaacctcccacagcaccgattccctgccgccgggctggagcaggaggagtttgacgtattcaccaaggcccccttttcaaagaaagtgaacgtccaagagtgccacgcggttgggcccgaggcccacactattcccgggtatcccaagagcgtggatgtgttcggaagtacaccctttcagcctttcctgacttcaacaagcaagtccgaatctaatgaagatcttttcggactggttccattcgacgagatcaccggtagccagcagcagaaggtcaaacagaggtctctgcagaaactgtcttcccgacagcggagaaccaagcaggacatgagcaagagcaatggaaaacggcatcatgggacgccaacatccaccaagaagactttgaaacctacttaccggacacccgagagggctagacgccataagaaggtgggacgcagggactcccagtcctcaaatgagtttttgaccattagcgactccaaagagaacatttccgtggcccttacagacggaaaggaccggggcaacgtgctacagcccgaagaatcattgttggacccatttggcgccaaaccattccactcacctgatctgtcttggcatccgccccatcaggggctgtctgacattagggccgatcataataccgtactgcccggacgtccccgacagaattctctgcatggctccttccactccgctgacgtgctgaaaatggacgactttggagccgtgccctttacggagctggttgttcagtcaattacaccacaccaatcacagcagtcacaaccggtggaattagacccattcggggctgcaccattccccagtaagcagtag

SEQ ID NO: 326252 - DNA, 3486 bp, Artificial Sequence
  derived and/or modified sequence
atgaaaaaattcagcagaatgcccaaatcggaggggggttcagggggaggagctgccggtgggggagctggcggtgccggagcaggcgctggctgcgggagcggcggaagcagtgtcggcgtgcgtgttttcgccgtgggccgacatcaggtgacccttgaagagtccctggccgagggcggattttctaccgttttcctggtacggacacacggcggtattcgctgtgccctaaagcgtatgtacgtcaataacatgcctgatctgaacgtgtgtaaacgggaaattaccatcatgaaggaacttagtgggcacaagaacattgtcgggtaccttgactgcgccgtaaacagtatttccgataatgtctgggaagtgctgatattaatggaatattgtagagcagggcaggtagttaaccagatgaataagaagctccaaactggattcaccgaaccagaagttctgcagatattctgcgacacgtgcgaggccgtggctcgcctgcaccagtgcaagacgccgataatccaccgggatcttaaggtggagaacatcctgctgaatgatggaggaaactacgtgctatgcgacttcgggtctgccactaacaagtttcttaatccccagaaggacggcgtcaacgtggtggaagaagagattaagaaatacactactctttcataccgcgctccagaaatgatcaatctctacggaggaaagcctatcactacgaaggctgacatatgggctctcggttgtctcctatataagctttgtttctttacactgccctttggagagagtcaagttgcaatttgcgatggaaattttacaatcccggataattcaagatatagccgcaacatccactgcctgattcgttttatgttagaacctgacccagaacacaggcccgacatttttcaagtttcttactttgcttttaagtttgccaaaaaggactgccctgtgtcaaatatcaacaattcctccatccccagtgcactgcctgagcccatgactgccagcgaggccgcagcaaggaaaagccaaattaaggccagaattactgacaccatcggcccaacagaaacttccatcgcccctcgccaaaggccgaaggctaactctgctacaacggctacccccagtgtgctcaccatccaatcatccgccacccccgtcaaggtcctcgcccctggtgaattcggcaatcaccgacctaagggagccctgcggcctggaaacggccctgagatcctgctggggcaagggccaccccagcaaccacctcaacagcatcgagtgctgcagcagttgcagcagggggattggcggcttcaacaattgcaccttcagcacagacacccgcaccagcagcaacagcagcagcagcaacagcagcagcagcagcagcagcagcaacaacagcagcagcaacagcaacaacagcaacatcaccatcatcaccaccaccaccttcttcaggacgcttacatgcagcagtatcagcatgctacccagcaacaacagatgctccagcagcaattccttatgcactccgtgtaccaacctcagccatcagccagtcagtatcctacaatgatgccacagtaccaacaggctttttttcaacagcagatgttggcacaacaccagcctagccaacaacaggcctcccccgaatatttgaccagtccccaggagttctccccagcactcgtgagctatactagttccctgccagctcaggtgggcacgattatggattcgtcctacagcgccaaccgtagcgttgccgacaaggaggcgatcgcaaactttactaatcagaagaacatttcaaatccacctgacatgagcgggtggaatccgttcggagaggacaatttttcaaaactgaccgaggaagagctgttggatagagaatttgatttactgagatctaatcgtttagaggaacgggcatcgtccgacaagaacgtggattctctatcagcaccccacaatcacccacccgaagacccattcggcagcgttcccttcattagccactctggttctccagagaagaaggccgagcattcttctatcaatcaggagaacgggacggcaaatcccataaagaacgggaagacatctcccgctagcaaagatcagaggacagggaaaaagacatccgttcagggacaggttcagaagggcaacgacgaatcagagtcagatttcgaaagtgatccaccaagcccgaagagctccgaagaggaggaacaggacgacgaggaagtgctgcaaggcgagcaaggcgatttcaacgatgatgatacagaaccagagaacttgggtcaccggccattgcttatggatagtgaagacgaggaggaggaggagaagcattcaagcgacagcgactacgagcaggccaaagccaagtactctgacatgtcttctgtgtacagagacagaagcgggtccgggcctacccaggatctcaacacaatccttctgactagcgcccaactcagcagtgacgtggccgttgaaaccccaaagcaggagttcgatgtgtttggagccgtgccattcttcgctgtgagagcgcagcaaccccagcaggagaagaatgagaaaaatctcccccagcaccgtttcccagccgcagggctggaacaggaagaatttgatgtgttcactaaggctccctttagcaaaaaggtgaatgttcaggagtgccacgcagtgggccctgaggcccacacaatacccggttaccccaaatcggttgacgtcttcggctccacccccttccagcctttccttacaagcactagcaagagtgaaagtaacgaggatcttttcggcttggtgccttttgatgagatcaccggaagccaacagcagaaagtgaaacagcggtctctgcagaagctgtcctccaggcaacgcaggactaaacaggatatgtcaaaatctaatgggaagagacatcacgggacacccacctcaactaagaaaactctgaagcccacttatcgcactccagaaagagctcgccgacataagaaggttggcaggcgcgactcacagagttcaaacgaatttctgactatcagcgactcaaaagagaacatctcagtggcccttacagatggtaaggatagaggcaacgtgctacaacccgaagaaagcctgctcgacccgttcggggcaaagccattccattcccccgacctgagctggcacccccctcaccagggactctcagacattagggccgatcacaacaccgttctgcccggtaggcctagacaaaattctctgcacgggagctttcactcagcggatgtgttgaagatggacgatttcggggctgtgccctttacagaacttgtggtccaatctattacccctcaccagtctcagcaatcgcaaccagtggaattggatccatttggcgctgcgcctttcccatctaagcaatag

SEQ ID NO: 326253 - DNA, 3804 bp, Artificial Sequence
  derived and/or modified sequence
cggggcccaggctgtgcgcttggggagcgcggaatgtgaggcttggcgggccgcagcacgctcggacgggccaggggcggcgacccctcgcggacgcccggctgcgcgccgggccggggacttgcccttgcacgctccctgcgccctccagctcgccggcgggaccatgaagaagttctctcggatgcccaagtcggagggcggcagcggcggcggagcggcgggtggcggggctggcggggccggggccggggccggctgcggctccggcggctcgtccgtgggggtccgggtgttcgcggtcggccgccaccaggtcaccctggaagagtcgctggccgaaggtggattctccacagttttcctcgtgcgtactcacggtggaatccgatgtgcattgaagcgaatgtatgtcaataacatgccagacctcaatgtttgtaaaagggaaattacaattatgaaagagctatctggtcacaaaaatattgtgggctatttggactgtgctgttaattcaattagtgataatgtatgggaagtccttatcttaatggaatattgtcgagctggacaggtagtgaatcaaatgaataagaagctacagacgggttttacagaaccagaagtgttacagatattctgtgatacctgtgaagctgttgcaaggttgcatcagtgtaagactccaataattcaccgggatctgaaggtagaaaatattttgttgaatgatggtgggaactatgtactttgtgactttggcagtgccactaataaatttcttaatcctcaaaaagatggagttaatgtagtagaagaagaaattaaaaagtatacaactctgtcatacagagcccctgaaatgatcaacctttatggagggaaacccatcaccaccaaggctgatatctgggcactgggatgtctactctataaactttgtttcttcactcttccttttggtgagagtcaggttgctatctgtgatggcaacttcaccatcccagacaattctcgttactcccgtaacatacattgcttaataaggttcatgcttgaaccagatccggaacatagacctgatatatttcaagtgtcatattttgcatttaaatttgccaaaaaggattgtccagtctccaacatcaataattcttctattccttcagctcttcctgaaccgatgactgctagtgaagcagctgctaggaaaagccaaataaaagccagaataacagataccattggaccaacagaaacctcaattgcaccaagacaaagaccaaaggccaactctgctactactgccactcccagtgtgctgaccattcaaagttcagcaacacctgttaaagtccttgctcctggtgaattcggtaaccatagaccaaaaggggcactaagacctggaaatggccctgaaattttattgggtcagggacctcctcagcagccgccacagcagcatagagtactccagcaactacagcagggagattggagattacagcaactccatttacagcatcgtcatcctcaccagcagcagcagcagcagcagcagcaacagcaacagcagcagcagcaacagcaacagcagcagcagcagcagcagcagcagcaccaccaccaccaccaccaccacctacttcaagatgcttatatgcagcagtatcaacatgcaacacagcagcaacagatgcttcaacaacaatttttaatgcattcggtatatcaaccacaaccttctgcatcacagtatcctacaatgatgccgcagtatcagcaggctttctttcaacagcagatgctagctcaacatcagccgtctcaacaacaggcatcacctgaatatcttacctcccctcaagagttctcaccagccttagtttcctacacttcatcacttccagctcaggttggaaccataatggactcctcctatagtgccaataggtcagttgctgataaagaggccattgcaaatttcacaaatcagaagaacatcagcaatccacctgatatgtcagggtggaatccttttggagaggataatttctctaagttaacagaagaggaactattggacagagaatttgaccttctaagatcaaataggctcgaggagagagcatcctcagataagaatgtagactcactttctgctccacataaccatcctccagaagatccttttggttctgttcctttcatttctcattcaggttctcctgaaaagaaagctgaacattcatctataaatcaagaaaatggcactgcaaaccctatcaagaacggtaaaacaagtccagcatctaaagatcagcggactggaaagaaaacctcagtacagggtcaagtgcaaaaggggaatgatgaatctgaaagtgattttgaatcagatcccccttctcctaagagcagtgaagaggaagagcaagatgatgaagaagttcttcagggggaacaaggagattttaatgatgatgatactgaaccagaaaatctgggtcataggcctctcctcatggattctgaagatgaggaagaagaggagaaacatagctctgattctgattatgagcaggctaaagcaaagtacagtgacatgagctctgtctacagagacagatctggcagtggaccaacccaagatcttaatacaatactcctcacctcagcccaattatcctctgatgttgcagtggagactcccaaacaggagtttgatgtatttggcgctgtccccttctttgcagtgcgtgctcaacagccccagcaagaaaagaatgaaaagaacctccctcaacacaggtttcctgctgcaggactggagcaggaggaatttgatgtattcacaaaggcgccttttagcaagaaggtgaatgtacaagaatgccatgcagtggggcctgaggcacatactatccctggttatcccaaaagtgtagatgtatttggctccactccatttcagcccttcctcacatcaacaagtaaaagtgaaagcaatgaggacctttttgggcttgtgccctttgatgaaataacggggagccagcagcaaaaagtcaaacagcgcagcttacagaaactgtcctctcgccaaaggcgcacaaagcaggatatgtccaaaagtaatgggaagcggcatcatggcacgccaactagcacaaagaagactttgaagcctacctatcgcactccagagagggctcgcaggcacaaaaaagtgggccgccgagactctcaaagtagcaatgaatttttaaccatctcagactccaaggagaacattagtgttgcactgactgatgggaaagatagggggaatgtcttacaacctgaggagagcctgttggaccccttcggtgccaagcccttccattctccagacctgtcatggcaccctccacatcagggcctgagcgacatccgtgctgatcacaatactgtcctgccagggcggccaagacaaaattcactacatgggtcattccatagtgcagatgtattgaaaatggatgattttggtgccgtgccctttacagaacttgtggtgcaaagcatcactccacatcagtcccaacagtcccaaccagtcgaattagacccatttggtgctgctccatttccttctaaacagtagatacttctgatggattctcggcattaactcctgtttcaaaaaagtgtgaacagttttatgaatttgaaagaaaatttggtagctctttatagcattcattcttaaagatcagtcagaataggtgatttctaaataaaccaaatagaagaatg

SEQ ID NO: 326254 - DNA, 3486 bp, Artificial Sequence
  derived and/or modified sequence
atgaagaagttcagcagaatgcccaagagcgagggcggcagcggcggcggcgccgccggcggcggcgccggcggcgccggcgccggcgccggctgcggcagcggcggcagcagcgtgggcgtgagagtgttcgccgtgggcagacaccaggtgaccctggaggagagcctggccgagggcggcttcagcaccgtgttcctggtgagaacccacggcggcatcagatgcgccctgaagagaatgtacgtgaacaacatgcccgacctgaacgtgtgcaagagagagatcaccatcatgaaggagctgagcggccacaagaacatcgtgggctacctggactgcgccgtgaacagcatcagcgacaacgtgtgggaggtgctgatcctgatggagtactgcagagccggccaggtggtgaaccagatgaacaagaagctgcagaccggcttcaccgagcccgaggtgctgcagatcttctgcgacacctgcgaggccgtggccagactgcaccagtgcaagacccccatcatccacagagacctgaaggtggagaacatcctgctgaacgacggcggcaactacgtgctgtgcgacttcggcagcgccaccaacaagttcctgaacccccagaaggacggcgtgaacgtggtggaggaggagatcaagaagtacaccaccctgagctacagagcccccgagatgatcaacctgtacggcggcaagcccatcaccaccaaggccgacatctgggccctgggctgcctgctgtacaagctgtgcttcttcaccctgcccttcggcgagagccaggtggccatctgcgacggcaacttcaccatccccgacaacagcagatacagcagaaacatccactgcctgatcagattcatgctggagcccgaccccgagcacagacccgacatcttccaggtgagctacttcgccttcaagttcgccaagaaggactgccccgtgagcaacatcaacaacagcagcatccccagcgccctgcccgagcccatgaccgccagcgaggccgccgccagaaagagccagatcaaggccagaatcaccgacaccatcggccccaccgagaccagcatcgcccccagacagagacccaaggccaacagcgccaccaccgccacccccagcgtgctgaccatccagagcagcgccacccccgtgaaggtgctggcccccggcgagttcggcaaccacagacccaagggcgccctgagacccggcaacggccccgagatcctgctgggccagggccccccccagcagcccccccagcagcacagagtgctgcagcagctgcagcagggcgactggagactgcagcagctgcacctgcagcacagacacccccaccagcagcagcagcagcagcagcagcagcagcagcagcagcagcagcagcagcagcagcagcagcagcagcagcagcagcagcaccaccaccaccaccaccaccacctgctgcaggacgcctacatgcagcagtaccagcacgccacccagcagcagcagatgctgcagcagcagttcctgatgcacagcgtgtaccagccccagcccagcgccagccagtaccccaccatgatgccccagtaccagcaggccttcttccagcagcagatgctggcccagcaccagcccagccagcagcaggccagccccgagtacctgaccagcccccaggagttcagccccgccctggtgagctacaccagcagcctgcccgcccaggtgggcaccatcatggacagcagctacagcgccaacagaagcgtggccgacaaggaggccatcgccaacttcaccaaccagaagaacatcagcaacccccccgacatgagcggctggaaccccttcggcgaggacaacttcagcaagctgaccgaggaggagctgctggacagagagttcgacctgctgagaagcaacagactggaggagagagccagcagcgacaagaacgtggacagcctgagcgccccccacaaccacccccccgaggaccccttcggcagcgtgcccttcatcagccacagcggcagccccgagaagaaggccgagcacagcagcatcaaccaggagaacggcaccgccaaccccatcaagaacggcaagaccagccccgccagcaaggaccagagaaccggcaagaagaccagcgtgcagggccaggtgcagaagggcaacgacgagagcgagagcgacttcgagagcgacccccccagccccaagagcagcgaggaggaggagcaggacgacgaggaggtgctgcagggcgagcagggcgacttcaacgacgacgacaccgagcccgagaacctgggccacagacccctgctgatggacagcgaggacgaggaggaggaggagaagcacagcagcgacagcgactacgagcaggccaaggccaagtacagcgacatgagcagcgtgtacagagacagaagcggcagcggccccacccaggacctgaacaccatcctgctgaccagcgcccagctgagcagcgacgtggccgtggagacccccaagcaggagttcgacgtgttcggcgccgtgcccttcttcgccgtgagagcccagcagccccagcaggagaagaacgagaagaacctgccccagcacagattccccgccgccggcctggagcaggaggagttcgacgtgttcaccaaggcccccttcagcaagaaggtgaacgtgcaggagtgccacgccgtgggccccgaggcccacaccatccccggctaccccaagagcgtggacgtgttcggcagcacccccttccagcccttcctgaccagcaccagcaagagcgagagcaacgaggacctgttcggcctggtgcccttcgacgagatcaccggcagccagcagcagaaggtgaagcagagaagcctgcagaagctgagcagcagacagagaagaaccaagcaggacatgagcaagagcaacggcaagagacaccacggcacccccaccagcaccaagaagaccctgaagcccacctacagaacccccgagagagccagaagacacaagaaggtgggcagaagagacagccagagcagcaacgagttcctgaccatcagcgacagcaaggagaacatcagcgtggccctgaccgacggcaaggacagaggcaacgtgctgcagcccgaggagagcctgctggaccccttcggcgccaagcccttccacagccccgacctgagctggcaccccccccaccagggcctgagcgacatcagagccgaccacaacaccgtgctgcccggcagacccagacagaacagcctgcacggcagcttccacagcgccgacgtgctgaagatggacgacttcggcgccgtgcccttcaccgagctggtggtgcagagcatcaccccccaccagagccagcagagccagcccgtggagctggaccccttcggcgccgcccccttccccagcaagcagtag

SEQ ID NO: 326255 - DNA, 885 bp, Artificial Sequence
  derived and/or modified sequence
atgatccgctgtcctttcctcgcactgagcgccaccatcagcaaccctgaacatttgacggaatggctccagtccgtcaaatggtactggaaacaagaggacaaaattatcgagaacaacacagcctctaaaagacacgtgggaaggcaggccggctttcccaaggactatcttcaggtgaagcagtcttacaaggtccgcctggtgctgtatggcgagagatacaacgatctggagaagcacgtttgttctatcaagcacggcgacattcattttgatcacttccatccctgtgccgccctgacaactgaccatatagaaagatacggtttccctcctgacctaacactcagcccacgcgaatctatccaactgtatgacgctatgttccagatatggaaaagttggccgcgagctcaagaactgtgtccggagaactttatccacttcaataataaattagtgattaagaaaatggacgccaggaagtacgaggaatcactaaaggcagagctcacctcctggatcaagaatggcaacgtggagcaagccaggatggtgcttcagaacctgtcacccgaagcagacctttcgccagagaacatgattacaatgtttcccttgcttgtggagaaactcaggaagatggagaagctgcctgcactatttttcctgtttaagctgggagcagtggaaaatgctgcggagtctgtgagtacgtttctgaagaagaagcaggagacaaagaggccacccaaagctgacaaagaggcccatgtcatggccaacaagttgaggaaggttaagaaatccattgaaaagcagaaaatcattgacgagaagtcgcaaaagaaccaaaaatgtggttctaagcccaacacatag

SEQ ID NO: 326256 - DNA, 885 bp, Artificial Sequence
  derived and/or modified sequence
atgatccgctgccccttcctggccctgagcgccaccatcagcaaccctgagcacctgacagagtggctgcagagcgtgaagtggtactggaagcaggaggacaagatcatcgagaacaacacagccagcaagagacatgtgggccggcaggccggcttccccaaggactacctgcaggtgaagcagagctacaaggtgcggctggtgctgtatggagagcgctacaatgacctggagaagcacgtgtgcagcatcaagcatggagacatccactttgaccacttccacccctgtgccgccctgaccacagaccacatcgagagatatggcttccccccagacctgaccctgagcccccgggagagcatccagctgtatgatgccatgttccagatctggaagtcctggccccgggcccaggagctgtgcccagagaacttcatccacttcaacaacaagctggtgatcaagaagatggatgccaggaaatatgaggagagcctgaaggccgagctgacctcctggatcaagaatggaaatgtggagcaggccaggatggtgctgcagaacctgagccctgaggccgacctgagccctgagaacatgatcaccatgttccccctgctggtggagaagctgaggaagatggagaagctgcctgccctcttcttcctgttcaagctgggcgctgtggagaatgctgctgagagcgtgtccaccttcctgaagaagaagcaggagaccaagaggcctcccaaggctgacaaggaggcccacgtgatggccaacaagctgaggaaggtgaagaagagcattgagaagcagaagatcattgatgagaagagccagaagaaccagaagtgtggcagcaagcccaacacctag

SEQ ID NO: 326257 - DNA, 885 bp, Artificial Sequence
  derived and/or modified sequence
atgatccggtgccccttcctggccctgagcgccaccatcagcaacccagaacacctcactgaatggctgcaatcagtcaaatggtattggaaacaggaggacaaaattatcgagaataacacagcaagtaaaaggcacgtgggtaggcaagctgggttccccaaagattatttacaagttaaacagagctacaaggtgagattggttctgtacggggagaggtacaacgatctggaaaagcatgtgtgttctatcaagcacggtgacatccatttcgaccacttccatccctgtgcggcccttacaactgaccatatcgaacgctatgggttcccccctgatttgacacttagcccccgggagagcatacagctatatgacgccatgtttcagatctggaaaagttggccgcgagcccaagagctctgtcctgaaaactttattcacttcaataataaactggtgatcaagaagatggatgccaggaagtatgaggagtcacttaaggcagagctgaccagttggattaagaacggcaacgtggagcaagcaagaatggtgctccagaacctgtcacctgaggccgaccttagtcccgagaacatgatcacaatgtttccccttctggttgaaaagctgagaaagatggaaaaactacccgccctgttttttctcttcaaactcggggctgtggagaacgccgcagagagcgtgtcaacctttttgaagaaaaaacaggagaccaagcgtcctcccaaggccgataaggaggcacatgtcatggccaacaagctgcgcaaggtcaagaaaagcattgagaaacagaaaataattgacgagaaaagtcagaaaaatcaaaaatgtggctcaaaacctaatacgtag

SEQ ID NO: 326258 - DNA, 885 bp, Artificial Sequence
  derived and/or modified sequence
atgattcggtgcccatttcttgctttgtcagctactatctctaatcccgagcatcttacagaatggttgcaaagcgttaaatggtactggaaacaggaggataagatcatcgaaaacaacactgcgtctaaaagacatgtgggtagacaggctggatttccgaaagattatctacaagtcaaacaatcatacaaggttcggctcgtgctttatggagaacgctataacgacctcgagaaacacgtatgtagtattaagcacggcgacattcacttcgatcacttccacccatgcgctgccctcaccacggaccacattgaacgttacggattccctccggacttaacactgtctcctagagaatcaatacaattgtatgatgctatgtttcagatttggaaaagctggcctcgcgctcaagaattgtgccccgagaattttattcatttcaataataagctggtgataaagaagatggatgctcgaaaatatgaggagtccctcaaggccgaactgactagctggattaagaatggtaacgtcgagcaggcaagaatggtgctgcagaacctttctcccgaggctgacctcagcccagaaaatatgatcacaatgtttcccttgctggtagagaagctgcgaaagatggaaaaactgcctgctctatttttcttattcaaactcggggctgttgaaaatgcagcggagtctgttagcacctttttgaagaaaaagcaggaaaccaagagaccacctaaggccgacaaggaggcacacgtcatggccaacaagttaagaaaagtgaagaagtccattgagaagcagaaaatcatcgatgagaagtcccagaaaaaccagaaatgtggaagcaagcccaacacctag

SEQ ID NO: 326259 - DNA, 885 bp, Artificial Sequence
  derived and/or modified sequence
atgatcagatgccccttcctggccctgagcgccaccatcagcaaccccgagcacctgaccgagtggctgcagagcgtgaagtggtactggaagcaggaggacaagatcatcgagaacaacaccgccagcaagagacacgtgggcagacaggccggcttccccaaggactacctgcaggtgaagcagagctacaaggtgagactggtgctgtacggcgagagatacaacgacctggagaagcacgtgtgcagcatcaagcacggcgacatccacttcgaccacttccacccctgcgccgccctgaccaccgaccacatcgagagatacggcttcccccccgacctgaccctgagccccagagagagcatccagctgtacgacgccatgttccagatctggaagagctggcccagagcccaggagctgtgccccgagaacttcatccacttcaacaacaagctggtgatcaagaagatggacgccagaaagtacgaggagagcctgaaggccgagctgaccagctggatcaagaacggcaacgtggagcaggccagaatggtgctgcagaacctgagccccgaggccgacctgagccccgagaacatgatcaccatgttccccctgctggtggagaagctgagaaagatggagaagctgcccgccctgttcttcctgttcaagctgggcgccgtggagaacgccgccgagagcgtgagcaccttcctgaagaagaagcaggagaccaagagaccccccaaggccgacaaggaggcccacgtgatggccaacaagctgagaaaggtgaagaagagcatcgagaagcagaagatcatcgacgagaagagccagaagaaccagaagtgcggcagcaagcccaacacctag

SEQ ID NO: 326260 - DNA, 363 bp, Artificial Sequence
  derived and/or modified sequence
atggaacgcaacgtgctcactacttttagtcaggagatgtcccaactgatcctgaacgaaatgccaaaagctgagtatagttcactgtttaacgattttgtcgagtctgagttcttcttaatcgacggcgacagcctgctgattacgtgtatttgtgaaatttcatttaaaccaggccagaacctgcacttcttttacttggtcgaacgctatttagtcgatctcataagtaaagggggacagtttaccatcgtgttctttaaggacgctgagtacgcctactttaatttccccgagctcctatctctccgcaccgcactgatcctgcatctccaaaagaatactaccatcgatgtgagatag

SEQ ID NO: 326261 - DNA, 363 bp, Artificial Sequence
  derived and/or modified sequence
atggagagaaatgtgctgaccaccttcagccaggagatgagccagctgatcctgaatgagatgcccaaggccgagtacagcagcctcttcaatgactttgtggagagcgagttcttcctgattgatggagacagcctgctgatcacctgcatctgtgagatctccttcaagccaggccagaacctgcacttcttctacctggtggagcgctacctggtggacctgatcagcaagggcggccagttcaccatcgtgttcttcaaggatgctgaatatgcctacttcaacttccctgagctgctgagcctgaggacagccctgatcctgcacctgcagaagaacaccaccattgatgtgaggtag

SEQ ID NO: 326262 - DNA, 363 bp, Artificial Sequence
  derived and/or modified sequence
atggagcggaacgtgctgaccaccttcagccaggagatgagccagttaattcttaatgaaatgcctaaagctgagtattcaagtctgtttaatgatttcgtggaaagcgagttcttcctcatcgacggtgattccctgttaatcacttgcatctgtgagatatcttttaaaccaggacagaacctgcacttcttttatctcgtcgaacgttacctagtggacctgataagcaaggggggccagttcaccatcgtgttttttaaggacgcggagtacgcctactttaattttcccgaactgctctctttgcggacggccttaatcctccacctacagaagaataccactatcgatgtgcgctag

SEQ ID NO: 326263 - DNA, 363 bp, Artificial Sequence
  derived and/or modified sequence
atggaacgcaatgtgctgactacattcagccaggaaatgagccagctgattctcaacgaaatgcctaaagcggagtacagtagcttgtttaacgacttcgtggaaagcgaattcttcctcattgacggtgactccctgttgatcacttgcatctgtgagataagttttaagcccggacagaatctccactttttttacctggtggaaaggtacttggtcgatctgatctccaaggggggacagttcaccatcgtgtttttcaaagatgccgaatacgcttatttcaactttcccgaactgctttcgctgcgtaccgcactgatcctgcatttacaaaagaacacgaccatcgacgtgagatag

SEQ ID NO: 326264 - DNA, 363 bp, Artificial Sequence
  derived and/or modified sequence
atggagagaaacgtgctgaccaccttcagccaggagatgagccagctgatcctgaacgagatgcccaaggccgagtacagcagcctgttcaacgacttcgtggagagcgagttcttcctgatcgacggcgacagcctgctgatcacctgcatctgcgagatcagcttcaagcccggccagaacctgcacttcttctacctggtggagagatacctggtggacctgatcagcaagggcggccagttcaccatcgtgttcttcaaggacgccgagtacgcctacttcaacttccccgagctgctgagcctgagaaccgccctgatcctgcacctgcagaagaacaccaccatcgacgtgagatag

SEQ ID NO: 326265 - DNA, 534 bp, Artificial Sequence
  derived and/or modified sequence
aaaccgaaactcccgccggatgcataaaagactggctgcggtggctcagagcgccgagtcctaggccaggactgccattttcattaagaactgccacttagaggtaccaaaataaagggtatttgctacctttaatacttgccagttcaggttggaggcacaggcagcagcaagaatggaaagaaatgttcttacaacattttcacaggaaatgtcccagttaattttgaatgaaatgccaaaagctgaatattccagtttattcaatgattttgttgaatctgaattttttttgattgatggggattcattacttatcacatgtatctgtgagatatcatttaagcctgggcagaacctccatttcttctatctggttgaacgctatcttgtggatcttattagcaaaggaggacaattcaccatagttttcttcaaggatgccgagtatgcgtatttcaacttccctgaacttctttctttgagaactgctttaattcttcatcttcagaagaataccaccattgatgttcg

SEQ ID NO: 326266 - protein, 51 aa, Artificial Sequence
  derived and/or modified sequence
MSLHFLYYCSEPTLDVKIAFCQGFDKQVDVSYIAKHYNMSKSKVDNQFYSV

SEQ ID NO: 326267 - protein, 91 aa, Artificial Sequence
  derived and/or modified sequence
MSLHFLYYCSEPTLDVKIAFCQGFDKQVDVSYIAKHYNMSKSKVDNQFYSVEVGDSTFTVLKRYQNLKPIGSGAQGIVCAAYDAVLDRNVA

SEQ ID NO: 326268 - protein, 121 aa, Artificial Sequence
  derived and/or modified sequence
MSLHFLYYCSEPTLDVKIAFCQGFDKQVDVSYIAKHYNMSKSKVDNQFYSVEVGDSTFTVLKRYQNLKPIGSGAQGIVCAAYDAVLDRNVAIKKLSRPFQNQTHAKRAYRELVLMKCVNHK

SEQ ID NO: 326269 - protein, 117 aa, Artificial Sequence
  derived and/or modified sequence
MSLHFLYYCSEPTLDVKIAFCQGFDKQVDVSYIAKHYNMSKSKVDNQFYSVEVGDSTFTVLKRYQNLKPIGSGAQGIVCAAYDAVLDRNVAIKKLSRPFQNQTHAKRAYRELVLMKC

SEQ ID NO: 326270 - protein, 141 aa, Artificial Sequence
  derived and/or modified sequence
MSLHFLYYCSEPTLDVKIAFCQGFDKQVDVSYIAKHYNMSKSKVDNQFYSVEVGDSTFTVLKRYQNLKPIGSGAQGIVCAAYDAVLDRNVAIKKLSRPFQNQTHAKRAYRELVLMKCVNHKNIISLLNVFTPQKTLEEFQD

SEQ ID NO: 326271 - protein, 48 aa, Artificial Sequence
  derived and/or modified sequence
MSLHFLYYCSEPTLDVKIAFCQGFDKQVDVSYIAKHYNMSKSKVDNQF

SEQ ID NO: 326272 - protein, 63 aa, Artificial Sequence
  derived and/or modified sequence
GSSFCDSKCKLRCSKAGLADRCLKYCGICCEECKCVPSGTYGNKHECPCYRDKKNSKGKSKCP

SEQ ID NO: 326273 - DNA, 549 bp, Artificial Sequence
  derived and/or modified sequence
atgccccagttcaccgaggccgtgagccccagcgtgctgccccccagcgccctgcccctggacctgctgaacaacgccatcaccgccttcagcaccctggaggacctgatcagatacctggagcccgagagatggcagctggacctggaggacctgtacagacccacctggcagctgctgggcaaggccttcgtgttcggcagaaagagcagagtggtggacctgaacctgctgaccgaggaggtgagactgtacagctgcacccccagaaacttcagcgtgagcatcagagaggagctgaagagaaccgacaccatcttctggcccggctgcctgctggtgaagagatgcggcggcaactgcgcctgctgcctgcacaactgcaacgagtgccagtgcgtgcccagcaaggtgaccaagaagtaccacgaggtgctgcagctgagacccaagaccggcgtgagaggcctgcacaagagcctgaccgacgtggccctggagcaccacgaggagtgcgactgcgtgtgcagaggcagcaccggcggctag

SEQ ID NO: 326274 - DNA, 573 bp, Artificial Sequence
  derived and/or modified sequence
atgatgcagtacacctggctgctgaccaagcagttcaccgaggccgtgagccccagcgtgctgccccccagcgccctgcccctggacctgctgaacaacgccatcaccgccttcagcaccctggaggacctgatcagatacctggagcccgagagatggcagctggacctggaggacctgtacagacccacctggcagctgctgggcaaggccttcgtgttcggcagaaagagcagagtggtggacctgaacctgctgaccgaggaggtgagactgtacagctgcacccccagaaacttcagcgtgagcatcagagaggagctgaagagaaccgacaccatcttctggcccggctgcctgctggtgaagagatgcggcggcaactgcgcctgctgcctgcacaactgcaacgagtgccagtgcgtgcccagcaaggtgaccaagaagtaccacgaggtgctgcagctgagacccaagaccggcgtgagaggcctgcacaagagcctgaccgacgtggccctggagcaccacgaggagtgcgactgcgtgtgcagaggcagcaccggcggctag

SEQ ID NO: 326275 - DNA, 549 bp, Artificial Sequence
  derived and/or modified sequence
atgcctcaattcaccgaggcagttagcccctctgtgctgcctcctagtgcgctgcctttagatttgctaaataatgccatcactgctttcagcaccctcgaagacctcatcaggtacctcgaacccgagcggtggcagttagacttggaagacctgtatcgccctacctggcagctcctgggaaaggctttcgtgttcggccggaagagtagggtcgtggacctcaacctactgacagaggaagtccggttatatagctgcacccctaggaacttttccgtaagtattcgggaggagctgaaaagaacagacaccattttttggcccggttgtctgctggtgaagcgttgtggcgggaattgcgcctgttgcctgcataattgcaatgagtgtcagtgtgttcccagcaaagtgacgaaaaaataccacgaagtcctgcagctgcgaccaaagaccggagtccgggggctacataagagcctcacagatgtggcacttgaacaccacgaagaatgcgattgtgtctgcaggggatcaacaggaggttag

SEQ ID NO: 326276 - DNA, 573 bp, Artificial Sequence
  derived and/or modified sequence
atgatgcagtacacctggctgcttacgaaacagttcaccgaggcagtgagccccagcgtgttgccaccatcagctctgcctctggacctattgaacaatgccatcaccgcttttagcacgctggaggacttaattagatatttggagccagagagatggcaactggatctcgaagacctgtaccggcctacgtggcagttgcttggtaaggcttttgtctttggcagaaagagcagggtggtggacctcaatctcctgaccgaggaggtgagattgtacagctgcacccctcgcaacttctcagttagcatcagagaggaacttaagcgtaccgacacaatcttttggccaggctgtttgctggtgaagagatgcgggggtaattgcgcctgttgcctgcacaactgcaatgagtgccagtgcgtgccctcgaaggtgactaaaaaataccacgaagtgctgcagctaaggcccaagaccggcgtccgcggtctgcacaagtcactgacagacgtagccctggaacaccacgaagagtgcgattgcgtgtgcagggggagcaccggtggctag

SEQ ID NO: 326277 - DNA, 549 bp, Artificial Sequence
  derived and/or modified sequence
atgccccagttcacagaagctgtgagccccagcgtgctgccccccagcgccctgcccctggacctgctgaacaatgccatcacagccttcagcaccctggaggacctgatccgctacctggagcctgagcgctggcagctggacctggaggacctgtaccggcccacctggcagctgctgggcaaggcctttgtgtttggaaggaagagccgggtggtggacctgaacctgctgacagaggaggtgcggctgtacagctgcacccccaggaacttctctgtgtccatccgggaggagctgaagaggacagacaccatcttctggccaggctgcctgctggtgaagagatgtggcggcaactgtgcctgctgcctgcacaactgcaatgaatgccagtgtgtgcccagcaaggtgaccaagaagtaccacgaggtgctgcagctgcggcccaagacaggagtgcggggcctgcacaagagcctgacagatgtggccctggagcaccatgaagaatgtgactgtgtgtgccggggcagcactggaggatag

SEQ ID NO: 326278 - DNA, 573 bp, Artificial Sequence
  derived and/or modified sequence
atgatgcagtacacctggctgctgaccaagcagttcacagaagctgtgagccccagcgtgctgccccccagcgccctgcccctggacctgctgaacaatgccatcacagccttcagcaccctggaggacctgatccgctacctggagcctgagcgctggcagctggacctggaggacctgtaccggcccacctggcagctgctgggcaaggcctttgtgtttggaaggaagagccgggtggtggacctgaacctgctgacagaggaggtgcggctgtacagctgcacccccaggaacttctctgtgtccatccgggaggagctgaagaggacagacaccatcttctggccaggctgcctgctggtgaagagatgtggcggcaactgtgcctgctgcctgcacaactgcaatgaatgccagtgtgtgcccagcaaggtgaccaagaagtaccacgaggtgctgcagctgcggcccaagacaggagtgcggggcctgcacaagagcctgacagatgtggccctggagcaccatgaagaatgtgactgtgtgtgccggggcagcactggaggatag

SEQ ID NO: 326279 - DNA, 549 bp, Artificial Sequence
  derived and/or modified sequence
atgccccagttcaccgaggccgtgagccccagcgtgctgcccccctctgccctgccgctggaccttcttaataatgccataaccgcatttagcacgcttgaggacctgatccgatatctggaacccgagcgctggcagctcgacctggaagacttatatcgccccacctggcagctcttgggaaaagccttcgtgtttgggaggaaatcccgggtggtagatcttaaccttctgaccgaggaggtccggctgtacagctgtactcccagaaacttctccgtatcaattagagaggaactaaagaggactgacacaatattttggccgggatgcctgttggtgaagcgttgtggagggaactgcgcctgctgcctgcacaattgcaatgagtgtcagtgcgtgccctctaaggtgactaaaaagtatcatgaggtcctacagctgaggccgaaaaccggggttagaggccttcacaagtccctgaccgacgtggctctggagcaccacgaggaatgtgattgtgtttgtagaggttctaccggcgggtag

SEQ ID NO: 326280 - DNA, 573 bp, Artificial Sequence
  derived and/or modified sequence
atgatgcagtacacctggctgctgaccaagcagttcaccgaggccgtgagtccaagcgtcctccctcccagcgcacttcccctggatctgctgaacaacgctattacagctttctccacactggaggacctgattagatacttagagcccgaaagatggcagctggacctcgaggatttatatcgcccgacgtggcaactgctgggcaaggcatttgtctttggccggaagtcacgcgtggtggacttaaatctgttgaccgaggaggtgaggctttacagttgcactccccgcaatttttcagtgtctatccgggaggagctgaaacgcacagacactattttttggccaggctgtctcctggtcaaacgttgtgggggcaattgcgcgtgttgcttacacaactgtaatgaatgtcagtgcgttccatccaaagtcaccaaaaagtatcatgaggtcctccagctccgacctaaaaccggagtgcgcgggttacacaagagcctgacagacgtggccctcgaacaccacgaagagtgtgattgtgtctgccgcggcagcaccggaggttag

SEQ ID NO: 326281 - DNA, 549 bp, Artificial Sequence
  derived and/or modified sequence
atgccccagttcaccgaggcagtgtctcccagcgtcctccccccttcggccttgccactggacttgctaaacaatgcaattactgccttttcaacattagaagacctcatcaggtacttagagcccgagcgctggcagcttgatttggaagatttatatagaccgacgtggcagctccttgggaaagcctttgtgttcggccgtaagagtcgagtggtggacttgaacttgctgacagaggaagtgcgactgtatagctgcacccccagaaacttcagtgtcagcatcagagaagaactcaagcgcacagacactatcttctggcctggatgcttacttgtgaaacgttgtggcggaaattgtgcctgttgtttgcataactgcaatgaatgccagtgcgtcccctctaaggttaccaaaaaataccatgaggttcttcagttgagaccaaaaacgggggtaaggggactgcacaagtccctgacagacgtggcccttgaacatcatgaggagtgtgactgcgtctgccggggatccacagggggatag

SEQ ID NO: 326282 - DNA, 573 bp, Artificial Sequence
  derived and/or modified sequence
atgatgcaatatacttggctgctgacaaaacagttcacggaggccgtttcaccctccgtattgccgccatccgctctgccacttgatttgcttaacaacgctatcacagcgttttcaacacttgaggatctcatcagatacctggaaccagaacggtggcagctggatctggaggatttgtaccggccaacttggcaacttctcggcaaggccttcgtttttggaagaaaatcaagagtggttgatctcaatttgctaacggaggaagtacggctttactcatgcaccccccgaaacttctctgtgtcaatccgggaagaactgaagagaacggacaccattttttggcccggttgcctgctggtcaaacgatgcgggggtaactgtgcctgctgtctgcataactgcaacgagtgtcagtgcgtgccatcgaaggtgactaaaaaataccacgaggtgctgcaactgcggcctaaaactggtgtgcggggtttgcataagagcctcaccgacgttgccctcgagcaccacgaggagtgtgactgcgtgtgccggggttccactggcggttag

SEQ ID NO: 326283 - DNA, 1354 bp, Artificial Sequence
  derived and/or modified sequence
aggaaaaagttttggatgggattatgtggaaactaccctgcgattctctgctgccagagcaggctcggcgcttccaccccagtgcagccttcccctggcggtggtgaaagagactcgggagtcgctgcttccaaagtgcccgccgtgagtgagctctcaccccagtcagccaaatgagcctcttcgggcttctcctgctgacatctgccctggccggccagagacaggggactcaggcggaatccaacctgagtagtaaattccagttttccagcaacaaggaacagaacggtatgattttgtagaagttgaggaacccagtgatggaactatattagggcgctggtgtggttctggtactgtaccaggaaaacagatttctaaaggaaatcaaattaggataagatttgtatctgatgaatattttccttctgaaccagggttctgcatccactacaacattgtcatgccacaattcacagaagctgtgagtccttcagtgctacccccttcagctttgccactggacctgcttaataatgctataactgcctttagtaccttggaagaccttattcgatatcttgaaccagagagatggcagttggacttagaagatctatataggccaacttggcaacttcttggcaaggcttttgtttttggaagaaaatccagagtggtggatctgaaccttctaacagaggaggtaagattatacagctgcacacctcgtaacttctcagtgtccataagggaagaactaaagagaaccgataccattttctggccaggttgtctcctggttaaacgctgtggtgggaactgtgcctgttgtctccacaattgcaatgaatgtcaatgtgtcccaagcaaagttactaaaaaataccacgaggtccttcagttgagaccaaagaccggtgtcaggggattgcacaaatcactcaccgacgtggccctggagcaccatgaggagtgtgactgtgtgtgcagagggagcacaggaggatagccgcatcaccaccagcagctcttgcccagagctgtgcagtgcagtggctgattctattagagaacgtatgcgttatctccatccttaatctcagttgtttgcttcaaggacctttcatcttcaggatttacagtgcattctgaaagaggagacatcaaacagaattaggagttgtgcaacagctcttttgagaggaggcctaaaggacaggagaaaaggtcttcaatcgtggaaagaaaattaaatgttgtattaaatagatcaccagctagtttcagagttaccatgtacgtattccactagctgggttctgtatttcagttctttcgatacggctta

SEQ ID NO: 326284 - DNA, 1014 bp, Artificial Sequence
  derived and/or modified sequence
ttacgtttgatgaaagatttgggcttgaagacccagaagatgacatatgcaagtatgattttgtagaagttgaggaacccagtgatggaactatattagggcgctggtgtggttctgggttctgcatccactacaacattgtcatgccaaacctcccgtgagttgttcctggcaggcatttgtgtctgcatgccctgtctgctgcttaggctctttaaaagatttgtgtgatacttgtttggttacttgtgtgattcataatagcagattctcgttttggcaagagaaaactctcttctatgatgcagtatacttggcttctcacaaagcaattcacagaagctgtgagtccttcagtgctacccccttcagctttgccactggacctgcttaataatgctataactgcctttagtaccttggaagaccttattcgatatcttgaaccagagagatggcagttggacttagaagatctatataggccaacttggcaacttcttggcaaggcttttgtttttggaagaaaatccagagtggtggatctgaaccttctaacagaggaggtaagattatacagctgcacacctcgtaacttctcagtgtccataagggaagaactaaagagaaccgataccattttctggccaggttgtctcctggttaaacgctgtggtgggaactgtgcctgttgtctccacaattgcaatgaatgtcaatgtgtcccaagcaaagttactaaaaaataccacgaggtccttcagttgagaccaaagaccggtgtcaggggattgcacaaatcactcaccgacgtggccctggagcaccatgaggagtgtgactgtgtgtgcagagggagcacaggaggatagccgcatcaccaccagcagctcttgcccagagctgtgcagtgcagtggctgattctattagagaacgtatgcgttatctccatccttaatctcagttgtttgcttcaaggacctttcatcttcaggatttacagtgcattctg

SEQ ID NO: 326285 - DNA, 549 bp, Artificial Sequence
  derived and/or modified sequence
atgccacaatttacagaagccgtatctcctagtgtcctgccaccctcagcattacccctcgaccttctcaacaatgccattacagccttcagcaccctagaggatctaatcagatacctggaacccgagagatggcagctggacctggaagacctgtatagaccaacctggcaactgctgggcaaggccttcgtctttggccgtaaatcaagagtggttgacctgaatctactcactgaggaggtccggctgtactcctgcacacccagaaacttcagtgtcagcatccgagaggaattgaaacgcacagacactattttttggccagggtgcctgcttgtcaaacggtgcggggggaactgcgcctgctgcctgcataattgtaatgagtgccagtgtgtgccaagtaaggttactaagaaatatcatgaagtgctacagcttcgaccgaaaactggcgttagaggtctgcataaatcgctgacagatgtcgcactcgaacatcatgaggagtgtgactgtgtgtgccgcggctctaccggaggctag

SEQ ID NO: 326286 - DNA, 573 bp, Artificial Sequence
  derived and/or modified sequence
atgatgcagtacacctggttactaacgaaacaattcaccgaggccgtgagcccctctgtcctaccaccaagtgcgctcccgcttgacctcctgaacaacgcgatcacggcgtttagtacgcttgaggatctgatccggtacttggaacctgaaagatggcagttggaccttgaagatttgtatagacctacttggcaactcctcggcaaagcctttgttttcgggaggaagtcacgcgtggtggatctgaacctgctcacagaggaggtgcgcctttattcttgcactccccgaaacttcagcgtctctattagggaagaactaaagagaaccgataccatattctggcctggatgcttgctcgttaaacgatgcggaggaaattgcgcatgttgtctccacaattgtaacgaatgtcagtgcgtgcctagcaaagtgactaagaagtatcacgaggttttgcagctgcgccccaagacaggtgtgagaggtcttcacaagagcctcaccgacgtagccttggagcatcacgaagaatgtgattgcgtgtgcagaggttcaactgggggttag

SEQ ID NO: 326287 - DNA, 549 bp, Artificial Sequence
  derived and/or modified sequence
atgccacagtttactgaggctgtctctccttctgtactgcccccctccgcgcttcccctggatctcctaaataacgccattacagccttcagtactctggaagacctgattcgctatcttgaacctgaacggtggcagctggatctcgaagacctgtaccgcccaacttggcagctcttgggcaaggcttttgtttttggtcgtaaatctcgggttgtagacctcaacctgctgaccgaagaagttcgactctattcttgtactcccagaaacttctctgtcagcattcgcgaagagctcaaacggacagacaccatcttctggcctgggtgtctactcgtcaagagatgcggaggaaattgtgcgtgctgccttcacaactgcaacgaatgccagtgtgtaccctccaaggtgactaagaaatatcatgaagtgttgcagctgcgtcctaagactggagttcggggtctccacaagtctctcaccgatgtcgctcttgagcatcacgaagaatgtgactgcgtttgcagagggtcaactggaggatag

SEQ ID NO: 326288 - DNA, 573 bp, Artificial Sequence
  derived and/or modified sequence
atgatgcagtatacatggctgttaacgaaacagttcaccgaggctgtctctccctccgtcttgcctcccagcgcattacccctggacttgctcaacaacgcaatcacagctttctcaaccctggaagatctgatccgatacttggaaccggagaggtggcagctggatttagaagacctgtaccgacccacatggcaattattgggaaaggcatttgtatttggccgcaagtcccgtgtggtagatctcaatctactcaccgaagaagtcaggctgtatagctgtactccccgcaatttttcagttagcattagggaggaattaaagagaaccgatacaatattttggcctggatgcctactggtgaagcgttgtggtggaaattgtgcctgttgtctgcacaactgtaatgaatgtcagtgcgtcccttcaaaagtgaccaagaagtaccatgaagtcctgcagttaagacctaagaccggcgtcaggggcctgcataagtcactgaccgacgtggctttagagcatcacgaagagtgcgattgtgtgtgccggggatccactggtggctag

SEQ ID NO: 326289 - RNA, 549 nt, Artificial Sequence
  derived and/or modified sequence
augccacaauuuacagaagccguaucuccuaguguccugccacccucagcauuaccccucgaccuucucaacaaugccauuacagccuucagcacccuagaggaucuaaucagauaccuggaacccgagagauggcagcuggaccuggaagaccuguauagaccaaccuggcaacugcugggcaaggccuucgucuuuggccguaaaucaagagugguugaccugaaucuacucacugaggagguccggcuguacuccugcacacccagaaacuucagugucagcauccgagaggaauugaaacgcacagacacuauuuuuuggccagggugccugcuugucaaacggugcggggggaacugcgccugcugccugcauaauuguaaugagugccagugugugccaaguaagguuacuaagaaauaucaugaagugcuacagcuucgaccgaaaacuggcguuagaggucugcauaaaucgcugacagaugucgcacucgaacaucaugaggagugugacugugugugccgcggcucuaccggaggcuag

SEQ ID NO: 326290 - RNA, 573 nt, Artificial Sequence
  derived and/or modified sequence
augaugcaguacaccugguuacuaacgaaacaauucaccgaggccgugagccccucuguccuaccaccaagugcgcucccgcuugaccuccugaacaacgcgaucacggcguuuaguacgcuugaggaucugauccgguacuuggaaccugaaagauggcaguuggaccuugaagauuuguauagaccuacuuggcaacuccucggcaaagccuuuguuuucgggaggaagucacgcgugguggaucugaaccugcucacagaggaggugcgccuuuauucuugcacuccccgaaacuucagcgucucuauuagggaagaacuaaagagaaccgauaccauauucuggccuggaugcuugcucguuaaacgaugcggaggaaauugcgcauguugucuccacaauuguaacgaaugucagugcgugccuagcaaagugacuaagaaguaucacgagguuuugcagcugcgccccaagacaggugugagaggucuucacaagagccucaccgacguagccuuggagcaucacgaagaaugugauugcgugugcagagguucaacuggggguuag

SEQ ID NO: 326291 - RNA, 549 nt, Artificial Sequence
  derived and/or modified sequence
augccacaguuuacugaggcugucucuccuucuguacugccccccuccgcgcuuccccuggaucuccuaaauaacgccauuacagccuucaguacucuggaagaccugauucgcuaucuugaaccugaacgguggcagcuggaucucgaagaccuguaccgcccaacuuggcagcucuugggcaaggcuuuuguuuuuggucguaaaucucggguuguagaccucaaccugcugaccgaagaaguucgacucuauucuuguacucccagaaacuucucugucagcauucgcgaagagcucaaacggacagacaccaucuucuggccugggugucuacucgucaagagaugcggaggaaauugugcgugcugccuucacaacugcaacgaaugccaguguguacccuccaaggugacuaagaaauaucaugaaguguugcagcugcguccuaagacuggaguucggggucuccacaagucucucaccgaugucgcucuugagcaucacgaagaaugugacugcguuugcagagggucaacuggaggauag

SEQ ID NO: 326292 - RNA, 573 nt, Artificial Sequence
  derived and/or modified sequence
augaugcaguauacauggcuguuaacgaaacaguucaccgaggcugucucucccuccgucuugccucccagcgcauuaccccuggacuugcucaacaacgcaaucacagcuuucucaacccuggaagaucugauccgauacuuggaaccggagagguggcagcuggauuuagaagaccuguaccgacccacauggcaauuauugggaaaggcauuuguauuuggccgcaagucccgugugguagaucucaaucuacucaccgaagaagucaggcuguauagcuguacuccccgcaauuuuucaguuagcauuagggaggaauuaaagagaaccgauacaauauuuuggccuggaugccuacuggugaagcguugugguggaaauugugccuguugucugcacaacuguaaugaaugucagugcgucccuucaaaagugaccaagaaguaccaugaaguccugcaguuaagaccuaagaccggcgucaggggccugcauaagucacugaccgacguggcuuuagagcaucacgaagagugcgauugugugugccggggauccacugguggcuag

SEQ ID NO: 326293 - protein, 130 aa, Artificial Sequence
  derived and/or modified sequence
MGRLDGKVIILTAAAQGIGQAAALAFAREGAKVIATDINESKLQELEKYPGIQTRVLDVTKKKQIDQFANEVERLDVLFNVAGFVHHGTVLDCEEKDWDFSMNLNVRSMYLMIKAFLPKMLAQKSGNIIN

SEQ ID NO: 326294 - protein, 116 aa, Artificial Sequence
  derived and/or modified sequence
MGRLDGKVIILTAAAQGIGQAAALAFAREGAKVIATDINESKLQELEKYPGIQTRVLDVTKKKQIDQFANEVERLDVLFNVAGFVHHGTVLDCEEKDWDFSMNLNVRSMYLMIKAF

SEQ ID NO: 326295 - protein, 245 aa, Artificial Sequence
  derived and/or modified sequence
MGRLDGKVIILTAAAQGIGQAAALAFAREGAKVIATDINESKLQELEKYPGIQTRVLDVTKKKQIDQFANEVERLDVLFNVAGFVHHGTVLDCEEKDWDFSMNLNVRSMYLMIKAFLPKMLAQKSGNIINMSSVASSVKGVVNRCVYSTTKAAVIGLTKSVAADFIQQGIRCNCVCPGTVDTPSLQERIQARGNPEEARNDFLKRQKTGRFATAEEIAMLCVYLASDESAYVTGNPVIIDGGWSL

SEQ ID NO: 326296 - DNA, 738 bp, Artificial Sequence
  derived and/or modified sequence
atgggacgtctggatgggaaagtcattatactcacagctgcagcccaaggcatagggcaggctgcagccctggccttcgcccgagaaggggctaaggtcatcgcgaccgatatcaatgaatccaaactccaagagcttgagaaataccccgggatccagacccgcgtgcttgatgtgacaaaaaaaaaacaaattgaccaattcgcaaacgaggtcgagcggctggatgtcctgtttaatgtagcaggctttgtgcatcacggaacagtacttgactgcgaagaaaaagactgggatttcagcatgaaccttaacgtgcgctccatgtatctgatgataaaggctttcctccccaagatgcttgcccagaagagtggtaacattataaacatgagcagtgtcgcctcgagcgtcaagggggtcgttaacagatgtgtatacagcacaacgaaagctgccgtcattggcctcaccaaatctgtggcagcagatttcattcagcagggaataagatgcaattgtgtttgcccaggaaccgtggacaccccctccctgcaggagcggatacaggctcgaggcaatcccgaggaagcccgtaacgactttctgaagcgtcagaaaaccgggcgttttgctacagcagaggagatcgccatgctgtgtgtgtacctggcatctgacgagagtgcttatgtgactggcaaccccgttattatcgatggcggatggagcctgtag

SEQ ID NO: 326297 - DNA, 738 bp, Artificial Sequence
  derived and/or modified sequence
atgggccgcctggatggcaaggtgatcatcctgacagctgctgcccagggcatcggccaggccgccgccctggcctttgcccgggagggcgccaaggtgattgccacagacatcaatgaaagcaagctgcaggagctggagaagtacccaggcatccagaccagggtgctggatgtgaccaagaagaagcagattgaccagtttgccaatgaggtggagcggctggatgtgctcttcaacgtggccggctttgtgcaccacggcaccgtgctggactgtgaggagaaggactgggacttctccatgaacctgaatgtgcgctccatgtacctgatgatcaaggccttcctgcccaagatgctggcccagaagagcggcaacatcatcaacatgagctctgtggccagctctgtgaagggcgtggtgaacagatgtgtgtacagcaccaccaaggctgctgtgattggcctgaccaagtctgtggccgctgacttcatccagcagggcatccgctgcaactgtgtgtgccccggcaccgtggacacccccagcctgcaggagcgcatccaggcccggggcaaccctgaggaggccagaaatgacttcctgaagaggcagaagacaggccgctttgccacagctgaggagatcgccatgctgtgtgtgtacctggccagtgatgaaagtgcctacgtgactggaaatcctgtgatcattgatggcggctggagcctgtag

SEQ ID NO: 326298 - DNA, 738 bp, Artificial Sequence
  derived and/or modified sequence
atgggccggctggacggcaaggtgatcatcctgaccgccgccgcccagggaatcggccaggctgcagcactggccttcgcccgcgaaggcgccaaggtgattgccaccgacattaacgagagcaagctccaggagttggagaagtatcctggcatccagacacgggttttggacgtgacgaagaagaaacagatcgatcaatttgctaatgaagtcgaacgactggatgtgctcttcaatgtggctggcttcgtgcatcatggaacggttctggactgcgaggagaaggattgggacttttctatgaacctgaacgtcagatccatgtatctcatgatcaaagcatttctccccaagatgctggcccagaaatccggtaatatcataaacatgagttcagtagcatcctctgtcaaaggagttgtgaaccgctgtgtgtattccacaactaaagctgccgtgatcgggctcactaagtccgtggctgcggattttatccagcagggcataaggtgtaactgcgtatgtcccggcaccgtggatactccctccttgcaagagagaatccaagctaggggtaacccggaggaagcaaggaacgacttcctgaagagacagaagacgggcagattcgctacagctgaggaaattgctatgttatgcgtctacctggcatccgacgaatctgcttacgtgaccggcaaccctgtgatcattgacggaggatggagtctgtag

SEQ ID NO: 326299 - DNA, 738 bp, Artificial Sequence
  derived and/or modified sequence
atgggcaggctcgacggtaaggtgatcattctcacggccgcagcacagggaatcggacaggctgctgccctggcattcgccagagagggggctaaggttatcgcaaccgacataaatgagtcaaaactgcaagaattggagaaatatcccggaatccagaccagagtacttgacgtgactaagaaaaagcagatcgatcaatttgcaaatgaagtggagagactcgacgttctgtttaatgtggctgggttcgtccatcatggcactgtgttggactgcgaagagaaggattgggactttagcatgaacctgaacgtgagatctatgtaccttatgattaaagcctttctgcctaagatgttggcccagaagtccggtaatatcataaacatgagttccgttgcatcctcagtgaagggcgtcgtgaacagatgtgtttactcgacgacgaaggctgccgtgattggtctgacaaagagtgttgcggctgactttattcaacagggcatccgctgtaattgcgtttgccctggaaccgtcgataccccctccttacaagaacggattcaggccagggggaaccccgaggaggccagaaatgatttcctgaagaggcaaaagaccggcagattcgcgacagcggaagagattgcgatgttgtgtgtttatctggctagcgacgaaagcgcatatgtcacaggcaacccagtgattatagatgggggatggagtctgtag

SEQ ID NO: 326300 - DNA, 1126 bp, Artificial Sequence
  derived and/or modified sequence
agcatgcattattaagcgcttgacttgcttccagacaaaggttgtctcaagtttgttgctcaaaccgagttctggagaacgccatcagctcgctgcttaaaattaaaccacaggttccattatgggtcgacttgatgggaaagtcatcatcctgacggccgctgctcaggggattggccaagcagctgccttagcttttgcaagagaaggtgccaaagtcatagccacagacattaatgagtccaaacttcaggaactggaaaagtacccgggtattcaaactcgtgtccttgatgtcacaaagaagaaacaaattgatcagtttgccaatgaagttgagagacttgatgttctctttaatgttgctggttttgtccatcatggaactgtcctggattgtgaggagaaagactgggacttctcgatgaatctcaatgtgcgcagcatgtacctgatgatcaaggcattccttcctaaaatgcttgctcagaaatctggcaatattatcaacatgtcttctgtggcttccagcgtcaaaggagttgtgaacagatgtgtgtacagcacaaccaaggcagccgtgattggcctcacaaaatctgtggctgcagatttcatccagcagggcatcaggtgcaactgtgtgtgcccaggaacagttgatacgccatctctacaagaaagaatacaagccagaggaaatcctgaagaggcacggaatgatttcctgaagagacaaaagacgggaagattcgcaactgcagaagaaatagccatgctctgcgtgtatttggcttctgatgaatctgcttatgtaactggtaaccctgtcatcattgatggaggctggagcttgtgattttaggatctccatggtgggaaggaaggcaggcccttcctatccacagtgaacctggttacgaagaaaactcaccaatcatctccttcctgttaatcacatgttaatgaaaataagctctttttaatgatgtcactgtttgcaagagtctgattctttaagtatattaatctctttgtaatctcttctgaaatcattgtaaagaaataaaaatattgaactcatagcaggagaatagtttttaaaataaatctcgatttgttagca

SEQ ID NO: 326301 - DNA, 738 bp, Artificial Sequence
  derived and/or modified sequence
atgggcagactggacggcaaggtgatcatcctgaccgccgccgcccagggcatcggccaggccgccgccctggccttcgccagagagggcgccaaggtgatcgccaccgacatcaacgagagcaagctgcaggagctggagaagtaccccggcatccagaccagagtgctggacgtgaccaagaagaagcagatcgaccagttcgccaacgaggtggagagactggacgtgctgttcaacgtggccggcttcgtgcaccacggcaccgtgctggactgcgaggagaaggactgggacttcagcatgaacctgaacgtgagaagcatgtacctgatgatcaaggccttcctgcccaagatgctggcccagaagagcggcaacatcatcaacatgagcagcgtggccagcagcgtgaagggcgtggtgaacagatgcgtgtacagcaccaccaaggccgccgtgatcggcctgaccaagagcgtggccgccgacttcatccagcagggcatcagatgcaactgcgtgtgccccggcaccgtggacacccccagcctgcaggagagaatccaggccagaggcaaccccgaggaggccagaaacgacttcctgaagagacagaagaccggcagattcgccaccgccgaggagatcgccatgctgtgcgtgtacctggccagcgacgagagcgcctacgtgaccggcaaccccgtgatcatcgacggcggctggagcctgtag

SEQ ID NO: 326302 - protein, 428 aa, Artificial Sequence
  derived and/or modified sequence
MEDTGIQRGIWDGDAKAVQQCLTDIFTSVYTTCDIPENAIFGPCVLSHTSLYDSIAFIALKSTDKRTVPYIFRVDTSAANGSSEGLMWLRLVQSARDKEEQNLEAYIKNGQLFYRSLRRIAKDEELLVWYGKELTELLLLCPSRSHNKMNGSSPYTCLECSQRFQFEFPYVAHLRFRCPKRLHSADISPQDEQGGGVGTKDHGGGGGGGKDQQQQQQEAPLGPGPKFCKAGPLHHYPSPSPESSNPSAAAGGSSAKPSTDFHNLARELENSRGGSSCSPAQSLSSGSGSGGGGGHQEAELSPDGIATGGGKGKRKFPEEAAEGGGGAGLVGGRGRFVERPLPASKEDLVCTPQQYRASGSYFGLEENGRLFAPPSPETGEAKRSAFVEVKKAARAASLQEEGTADGAGVASEDQDAGGGGGSSTPAAA

SEQ ID NO: 326303 - DNA, 4118 bp, Artificial Sequence
  derived and/or modified sequence
aaaagcagcatcagacaagagctttattaatcccttacacgagcaaatgcgatctctgacctactagacttgttttcctacaatttcacaaaaagcctcgctagaggaatgtgcaaggacagaagggaaactgaggagacccgcaactcattagcgaaataatagggtgcacttcaataaaaatgcggtcctgaagtggagcagactcaccggcaaggagcccggaaaatcgtcaggggcggcggcaaaatactatcaaatcagcctgggaagcatcttttcgctcagcaagttcaagagaacaaatatgttacaatccttgcctattcttgcctccacttcataatgtcataaaagccacctggggtgtcatttatcaacctctctccagcccactcttccaaaataacactacagtttcctacatgtgtatttttgccaggactccaaagagccttgctaaagtggaacaagcaaaatcctcccctggcctcctgggactgcagtcaccaggctgtcaaagcctcaataccccactgagttccagagaagggtctcaaagctgggagaggatcaaactaacatggagtagagaattgaactgtgaaaaagaagcccgagattccccagcgacgtggtgttgcagccccgttgaaggagtcaacttgcaggctgttaaagacctcaagtcattagcatcagctgctgcactaaaggggcaagtcagcgcctctaagtggcttagcgcacaaacgaggctcccgagacggcctcggcaactccatcccctcctccaccacccgctggatgtgaaaagctttccggagcccatcttgggggaagcttggtagtgttggcgctcctgaagagagacgacgcccgtttatcacccccaggcaactagctgcgcaaatcagcggtggctccagggctagagaatccctggagctaaccgcacccctctccctttcacggaacgcggactccggggaaatacgcacggggtccgcacgcgctgggtgtccagctctctgtcacagcttctccaagtgcctagtgaaacggggaaaggccctctccaatcattttggaagagcctaaaaggcggcaacaccaacacctcttgacatggaaatacactgatacaataggcaaaaggaaacactcgattgcatcttcccggttccaggtggccttatttgggagattctatactgaccttattcctgtgatggaggatactggcatccagcgaggcatctgggatggagatgccaaggctgtccaacaatgtctgacagatatttttaccagcgtttacaccacctgcgacatccctgagaatgctatatttggtccctgtgtcctgagccatacttccctatatgacagcatagctttcatagctctcaagtctactgacaagagaacagtaccgtatatctttcgggtagacacctcagcagcaaatggttcctcagaaggtctcatgtggctgcggttggtccaatcggccagagataaggaagagcagaaccttgaagcctacataaaaaacggacagctgttctaccgctctctccgcaggattgccaaagacgaggagttactagtttggtacgggaaagaactgactgagttactcttgctctgcccctctagatcccacaacaaaatgaatgggtcgtccccttacacatgcctggaatgcagccaacgtttccagtttgagttcccctatgtggcgcatctgcgtttccgctgccccaagagacttcacagcgctgatataagtccccaagacgaacaaggcggcggcgtgggcaccaaggaccacgggggcggcggcggcggtggcaaagaccagcagcagcagcagcaggaggcacctttaggcccgggtcccaagttttgcaaagccggccccctccaccactacccatccccctccccggaaagcagcaacccatccgctgccgccggcggcagcagcgcgaagccatccacagacttccacaacctggccagggagctggaaaactcccggggaggcagcagctgctccccagcccagagcctcagcagcggtagcggcagcggcggcggcggcggccaccaggaggcggagctgagtcccgacggcatcgccacgggcggcggcaaaggaaagaggaaattcccggaggaggcggcggagggcggcggtggcgctggtctggtagggggccggggccgcttcgtagagcggcccctcccggcctccaaggaggatctggtgtgcacaccgcagcagtaccgagcctcgggcagctacttcggcctggaagagaacggccgcctcttcgcgccgccaagtcccgagacgggcgaggcgaagcgcagcgccttcgtggaggtgaagaaggctgcccgcgcggccagcctgcaggaggaggggacagccgacggcgcgggagtcgcctccgaggaccaggacgctggcggcggcggcggctcctccacgcccgcggccgcgtcaccggtgggcgccgagaagctgctggccccgcggcctgggggcccgctgcccagccggctcgagggcggcagtcctgcgaggggcagcgccttcacttcggtgccgcagctgggcagcgcgggcagcaccagcggtgggggcggaacgggcgccggggccgcaggcggcgcgggcgggggccagggcgccgcgtcggacgagcgcaaaagcgccttctcgcagccagcacgctctttctcgcagctgtccccgctggtgctgggccagaagctgggcgcgctcgagccatgccaccccgccgacggcgtgggccccaccagactctatcccgccgccgcggaccctctagcggtgaagctccagggggccgcggacctgaacggaggttgcgggtccctgccgagcggcggcggcggcctgcctaagcagagccccttcctgtacgccaccgccttctggcccaagagctccgctgccgctgcagccgcggctgcggcggcggccgcggggcccttgcagctgcagctgccctcggcgctcacgctgctgccgccctccttcacctcgctgtgtctgcccgcgcagaactggtgcgccaagtgcaatgcctccttccgcatgacctccgacctggtgtaccatatgaggtcgcaccacaaaaaggagtatgcgatggagcccttggtgaagcggcggcgagaggagaaactcaagtgccccatctgcaatgagtccttcagggagcgccaccacctctccaggcacatgacctcgcataattgactcggaaaggaccccagctttccacgcgcgcgcaagcacagttaagccacctgcaggaataaacacgcgagaacatccaccgcttccttgcaccccgaaaccctgcacaaagacacatacattcaccgcccccccgcccccccaacgcgcacacacacgtcctctcctcccaggaacctcattcaaatatttacccgggacacacacccccccccacacacacacacagacacactcacacacaagagccaggatggtggagttttgattgggtgggttgtttgagggggttttcttttgaatgcacgcattttcactttccccaaaacaaaggtacattttttaaaatgtcatatattgcaacatattgatgcatttgtcatacgtttctacttaaattattaagcacttacgatttagatgtaataattatatgtaagggcaaaatttattttagatataaagtaaaggaggagggtgagatgctttctgcatttcttgatgacagtttgtgttcctacaaaaataaacaaaatgaataaaaagggatcaccattcaatttgagtttccagggggaagtgcatgtataatgaaatgataatggacttcaatgaagaatgtcatcaattatgtacatatgtattttcttttaatacaaagtgtaattttgtgccagtgaaatggagtctgaatagttatgtgtttcttttatccctggaaatatttattaaactttatagtttatccgagtatgttggatgctttgacaataaatgactattttcttcaaagcaaaaaaaaaaaaaaaaaaaaaaa

SEQ ID NO: 326304 - DNA, 4095 bp, Artificial Sequence
  derived and/or modified sequence
aaaagcagcatcagacaagagctttattaatcccttacacgagcaaatgcgatctctgacctactagacttgttttcctacaatttcacaaaaagcctcgctagaggaatgtgcaaggacagaagggaaactgaggagacccgcaactcattagcgaaataatagggtgcacttcaataaaaatgcggtcctgaagtggagcagactcaccggcaaggagcccggaaaatcgtcaggggcggcggcaaaatactatcaaatcagcctgggaagcatcttttcgctcagcaagttcaagagaacaaatatgttacaatccttgcctattcttgcctccacttcataatgtcataaaagccacctggggtgtcatttatcaacctctctccagcccactcttccaaaataacactacagtttcctacatgtgtatttttgccaggactccaaagagccttgctaaagtggaacaagcaaaatcctcccctggcctcctgggactgcagtcaccaggctgtcaaagcctcaataccccactgagttccagagaagggtctcaaagctgggagaggatcaaactaacatggagtagagaattgaactgtgaaaaagaagcccgagattccccagcgacgtggtgttgcagccccgttgaaggagtcaacttgcaggctgttaaagacctcaagtcattagcatcagctgctgcactaaaggggcaagtcagcgcctctaagtggcttagcgcacaaacgaggctcccgagacggcctcggcaactccatcccctcctccaccacccgctggatgtgaaaagctttccggagcccatcttgggggaagcttggtagtgttggcgctcctgaagagagacgacgcccgtttatcacccccaggcaactagctgcgcaaatcagcggtggctccagggctagagaatccctggagctaaccgcacccctctccctttcacggaacgcggactccggggaaatacgcacggggtccgcacgcgctgggtgtccagctctctgtcacagcttctccaagtgcctagtgaaacggggaaaggccctctccaatcattttggaagagcctaaaaggcggcaacaccaacacctcttgacatggaaatacactgatacaataggcaaaaggaaacactcgattgcatcttcccggttccaggtggccttatttgggagattctatactgaccttattcctgtgatggaggatactggcatccagcgaggcatctgggatggagatgccaaggctgtccaacaatgtctgacagatatttttaccagcgtttacaccacctgcgacatccctgagaatgctatatttggtccctgtgtcctgagccatacttccctatatgacagcatagctttcatagctctcaagtctactgacaagagaacagtaccgtatatctttcgggtagacacctcagcagcaaatggttcctcagaaggtctcatgtggctgcggttggtccaatcggccagagataaggaagagcagaaccttgaagcctacataaaaaacggacagctgttctaccgctctctccgcaggattgccaaagacgaggagttactagtttggtacgggaaagaactgactgagttactcttgctctgcccctctagatcccacaacaaaatgaatgggtcgtccccttacacatgcctggaatgcagccaacgtttccagtttgagttcccctatgtggcgcatctgcgtttccgctgccccaagagacttcacagcgctgatataagtccccaagacgaacaaggcggcggcgtgggcaccaaggaccacgggggcggcggcggcggtggcaaagaccagcagcagcagcagcaggaggcacctttaggcccgggtcccaagttttgcaaagccggccccctccaccactacccatccccctccccggaaagcagcaacccatccgctgccgccggcggcagcagcgcgaagccatccacagacttccacaacctggccagggagctggaaaactcccggggaggcagcagctgctccccagcccagagcctcagcagcggtagcggcagcggcggcggcggcggccaccaggaggcggagctgagtcccgacggcatcgccacgggcggcggcaaaggaaagaggaaattcccggaggaggcggcggagggcggcggtggcgctggtctggtagggggccggggccgcttcgtagagcggcccctcccggcctccaaggaggatctggtgtgcacaccgcagcagtaccgagcctcgggcagctacttcggcctggaagagaacggccgcctcttcgcgccgccaagtcccgagacgggcgaggcgaagcgcagcgccttcgtggaggtgaagaaggctgcccgcgcggccagcctgcaggaggaggggacagccgacggcgcgggagtcgcctccgaggaccaggacgctggcggcggcggcggctcctccacgcccgcggccgcgtcaccggtgggcgccgagaagctgctggccccgcggcctgggggcccgctgcccagccggctcgagggcggcagtcctgcgaggggcagcgccttcacttcggtgccgcagctgggcagcgcgggcagcaccagcggtgggggcggaacgggcgccggggccgcaggcggcgcgggcgggggccagggcgccgcgtcggacgagcgcaaaagcgccttctcgcagccagcacgctctttctcgcagctgtccccgctggtgctgggccagaagctgggcgcgctcgagccatgccaccccgccgacggcgtgggccccaccagactctatcccgccgccgcggaccctctagcggtgaagctccagggggccgcggacctgaacggaggttgcgggtccctgccgagcggcggcggcggcctgcctaagcagagccccttcctgtacgccaccgccttctggcccaagagctccgctgccgctgcagccgcggctgcggcggcggccgcggggcccttgcagctgcagctgccctcggcgctcacgctgctgccgccctccttcacctcgctgtgtctgcccgcgcagaactggtgcgccaagtgcaatgcctccttccgcatgacctccgacctggtgtaccatatgaggtcgcaccacaaaaaggagtatgcgatggagcccttggtgaagcggcggcgagaggagaaactcaagtgccccatctgcaatgagtccttcagggagcgccaccacctctccaggcacatgacctcgcataattgactcggaaaggaccccagctttccacgcgcgcgcaagcacagttaagccacctgcaggaataaacacgcgagaacatccaccgcttccttgcaccccgaaaccctgcacaaagacacatacattcaccgcccccccgcccccccaacgcgcacacacacgtcctctcctcccaggaacctcattcaaatatttacccgggacacacacccccccccacacacacacacagacacactcacacacaagagccaggatggtggagttttgattgggtgggttgtttgagggggttttcttttgaatgcacgcattttcactttccccaaaacaaaggtacattttttaaaatgtcatatattgcaacatattgatgcatttgtcatacgtttctacttaaattattaagcacttacgatttagatgtaataattatatgtaagggcaaaatttattttagatataaagtaaaggaggagggtgagatgctttctgcatttcttgatgacagtttgtgttcctacaaaaataaacaaaatgaataaaaagggatcaccattcaatttgagtttccagggggaagtgcatgtataatgaaatgataatggacttcaatgaagaatgtcatcaattatgtacatatgtattttcttttaatacaaagtgtaattttgtgccagtgaaatggagtctgaatagttatgtgtttcttttatccctggaaatatttattaaactttatagtttatccgagtatgttggatgctttgacaataaatgactattttcttcaaagc

SEQ ID NO: 326305 - DNA, 3124 bp, Artificial Sequence
  derived and/or modified sequence
gtcactgcatcgggtccatctgtacaactctctccgtttctccgtctctctccctccctccctccctccacccccccaatctttttctccccatctctccatctctctcttatctcttcaggaagagcctaaaaggcggcaacaccaacacctcttgacatggaaatacactgatacaataggcaaaaggaaacactcgattgcatcttcccggttccaggtggccttatttgggagattctatactgaccttattcctgtgatggaggatactggcatccagcgaggcatctgggatggagatgccaaggctgtccaacaatgtctgacagatatttttaccagcgtttacaccacctgcgacatccctgagaatgctatatttggtccctgtgtcctgagccatacttccctatatgacagcatagctttcatagctctcaagtctactgacaagagaacagtaccgtatatctttcgggtagacacctcagcagcaaatggttcctcagaaggtctcatgtggctgcggttggtccaatcggccagagataaggaagagcagaaccttgaagcctacataaaaaacggacagctgttctaccgctctctccgcaggattgccaaagacgaggagttactagtttggtacgggaaagaactgactgagttactcttgctctgcccctctagatcccacaacaaaatgaatgggtcgtccccttacacatgcctggaatgcagccaacgtttccagtttgagttcccctatgtggcgcatctgcgtttccgctgccccaagagacttcacagcgctgatataagtccccaagacgaacaaggcggcggcgtgggcaccaaggaccacgggggcggcggcggcggtggcaaagaccagcagcagcagcagcaggaggcacctttaggcccgggtcccaagttttgcaaagccggccccctccaccactacccatccccctccccggaaagcagcaacccatccgctgccgccggcggcagcagcgcgaagccatccacagacttccacaacctggccagggagctggaaaactcccggggaggcagcagctgctccccagcccagagcctcagcagcggtagcggcagcggcggcggcggcggccaccaggaggcggagctgagtcccgacggcatcgccacgggcggcggcaaaggaaagaggaaattcccggaggaggcggcggagggcggcggtggcgctggtctggtagggggccggggccgcttcgtagagcggcccctcccggcctccaaggaggatctggtgtgcacaccgcagcagtaccgagcctcgggcagctacttcggcctggaagagaacggccgcctcttcgcgccgccaagtcccgagacgggcgaggcgaagcgcagcgccttcgtggaggtgaagaaggctgcccgcgcggccagcctgcaggaggaggggacagccgacggcgcgggagtcgcctccgaggaccaggacgctggcggcggcggcggctcctccacgcccgcggccgcgtcaccggtgggcgccgagaagctgctggccccgcggcctgggggcccgctgcccagccggctcgagggcggcagtcctgcgaggggcagcgccttcacttcggtgccgcagctgggcagcgcgggcagcaccagcggtgggggcggaacgggcgccggggccgcaggcggcgcgggcgggggccagggcgccgcgtcggacgagcgcaaaagcgccttctcgcagccagcacgctctttctcgcagctgtccccgctggtgctgggccagaagctgggcgcgctcgagccatgccaccccgccgacggcgtgggccccaccagactctatcccgccgccgcggaccctctagcggtgaagctccagggggccgcggacctgaacggaggttgcgggtccctgccgagcggcggcggcggcctgcctaagcagagccccttcctgtacgccaccgccttctggcccaagagctccgctgccgctgcagccgcggctgcggcggcggccgcggggcccttgcagctgcagctgccctcggcgctcacgctgctgccgccctccttcacctcgctgtgtctgcccgcgcagaactggtgcgccaagtgcaatgcctccttccgcatgacctccgacctggtgtaccatatgaggtcgcaccacaaaaaggagtatgcgatggagcccttggtgaagcggcggcgagaggagaaactcaagtgccccatctgcaatgagtccttcagggagcgccaccacctctccaggcacatgacctcgcataattgactcggaaaggaccccagctttccacgcgcgcgcaagcacagttaagccacctgcaggaataaacacgcgagaacatccaccgcttccttgcaccccgaaaccctgcacaaagacacatacattcaccgcccccccgcccccccaacgcgcacacacacgtcctctcctcccaggaacctcattcaaatatttacccgggacacacacccccccccacacacacacacagacacactcacacacaagagccaggatggtggagttttgattgggtgggttgtttgagggggttttcttttgaatgcacgcattttcactttccccaaaacaaaggtacattttttaaaatgtcatatattgcaacatattgatgcatttgtcatacgtttctacttaaattattaagcacttacgatttagatgtaataattatatgtaagggcaaaatttattttagatataaagtaaaggaggagggtgagatgctttctgcatttcttgatgacagtttgtgttcctacaaaaataaacaaaatgaataaaaagggatcaccattcaatttgagtttccagggggaagtgcatgtataatgaaatgataatggacttcaatgaagaatgtcatcaattatgtacatatgtattttcttttaatacaaagtgtaattttgtgccagtgaaatggagtctgaatagttatgtgtttcttttatccctggaaatatttattaaactttatagtttatccgagtatgttggatgctttgacaataaatgactattttcttcaaa

SEQ ID NO: 326306 - DNA, 3706 bp, Artificial Sequence
  derived and/or modified sequence
ggcgtcccgcccccgccccggggaacgctgcctctgccgcaaagatgcccccttccgctggaaagcggtcataaaagccacctggggtgtcatttatcaacctctctccagcccactcttccaaaataacactacagtttcctacatgtgtatttttgccaggactccaaagagccttgctaaagtggaacaaggagtagagaattgaactgtgaaaaagaagcccgagattccccagcgacgtggtgttgcagccccgttgaaggagtcaacttgcaggctgttaaagacctcaagtcattagcatcagctgctgcactaaaggggcaagtcagcgcctctaagtggcttagcgcacaaacgaggctcccgagacggcctcggcaactccatcccctcctccaccacccgctggatgtgaaaagctttccggagcccatcttgggggaagcttggtagtgttggcgctcctgaagagagacgacgcccgtttatcacccccaggcaactagctgcgcaaatcagcggtggctccagggctagagaatccctggagctaaccgcacccctctccctttcacggaacgcggactccggggaaatacgcacggggtccgcacgcgctgggtgtccagctctctgtcacagcttctccaagtgcctagtgaaacggggaaaggccctctccaatcattttggaagagcctaaaaggcggcaacaccaacacctcttgacatggaaatacactgatacaataggcaaaaggaaacactcgattgcatcttcccggttccaggtggccttatttgggagattctatactgaccttattcctgtgatggaggatactggcatccagcgaggcatctgggatggagatgccaaggctgtccaacaatgtctgacagatatttttaccagcgtttacaccacctgcgacatccctgagaatgctatatttggtccctgtgtcctgagccatacttccctatatgacagcatagctttcatagctctcaagtctactgacaagagaacagtaccgtatatctttcgggtagacacctcagcagcaaatggttcctcagaaggtctcatgtggctgcggttggtccaatcggccagagataaggaagagcagaaccttgaagcctacataaaaaacggacagctgttctaccgctctctccgcaggattgccaaagacgaggagttactagtttggtacgggaaagaactgactgagttactcttgctctgcccctctagatcccacaacaaaatgaatgggtcgtccccttacacatgcctggaatgcagccaacgtttccagtttgagttcccctatgtggcgcatctgcgtttccgctgccccaagagacttcacagcgctgatataagtccccaagacgaacaaggcggcggcgtgggcaccaaggaccacgggggcggcggcggcggtggcaaagaccagcagcagcagcagcaggaggcacctttaggcccgggtcccaagttttgcaaagccggccccctccaccactacccatccccctccccggaaagcagcaacccatccgctgccgccggcggcagcagcgcgaagccatccacagacttccacaacctggccagggagctggaaaactcccggggaggcagcagctgctccccagcccagagcctcagcagcggtagcggcagcggcggcggcggcggccaccaggaggcggagctgagtcccgacggcatcgccacgggcggcggcaaaggaaagaggaaattcccggaggaggcggcggagggcggcggtggcgctggtctggtagggggccggggccgcttcgtagagcggcccctcccggcctccaaggaggatctggtgtgcacaccgcagcagtaccgagcctcgggcagctacttcggcctggaagagaacggccgcctcttcgcgccgccaagtcccgagacgggcgaggcgaagcgcagcgccttcgtggaggtgaagaaggctgcccgcgcggccagcctgcaggaggaggggacagccgacggcgcgggagtcgcctccgaggaccaggacgctggcggcggcggcggctcctccacgcccgcggccgcgtcaccggtgggcgccgagaagctgctggccccgcggcctgggggcccgctgcccagccggctcgagggcggcagtcctgcgaggggcagcgccttcacttcggtgccgcagctgggcagcgcgggcagcaccagcggtgggggcggaacgggcgccggggccgcaggcggcgcgggcgggggccagggcgccgcgtcggacgagcgcaaaagcgccttctcgcagccagcacgctctttctcgcagctgtccccgctggtgctgggccagaagctgggcgcgctcgagccatgccaccccgccgacggcgtgggccccaccagactctatcccgccgccgcggaccctctagcggtgaagctccagggggccgcggacctgaacggaggttgcgggtccctgccgagcggcggcggcggcctgcctaagcagagccccttcctgtacgccaccgccttctggcccaagagctccgctgccgctgcagccgcggctgcggcggcggccgcggggcccttgcagctgcagctgccctcggcgctcacgctgctgccgccctccttcacctcgctgtgtctgcccgcgcagaactggtgcgccaagtgcaatgcctccttccgcatgacctccgacctggtgtaccatatgaggtcgcaccacaaaaaggagtatgcgatggagcccttggtgaagcggcggcgagaggagaaactcaagtgccccatctgcaatgagtccttcagggagcgccaccacctctccaggcacatgacctcgcataattgactcggaaaggaccccagctttccacgcgcgcgcaagcacagttaagccacctgcaggaataaacacgcgagaacatccaccgcttccttgcaccccgaaaccctgcacaaagacacatacattcaccgcccccccgcccccccaacgcgcacacacacgtcctctcctcccaggaacctcattcaaatatttacccgggacacacacccccccccacacacacacacagacacactcacacacaagagccaggatggtggagttttgattgggtgggttgtttgagggggttttcttttgaatgcacgcattttcactttccccaaaacaaaggtacattttttaaaatgtcatatattgcaacatattgatgcatttgtcatacgtttctacttaaattattaagcacttacgatttagatgtaataattatatgtaagggcaaaatttattttagatataaagtaaaggaggagggtgagatgctttctgcatttcttgatgacagtttgtgttcctacaaaaataaacaaaatgaataaaaagggatcaccattcaatttgagtttccagggggaagtgcatgtataatgaaatgataatggacttcaatgaagaatgtcatcaattatgtacatatgtattttcttttaatacaaagtgtaattttgtgccagtgaaatggagtctgaatagttatgtgtttcttttatccctggaaatatttattaaactttatagtttatccgagtatgttggatgctttgacaataaatgactattttcttcaaagcaaa

SEQ ID NO: 326307 - DNA, 372 bp, Artificial Sequence
  derived and/or modified sequence
atgctgggccccaacgcccaggtgaccgtggtggtggcccagcccggcccggaccacttggaccatctcctgctcgacacccagcactgtcagcattcatcgtgtggatcggctgcctgtacccagctgacttgggtcccctgcctggggggttcacataaagccagcatcaaaatgtctgctcaggccgtggtttctactgaagccccttgggaacggccttgtttccaggcacacctggggtgtctgcagaatagtgtcctgtgctcatgcagaatggagggattcagtctcttcctcgcaatgctatggggcggcgtcggggagctgccatctgatccgcgaggccatcttcagttcctcgctacctag

SEQ ID NO: 326308 - DNA, 2514 bp, Artificial Sequence
  derived and/or modified sequence
aaaagcagcatcagacaagagctttattaatcccttacacgagcaaatgcgatctctgacctactagacttgttttcctacaatttcacaaaaagcctcgctagaggaatgtgcaaggacagaagggaaactgaggagacccgcaactcattagcgaaataatagggtgcacttcaataaaaatgcggtcctgaagtggagcagactcaccggcaaggagcccggaaaatcgtcaggggcggcggcaaaatactatcaaatcagcctgggaagcatcttttcgctcagcaagttcaagagaacaaatatgttacaatccttgcctattcttgcctccacttcataatgtcataaaagccacctggggtgtcatttatcaacctctctccagcccactcttccaaaataacactacagtttcctacatgtgtatttttgccaggactccaaagagccttgctaaagtggaacaagcaaaatcctcccctggcctcctgggactgcagtcaccaggctgtcaaagcctcaataccccactgagttccagagaagggtctcaaagctgggagaggatcaaactaacatggagtagagaattgaactgtgaaaaagaagcccgagattccccagcgacgtggtgttgcagccccgttgaaggagtcaacttgcaggctgttaaagacctcaagtcattagcatcagctgctgcactaaaggggcaagtcagcgcctctaagtggcttagcgcacaaacgaggctcccgagacggcctcggcaactccatcccctcctccaccacccgctggatgtgaaaagctttccggagcccatcttgggggaagcttggtagtgttggcgctcctgaagagagacgacgcccgtttatcacccccaggcaactagctgcgcaaatcagcggtggctccagggctagagaatccctggagctaaccgcacccctctccctttcacggaacgcggactccggggaaatacgcacggggtccgcacgcgctgggtgtccagctctctgtcacagcttctccaagtgcctagtgaaacggggaaaggccctctccaatcattttggaagagcctaaaaggcggcaacaccaacacctcttgacatggaaatacactgatacaataggcaaaaggaaacactcgattgcatcttcccggttccaggtggccttatttgggagattctatactgaccttattcctgtgatggaggatactggcatccagcgaggcatctgggatggagatgccaaggctgtccaacaatgtctgacagatatttttaccagcgtttacaccacctgcgacatccctgagaatgctatatttggtccctgtgtcctgagccatacttccctatatgacagcatagctttcatagctctcaagtctactgacaagagaacagtaccgtatatctttcgggtagacacctcagcagcaaatggttcctcagaaggtctcatgtggctgcggttggtccaatcggccagagataaggaagagcagaaccttgaagcctacataaaaaacggacagctgttctaccgctctctccgcaggattgccaaagacgaggagttactagtttggtacgggaaagaactgactgagttactcttgctctgcccctctagatcccacaacaaaatgaatgggtcgtccccttacacatgcctggaatgcagccaacgtttccagtttgagttcccctatgtggcgcatctgcgtttccgctgccccaagagacttcacagcgctgatataagtccccaagacgaacaaggcggcggcgtgggcaccaaggaccacgggggcggcggcggcggtggcaaagaccagcagcagcagcagcaggaggcacctttaggcccgggtcccaagttttgcaaagccggccccctccaccactacccatccccctccccggaaagcagcaacccatccgctgccgccggcggcagcagcgcgaagccatccacagacttccacaacctggccagggagctggaaaactcccggggaggcagcagctgctccccagcccagagcctcagcagcggtagcggcagcggcggcggcggcggccaccaggaggcggagctgagtcccgacggcatcgccacgggcggcggcaaaggaaagaggaaattcccggaggaggcggcggagggcggcggtggcgctggtctggtagggggccggggccgcttcgtagagcggcccctcccggcctccaaggaggatctggtgtgcacaccgcagcagtaccgagcctcgggcagctacttcggcctggaagagaacggccgcctcttcgcgccgccaagtcccgagacgggcgaggcgaagcgcagcgccttcgtggaggtgaagaaggctgcccgcgcggccagcctgcaggaggaggggacagccgacggcgcgggagtcgcctccgaggaccaggacgctggcggcggcggcggctcctccacgcccgcggccgc

SEQ ID NO: 326309 - DNA, 3673 bp, Artificial Sequence
  derived and/or modified sequence
catgtgaagattgtgcttgctttccttccatcccttagccataattgcctgtttcctgagacctcctgtacagcctatggaactgtttaatgtcttctcatgcccagcccctgaagctgatttcaccatgcccatattccctttcctcaggtgtagaagacatcgtggccataatgattcctgagccaaaagggaaggagatagtaagcctgctggaaagaaacatcaccgtgacaatgtacatcaccatcggaacccggaacttgcagaaatatgtgagccgcacttcggttgtgtttgtctccatctccttcattgtcctgatgatcatttccctcgcatggctcgtcttttattacatccagaggtttcgatatgcaaatgccagggataggaaccagcgccgactgggggatgcagcaaagaaagccatcagcaaactccagatcaggaccatcaagaagggtgacaaggaaacagagtctgattttgacaactgtgcagtttgtattgaagggtacaagcccaatgacgttgtccggatcctgccctgccggcatcttttccacaagtcctgtgttgacccctggcttctagaccatcgtacctgtcccatgtgcaagatgaacattcttaaagccctagggatcccgcccaatgccgactgcatggacgacttgcccactgacttcgagggctctctgggaggtccacccaccaaccagatcacaggtgccagcgacacaacagtgaatgaaagttcagtcactttggaccctgctgtccggactgtgggagccttgcaggtggtccaggatacagaccccatcccccaggagggagacgtcatctttactactaacagtgagcaggagccagctgtaagcagtgattctgacatttccttgatcatggcaatggaggttggactgtctgatgtagaactttccactgaccaggactgtgaagaagtgaaatcttgaaacgacaaatccagaagcaaagagatagtaggacccaagggaaaggaagggaagagtgctccaagacttggaccaggcacacacacacctccagatcaccttggcaactccagggcgctccgttcaagaatgctgacgaaaagcaatatccaaagtcttgtcaatcaggatgcagtttctccatcggtatggcagtctgtggccttggcagctgggaagttgaaagctgatttccactcctatgtccatgtagacatacacttcagaagctcctaaaacagagactgaaaggccacctttaggatttcttagtttcatttcaattctttccatgtctcatcattcttgtttttggcatgttgtttgatttctttggcaatttttttaaagattatttgtagtttactttccatctattcctttgtttttcctttgatgcactccagcttttgtataggtttctgtttagaagcaccagttcctgctatgatcagtttgtattccatctctgagatatgtggtcttgacctcccagcatgaagtgtgcatggctttgagaagtgcctcagcaccctgaaatggactaaggccagctttcattaagaatctaagttcttctaagtgggcctttaaaaaccccagctgccagagaccccaacactaagccctaaatctgctgaggccactgctggttattttaagccacatcacacttgcttccacttgccgggcttgattaagggcccacgtgacatgagaagggagctctagggaagccgtttcattcttctgggtcttacagtctttggctgaaattctgaactcagaagtcccctccaaggcatccagtctttggtggttgtagggctggttttaaaaccagataccacattttcttcctattgaaaacaaaatgccagttgcattggtttcccctgggctagaacagtttttttcttacctctgtaagtgggttctgtaaaaaatggaggctttagagaaaagccaatcatttttaagtccaatggcaaacatagtgggggctgcagtagcacctagcttttaccttaatttcgacacacttctgttgaatctcaccagaccatgtgggaggatttaggtgaatccctagcagattgcttcccagggctccctgagtgtgtccagataccaagtgaggaatgaggtgtgatttgctgtatcatttgaaccaaaaagtatgcagcatgagaatttgctagatcgtttatcctgactgaaatagacaaagtaagagggaaaggaaaagaggtatcaagtaaatactgaaacccaatggtgtttttaaactgtttctgtttttattcatcttttgtaactatgacagaaatgtgctattttttcagtgggcaattttgtaatatattcagactatccagatacagagatgactaaggtcattgatagcgtctctgaacaatcagacggatcaccttatctctacacagctggcaaacaccaggctgcggcttggattaaccaggaaagaaagcttttctcactgagttgtttttatgtattgatggggacttttccacctcattagactaatactcattcaaaaagagtttggttctgctgtaaatccttgccgcctgctgaaacatggtgtgcaggtcaacggagaatactagctgctcctttttcaccacctttaccaatttcctatttgatggtttgtaagtagacagtaaggcaaggcagatgattattaccctcagaaaggttgcatctccctaggagtccaatgcttcctgtaatgaaatccactctctatgtgtgggaaaagaggcagggaggaatgaagagagctctgaatcgagaatcctagatgaaccacacgctttactaagcctcggcttcttcatctataatgtgaagggtttaataacatgagtccccaagctcctctggctgtgggaccacagatgagtctttcagaggcaggatccatttttgcagatagctatgacttgtggcaatcaggcttcgtagcttggggaggtagagttacttgacatgtatcatgtaataacagcctttgagacttggcacaactatggtgctgagaatgaaaatctaaatgattgaagttttaagtccaagtaggagttggtttgttttgccttgtttaaaaattgctgttagtcacagagtttgcaatctctggataccttcaaatcctagctctcactgtgggattcttgatctcagaggtgtttatttttcacagtcagcataggcttgcgccactgactcctccttcagtcggctttgcccaaaacaaattttagtattactggtattaagtttagtccagtggaattagaaggataattcaatagcaacagaaatataaattatattccattcccagagagagaatgcgctttggattgtttagtcctctgattaacgagtattttctcttcctgccaagaactaggtgaatcaggaattgattgcatatgcaagccctggccacagctgcacttacaggatgcctcatagacgatgaggggtctgaaaggccaacccgaggctggcagatctgaccccaaggaggtcctgctgcaaaccccctgagcctttgccattcactacttaccaaagtttgtttctggaggattttcctgtagctttgatagttt

SEQ ID NO: 326310 - DNA, 894 bp, Artificial Sequence
  derived and/or modified sequence
atgagcagccacgcccagcccctgaagctgatcagcccctgcccctacagcctgagcagcggcgtggaggacatcgtggccatcatgatccccgagcccaagggcaaggagatcgtgagcctgctggagagaaacatcaccgtgaccatgtacatcaccatcggcaccagaaacctgcagaagtacgtgagcagaaccagcgtggtgttcgtgagcatcagcttcatcgtgctgatgatcatcagcctggcctggctggtgttctactacatccagagattcagatacgccaacgccagagacagaaaccagagaagactgggcgacgccgccaagaaggccatcagcaagctgcagatcagaaccatcaagaagggcgacaaggagaccgagagcgacttcgacaactgcgccgtgtgcatcgagggctacaagcccaacgacgtggtgagaatcctgccctgcagacacctgttccacaagagctgcgtggacccctggctgctggaccacagaacctgccccatgtgcaagatgaacatcctgaaggccctgggcatcccccccaacgccgactgcatggacgacctgcccaccgacttcgagggcagcctgggcggcccccccaccaaccagatcaccggcgccagcgacaccaccgtgaacgagagcagcgtgaccctggaccccgccgtgagaaccgtgggcgccctgcaggtggtgcaggacaccgaccccatcccccaggagggcgacgtgatcttcaccaccaacagcgagcaggagcccgccgtgagcagcgacagcgacatcagcctgatcatggccatggaggtgggcctgagcgacgtggagctgagcaccgaccaggactgcgaggaggtgaagagctag

SEQ ID NO: 326311 - DNA, 894 bp, Artificial Sequence
  derived and/or modified sequence
atgagcagccatgcccagcctttaaagctcatttccccatgtccctattccctttctagcggagttgaggatattgtggcgatcatgatccctgaaccaaaaggcaaggagatagttagccttctagagagaaacattaccgtgactatgtatatcaccatcgggaccagaaatctccagaaatacgtgagtaggacttcagtagtgtttgtcagcatctctttcattgtgctcatgattataagcttagcttggctcgtcttttactatattcagcgcttccgatatgccaacgcgcgcgatcgcaatcagaggaggctgggcgatgcagccaagaaggcaatctccaagctgcaaatacggacaattaagaagggtgacaaagagactgaatccgactttgacaactgcgccgtgtgtatagaaggctacaaacccaatgatgtagtgaggatcctaccatgccgccacctgttccacaagtcctgcgtagatccttggttgctggatcacagaacctgccccatgtgtaagatgaatatcctgaaagccctagggattccgccaaatgccgactgtatggatgacctcccaacagactttgagggatcactgggcggacccccaacaaaccaaattacaggcgcctcagacacaacggtgaatgaatccagcgtgacactggaccccgcagtcagaacggtgggcgcccttcaggtggtgcaggataccgaccctatcccacaggaaggcgacgttattttcacaaccaacagcgagcaggaacccgcggtgtcatctgacagcgatattagcttaatcatggctatggaagtcgggctgtcagatgtcgagctctccactgatcaggattgtgaagaagtgaaatcatag

SEQ ID NO: 326312 - DNA, 894 bp, Artificial Sequence
  derived and/or modified sequence
atgagctcacatgcacagccactgaagctgataagtccgtgtccctatagcttgtcatccggggtagaggacatcgtagccatcatgattccagaacccaaaggaaaggaaatcgtaagcctgttagagcgtaacattactgtcactatgtacatcactataggaacacggaatctgcagaaatacgtgtccaggacaagcgtcgtgttcgtaagcattagcttcattgtgctgatgattatctctttggcctggctcgtattttactatattcagagattccggtatgccaacgcacgggaccgaaatcaacgcagactgggagacgcagctaagaaggccatttcaaagctgcagattaggactatcaagaaaggagataaggagaccgaatcagactttgataattgcgctgtttgtatcgaggggtataaacctaatgatgtggtgcggatcttaccgtgtcggcacctgttccacaagtcctgcgtggatccatggcttctcgatcacaggacctgccctatgtgtaaaatgaatatcctgaaggctctggggatcccaccaaacgccgactgcatggatgacctacccaccgactttgagggaagtttgggcggcccgccaaccaaccagataacaggagctagcgatacgaccgtaaatgagtcttcggtgaccttagatccagcggttcgcaccgtaggagctctgcaggtggtgcaggacacagatcctatccctcaagaaggagacgttatattcacgacaaacagcgaacaggaacctgccgtgagttcagactccgacatatcattaattatggcgatggaagtgggcctttcagacgtcgagttgtccaccgaccaagactgcgaagaggtaaagagctag

SEQ ID NO: 326313 - DNA, 894 bp, Artificial Sequence
  derived and/or modified sequence
atgagcagccacgcccagcccctgaagctgatcagcccctgcccctacagcctgagcagcggcgtggaggacatcgtggccatcatgatccctgagcccaagggcaaggagatcgtgtccctgctggagaggaacatcaccgtgaccatgtacatcaccatcggcaccaggaacctgcagaagtatgtgtccaggacctctgtggtgtttgtgtccatctccttcatcgtgctgatgatcatcagcctggcctggctggtgttctactacatccagcgcttccgctatgccaatgcccgggacaggaaccagaggcggctgggagatgctgccaagaaggccatcagcaagctgcagatccgcaccatcaagaagggggacaaggagacagaaagtgactttgacaactgtgctgtgtgcatcgagggctacaagcccaatgatgtggtgcgcatcctgccctgccgccacctgttccacaagagctgtgtggacccctggctgctggaccacaggacctgccccatgtgcaagatgaacatcctgaaggccctgggcatccccccaaatgctgactgcatggatgacctgcccacagactttgagggcagcctgggcggcccccccaccaaccagatcaccggggccagtgacaccaccgtgaatgaatcttctgtgaccctggaccctgctgtgaggacagtgggcgccctgcaggtggtgcaggacacagaccccatcccccaggagggagatgtgatcttcaccaccaacagcgagcaggagcctgctgtgtccagtgacagcgacatcagcctcatcatggccatggaggtgggcctgagtgatgtggagctgagcacagaccaggactgtgaggaggtgaagagctag

SEQ ID NO: 326314 - DNA, 894 bp, Artificial Sequence
  derived and/or modified sequence
atgagcagccacgcccagcccctgaagctgatcagcccctgcccctatagcctttcaagcggcgtggaagacatcgtggccattatgattccagagccaaaaggaaaggaaatcgtgtcactgctcgagcgaaatataacagttacgatgtacatcaccattgggacccggaatcttcagaagtatgtctccaggacctccgtggtgtttgtttccatttctttcatcgttttgatgatcatctccttggcctggctcgtgttctactacattcagaggttccggtatgcaaatgctcgcgacagaaaccagcgtcgcctgggggacgccgcaaaaaaggccatttctaagctccagattcgcacaatcaaaaaaggagacaaagaaactgagtccgatttcgataactgcgcagtgtgcattgaaggttataaacccaatgatgtcgttagaattctcccctgcagacacctgtttcataagagctgcgtagacccctggttgctagatcatcgaacctgccccatgtgtaaaatgaacatcctaaaagctttaggcatccccccaaatgcagactgtatggacgatctgcccactgacttcgaaggaagcttgggaggaccccccacgaaccagatcacaggagcctcagatacgacagtaaacgagtcaagcgttaccctggaccccgcagtgcgcacagttggcgcgttgcaagttgtgcaggacacggacccaataccccaggagggcgacgtgattttcacaaccaatagcgagcaagaacctgctgtgtcttcagacagcgacattagcttgatcatggcaatggaggtggggttatctgatgtggaactgtcaactgatcaggactgtgaggaagtgaagagctag

SEQ ID NO: 326315 - DNA, 894 bp, Artificial Sequence
  derived and/or modified sequence
atgagcagccacgcccagcccctgaagctgatcagcccctgcccctacagcttaagttctggggtagaggacatcgtagcaattatgatccctgagccaaagggaaaggaaattgtgagcctactagagaggaacatcaccgtgaccatgtacatcacaattgggacacggaacctgcagaaatatgtgtcaaggacttcagtggtatttgttagcattagcttcatcgtgctgatgatcatcagcctcgcatggctggtgttctactacattcagcggttcaggtacgcgaacgcacgagatagaaatcagagacgactcggagacgcagccaagaaggcaatatcaaaactacaaatccgcactataaaaaaaggcgacaaagagacagagtccgattttgacaactgcgcagtgtgtatcgagggttacaagcctaatgacgtggtcaggattctaccatgtcgccatttattccacaaatcctgcgtcgatccttggcttctcgatcacaggacctgccccatgtgcaagatgaacatactgaaggctctcggcattccacctaacgccgactgcatggatgatcttccaacggactttgagggaagtctgggcggcccgcccacgaaccagattacgggagctagtgatactacagtgaacgagtcttctgtgactctggaccccgccgtgcgtacggtaggcgccctacaggttgtacaggatacagatcccataccccaggagggagatgtcatcttcacaacaaactctgagcaggaacccgccgtgagtagcgactcagacatcagcctcatcatggcaatggaggtgggactttcggatgtagagctgtccaccgaccaggattgtgaggaagtgaagtcctag

SEQ ID NO: 326316 - DNA, 894 bp, Artificial Sequence
  derived and/or modified sequence
atgtcttcccacgcacagcccctgaagctgatttctccctgcccctacagtctctcaagcggcgtcgaggatattgttgctatcatgattcccgagccaaaggggaaggagattgtgtcattgttggagagaaatataacagttaccatgtatatcacaatcggaacgcggaatcttcagaagtatgtatccaggacctccgtggtgttcgtatcaattagttttatagtgcttatgatcataagtctcgcttggctggtattctactatattcagcggtttagatatgctaatgctcgggaccggaaccagcgtagacttggcgatgcggctaagaaagcgatttcaaagttacagattagaacaatcaagaaaggcgacaaagagacagagtctgattttgataattgcgcggtgtgcattgaaggctacaagccaaatgacgttgttaggattttgccctgccgtcatctgttccataagtcatgtgtcgacccctggcttcttgaccatcggacctgccccatgtgtaagatgaatatcctgaaagccctgggcatcccgcctaatgctgactgcatggatgatctgccgacggacttcgagggatcactgggcggacctcccacaaatcagatcaccggcgcttccgatactaccgtaaatgagtccagtgttacattagatccggcagtgcggactgtgggcgctctgcaagtcgtccaggacacggacccaatcccccaggagggggacgttattttcaccaccaactctgagcaggaacctgcagtgagtagtgactctgatatatccttaattatggccatggaagtgggactgtcagacgttgaactctccactgaccaggactgcgaagaggttaaatcttag

SEQ ID NO: 326317 - DNA, 894 bp, Artificial Sequence
  derived and/or modified sequence
atgagtagccatgcacagcctctgaaactgattagcccctgtccatactcactttcctctggggtggaggatatcgtggctattatgatccccgaacctaaaggaaaagaaatcgtgtctctactcgaaagaaatatcacagtcacgatgtatatcactattggaactagaaaccttcagaagtacgtcagccggacttcagtcgtgttcgttagcatcagctttattgttctgatgatcatcagcctggcttggcttgtgttttactacatccagaggtttcggtatgcaaacgctcgtgaccgaaaccagcgcaggcttggggatgcggcaaaaaaagccatctctaagctgcagatccggacaatcaaaaaaggggataaggaaacagagtcagacttcgataattgtgcggtttgtattgagggctataagccaaacgacgtagtgcggatcctgccttgtcggcatctgtttcataaaagctgcgtggacccctggcttctggaccaccgcacctgcccaatgtgtaagatgaacatcctcaaggcattaggcattccgcctaatgcggactgtatggacgatctgcccaccgactttgaaggatccctcgggggaccccctaccaatcagattactggcgcttccgacacaacagtcaacgaatctagcgtgactctggatcctgccgtgcgtacagtgggagcgctccaagtcgtccaggatactgatccaatcccacaggaaggcgacgtaatcttcacaaccaattccgaacaggaacccgctgtctccagtgacagtgatattagtttaataatggcaatggaggtcggtctgtccgacgtagaactctccacagatcaagactgcgaggaggtgaagagttag

SEQ ID NO: 326318 - DNA, 3584 bp, Artificial Sequence
  derived and/or modified sequence
atgtcttctcatgcccagcccctgaagctgatttcaccatgcccatattccctttcctcaggtgtagaagacatcgtggccataatgattcctgagccaaaagggaaggagatagtaagcctgctggaaagaaacatcaccgtgacaatgtacatcaccatcggaacccggaacttgcagaaatatgtgagccgcacttcggttgtgtttgtctccatctccttcattgtcctgatgatcatttccctcgcatggctcgtcttttattacatccagaggtttcgatatgcaaatgccagggataggaaccagcgccgactgggggatgcagcaaagaaagccatcagcaaactccagatcaggaccatcaagaagggtgacaaggaaacagagtctgattttgacaactgtgcagtttgtattgaagggtacaagcccaatgacgttgtccggatcctgccctgccggcatcttttccacaagtcctgtgttgacccctggcttctagaccatcgtacctgtcccatgtgcaagatgaacattcttaaagccctagggatcccgcccaatgccgactgcatggacgacttgcccactgacttcgagggctctctgggaggtccacccaccaaccagatcacaggtgccagcgacacaacagtgaatgaaagttcagtcactttggaccctgctgtccggactgtgggagccttgcaggtggtccaggatacagaccccatcccccaggagggagacgtcatctttactactaacagtgagcaggagccagctgtaagcagtgattctgacatttccttgatcatggcaatggaggttggactgtctgatgtagaactttccactgaccaggactgtgaagaagtgaaatcttgaaacgacaaatccagaagcaaagagatagtaggacccaagggaaaggaagggaagagtgctccaagacttggaccaggcacacacacacctccagatcaccttggcaactccagggcgctccgttcaagaatgctgacgaaaagcaatatccaaagtcttgtcaatcaggatgcagtttctccatcggtatggcagtctgtggccttggcagctgggaagttgaaagctgatttccactcctatgtccatgtagacatacacttcagaagctcctaaaacagagactgaaaggccacctttaggatttcttagtttcatttcaattctttccatgtctcatcattcttgtttttggcatgttgtttgatttctttggcaatttttttaaagattatttgtagtttactttccatctattcctttgtttttcctttgatgcactccagcttttgtataggtttctgtttagaagcaccagttcctgctatgatcagtttgtattccatctctgagatatgtggtcttgacctcccagcatgaagtgtgcatggctttgagaagtgcctcagcaccctgaaatggactaaggccagctttcattaagaatctaagttcttctaagtgggcctttaaaaaccccagctgccagagaccccaacactaagccctaaatctgctgaggccactgctggttattttaagccacatcacacttgcttccacttgccgggcttgattaagggcccacgtgacatgagaagggagctctagggaagccgtttcattcttctgggtcttacagtctttggctgaaattctgaactcagaagtcccctccaaggcatccagtctttggtggttgtagggctggttttaaaaccagataccacattttcttcctattgaaaacaaaatgccagttgcattggtttcccctgggctagaacagtttttttcttacctctgtaagtgggttctgtaaaaaatggaggctttagagaaaagccaatcatttttaagtccaatggcaaacatagtgggggctgcagtagcacctagcttttaccttaatttcgacacacttctgttgaatctcaccagaccatgtgggaggatttaggtgaatccctagcagattgcttcccagggctccctgagtgtgtccagataccaagtgaggaatgaggtgtgatttgctgtatcatttgaaccaaaaagtatgcagcatgagaatttgctagatcgtttatcctgactgaaatagacaaagtaagagggaaaggaaaagaggtatcaagtaaatactgaaacccaatggtgtttttaaactgtttctgtttttattcatcttttgtaactatgacagaaatgtgctattttttcagtgggcaattttgtaatatattcagactatccagatacagagatgactaaggtcattgatagcgtctctgaacaatcagacggatcaccttatctctacacagctggcaaacaccaggctgcggcttggattaaccaggaaagaaagcttttctcactgagttgtttttatgtattgatggggacttttccacctcattagactaatactcattcaaaaagagtttggttctgctgtaaatccttgccgcctgctgaaacatggtgtgcaggtcaacggagaatactagctgctcctttttcaccacctttaccaatttcctatttgatggtttgtaagtagacagtaaggcaaggcagatgattattaccctcagaaaggttgcatctccctaggagtccaatgcttcctgtaatgaaatccactctctatgtgtgggaaaagaggcagggaggaatgaagagagctctgaatcgagaatcctagatgaaccacacgctttactaagcctcggcttcttcatctataatgtgaagggtttaataacatgagtccccaagctcctctggctgtgggaccacagatgagtctttcagaggcaggatccatttttgcagatagctatgacttgtggcaatcaggcttcgtagcttggggaggtagagttacttgacatgtatcatgtaataacagcctttgagacttggcacaactatggtgctgagaatgaaaatctaaatgattgaagttttaagtccaagtaggagttggtttgttttgccttgtttaaaaattgctgttagtcacagagtttgcaatctctggataccttcaaatcctagctctcactgtgggattcttgatctcagaggtgtttatttttcacagtcagcataggcttgcgccactgactcctccttcagtcggctttgcccaaaacaaattttagtattactggtattaagtttagtccagtggaattagaaggataattcaatagcaacagaaatataaattatattccattcccagagagagaatgcgctttggattgtttagtcctctgattaacgagtattttctcttcctgccaagaactaggtgaatcaggaattgattgcatatgcaagccctggccacagctgcacttacaggatgcctcatagacgatgaggggtctgaaaggccaacccgaggctggcagatctgaccccaaggaggtcctgctgcaaaccccctgagcctttgccattcactacttaccaaagtttgtttctggaggattttcctgtagctttgatagttt

SEQ ID NO: 326319 - protein, 532 aa, Artificial Sequence
  derived and/or modified sequence
MDQFGDILEGEVDHSFFDSDFEEGKKCETNSVFDKQNDDPKERIDKDTKNVNSNTGMQTTENYLTEKGNERNVKFPPEHPVENDVTQTVSSFSLPASSRSKKLCDVTTGLKIHVSIPNRIPKIVKEGEDDYYTDGEESSDDGKKYHVKSKSAKPSTNVKKSIRKKYCKVSSSSSSSLSSSSSGSGTDCLDAGSDSHLSDSSPSSKSSKKHVSGITLLSPKHKYKSGIKSTETQPSSTTPKCGHYPEESEDTVTDVSPLSTPDISPLQSFELGIANDQKVKIKKQENVSQEIYEDVEDLKNNSKYLKAAKKGKEKHEPDVSSKSSSVLDSSLDHRHKQKVLHDTMDLNHLLKAFLQLDKKGPQKHHFDQPSVAPGKNYSFTREEVRQIDRENQRLLKELSRQAEKPGSKSTIPRSADHPPKLYHSALNRQKEQQRIERENLALLKRLEAVKPTVGMKRSEQLMDYHRNMGYLNSSPLSRRARSTLGQYSPLRASRTSSATSGLSCRSERSAVDPSSGHPRRRPKPPNVRTAWL

SEQ ID NO: 326320 - DNA, 1599 bp, Artificial Sequence
  derived and/or modified sequence
atggaccagttcggcgacatcctggagggcgaggtggaccacagcttcttcgacagcgacttcgaggagggcaagaagtgcgagaccaacagcgtgttcgacaagcagaacgacgaccccaaggagagaatcgacaaggacaccaagaacgtgaacagcaacaccggcatgcagaccaccgagaactacctgaccgagaagggcaacgagagaaacgtgaagttcccccccgagcaccccgtggagaacgacgtgacccagaccgtgagcagcttcagcctgcccgccagcagcagaagcaagaagctgtgcgacgtgaccaccggcctgaagatccacgtgagcatccccaacagaatccccaagatcgtgaaggagggcgaggacgactactacaccgacggcgaggagagcagcgacgacggcaagaagtaccacgtgaagagcaagagcgccaagcccagcaccaacgtgaagaagagcatcagaaagaagtactgcaaggtgagcagcagcagcagcagcagcctgagcagcagcagcagcggcagcggcaccgactgcctggacgccggcagcgacagccacctgagcgacagcagccccagcagcaagagcagcaagaagcacgtgagcggcatcaccctgctgagccccaagcacaagtacaagagcggcatcaagagcaccgagacccagcccagcagcaccacccccaagtgcggccactaccccgaggagagcgaggacaccgtgaccgacgtgagccccctgagcacccccgacatcagccccctgcagagcttcgagctgggcatcgccaacgaccagaaggtgaagatcaagaagcaggagaacgtgagccaggagatctacgaggacgtggaggacctgaagaacaacagcaagtacctgaaggccgccaagaagggcaaggagaagcacgagcccgacgtgagcagcaagagcagcagcgtgctggacagcagcctggaccacagacacaagcagaaggtgctgcacgacaccatggacctgaaccacctgctgaaggccttcctgcagctggacaagaagggcccccagaagcaccacttcgaccagcccagcgtggcccccggcaagaactacagcttcaccagagaggaggtgagacagatcgacagagagaaccagagactgctgaaggagctgagcagacaggccgagaagcccggcagcaagagcaccatccccagaagcgccgaccacccccccaagctgtaccacagcgccctgaacagacagaaggagcagcagagaatcgagagagagaacctggccctgctgaagagactggaggccgtgaagcccaccgtgggcatgaagagaagcgagcagctgatggactaccacagaaacatgggctacctgaacagcagccccctgagcagaagagccagaagcaccctgggccagtacagccccctgagagccagcagaaccagcagcgccaccagcggcctgagctgcagaagcgagagaagcgccgtggaccccagcagcggccaccccagaagaagacccaagccccccaacgtgagaaccgcctggctgtag

SEQ ID NO: 326321 - DNA, 1599 bp, Artificial Sequence
  derived and/or modified sequence
atggatcagtttggggacatcctggagggtgaggtggatcacagtttttttgattcagattttgaagagggaaagaagtgcgaaacaaacagcgtgttcgacaagcagaacgacgaccccaaagagcgcattgataaggacacaaagaacgttaattcaaacacgggtatgcagacaacagagaattatctgaccgagaagggtaacgagagaaatgtcaaattcccacccgaacacccagtggagaatgacgtcacacaaactgtatcctcctttagtctgcccgcatccagcaggagcaaaaagctgtgcgatgttaccacaggtctaaaaatccacgtgagtatcccaaacagaattcctaagatcgtgaaagaaggggaggatgactactatactgacggagaggagagttcagatgacgggaagaaataccacgtgaaatcaaagtcagctaagccatccactaacgtaaaaaagtcaattcgtaagaaatattgtaaggtgtcctcatcctcctccagctccttgtcatcatccagcagcgggtctgggacagactgcctagacgctggatcagatagccatctgtctgatagctcaccatcaagcaaatcctctaaaaaacacgtctccggtatcactctgctgtcacctaagcacaaatacaaatcaggcatcaaaagcaccgagacacagcccagctcaactactcccaagtgtgggcattatcctgaagagagtgaagatacagtgacagacgtttcacctctgtcgacacccgatatttcaccgttgcagtctttcgagctcgggatagccaacgaccaaaaagtgaaaattaaaaagcaggagaatgtgtcccaggagatctatgaagacgttgaagatctgaagaataactccaagtatctcaaagccgcaaaaaaagggaaagagaaacacgaacccgatgtttcttccaagtcaagctccgtcctggatagctccttggatcacagacacaaacagaaggtcctgcatgataccatggatctgaatcacctgctgaaagcttttctacagctcgataaaaaagggccacaaaaacatcactttgaccagccatctgtagcccctggaaagaactattcgttcacacgagaggaagttaggcagatcgatagagaaaaccagcgtctgttaaaggagctgagccgccaagccgagaagccagggtccaagtccactatcccgaggagcgccgatcatccccctaagctgtatcacagcgccttgaaccgccaaaaggaacagcagcgcatcgagagggagaatctcgcattactgaagagattggaggcagtcaaaccgactgtcggaatgaaacgttctgagcagctgatggattatcacaggaatatgggctacttaaatagttcgccactttcccgtcgggcaaggagtacactgggtcaatatagtccgctgcgcgcctccaggacatcctcagcaacaagcggcctgtcttgcagaagcgagcggagcgcagttgaccctagctctggccaccctagacggaggcctaaaccaccaaatgtcaggactgcctggctatag

SEQ ID NO: 326322 - DNA, 1599 bp, Artificial Sequence
  derived and/or modified sequence
atggaccagtttggagacatcctggagggggaggtggaccacagcttctttgacagcgactttgaggagggcaagaagtgtgagaccaacagcgtgtttgacaagcagaatgatgaccccaaggagagaattgacaaggacaccaagaatgtgaacagcaacacaggcatgcagaccacagagaactacctgacagagaagggaaatgaaagaaatgtgaagttccccccagagcaccctgtggagaatgatgtgacccagacagtgtcctccttcagcctgcctgccagcagccgcagcaagaagctgtgtgatgtgaccaccggcctgaagatccacgtgtccatccccaaccgcatccccaagatcgtgaaggagggggaggatgactactacacagatggagaggagagcagtgatgatggcaagaagtaccacgtgaagagcaagagcgccaagcccagcaccaacgtgaagaagagcatcaggaagaagtactgcaaggtgagcagcagcagcagcagcagcctgagcagcagcagcagcggcagcggcacagactgcctggatgctggcagtgacagccacctgagtgacagcagccccagcagcaagagcagcaagaagcacgtgtctggcatcaccctgctgagccccaagcacaagtacaagagcggcatcaagagcacagagacccagcccagcagcaccacccccaagtgtggccactacccagaggagagtgaagatactgtgacagatgtgagccccctgagcaccccagacatcagccccctgcagagctttgagctgggcatcgccaatgaccagaaggtgaagatcaagaagcaggagaatgtgtcccaggagatctatgaagatgtggaggacctgaagaacaacagcaagtacctgaaggccgccaagaagggcaaggagaagcatgagccagatgtgagcagcaagagcagctctgtgctggacagcagcctggaccaccgccacaagcagaaggtgctgcatgacaccatggacctgaaccacctgctgaaggccttcctgcagctggacaagaagggcccccagaagcaccactttgaccagcccagcgtggcccctgggaagaactacagcttcacccgggaggaggtgcggcagattgaccgggagaaccagaggctgctgaaggagctgagccggcaggccgagaagccaggcagcaagagcaccatccccaggtctgctgaccacccccccaagctgtaccacagcgccctgaaccggcagaaggagcagcagagaattgagcgggagaacctggccctgctgaagaggctggaggccgtgaagcccaccgtgggcatgaagaggtctgagcagctgatggactaccacaggaacatgggctacctgaacagcagccccctgagccggcgggcccggagcaccctgggccagtacagccccctgcgggccagcaggaccagcagcgccaccagcggcctgagctgccgctctgagaggtctgctgtggaccccagcagcggccacccccggcggcggcccaagccacccaacgtgaggacagcctggctgtag

SEQ ID NO: 326323 - DNA, 1599 bp, Artificial Sequence
  derived and/or modified sequence
atggaccagttcggcgacatcctggagggcgaggtggaccacagcttctttgattcagattttgaggaggggaagaaatgcgagacgaactcagttttcgacaaacagaatgatgaccctaaagagaggatcgataaggatactaaaaatgtgaatagcaacacaggtatgcagaccacagagaattacctgactgagaaagggaacgaaaggaacgtcaaattcccccctgagcacccagttgagaacgatgtaacacagacagtgtcctcattctctcttccagcaagctcgcgaagcaaaaagctttgcgacgttacaacaggattgaaaatccatgttagcatcccaaacaggatcccaaaaatcgtcaaggagggcgaggacgattattatactgacggggaagagtcctcagacgacggtaagaaataccacgtgaaaagcaaaagtgccaagcccagcaccaacgtgaagaagtcaattcggaaaaagtattgtaaggtctcttccagtagttccagctcattaagctcatctagctctggctcaggtaccgactgtctggacgccgggtccgacagccacttgtctgatagttcaccgagttccaaaagctcgaagaaacacgtctcagggattactttgctaagcccaaagcacaaatacaagagcggtattaagtctaccgagacccagccatcatcaactacacccaagtgcggtcactaccccgaagagtccgaagatactgttaccgacgtttcgcctctgtccactccagatatttcaccgctccagagctttgagttgggaattgctaacgatcagaaagtgaagatcaagaagcaggaaaacgtctctcaagagatatatgaggacgttgaggacctgaagaataactcaaaatacctgaaagctgcaaaaaaaggcaaagaaaagcatgaaccggacgtgtcttccaagtccagctccgtgcttgattcaagcttggaccacagacataaacagaaggtcctgcacgatactatggatctgaatcatcttcttaaagcattccttcagctcgataagaaagggccacagaagcaccacttcgatcagccgagtgttgcaccagggaagaattacagttttaccagggaagaggtgaggcagattgatagagagaaccagcgccttctcaaggaactgtctaggcaggcggagaaacctggttcaaagtccaccatcccaagatctgcggaccacccgccgaaactgtaccattctgcactcaaccggcaaaaagagcaacaaagaattgagcgtgaaaatctagcactacttaaacgcctcgaggccgtcaagcccaccgtggggatgaaacggagtgagcaactgatggattatcacagaaatatggggtaccttaactcaagtccactcagtcgccgggctaggtcaaccctaggccagtattcccccctgagggcatcgagaacatctagcgcgacctctggcctgagctgccgcagcgagcgatccgccgtggatccatcaagcggccacccgcggcgcagaccgaagccccccaatgtgcgcacagcttggctgtag

SEQ ID NO: 326324 - DNA, 1599 bp, Artificial Sequence
  derived and/or modified sequence
atggatcagttcggcgatattctggaaggcgaagttgatcactcctttttcgattctgactttgaggaaggcaaaaagtgcgagaccaacagcgtttttgacaagcaaaacgacgatcctaaagagaggatagacaaggatactaaaaatgtaaattccaataccggcatgcagaccactgagaactacctgacagagaagggcaacgagaggaacgttaaattccccccagaacacccagtggaaaatgacgtaacccagactgtatcctcctttagccttcccgcttctagccgtagtaaaaaactgtgcgatgtcaccactggcctgaagatccacgtgtcaattccaaatcggatccccaagatagtgaaagaaggggaggacgattactatactgacggtgaggagtcctctgacgatggtaagaagtatcacgtaaagtctaaatctgccaagccctcaactaacgtgaagaagagcatccgcaaaaaatattgtaaagtgtcgtcatcctctagtagttcattatcttcttcctccagcggctccggcaccgactgtctcgacgccggttcagattcacatctctctgactcctccccatccagtaaatcatccaaaaaacacgtgtcaggcatcaccttgctcagtccgaagcacaagtataagtctggcatcaagtccactgagacgcaacccagctccaccacccctaagtgcggtcactatccggaagagtcagaggacactgtaacagatgtgagccctctaagcaccccagacatctccccgctacaatctttcgagctgggcatcgcaaacgatcagaaggtcaaaattaagaagcaagaaaacgtcagccaggaaatctacgaggatgttgaagacttgaagaataattcgaaatacctgaaagcggctaagaaagggaaagaaaaacatgagccagacgtaagttctaaatcctcctccgtgctggattcatcgcttgaccacaggcacaaacagaaggttctccacgatacgatggacctgaaccacctgctcaaagcttttctacagctggataagaagggccctcaaaagcatcattttgaccaacctagcgtggcccctggaaagaactactcgttcaccagagaggaggtccgccaaatagatagggagaaccagagactgttgaaagaactgtctcgacaggcagagaaacctggaagcaaatcgaccattccacgctccgctgatcatcctcccaagttgtatcattccgctctgaaccggcagaaggagcaacagagaatcgagagagagaacctggccctgttgaaaagactggaggctgtgaaacccaccgttggaatgaagaggtcggaacagttgatggattaccaccgtaacatggggtaccttaattcctcaccactgtctaggcgcgctcgatcaactctaggccagtattcgccactcagggcctctcgcacatcatccgctaccagcggcctgtcctgccgttcggagagatccgcagtcgacccatcctctggacaccccagacggagaccaaaaccacccaacgtgcggacagcctggctgtag

SEQ ID NO: 326325 - DNA, 4852 bp, Artificial Sequence
  derived and/or modified sequence
tctctccgcctccggaagcgcgggcgcgcggcgccgggagcccgttcagggccgcgggagtgcgccagcgccgcgcgtggggctgtggtggccgcggctctcagatatatttttgccatcatggatcagtttggagatatattagaaggtgaagtggaccattctttctttgacagtgactttgaagaaggaaagaaatgtgaaactaactcagtttttgacaagcaaaatgatgacccaaaggaaagaatagataaagatacaaaaaatgtaaattcgaacactggaatgcaaacaacagaaaattatcttactgagaagggaaatgaaagaaacgtgaaatttcccccagaacaccccgtagagaatgatgttacacaaactgtaagttctttctcattgccagcctcttcaagatcaaaaaaattgtgtgatgttacaacaggacttaaaatacacgtgtccattccaaatagaattcccaaaattgtaaaagaaggtgaagatgattactacacagatggagaggaaagcagtgatgatgggaagaaataccatgtgaagtccaagtccgctaaaccatctactaacgttaaaaaaagcataaggaaaaagtattgcaaagttagctcctcttcctcctcctctttatcttcctcatcttcaggttcaggtacagattgtttagatgcagggtctgatagccatctatctgattcgtctccgtcatctaagtcatctaagaaacatgtatctggtataaccctcctgtcaccaaaacacaagtataaatcaggaataaaatcgacagaaacacagccttcaagtactacaccaaaatgtggccactaccctgaggagtctgaagatactgtgactgacgtaagtcccttatcaactccagacattagccctcttcagtcttttgaactgggcatagcaaatgatcaaaaagtgaaaattaaaaagcaagaaaatgtgagccaagaaatatatgaagatgttgaggatttgaaaaataattcaaaatatttgaaagcagccaaaaaagggaaagaaaaacatgagcctgatgtctcctcaaagtcgtcttcagtgttagactccagtttagaccacagacataaacagaaagtcttacatgacacaatggatctgaatcatctcttgaaagcttttctgcaattagataaaaaaggaccacaaaaacatcactttgatcagccttcagtagcacccgggaaaaactactctttcacaagagaagaggtgagacagatcgatcgggaaaatcagaggcttttgaaagaactgtcaagacaggcggaaaagccgggaagcaaaagtacaattcctagatcggctgatcatcccccaaagttatatcacagtgctctcaacagacagaaggaacaacaaaggattgagagagaaaacttggctttattgaaaaggcttgaggccgtgaaaccaacagttggtatgaaacgttcagaacaactgatggactatcatcgcaatatgggctatctcaactcatcaccattgtcaagacgggccagatccactcttggccaatatagcccattaagagcttccaggacatccagtgctacgagtggtctcagttgtaggagtgagcgatcagcggttgacccctccagtggccaccctcgaagaagacctaaaccccctaatgtccgtacagcttggttataaaacacttttttactttaaacattgttcacacaacttttcttgaagtgctcgtgcatattcctataattctctgtgtaaacatctagaataccgttttagcaattgaaggtgtacaacagtgagttgtaatgtattgttattcagtgcaaaattattgtcaaaaaacgatttaatgtaaaaagtgtttcctgaggatgtatttatatgagatgtatgtgttcttaatagagaaatagtggtatgcatgtgtatcttctaattattcagttgtcatgctgtcaaaatagtagtgatagtatcattgcatgtcgtacccaagatggtcactatagttttcaatttgtgttattttcatttctttataagtgttataccatgagctcagctcctaaatttggctggctttgtttttcatttgctttagaacttatgtggcatgacatagctcgattgtatgagatttaacacttattatgaaacaaatcttgaaatttgttttcactggtagagctgatctagatttgatgagcagattgagagacgcttctattggagcaattcttgtaattcaccagaggtatctagttgttgtataagtgcactgagttagatcttaaaagtttgatcaatcattccaaaccatttcaaatatgaatattagaaagttcaacttagaagcttcccttttgtgttttcatgcattcaggtaaagtcctatttatgactcttagaaatgaggtaggttttagagctagtcttctaactcgtgaatagtttaaggaccacatcagttgcaaaccaagtatttgttgaatcagtaaaatggcactatcagcatgaagagccgagaagcagatcctgaggtgtgtcggacagtgttttaggtaattcagtatttattatgttattagagaagacttagcgtaagaaagaaatgctttagaaattccagcaagtatttataaggcctgaaaaaactaaaatttgaacaaaaagggaaataaatcacacatttgttgaggctgctgctttaagtattagctaattttcttgttttggtttactttgatttatttgattgaaccctggaagtattatttttaccagtcccacatttaaagacctagtaatcttgatggaattggtaatggcagatagggtttaatgttgttgacttttcaaattagaattttttttctatgaaacttaggcttttatataacaaagtatgttatctcattgttaccgccgtttttcactactagccttttcagtatgcccttaaaatgtattggaaaggttccatgttaaatgacaaatatctttttcagtatgaatttttgatctgtagccacaataagattttcatttttcagtgctcaggctctgtagcatgtatgctgaatgcttttttccttagcacctttaacagtaaggtgttactgcattttacaaaacatcaattcaacatgtcttggatttagtttgtattcatagattttgttaaggatcaggcctgtgaacatgggcacagtgaggttaaataattcacctggccacaacctggctttgaggttctgcttttgggggccataattttcattcaatgttattcgatgctctgttctggtgaacaagttactatacctgctgtgtatataagcttgagctatactaaaccaaggctttattttcttttgttttttaacttactgtacttttactgtttatataacctatatttcaagagagagaagataatgctgaattttaaatttagcatttgaacatctgtccaatagtgaattaatcagtttttttaaaattgatttttaagttgttccagaaaaaaatatatatatatgttttatatatataatctttttatatatataaaaaatcttttttataaattttattttaaaaatcttttaaaaaagatttttatatatatataaagattatatatttatatatagtcttttctgttcataatggcattagtctctgagtacattttatattatctttgttgccacatgtcaggatacaacacaatagttttataaataacaactgtactttgattttaggtactaatttaatgctttagtttttactactttgaaaggggaggttcatctaagtattactgataacagggatccaacttaaagtaaaagttggaaagggcaagagtcttttaagcggaacttcaattctgttgtcatggttacttatatataatgaatataaatagacaaataggacttggaaaatgtggtatattctaagtcaagatgctatgaagttgttatagtttaagggacattcttaagaaggaattacttaagtacattactcttctcatttcaaggacatgaaaaagtaaaggatggtctggcactattttattttattttttttttgacttgtactgaatatatgtactttgaagatttacatctataactagaaagtatgctaatccgaggtctggttattaggccagattcttgttcagttattttttaaactaatgttgcctcctttttagtaagattctacgaaagttttttaactattaaagttatttcttaaggggtagctcttatacttcctctgctctctttttcagtttccataaaaagctgttttcttagctattactccaaataaagttctttggtttgcttaaaaatgtagtgtaatgcagttgttttctctccgctaacctgagtgtccacagtagatatcgagacagctttaggaaggtgacggtcatgggtaagtgacggctgtgcctgtcatcttcagattcttcaaatactgcaaactatgaaacatgttaagaccaatataaacccaaagatgtgagttgattatactttaataattacattcataaaaagtttactatcttcaatgccaaaaaagtcttaacctataaatgattatatacaatcttagaaaatgtgcttaacagttatggcttctttatttctatgaggaaagattagtaagaaacttaaaattaacatccttttaagattttctgttccattttaatgtattttaggcatttagaactagcctggcataatgaagaaagaaataaaagaattaaagataa

SEQ ID NO: 326326 - protein, 258 aa, Artificial Sequence [sequence omitted]

SEQ ID NO: 326327 - protein, 186 aa, Artificial Sequence
  derived and/or modified sequence
MAFYSTTEYDIQLARGLLSGMFLFATRRSEPAGRPHSWHTTKSGEKQPDASMMQISQGMIGPPWHQSYHSSSSTSDLSNYDHAYLRRSPDQCSSQGSMESLEPSGAYPPCHLSPAKSTGSIDQLSHFHNKRDSAYSSFSTSSSILEYPHPGKRVKTRDLPGSQSPGRAISRKTTMPTSGGGWREKA

SEQ ID NO: 326328 - DNA, 561 bp, Artificial Sequence
  derived and/or modified sequence
atggcattctacagtactactgaatatgatatccagcttgcgcgcggcctgctgtctggcatgttcttgtttgccacaaggcgctccgagccagccgggcggcctcattcttggcacacaacaaaatctggtgaaaaacagccggatgcctccatgatgcagatcagccaggggatgatcggccctccatggcatcaaagctatcactcctccagctccacctctgatctgagcaattatgaccacgcttatttacgccggagccctgatcagtgcagcagccaaggaagcatggaaagtctggaacctagcggagcctatcccccttgccacctctccccggcaaaatctaccggatccatcgatcagttatcccactttcacaacaagagagactctgcctactcgtcgttcagcacttccagctccattctggagtatccccatcctggaaaacgcgtcaagactcgtgacctccctggctctcagagccctgggagggccatctcaaggaagacgacgatgccaacctccggtggcggctggagagagaaagcctag

SEQ ID NO: 326329 - DNA, 561 bp, Artificial Sequence
  derived and/or modified sequence
atggccttctacagcaccacagaatatgacatccagctggcccggggcctgctgagcggcatgttcctgtttgccaccaggagaagtgagcccgccggccggccccacagctggcacaccaccaagtctggagagaagcagccagatgcctccatgatgcagatcagccagggcatgattggccccccctggcaccagagctaccacagcagcagcagcaccagtgacctgagcaactatgaccacgcctacctgcggcgcagcccagaccagtgcagcagccagggctccatggagagcctggagcccagcggggcctacccaccctgccacctgagccctgccaagagcacaggcagcattgaccagctgagccacttccacaacaagagggacagcgcctacagcagcttcagcaccagcagcagcatcctggagtacccccaccctgggaagagggtgaagacccgggacctgcccggcagccagagccctggccgggccatcagcaggaagaccaccatgcccaccagcggcggcggctggagggagaaggcctag

SEQ ID NO: 326330 - DNA, 561 bp, Artificial Sequence
  derived and/or modified sequence
atggccttctacagcaccaccgagtacgacatccagctggcccgggggctcttatcaggcatgttcctgttcgccactagacgatctgagcccgccgggcgaccacacagttggcatacaacaaagtcgggcgagaagcagccggatgccagtatgatgcagatttctcagggcatgatcgggccaccgtggcaccaaagctaccacagtagcagcagtacttccgacctgagcaactatgatcacgcctatctaagacgtagtcctgatcagtgtagttcccagggatctatggagagtctcgagccctccggagcttaccccccatgccacctcagtcccgccaaatccactggcagtatcgaccagctcagccactttcacaacaagcgtgactcggcatactctagcttctctacaagctcctccatcctcgaatacccccaccccggaaagagggtgaaaaccagagacttacctggctcacagtcccccggacgcgccatcagccgcaaaaccaccatgcccacgagcgggggaggatggcgggaaaaggcctag

SEQ ID NO: 326331 - DNA, 561 bp, Artificial Sequence
  derived and/or modified sequence
atggctttctacagtaccactgagtacgacatacaactcgcgaggggtctcctgagcggcatgttccttttcgcaacccgacggtccgagccagcaggcagaccccactcctggcacactacaaaaagtggtgaaaagcagcccgacgcatccatgatgcagatctcccagggtatgattggaccaccgtggcatcagtcctaccattctagttccagcaccagtgacctttccaattacgaccacgcctatctcagacgcagcccggaccaatgctcctctcaagggagcatggaatccctggagccgtccggtgcctaccctccttgccatctgtccccggcaaaaagcaccgggtccattgaccagctgagtcatttccataataaacgcgactccgcttattcttcctttagcacatcgagctctatcctggaataccctcatccgggtaagagggtcaagaccagagacttgccgggatcgcagtcccccggacgcgcaatttctcgaaagaccacgatgccgacaagcggcggtggttggcgagaaaaggcctag

SEQ ID NO: 326332 - DNA, 2241 bp, Artificial Sequence
  derived and/or modified sequence
gcattctatcatcagatgattttccttgcttccctcctcctcttgcccacaaaaatagaattccagcatttctaagctataggctattgttcaagatgccagctcttctcagggagtcattaagggtcaccttctcttcttccctcttacagagcaggaattgaattttaattggccaatttacagaggggactggcattgagagtccctcccacttgcgctgagctgggcaagttcaaggcgattcaggccgtccaactggaggcacatgtagtacttgtgaggcttttaccatgctgtggggagcagaaagagcagtagcagggcagaatggctttttattccacgactgaatatgacatccaattggccagagggttgctatctgggatgtttctatttgccacaaggcgcagtgagcctgcaggccgacctcactcgtggcacacaactaaatctggggagaagcaacccgatgccagcatgatgcagatatctcagggtatgatcggccctccttggcaccaaagctaccattccagctcctctactagtgacctctccaactatgaccatgcttatctaaggcggagccctgaccagtgcagctcccaggggagcatggagagcctggagcccagtggggcatacccaccctgtcatctttcccctgccaagtccaccggcagcattgaccagctcagccacttccataacaagagagactcggcttacagctctttctccaccagttctagcatcctagagtatccacaccctggcaagcgggtgaagacaagagatcttccaggctctcagagccctgggagggcgatttccaggaagaccacaatgccaacctctggaggaggctggagagagaaggcctaggccagagcctgtcaggcaactttggcaagaccaagtcagccttctcatctctccagaacattcctgagagtctgagaagacacagcagcctggagctaggccggggaacccaggagggttaccccgggggcaggcccacctgtgcagtcaacaccaaggcagaagaccctgggaggaaagccgctcctgacctcgggagccatctggaccggcaggtttcctacccgcggcccgaggggaggaccggtgcctcggcttctttcaacagcacagacccaagtcccgaagagccgcctgccccctcgcacccgcacacatccagtctgtatcagagctgctctggcagagaggccctcagagctcggtgctgggaaaggagcaagtggaagtggtgagcgtggccaacgtcttgccaagactgagaggggaagggctttgtaaggaggagagcctagagaaatagattcgtgtactacactgacccttacctctgaggcattaaggtgggtgttggcgcaaatcctgaaaatcaggaaaggtctgagtaggagcgcactgtctggtttggcccagtccgtgagcctctgcttctgaagctccttgagccagccatgtaacacgtgtcccagtgtgcagtctgtgcttttcatttctcctgggttactgcagtattttcttgcatgttttatttccttaaaagactactatgagaaagactgagtagctttcattttctcttaaattttcagtgaaatctttgtggattgacagtctgggactcagcagttagtggcttccagactaaataaaaacagaacattttatccaaatttgggattgcattttaaaaatttccaactgatcctaactaaattactaacaggaacaccacgtttcattttatgggggagagagaaaggaaagagctatgtgatacttacaagctatttgtcacattgtcagaggctcttctgattcaaggccttaactgtcaccttgtccatttcactgcttttattttcagatttgggaaacagactaattgaggtgaagtgatttatccagggtcatgtctttagcaaacacatactgagcacctacaatgtgcaaggcaatccactgggtactatggggaccccaaagataagatttttgtaggtgtgccagtcagttcaccatgggtggttgcagtatggtcattctgttctctgaccactggctgaaggaccaaagtaacatccttagcaaagtatttcctagcattaccactggaaatatatgtttgctccgtcagtttagaagcagaatggtcatggagcttttgcagcactgagaccttcctggggattt

SEQ ID NO: 326333 - DNA, 561 bp, Artificial Sequence
  derived and/or modified sequence
atggccttctacagcaccaccgagtacgacatccagctggccagaggcctgctgagcggcatgttcctgttcgccaccagaagaagcgagcccgccggcagaccccacagctggcacaccaccaagagcggcgagaagcagcccgacgccagcatgatgcagatcagccagggcatgatcggccccccctggcaccagagctaccacagcagcagcagcaccagcgacctgagcaactacgaccacgcctacctgagaagaagccccgaccagtgcagcagccagggcagcatggagagcctggagcccagcggcgcctaccccccctgccacctgagccccgccaagagcaccggcagcatcgaccagctgagccacttccacaacaagagagacagcgcctacagcagcttcagcaccagcagcagcatcctggagtacccccaccccggcaagagagtgaagaccagagacctgcccggcagccagagccccggcagagccatcagcagaaagaccaccatgcccaccagcggcggcggctggagagagaaggcctag

SEQ ID NO: 326334 - DNA, 420 bp, Artificial Sequence
  derived and/or modified sequence
atgcatgtgagtttagccgaggctttagaggtaaggggcgggccgctgcaggaggaggaaatttgggcagtgctgaaccaaagtgcagagtctctccaagagctgttcaggaaagtgagtctagccgaccctgctgccctcgggtttatcatttctccctggagcctgttactgttaccctctggaagtgtaagctttacggatgagaatattagtaatcaagacttgagggccttcacagcacctgaggttctgcagaaccaatccctcaccagtctgagcgatgtcgagaagatacacatatactctttgggaatgactttgtactggggagcggactatgaggtgccacagagtcagcctattaagcttggggatcatctgaactcaatactgttaggcatgtgtgaggatgtgtag

SEQ ID NO: 326335 - DNA, 420 bp, Artificial Sequence
  derived and/or modified sequence
atgcacgtgtccctggccgaggccctggaggtgcggggcggccccctgcaggaggaggagatctgggccgtgctgaaccagagcgctgagagcctgcaggagctgttcaggaaggtgtccctggccgaccctgctgccctgggcttcatcatcagcccctggagcctgctgctgctgcccagcggctctgtgtccttcacagatgagaacatcagcaaccaggacctgcgggccttcaccgcccctgaggtgctgcagaaccagagcctgaccagcctgagtgatgtggagaagatccacatctacagcctgggcatgaccctgtactggggcgctgactatgaggtgccccagagccagcccatcaagctgggggaccacctgaacagcatcctgctgggcatgtgtgaagatgtgtag

SEQ ID NO: 326336 - DNA, 420 bp, Artificial Sequence
  derived and/or modified sequence
atgcacgtgagcctggccgaggccctggaggtgcggggcggccccctgcaagaggaagagatctgggccgtgctgaaccagtctgcagaaagcctccaagaactgtttcggaaggttagtttggctgatcctgccgccctgggctttatcatttccccctggtccctgttgctccttccgagcgggtcagtgtcttttactgacgaaaacatctctaaccaggatttacgcgcgttcaccgccccagaagtgcttcagaatcaatcgctgacaagcctcagtgatgttgaaaagatccatatctacagtctcggaatgaccctttactggggcgctgactacgaagtgccacagagccaaccaataaagttgggagatcatttaaacagtattctgctcgggatgtgtgaagacgtatag

SEQ ID NO: 326337 - DNA, 420 bp, Artificial Sequence
  derived and/or modified sequence
atgcacgtctccctggccgaggcgttggaagtgcgaggcggacctcttcaggaagaagagatctgggcggtgcttaaccaaagtgcagagtcgctccaggaactctttcgcaaggtgtccctggccgatcccgcagctttgggattcatcatctctccgtggtcgctacttctcctgccaagtggttcggtctcattcactgacgagaatatatcgaatcaggacctgcgcgcatttacagcccctgaggtcctccaaaaccagtcactcaccagcttgagtgatgtggagaagatccacatatactcactaggcatgactttgtactggggagctgattatgaagtcccccaaagtcaacctattaagttgggagatcacttgaactcgattttgctaggaatgtgcgaagatgtctag

SEQ ID NO: 326338 - DNA, 516 bp, Artificial Sequence
  derived and/or modified sequence
agctccctcgcagaaaatggggcaatcgggtttgttttcaaggcaggacctgaacaaaatgtaggacacctgatctgtgggatgaagggcgctggtaatatgcacgtgtcactagctgaggccctggaggttcggggtggaccacttcaggaggaagaaatatgggctgtattaaatcaaagtgctgaaagtctccaagaattattcagaaaagtaagcctagctgatcctgctgcccttggcttcatcatttctccatggtctctgctgttgctgccatctggtagtgtgtcatttacagatgaaaatatttccaatcaggatcttcgagcattcactgcaccagaggttcttcaaaatcagtcactaacttctctctcagatgttgaaaagatccacatttattctcttggaatgacactgtattggggggctgattatgaagtgcctcagagccaacctattaagcttggagatcatctcaacagcatactgcttggaatgtgtgaggatgtt

SEQ ID NO: 326339 - DNA, 420 bp, Artificial Sequence
  derived and/or modified sequence
atgcacgtgagcctggccgaggccctggaggtgagaggcggccccctgcaggaggaggagatctgggccgtgctgaaccagagcgccgagagcctgcaggagctgttcagaaaggtgagcctggccgaccccgccgccctgggcttcatcatcagcccctggagcctgctgctgctgcccagcggcagcgtgagcttcaccgacgagaacatcagcaaccaggacctgagagccttcaccgcccccgaggtgctgcagaaccagagcctgaccagcctgagcgacgtggagaagatccacatctacagcctgggcatgaccctgtactggggcgccgactacgaggtgccccagagccagcccatcaagctgggcgaccacctgaacagcatcctgctgggcatgtgcgaggacgtgtag

SEQ ID NO: 326340 - DNA, 7473 bp, Artificial Sequence
  derived and/or modified sequence
atgcacgtatccctggcagaggcactcgaggtaagggggggaccactccaagaagaagagatttgggccgtgctaaaccagtcagcagagagtctccaggagctgttccggaaggtgtcactcgcagatccagctgccctgggctttattatttccccatggtcactactgctgctcccgtccggcagtgtgtcctttacagacgagaatattagcaaccaggatctgcgtgcattcaccgctccagaagttctgcagaaccagagcttaacgtctttatccgacgtggagaaaatccacatttactcgctgggcatgacgctctactggggcgccgattatgaggtgcctcagagtcagcctattaagctgggcgatcatctaaatagtatattgctcggaatgtgcgaggatgtgatctacgcccgcgtgtccgttcgcacagtactcgacgcttgctctgcccacatccgaaacagcaactgtgcccccagctttagctacgttaaacacctggtaaaactagtgctgggcaatctatccggaacagatcagctgtcgtgtaactctgaacaaaaaccagaccggagtcaggcaatccgcgacaggcttcggggaaagggcctcccgaccggccgcagctccacgtcagacgtgcttgatatccaaaagccccctttgtcccatcaaactttcttaaataaaggactaagtaagtctatgggttttctgtccatcaaggacacccaggacgaaaattactttaaggacattttgtccgataatagtggccgggaggatagcgagaacacgtttagcccttaccagttcaagacctccgggcctgagaaaaaaccgattcccggcatagacgtcctttcaaagaagaaaatttgggcatcctccatggacctcctgtgtactgcagaccgggatttcagcagtggcgaaaccgctacctaccggagatgccacccagaagctgtcactgtgagaacctccacaacgccaagaaagaaggaggccagatatagcgatgggtctatagcacttgatatttttggtccacagaagatggatccaatctatcacaccagagagctccctacttcatccgccattagttccgccttggatcgcattcgggagcgtcaaaagaagctgcaagtgctgagggaggcaatgaatgtagaggagccagtccgtagatataagacctatcacggtgacgttttcagcacatctagcgaatccccctcgattatttccagcgaatcagacttcagacaggtgcgacgcagtgaggcatctaaaaggtttgaatccagcagtggcctccccggcgtagacgaaactctctcgcaaggccagtcccagcggccttctcgccagtacgagaccccattcgagggaaacctgataaaccaggaaataatgctgaaaagacaggaggaagagctgatgcagctacaggcaaagatggccttgcgacaatctcggctgagcctttatccaggcgacactataaaagccagtatgctggacatcactagggatcctctgcgagagatcgctctggaaacagctatgacgcagaggaaacttcgcaacttcttcggcccagagttcgtcaaaatgacgatcgaaccctttatcagcctggacttaccgcgcagcattcttacgaagaaggggaagaacgaggacaaccggcgcaaggtaaatataatgttgttaaatggccagcgtctggaactgacctgcgacacgaaaactatttgtaaggacgtgttcgacatggtggtagcacacatcggtctggttgaacaccatctttttgccctggccactcttaaagataatgagtacttttttgtcgatccagacttgaagttgactaaagtggcacctgaggggtggaaggaagaacctaaaaaaaaaaccaaggccactgtgaacttcactttgtttttccgcataaagttcttcatggacgatgtatcattgattcaacacacacttacctgtcaccagtactacttgcagcttcgtaaggacattctggaggaaagaatgcactgcgacgacgagaccagtctcctgctagcctccctggccctgcaggccgagtatggagactaccagcccgaggtgcatggggttagctacttccgtatggaacattacctgccagctagagtcatggaaaagctagacctgagttacataaaggaagagttacccaagctccacaacacctatgtgggcgccagtgaaaaggaaactgaactcgaattcctcaaggtgtgccagcgtctaactgagtacggcgtgcactttcaccgcgtacacccagagaaaaagtcccagaccggcattctgctgggcgtgtgcagtaagggagtgcttgtattcgaggtccataatggggtgagaaccctcgttctgaggtttccctggagggaaactaaaaagatctccttttccaaaaagaaaattactctccagaatacctccgacggaattaaacacggtttccagactgacaacagtaagatttgccaatatttactgcatctatgtagttaccagcataagtttcaattgcagatgagggctagacagtcaaatcaggatgcacaggatatagagagagcttcttttaggtcactcaatctgcaggccgagtcagtgcgcgggtttaacatgggacgggcgatttccaccggcagtctggcgtcgtctaccctcaataaactggccgtgcggcccttgtctgttcaggccgaaatccttaaaaggctgagctgttcagagctgtctctgtatcaaccgctacagaattccagtaaagaaaagaatgataaggcctcgtgggaggagaaaccccgtgaaatgtccaagtcataccatgatctgtctcaggcttctctgtaccctcatcgtaagaacgttattgttaacatggagcccccgcctcagacagtggcagagctggtgggcaaaccatcccaccaaatgtctagaagtgatgctgagtccctggccggggtgacgaaactgaacaattcaaaatctgttgcaagcctcaaccgctctcccgaaagaaggaaacacgaaagcgatagctcgagcattgaagaccccggccaagcctacgtcctagggatgactatgcattcttcgggaaattcgtcaagtcaagtccctctgaaggagaatgacgtcctccacaaaaggtggtccattgtaagtagccccgagcgggaaatcacactcgtcaacctgaagaaggacgctaaatacggcttggggttccaaattatcggtggagaaaaaatgggccgccttgatctgggcattttcatatcctccgtggcccctggggggcccgccgacctggatggatgccttaagcctggggataggctcataagcgtgaatagcgtctccctcgagggggtgtctcaccacgctgcaatagaaattctccaaaatgcccccgaggacgtaaccctggtaattagccagcctaaagagaaaattagcaaagtccctagcacccctgttcatctaacaaatgagatgaagaactatatgaaaaagtcaagttatatgcaggacagcgcaattgactcttcctcgaaggatcatcactggtcacggggcaccttaaggcatatcagtgaaaatagctttggccccagcggaggcctgcgcgaaggatccctgtcttcacaggatagtcgtacagaatctgcatccctgagccagtcccaggtgaatggctttttcgcatctcacctgggggaccagacgtggcaagaatcacagcacggatcaccaagcccctctgtaatctcaaaggccacagaaaaagagaccttcacagattctaaccagtctaagaccaaaaagccagggatctctgacgtcactgactattcagatcgaggcgactcagacatggacgaggctacttactcctcaagccaagaccatcagactcctaaacaggagagctccagctctgtgaacacctcaaacaaaatgaatttcaagacattttcaagctcacctccaaagccaggggacatcttcgaggttgaattggcaaaaaatgataattctctgggaatctcagtgaccgtactctttgataaaggaggagttaacacctccgtgaggcacggcggcatatacgtgaaagccgtcatacctcagggagccgctgagtcggacggacgaattcacaaaggtgatagagtgcttgccgtcaatggggtgagccttgagggggccacacacaagcaggccgtcgaaactctccggaacactggacaggttgtacatctgttgctggaaaagggccagtcccccacatccaaggagcatgtgcctgtgacccctcagtgtacattatctgaccaaaacgctcagggacagggcccagaaaaagtcaagaagaccacgcaagtgaaagattactcctttgtgacagaagagaatacatttgaggtgaaactcttcaagaattctagcggtctcggattctcttttagccgagaggacaacctgattcctgaacagattaacgcctcaattgtccgggtgaaaaagctgtttccgggccagcctgcagcagagtccggtaaaatcgacgtgggcgacgttatcctcaaggtaaacggagcttcgttaaaaggactcagccagcaagaggtgatctctgccctgcgcggtaccgccccagaagttttcctcctgttgtgtcgtcctccccctggcgtgctgcccgaaatcgacaccgccttgctgaccccattgcagtcgcctgctcaggttctgccaaacagctctaaagattcttctcagcctagctgcgtggagcagtctacttcaagcgatgaaaatgagatgagtgataagagcaagaaacagtgcaagtctccttcaaggagggactcttactccgactcctcggggtccggagaagatgatctggtcacagccccagccaatatcagtaatagtacgtggagcagcgcgctgcaccaaacactgtcgaacatggtaagtcaggcacaatcccatcatgaggcacccaagagtcaggaggacacgatttgcactatgttctactaccctcaaaaaataccaaataaaccagagttcgaggacagcaacccatcgcctctgcccccagacatggccccaggacagtcatatcagcctcagagcgaatcagcctcttcgtccagcatggacaaatatcatatccaccacattagcgaacccactaggcaggagaattggacaccactaaagaatgacctggagaatcatctggaggacttcgaactagaggtggaacttctgatcacactgatcaaatcggagaaaggctcattgggttttacagtgactaaggggaatcaacgaatcggctgttatgtccatgacgtaattcaagatcctgccaagagtgacggcagactgaaaccaggggaccgcttgatcaaggtgaatgatacagatgttacgaatatgacacacaccgatgctgttaacctgttgcgagccgcctccaagactgttcggctggtgatcggaagagtactcgagttgccacggatcccaatgttgccacacttgctgcccgatatcacccttacatgcaataaagaggaacttggcttttctttgtgcggcgggcacgattctttgtaccaagtcgtgtacatcagtgatataaacccacggtccgtggctgccatcgaagggaatctgcagctcctggacgtaattcattatgtgaatggggtatccactcaaggcatgacactggaagaggtgaaccgggccctggacatgtctttacctagccttgtgctaaaagcaacccgaaacgacctgcctgtagtgccttcctcaaagcgatccgccgtgtctgctccaaagtcaacaaaaggtaatggatcctacagcgtcggcagctgcagtcaaccagccctcactcctaatgatagtttttctactgttgccggggaagaaatcaatgaaatctcctatcccaaaggtaaatgcagcacttaccagataaagggctctccaaacctgactttaccaaaagagtcctacattcaggaggatgacatctacgatgacagtcaggaggctgaggtcatccagagtctgctggacgttgtcgacgaggaggctcagaacttgcttaatgagaataacgccgccggatattcctgtggtccgggaaccctaaagatgaatggcaagcttagtgaggaaaggaccgaagacactgactgcgatggctcccccttacccgagtatttcactgaggccacgaaaatgaacggatgcgaggagtattgtgaagaaaaagtgaaatccgagtccctcatccaaaaacctcaagaaaaaaagacagacgacgatgaaataacgtggggaaatgacgagctcccaattgaacgtacaaaccacgaagacagcgataaagaccattctttcttgacaaatgacgaactggcagttctgccagtcgtgaaagtcttacccagcggcaaatatacaggggcaaacctgaaatcagtgatccgggtcctgcgggggcttcttgatcaaggtatcccttcaaaagagctcgagaacctgcaggaactgaaacctctagaccagtgcctgatcggccagacaaaagagaaccggcgaaaaaatcgctataaaaacatactgccttacgatgccacgcgagttccccttggagacgaaggcggatatatcaacgcctctttcattaagatcccggttggcaaggaggagtttgtctatatcgcttgtcagggcccactgcccactacggtaggcgacttttggcagatgatatgggagcaaaagagtactgtgatcgccatgatgactcaagaggtcgaaggtgaaaaaatcaaatgtcagcgctactggcctaacattctggggaagaccactatggtatctaaccgactccggttggctctggttcggatgcagcaacttaagggtttcgtcgtgagagcaatgacactggaagacatacagacgagagaagtgcgacacatcagtcacctgaatttcaccgcctggcctgaccatgatacacccagccaacccgatgatctactcacctttataagctatatgaggcacattcatcgtagcgggcctataattactcattgcagcgcgggaataggccgcagcggcactctgatatgtatcgatgtggtgttgggcctgatcagccaggatcttgacttcgacatctctgatctggtgaggtgcatgaggctgcaacggcacggtatggttcagactgaagaccagtacatcttctgctatcaagtgattctgtacgtgttgacgcgactgcaagccgaagaggaacagaagcaacagccgcagttactgaaatag

SEQ ID NO: 326341 - DNA, 7473 bp, Artificial Sequence
  derived and/or modified sequence
atgcacgtcagcctagccgaggccctggaagtaagggggggtcctcttcaagaagaggaaatttgggctgtcttgaatcaaagcgcggagagcttgcaagagttatttcggaaagtgtcgctggcagaccccgcggccctcggattcatcatctcgccttggtccctgctgttgctcccatcaggatccgtgagctttacagacgagaacatttccaatcaggacctaagagccttcacagcacctgaggtgctgcagaaccagtcactcaccagcctcagcgacgtggaaaagatccacatttactcgctcggaatgaccctgtactggggagctgactacgaagtgccccagagccaacccattaaattaggtgatcacctgaacagtattctcctcggaatgtgtgaggacgtcatctatgccagagtcagcgtcaggaccgtgctggacgcttgctcagcccacattcgaaacagcaactgtgccccttccttttcatacgtgaagcatctggtaaaactcgttctaggcaacctgtcaggaactgatcagctcagctgtaattcagaacagaagcccgacagaagtcaggccattcgcgataggctgagaggaaagggcctgcccacaggtcggagcagcacgagcgacgtgctggacattcaaaagccccccctctcccaccaaacctttctgaataaggggctgtctaagagtatggggtttctgagcataaaagacacacaagacgagaactactttaaagatatcttgagcgacaatagtgggcgcgaagattcagagaatacatttagcccttatcagtttaagactagcgggcccgagaagaagccaatccccggaattgatgtgctttccaagaagaagatctgggcgtcatccatggatctcctctgtacggccgacagggatttcagcagtggtgaaactgccacatatcggagatgtcatcctgaagcagtgacagtgagaactagcacgaccccgcgaaagaaggaggctagatattctgatggttccattgctctcgacatcttcggaccacagaaaatggatccaatttatcacaccagagagttgcctacaagctcggcaatctcttctgcattggacagaattagagagcgtcagaagaaactccaggtcttaagggaggctatgaacgtggaggagcccgtgcggcgatacaagacttaccacggtgatgttttttctacctcttcagagtcgccatctatcatttcaagtgaatctgactttcgacaggtgcgacggagcgaggcctctaaacggttcgaatctagtagtggactgcccggcgttgatgagacccttagccagggccaatcccagcggcccagtagacagtatgagacgcctttcgaggggaatctgatcaatcaggagattatgttaaagcggcaagaggaagagctcatgcagctccaggccaagatggcacttcggcagtccaggttgtcactatatcctggcgacacaattaaagcctcaatgctagacattacccgcgaccctttaagggaaatcgccctagaaaccgctatgacacagcggaaactgcgaaattttttcgggccagaatttgtaaaaatgacaatcgagccctttatttctctggatctccctaggtccatactcaccaagaagggtaaaaatgaggacaatcggcggaaagttaatattatgcttctgaatggacagcgactggagctcacgtgtgatacaaagactatctgcaaagacgtgttcgatatggtggtcgctcatatcggtctggtggaacaccacctttttgccttggctacactgaaggataatgagtacttcttcgtggaccccgacctcaagctcacaaaggtggccccggagggttggaaagaagagccaaagaaaaagacaaaggccacagttaattttactctgttcttccgtataaaattctttatggatgacgtgagcctcattcagcatacgctaacatgtcaccagtattatctgcagcttcggaaggatattctagaggagaggatgcattgcgacgatgagacttcactcctgctagcaagccttgccctgcaggccgaatatggcgactaccagccagaagtccatggcgtttcctatttccgaatggagcactatttgcctgcacgcgtgatggaaaagctggatctgtcttatatcaaagaagaacttccgaagttgcacaacacgtatgtgggcgcgagcgagaaggagactgaactagaattcctgaaggtttgccagcgtctgactgaatacggtgtccatttccaccgggttcatcctgagaaaaaatctcagactggtattcttttaggagtgtgtagcaaaggcgttctggtttttgaggttcataatggtgtgaggactcttgtgcttcgtttcccttggagagaaaccaaaaaaatctctttttccaaaaagaagataacccttcagaatacatcggacggtattaaacacggatttcagaccgataatagcaaaatctgtcagtaccttttgcatttgtgttcctaccagcataagttccagttgcagatgcgggctagacaatcgaatcaggacgcccaggacattgagagagccagttttcgctccctgaacttgcaggctgagtctgtgaggggtttcaatatgggccgggcgatcagcacaggctccctagctagttccaccctcaacaagctggcggttaggccattatccgtccaagcggagattttaaagcgtctctcatgtagcgagttgtccctataccagccactccagaacagctcaaaggaaaagaatgacaaagccagctgggaggagaaacctcgggagatgagtaaatcctaccacgacctgagtcaggcctccctttacccccataggaagaatgttattgtcaatatggagccgcccccgcagacagtagctgagctggtggggaagccctcccaccagatgagcaggtccgatgctgaatcgctggcaggcgtgactaagctaaacaactcaaagagcgtggcttctctcaatagatctcccgagcgtagaaaacatgagtcagactcatcgtccatcgaggatccggggcaggcttacgttttggggatgaccatgcactctagcgggaatagctcgtcgcaagtgcccctgaaagaaaacgatgtcttgcacaagagatggtccattgtaagcagccctgagcgcgaaattactcttgtgaatttaaagaaggacgccaaatacggcctcggatttcagatcatcgggggcgagaaaatggggcggttggacttaggtattttcatcagctcggtagctcctggtggccctgcagacctggacgggtgcctgaaacccggggataggctgatctccgtgaattcagttagcttggaaggagtgagtcatcatgctgctatcgagatccttcagaacgctcccgaagacgtcacgctggttattagccagccaaaggaaaaaatcagcaaggtcccctcaaccccagtgcaccttactaacgaaatgaaaaactatatgaagaagtcttcatatatgcaagatagcgcaattgactcatccagcaaagatcaccattggtccagaggaactctccgacacatctctgagaacagcttcggtccatctggaggactgagggagggctctttatcctcccaggacagcagaacagagtctgcatctctctcccagtcccaggtcaatggcttttttgcatcacatctgggcgaccaaacatggcaggagagccagcacgggtcaccgtcacctagtgtcatttccaaggccacggagaaagaaacgtttaccgattccaaccagagcaagacaaaaaagccaggcatttctgacgtgacagactattctgacagaggcgatagcgatatggatgaggctacctacagttcctcgcaggaccatcaaacaccgaaacaagagtctagctcctctgtgaatacctctaacaagatgaattttaaaaccttttccagcagtcctccaaaacctggcgacattttcgaagttgaactcgcaaagaacgataactccctgggcatatccgtaaccgttctgttcgataagggaggggtgaatacatcggtgaggcatgggggcatttacgtgaaggcggtgatcccccaaggtgctgccgagtccgacggcaggatccataagggcgatagggtcctggccgtgaacggagtcagtctggagggagccacccataaacaagcagtggagaccttaaggaatacaggccaggtagtgcatctgctactggagaagggacagagccctacttctaaagagcacgtgccggtaaccccccaatgcacgttgtctgaccagaacgcccagggccagggtcctgaaaaggtaaagaagaccactcaggtcaaagactattccttcgtcacagaagaaaatacatttgaggttaagctatttaagaacagttccggactagggtttagctttagcagggaagataacctcatcccagagcagataaatgccagcattgtgcgcgttaaaaagctgttccccggccagcctgccgcggagtccggtaagattgatgtgggagacgtgatcttgaaagtcaatggggcctcgctgaagggtctcagccaacaggaggtgatcagcgcccttagggggacagctccagaggttttcctcctgttgtgcaggcccccgccaggtgtattgccagagatcgacaccgcccttttaacacctttgcagtcgcccgcacaagtcttgcccaacagctcgaaagattcctcacaaccgtcatgcgttgagcagtccacctcgtcagacgaaaacgaaatgagcgataagtctaagaagcagtgtaagagcccgtcacgacgggattcctactccgatagctctggatccggggaagacgaccttgtgacggctcctgcaaacatctctaattcgacgtggtcctccgccctccaccaaaccctctcaaacatggtgtcccaggcacaatcacatcatgaagcccccaagtcccaagaggacacaatttgcacgatgttctattacccccaaaaaatcccgaacaagcccgagttcgaggattccaatcccagtccgctgccaccagacatggcccccggacagagttaccaaccgcagtctgaaagcgcctcttcatccagtatggataagtatcatattcaccacatatccgaacccacccgccaggagaattggacacctctgaaaaacgatcttgaaaaccatttggaggatttcgagcttgaggtggagttactcattaccctgataaaatccgagaaagggtctcttgggtttacggtcaccaagggaaaccaacggattgggtgctatgtgcacgatgtcatccaagaccccgctaaaagcgacgggcgactcaagccaggcgatcgacttataaaggtaaacgacactgatgtgacgaacatgactcacacagacgccgttaacctcctgcgggcagccagcaagacggtgaggctggtgatcggtagagttttggaattgccacggatccccatgctgcctcacctactgccagacattaccttaacatgcaacaaggaagagctcggtttctctctttgtggtggccatgattctctgtaccaggtggtctatattagcgacataaatcctagatcagtggccgccatagagggcaatctgcaactgctggacgtcattcattatgtcaatggcgtgtctacccaggggatgacgctcgaggaggtgaaccgagcccttgacatgtctttgccttccctggtgctcaaagccacaagaaacgatcttcccgtggtgcccagctcaaagcggtcagccgtatcagcccccaaatctacgaagggaaacggcagctactcggtggggtcctgcagccagcccgcactgacaccaaacgactcattcagtacagtcgctggagaggagatcaacgaaattagctacccaaagggtaagtgctccacgtaccaaatcaaggggagccctaacctcaccctgccgaaggaaagctacatccaggaagacgatatctacgacgattcacaggaggccgaagtcatacaatccctgctcgacgtggtggatgaggaggctcagaatctgctgaatgagaataatgcggctggttattcctgcgggccaggcacactgaaaatgaacggcaaactgtcagaagagcgcacagaagataccgattgcgacggttcgcccttgcccgaatacttcaccgaagccacaaaaatgaatggttgcgaggaatactgtgaagaaaaagtgaaatctgagtccctgatccagaagccgcaagagaagaaaacagacgacgatgaaattacgtggggcaacgacgagcttcctatcgagcgtaccaatcacgaggactctgataaagaccactcttttctgacaaacgatgaactggccgtgctgcctgttgtcaaagttctgcctagcggtaaatacacaggtgccaatcttaagagcgtcatcagggtgctgcgagggctgcttgaccagggcataccaagcaaagagctggagaatctccaggaactgaagccactggaccaatgcctgatcggccagacaaaggaaaaccgacggaaaaatcgatataagaatatcctgccgtacgatgcgaccagggtgccccttggagatgagggggggtacatcaacgcctccttcatcaaaatcccagtgggcaaagaagagtttgtgtacatcgcatgccagggaccattgccaactacagtgggcgacttctggcagatgatatgggaacagaagtccaccgtaatagccatgatgactcaagaggtggaaggcgagaagattaaatgccagaggtactggcccaacatcctggggaaaacaacaatggtgagcaaccgcctccggctggccctcgttcgcatgcagcagctcaaagggtttgttgtgcgggctatgaccctggaggatattcagacacgagaagtgaggcacatctctcatcttaattttacagcctggcccgatcacgacaccccatcccagcccgacgatcttctgacatttatttcctacatgcgccacatccataggtcgggaccaattatcacccattgtagcgctgggataggcagatcaggtacactgatttgcatcgatgtagtgttggggctcatttctcaggacttggactttgacattagtgatctggtgcggtgcatgagactccagaggcacgggatggtccagacagaagatcagtatatattctgttatcaggtgatcctgtacgtgcttacgaggcttcaggctgaagaagaacagaaacagcagcctcagctgctgaaatag

SEQ ID NO: 326342 - DNA, 7473 bp, Artificial Sequence
  derived and/or modified sequence
atgcacgtgtccctggccgaggccctggaggtgcggggcggccccctgcaggaggaggagatctgggccgtgctgaaccagagcgctgagagcctgcaggagctgttcaggaaggtgtccctggccgaccctgctgccctgggcttcatcatcagcccctggagcctgctgctgctgcccagcggctctgtgtccttcacagatgagaacatcagcaaccaggacctgcgggccttcaccgcccctgaggtgctgcagaaccagagcctgaccagcctgagtgatgtggagaagatccacatctacagcctgggcatgaccctgtactggggcgctgactatgaggtgccccagagccagcccatcaagctgggggaccacctgaacagcatcctgctgggcatgtgtgaagatgtgatctatgcccgggtgtctgtgaggacagtgctggatgcctgcagcgcccacatccggaacagcaactgtgcccccagcttctcctatgtgaagcacctggtgaagctggtgctgggcaacctgtctggaacagaccagctgagctgcaacagcgagcagaagccagacaggagccaggccatccgggaccggctgcggggcaagggcctgcccaccggccgcagcagcaccagtgatgtgctggacatccagaagccacccctgagccaccagaccttcctgaacaagggcctgagcaagtccatgggcttcctgagcatcaaggacacccaggatgagaactacttcaaggacatcctgagtgacaacagcggccgggaggacagcgagaacaccttcagcccctaccagttcaagaccagcggccctgagaagaagcccatccctggcattgatgtgctgagcaagaagaagatctgggccagctccatggacctgctgtgcacagctgaccgggacttcagcagtggagaaacagccacctaccgccgctgccaccctgaggccgtgacagtgaggaccagcaccacccccaggaagaaggaggcccgctacagtgatggcagcatcgccctggacatcttcggcccccagaagatggaccccatctaccacacccgggagctgcccaccagcagcgccatcagcagcgccctggaccgcatccgggagcggcagaagaagctgcaggtgctgcgggaggccatgaatgtggaggagcctgtgcggcgctacaagacctaccatggagatgtgttcagcaccagcagcgagagccccagcatcatcagcagcgagagtgacttccggcaggtgcggcgctctgaggccagcaagagatttgagagcagcagcggcctgcccggggtggatgagaccctgagccagggccagagccagaggcccagccggcagtatgagaccccatttgagggcaacctgatcaaccaggagatcatgctgaagaggcaggaggaggagctgatgcagctgcaggccaagatggccctgcggcagagccggctgagcctgtacccaggggacaccatcaaggcctccatgctggacatcacccgggaccccctgcgggagatcgccctggagacagccatgacccagaggaagctgaggaacttctttggacctgagtttgtgaagatgaccatcgagcccttcatcagcctggacctgcccaggagcatcctgaccaagaagggcaagaatgaagacaacagaaggaaggtgaacatcatgctgctgaatggccagaggctggagctgacctgtgacaccaagaccatctgcaaggatgtgtttgacatggtggtggcccacatcggcctggtggagcaccacctgtttgccctggccaccctgaaggacaatgagtacttctttgtggaccctgacctgaagctgaccaaggtggcccctgagggctggaaggaggagcccaagaagaagaccaaggccaccgtgaacttcaccctcttcttccgcatcaagttcttcatggatgatgtgtccctcatccagcacaccctgacctgccaccagtactacctgcagctgaggaaggacatcctggaggagaggatgcactgtgatgatgagaccagcctgctgctggccagcctggccctgcaggccgagtatggagactaccagcctgaggtgcatggagtgtcctacttcaggatggagcactacctgcctgcccgggtgatggagaagctggacctgagctacatcaaggaggagctgcccaagctgcacaacacctacgtgggcgccagcgagaaggagacagagctggagttcctgaaggtgtgccagaggctgacagaatatggagtgcacttccaccgggtgcaccctgagaagaagagccagacaggcatcctgctgggcgtgtgcagcaagggcgtgctggtgtttgaggtgcacaatggagtgaggaccctggtgctgcgcttcccctggagggagaccaagaagatctccttcagcaagaagaagatcaccctgcagaacaccagtgatggcatcaagcacggcttccagacagacaacagcaagatctgccagtacctgctgcacctgtgcagctaccagcacaagttccagctgcagatgagggcccggcagagcaaccaggatgcccaggacatcgagcgggccagcttccgcagcctgaacctgcaggccgagagcgtgcggggcttcaacatgggccgggccatcagcacaggcagcctggccagcagcaccctgaacaagctggccgtgcggcccctgtctgtgcaggccgagatcctgaagaggctgagctgcagcgagctgagcctgtaccagcccctgcagaacagcagcaaggagaagaatgacaaggcctcctgggaggagaagccccgggagatgagcaagagctaccatgacctgagccaggccagcctgtacccccacaggaagaatgtcatcgtgaacatggagcccccaccccagacagtggccgagctggtgggcaagcccagccaccagatgagcagaagtgatgctgagagcctggccggcgtgaccaagctgaacaacagcaagtctgtggccagcctgaacagaagccctgagaggaggaagcatgaaagtgacagcagcagcattgaagatcctggccaggcctacgtgctgggcatgaccatgcacagcagcggcaacagcagcagccaggtgcccctgaaggaaaatgatgtgctgcacaagcgctggagcatcgtgagcagccctgagcgggagatcaccctggtgaacctgaagaaggatgccaagtatggcctgggcttccagatcattggaggagagaagatgggccgcctggacctgggcatcttcatcagctctgtggcccctgggggccctgctgacctggatggctgcctgaagccaggggacaggctcatctctgtgaacagcgtgtccctggagggcgtgagccaccacgccgccatcgagatcctgcagaatgccccagaagatgtgaccctggtgatcagccagcccaaggagaagatcagcaaggtgcccagcacccctgtgcacctgaccaatgagatgaagaactacatgaagaagagcagctacatgcaggacagcgccatcgacagcagcagcaaggaccaccactggagccggggcaccctgcggcacatcagcgagaacagctttggccccagcggcggcctgcgggagggcagcctgagcagccaggacagcaggacagaaagtgccagcctgagccagagccaggtgaatggcttctttgccagccacctgggggaccagacctggcaggagagccagcacggcagccccagccccagcgtcatcagcaaggccacagagaaggagaccttcacagacagcaaccagagcaagaccaagaagccaggcatcagtgatgtgacagactacagcgacagaggagacagcgacatggatgaggccacctacagcagcagccaggaccaccagacccccaagcaggagagcagcagctctgtgaacaccagcaacaagatgaacttcaagaccttcagcagcagcccccccaagccaggggacatctttgaggtggagctggccaagaatgacaacagcctgggcatctctgtgacagtgctgtttgacaagggcggcgtgaacacctctgtgagacatggaggcatctacgtgaaggccgtcatcccccagggcgctgctgagagtgatggccgcatccacaagggggacagagtgctggccgtgaatggagtgtccctggagggcgccacccacaagcaggccgtggagaccctgaggaacacaggccaggtggtgcacctgctgctggagaagggccagagccccaccagcaaggagcacgtgcctgtgaccccccagtgcaccctgagtgaccagaatgcccagggccagggccctgagaaggtgaagaagaccacccaggtgaaggactacagctttgtgacagaggagaacacctttgaggtgaagctgttcaagaacagcagcggcctgggcttctccttcagccgggaggacaacctgatccctgagcagatcaatgccagcatcgtgcgggtgaagaagctgtttcctggccagcctgctgctgagagcggcaagattgatgtgggagatgtgatcctgaaggtgaatggagccagcctgaagggcctgagccagcaggaggtgatcagcgccctgcggggcacagcccctgaggtgttcctgctgctgtgcaggcctcctcctggggtgctgcctgagattgacacagccctgctgacccccctgcagagccctgcccaggtgctgcccaacagcagcaaggacagcagccagcccagctgtgtggagcagagcaccagcagtgatgaaaatgagatgtctgacaagagcaagaagcagtgcaagagccccagcagaagagacagctacagcgacagcagcggcagcggagaagatgacctggtgacagccccagccaacatcagcaacagcacctggagcagcgccctgcaccagaccctgagcaacatggtgtcccaggcccagagccaccacgaggcccccaagagccaggaggacaccatctgcaccatgttctactacccccagaagatccccaacaagccagagtttgaggacagcaaccccagccccctgcccccagacatggcccctggccagagctaccagccccagagcgagagcgccagcagcagctccatggacaagtaccacatccaccacatcagcgagcccacccggcaggagaactggacccccctgaagaatgacctggagaaccacctggaggactttgagctggaggtggagctgctgatcaccctcatcaagtctgagaagggcagcctgggcttcaccgtgaccaagggcaaccagagaattggctgctacgtgcatgatgtgatccaggaccctgccaagagtgatggccgcctgaagccaggggacaggctcatcaaggtgaatgacacagatgtgaccaacatgacccacacagatgctgtgaacctgctgcgggccgccagcaagacagtgcggctggtgattggccgggtgctggagctgccccgcatccccatgctgccccacctgctgcctgacatcaccctgacctgcaacaaggaggagctgggcttcagcctgtgtggcggccatgacagcctgtaccaggtggtgtacatcagtgacatcaaccccaggtctgtggccgccatcgagggcaacctgcagctgctggatgtgatccactacgtgaatggagtgtccacccagggcatgaccctggaggaggtgaacagagccctggacatgagcctgcccagcctggtgctgaaggccaccagaaatgacctgcctgtggtgcccagcagcaagaggtctgctgtgtctgcccccaagagcaccaagggaaatggcagctacagcgtgggcagctgcagccagcctgccctgaccccaaatgacagcttcagcacagtggccggggaggagatcaatgagatctcctaccccaagggcaagtgcagcacctaccagatcaagggcagccccaacctgaccctgcccaaggagagctacatccaggaggatgacatctatgatgacagccaggaggccgaggtgatccagagcctgctggatgtggtggatgaggaggcccagaacctgctgaatgaaaataatgctgctggctacagctgtggccctggcaccctgaagatgaatggcaagctgtctgaggagaggacagaggacacagactgtgatggcagccccctgcctgagtacttcacagaggccaccaagatgaatggctgtgaggagtactgtgaggagaaggtgaagtctgagagcctcatccagaagccccaggagaagaagacagatgatgatgagatcacctggggcaatgatgagctgcccattgaaagaaccaaccatgaagattctgacaaggaccacagcttcctgaccaatgatgagctggccgtgctgcctgtggtgaaggtgctgcccagcggcaagtacaccggggccaacctgaagagcgtcatccgggtgctgcggggcctgctggaccagggcatccccagcaaggagctggagaacctgcaggagctgaagcccctggaccagtgcctgattggccagaccaaggaaaatagaaggaagaaccgctacaagaacatcctgccctatgatgccaccagggtgcccctgggagatgaaggaggctacatcaatgccagcttcatcaagatccctgtgggcaaggaggagtttgtgtacatcgcctgccagggccccctgcccaccaccgtgggggacttctggcagatgatctgggagcagaagagcaccgtcatcgccatgatgacccaggaggtggagggggagaagatcaagtgccagcgctactggcccaacatcctgggcaagaccaccatggtgagcaaccggctgcggctggccctggtgaggatgcagcagctgaagggctttgtggtgcgggccatgaccctggaggacatccagacccgggaggtgcgccacatcagccacctgaacttcaccgcctggccagaccatgacacccccagccagccagatgacctgctgaccttcatctcctacatgaggcacatccacaggagcggccccatcatcacccactgcagcgctggcatcggccgcagcggcaccctcatctgcattgatgtggtgctgggcctcatcagccaggacctggactttgacatcagtgacctggtgcgctgcatgaggctgcagagacatggcatggtgcagacagaggaccagtacatcttctgctaccaggtgatcctgtatgtgctgacccggctgcaggccgaggaggagcagaagcagcagccccagctgctgaagtag

SEQ ID NO: 326343 - DNA, 7473 bp, Artificial Sequence
  derived and/or modified sequence
atgcacgtgagcctggccgaggccctggaggtgcggggcggccccttgcaggaggaagagatttgggctgtgctgaaccagtccgcagagtcactgcaggaattgttccgaaaggtgtccctggcagaccctgccgccttgggcttcataattagcccatggagccttttgctgctcccctctggctctgtctcctttaccgatgaaaatatctccaatcaggacttgagagcctttaccgcgccggaggttctgcaaaaccaatcgctaacaagcctttcagatgtggaaaaaatacacatttattctcttggcatgactttatactggggagctgactatgaagtgcctcaatcccaacccatcaaattaggtgaccaccttaactctatcttactgggcatgtgtgaggacgtgatctatgcacgtgtctccgtgcgtaccgttctcgatgcatgtagcgcccatatccgcaatagtaattgcgctcctagcttttcctacgtgaagcatctcgtcaagctggtcctggggaacctgagcggaacggaccagttatcctgcaactctgaacagaaacctgaccgatcgcaggctattcgggaccgcttacggggaaaaggtctgcccacaggcagatccagtacatccgatgttctcgatatacaaaagcccccgctctcacaccagacgttcttgaacaagggacttagcaaatccatgggcttcctctccatcaaggatacgcaggacgaaaactatttcaaagacatactgtcagataattctgggcgcgaggactctgagaatacttttagtccttatcaattcaagacaagtgggcctgaaaaaaagcccattcctggcattgacgtgctgtctaagaaaaagatctgggcctcaagcatggacctgctctgcacggctgatcgggatttcagctctggggaaaccgccacgtaccgtcggtgtcatcccgaggccgtgaccgtccgaactagcactactccccgaaaaaaggaggctcgctattctgacggaagcatagctctggatatctttggcccccaaaaaatggaccctatttaccatactagggagctgccaacctccagcgcgatctcctctgccctagatcggatccgggagcgtcaaaaaaagctgcaggtgctgcgggaagccatgaacgtggaagaaccggtgcggcgctataagacataccacggtgatgtgttttccacttcctcggagtctccatccatcatttcttccgagagcgattttcggcaggtccgcaggtctgaagcatctaaacgttttgaatccagcagcggtttgcccggtgtggatgaaactctcagtcagggacagagccaaagaccctctaggcaatatgaaactcctttcgaaggaaatctcatcaaccaggaaatcatgttgaaaaggcaggaagaggagcttatgcagttacaggcaaaaatggctctgaggcagagccgcctgagcttgtaccccggcgacaccattaaggcttctatgctggatataactagggatcccctgcgcgagatcgcacttgaaaccgctatgacacagaggaaacttcggaacttttttggccctgagtttgtaaagatgacgattgagcctttcatctcattagatctgcccagatctatactcactaagaaggggaagaatgaagacaaccggcggaaggttaacattatgctcctgaatgggcagaggttggagctcacttgtgacactaagactatatgtaaagatgtgtttgacatggtcgtggctcacataggactggtggagcaccacctcttcgcacttgccaccctgaaggataatgagtatttctttgtcgatccagacctgaaacttactaaggtcgcaccggaggggtggaaggaagagccaaagaaaaaaacaaaggccactgtcaatttcaccctgttctttcgaatcaagttcttcatggatgatgtctctctgattcagcacactctgacatgccaccaatattatctgcaactgcgaaaggacatcctagaggaacggatgcactgcgatgacgagacaagcctgttgctggcatcgcttgccttacaggcggagtacggcgattaccagcctgaggtccatggggtgagctacttcaggatggagcactacttgcctgcccgggttatggagaaactcgatttgagctacatcaaggaagaacttcctaagctccacaatacctacgtgggagcctctgagaaggaaacagagctcgagtttctcaaggtttgccagaggctcactgagtatggagtgcatttccatcgggttcaccccgaaaagaagtcgcagacaggcattctgctcggagtttgttccaagggagtgctggtgttcgaggttcacaacggagtgagaaccctggttcttaggtttccctggagagagacaaagaagatctccttctcaaaaaagaagataaccctgcagaacacctccgatggaataaagcacggatttcagaccgataatagcaaaatttgccagtacctcttacatctttgctcttaccagcataagtttcagctgcagatgcgggccagacagtccaaccaggatgctcaagatatagaacgggcctcatttcggtcactgaacctccaggcagagtcagtccgcggatttaacatgggccgagccataagtaccggatctctcgcgtcatcaaccctgaacaaactggctgttaggcctttgagtgtgcaagcggagattcttaagaggctgtcttgctccgagctcagtctgtaccagcctctgcagaacagtagcaaagaaaagaatgacaaggcctcgtgggaagagaaacctcgcgaaatgagcaagtcttaccatgatcttagccaggcctctttgtacccgcatcgcaagaatgtgatcgttaatatggaacctcctccacagactgtggcagagctggtgggaaagccgagccaccaaatgtctcgctccgatgctgaatcactggcaggtgtaaccaagctgaataatagtaagagcgttgcttccctgaacagatctccagaaagaagaaaacatgagtccgattcatcctctattgaggacccggggcaggcctatgttctcgggatgaccatgcactcctcaggtaattctagttctcaggtccctctaaaggagaatgacgtactccacaagcgctggtccatcgttagttctcccgagcgggagattacactggtcaacctgaaaaaggacgccaaatacgggctgggctttcagattatcggaggagagaagatgggacgtttagatcttggcatcttcatatcctctgtggcccctgggggccctgcagatctggatgggtgtctgaagccgggggacagactgataagtgtcaactccgttagcttggagggggtgagccatcacgccgctatcgagatcctacagaatgctcccgaggacgtgacactagtcataagccaaccaaaggagaagatctccaaggtgcctagtacacctgtacacctcaccaatgagatgaaaaattacatgaagaaatcttcgtatatgcaggattcagccatcgactcctcttctaaagaccaccattggagccgaggtacattgagacatatttccgagaactcatttggaccgtctgggggcctgagggaagggtcactttcctctcaggattctcgaaccgagagcgccagcctttcccagagccaagtgaatgggttttttgcatcccacctgggagaccaaacctggcaggagtcacagcacggatcgccctcaccgtctgttatatcaaaggctacagagaaggaaaccttcaccgatagtaatcagagcaaaacaaagaagcccggaatctcggacgttacagactattccgataggggtgattccgatatggacgaagccacatattccagctcccaggaccaccaaacacctaagcaagaatcgtcgtcaagcgtgaacacctccaataaaatgaatttcaagacgttcagctcatcccctccaaaacctggggacatttttgaggtggagttagccaagaacgataactctcttggcatctctgtgacagtgctgttcgataagggcggggttaatacctcggtgcggcacgggggcatctacgtcaaggccgtgatcccacaaggcgccgctgagtccgatgggcggatccataaaggggatcgagtacttgccgtaaacggtgtgtctcttgaaggagccacacacaaacaggccgtcgaaacgctgagaaatactggccaagttgttcacctactgctggaaaagggtcagtcccccaccagtaaagaacatgttcccgtaaccccccagtgtacgcttagcgaccagaacgcccaggggcaaggtccggagaaagtaaagaagacgacccaggtgaaagattacagttttgtgacggaagagaatacctttgaggttaagctcttcaaaaactcgtccgggctgggattctccttctcccgagaggacaacctgatccccgagcagattaacgcctctatcgtgagggttaagaagcttttcccagggcagccagccgcagagtctggtaaaatagacgtgggggacgtgatactaaaagttaatggcgcctcactgaagggattgagccagcaggaggtcatatccgccctgcgcggtacagctccagaagtatttctgttactgtgcaggccaccgcccggggtgctgcccgaaattgatacggcattgcttacacccctgcaatcccctgctcaggtcctcccaaacagttcaaaagactcaagccagcccagttgcgttgaacagtctactagctccgacgaaaacgagatgagcgacaaatccaagaaacagtgcaagagtccaagcaggcgcgacagttactctgattcgtctggaagcggcgaggacgacttagtcactgcccctgcgaacatcagcaattccacgtggagcagtgccctccaccagactctgagtaatatggtgtctcaggcccagagtcatcatgaggcgcctaagagtcaggaagatacaatctgcactatgttttactatccgcaaaaaatcccaaataagcctgagtttgaggacagtaatccaagtcccctcccaccagatatggctcctggacagagctaccagcctcagagtgaatcagcctccagctcatccatggacaagtaccatattcatcatatttcagagcccactcgacaggagaattggacgcccctgaagaacgatctcgagaatcacctggaggactttgagctggaggtggaactgctgattactctaataaaaagtgagaagggatctctgggcttcaccgtgactaaaggaaatcaacgaatcggatgctatgtgcacgatgtaatccaagaccccgccaaatcagatgggcggttaaaacctggcgatagattaattaaagtgaatgacactgacgtgaccaacatgacacacaccgatgcagtcaaccttttgagggctgcatctaaaacggttcgactggtgattggtcgggtgctggagcttccacggattcctatgctgcctcacttgctgcctgatataaccctgacctgtaacaaggaggagttgggattctctttatgcggggggcacgactctctctaccaggtcgtctacatttccgatattaaccctaggagtgtggccgcaatcgaaggtaacttacagcttctcgatgtgatccactatgtcaacggggtctctactcagggtatgaccctggaggaggttaatcgggcgctggacatgtcactaccaagcctcgtcctgaaggcaacgcgcaatgatctccccgtcgtcccaagttctaagcgatcggccgtgtcagcccctaaatccaccaaggggaatggaagctactcagtggggagctgtagccagcctgccctcacccctaatgatagtttttctactgtggcgggggaagaaatcaatgagattagttatcctaaaggaaagtgcagtacataccagataaaagggagtcccaacctgacactgccaaaagaatcttatatacaagaggacgacatatacgatgattcccaggaggcagaggtgatacagagtctgcttgacgtcgtcgacgaagaggcccagaacctcttgaacgaaaacaatgccgccggatacagctgcggaccagggactttaaagatgaatggaaaattgtcagaagagaggactgaagatactgactgtgacgggagtcctctgcctgagtacttcaccgaggccacaaagatgaatggatgtgaggagtactgtgaggagaaagtgaagtccgaatccctgatccagaaaccacaagagaaaaagacagatgatgatgaaattacatggggaaacgacgagctgcctatcgaaaggacgaatcacgaggactctgacaaagaccattcattcttgactaatgacgagctggctgtacttccagtggtgaaagtgctcccttccggaaagtacacaggcgccaatcttaaatcggtgattagggtcttgcgaggcttgttggatcaaggaatcccctccaaggaactggagaatctgcaggaattaaagcctctggaccaatgtttaatcgggcagaccaaggaaaatcggaggaagaatcgatacaaaaacatcctcccatacgacgcaacccgtgttcccctgggtgatgaaggaggatacattaacgcttctttcatcaagattcctgtcggaaaagaagagtttgtctacattgcttgccaggggccactccctacaaccgtcggggatttttggcagatgatctgggaacaaaaaagcacagtgatcgcaatgatgacccaagaagtagagggagagaaaatcaagtgccagcggtactggccaaacatccttggcaagaccacgatggtcagtaaccgtctaagactggcactggtgcggatgcagcagctgaaaggtttcgtggtaagagcaatgactctggaggatatacaaaccagggaggtgcggcacatcagccatcttaatttcacagcttggcccgatcacgacacaccaagtcaacctgacgacttactgacattcatcagctatatgagacacatacacaggtccggaccaatcataacccactgttccgctggcatcggcagaagcggtaccctaatctgtattgacgttgtgttaggattaatctcacaggatctggacttcgatatctctgacttggtgcgctgtatgagacttcagagacacggaatggtccagaccgaagatcagtacattttttgctatcaggtgatcctatacgtcctgacacgcctgcaggccgaagaggagcagaaacaacagcctcagctgctgaaatag

SEQ ID NO: 326344 - DNA, 7473 bp, Artificial Sequence
  derived and/or modified sequence
atgcacgtgagcctggccgaggccctggaggtgcggggcggccccctgcaggaagaagaaatctgggctgttctcaatcagagcgctgagtccctccaggaactttttcgtaaggtctcccttgcagatccagctgcactaggcttcatcataagtccctggagtctcctcttgctgcccagcggtagcgtctcttttacggacgagaatattagtaatcaagacctgcgggcctttacggctcccgaggtgttacaaaatcagtccctcactagtctttctgatgtcgagaaaatacacatctacagtttaggcatgaccctgtactggggggcagactatgaggtcccacagagccagccaataaaacttggggatcatctgaactctatcctgctggggatgtgtgaggacgtcatctatgcgagagtaagcgtgcgaaccgtgctcgacgcatgcagcgcccacattagaaacagtaattgtgctccatctttctcttacgtgaaacacttagttaaactcgtcttgggcaatttaagcggcactgaccagctttcttgtaatagcgaacaaaagcctgatagaagccaggctatcagggaccgcctcaggggaaaaggactaccaacaggcaggagcagcacttccgacgtgcttgacatccaaaaacctcccctgtcccatcagacatttctgaataagggcttgtctaaatcaatgggttttttatccattaaagatacacaggacgagaactattttaaggatatactgagtgataactctggccgggaggatagtgagaatacgttctctccatatcaattcaagaccagtgggcctgagaagaaaccaatccctggcatcgatgtgctgtctaagaaaaagatatgggccagctccatggaccttctgtgcaccgccgatcgtgatttctcttccggggagaccgctacatatcgaaggtgccatcccgaagcagtcactgtgcggacgtccacaacccctcggaagaaggaggccaggtatagcgatggtagcattgccctcgacatctttggaccgcagaagatggatcccatctaccatacgcgggagctgccaacttcctcagctataagctccgcactcgatcgtattagagagaggcaaaagaaattacaggttcttagggaagcgatgaatgtcgaggagccagtccggcgatacaaaacttatcacggcgatgtcttctctacgagtagcgaatcacctagcatcataagttctgagtcggatttcagacaggttcggcggagcgaggcctccaagcgcttcgaatcaagcagcggcctgcctggcgttgacgagacgctgagccaaggccagagtcaaagaccttcccgccagtacgagaccccattcgagggcaacctcatcaaccaggagatcatgctgaagcgccaggaggaagaactgatgcagctccaggcaaaaatggccttgagacagagtcggctgtctctgtaccctggcgatactataaaggccagcatgctggatattaccagggacccactcagggaaattgccttggagacagcaatgacacagagaaagctgcgcaacttcttcgggcccgagttcgtgaaaatgacaattgaacctttcatctcgcttgatctgccgcgctctattcttactaaaaagggcaagaatgaggataacaggcggaaggtaaatataatgctgctcaacggtcaaaggctggaactgacctgtgacaccaagacaatttgcaaggacgtcttcgatatggtggtcgcccatatcggcctggtcgaacaccatctgttcgccctggcaaccctgaaagacaatgagtacttttttgttgatccagacctcaagcttactaaggtcgcgccagaagggtggaaggaggagcctaaaaagaagactaaggccactgtaaactttaccctcttcttccgaatcaagttctttatggacgacgtgtcactgatccaacatacccttacctgccatcagtactacttgcagctccgtaaggacatcctcgaggagagaatgcattgcgatgatgagacttccctgctgcttgccagtcttgccttgcaagccgagtacggggactatcagcccgaagtgcatggggtgagttatttcagaatggagcattatttaccagcaagggtaatggaaaaacttgatcttagctacattaaagaggaactccccaagctgcacaatacatatgtgggagcttctgaaaaggaaaccgaactcgaattcctcaaagtctgccagcgactaacagaatatggtgtgcacttccatcgcgtgcaccccgaaaagaaaagccagacagggatcctgcttggcgtttgttccaagggtgttctggtctttgaggttcacaacggcgttaggactctcgtcctgcgttttccctggagggaaacaaaaaagatcagttttagcaaaaagaaaattacacttcagaataccagtgatggtattaaacacggattccagactgataattctaagatctgccagtacctgctgcatctgtgttcgtatcaacacaaatttcagcttcagatgagggcccgccagagtaatcaggacgctcaagacatcgaacgcgcatcattccgaagtctgaacctccaggcagaatccgtccggggcttcaacatggggagggccatctccacggggtccctcgccagctccactctgaacaagctagcagtgcgccccctgtctgtgcaggcagagatcctgaagcgactgtcctgtagcgagctgtccttgtatcagcccctgcagaattcttcaaaggaaaagaacgataaggccagctgggaggaaaaacctcgtgaaatgtctaagagctaccatgatttgagccaggcctccctgtaccctcaccgtaaaaacgtgatcgtcaatatggagcccccccctcaaaccgtggccgaattagtcggtaagcccagtcaccagatgtcacggagcgatgccgagtctttggcaggagtcacgaaactgaataacagtaagagcgtggcaagcctgaatcgctccccagagagaagaaagcacgaatccgatagttcatctattgaagacccaggccaggcttatgtgctgggcatgacaatgcattcctccgggaactcttcctcacaggtcccactcaaagagaacgatgtgctacacaaaaggtggtcaatagtttcatcccccgagagggaaattaccttagtcaacttgaaaaaagacgcgaaatacgggctgggcttccagataatcggaggggaaaagatgggtagacttgatctcggaatcttcataagctccgttgccccaggaggaccagcggatctggacgggtgcctgaagcctggggacaggcttattagtgttaattctgtgagcctcgagggggtttctcatcatgccgcaattgagattctacagaacgcacccgaggatgtcacactcgttattagccagcctaaagagaagatatctaaggtgccgtctaccccagtgcatttgaccaacgagatgaagaactacatgaaaaaaagtagttatatgcaggattcagccatcgacagctcgtccaaggaccaccactggtctcgaggaactctgcggcacatctccgagaatagcttcggaccttctggtgggctcagggagggatctttaagttcccaggactcacgaaccgagtctgctagcctgtcccagtcacaggtcaatgggtttttcgcttcacacctgggggaccagacatggcaagagtcacagcatggaagtccaagcccatccgtgataagcaaagccacagaaaaagaaacatttacagactccaatcagagcaagacaaagaagccgggaatctctgatgtaactgactatagtgatcgcggggatagcgacatggacgaagcaacatattcgtcgtcacaggatcaccagacaccgaaacaggagagctcttcttctgttaatacctccaacaagatgaactttaaaactttttccagcagcccacctaagccaggtgacatttttgaagtggagctcgccaaaaacgacaactcactgggaatttcggtaactgtgctttttgacaagggcggagtcaacacctcagtgcgccacggggggatatacgtcaaagcagttatcccacagggtgccgctgagagcgatggaaggatccacaagggagatcgagtgcttgcagtcaacggcgtcagtctggaaggtgccactcacaagcaggccgtcgagacacttcgcaatacagggcaagttgtccatttgcttctagaaaaggggcagtcgcctaccagtaaggagcacgtccccgtgactccacagtgtactttgtctgaccagaacgcacagggtcagggaccagaaaaggtgaagaagaccactcaggttaaagactattcattcgttaccgaagagaacacatttgaagtgaagctcttcaagaattcttccggtctggggtttagcttctctagggaggataatctgattcccgaacagatcaatgctagtatcgtgagggtgaagaaactctttccaggacaacccgcagccgaatccgggaaaattgacgtcggagacgtcatactcaaagtcaacggagcgtccctgaaggggctaagtcagcaagaggttatcagcgctctgcgcggaaccgcaccggaggtgtttctgctgctgtgtagacctcctcccggggtcctgccagagattgacaccgccctattgacccctctgcagtcacccgcgcaagttcttcccaactcgtcaaaagattccagccagcctagctgtgtggaacagtcaacgtcctctgacgagaacgagatgagcgacaaatcaaagaagcaatgtaagagcccctcacgaagggactcatattccgattcttctggcagtggggaagatgatctggtgacggcgccggccaacatctcaaatagcacctggagcagcgctcttcatcagactctgtctaatatggttagtcaagcgcagtctcatcatgaagcacctaaaagccaagaagacaccatctgtactatgttttattacccccagaaaattccgaacaagcctgagtttgaagacagcaatcctagccccttgccgccagatatggctccagggcagagttaccaacctcagagtgagagcgcatccagtagctccatggataaataccacatacatcacattagcgagccaacgcggcaggaaaattggactcccctgaagaatgacctagagaaccacctggaggattttgaattagaggtcgaacttcttattaccctgatcaaatccgagaaaggatccctcgggttcacggtgaccaaagggaaccagagaatcgggtgctatgtccatgacgtgatccaagatcccgccaaaagcgacggccgattaaagccaggggatcgtttgattaaagtcaatgacaccgacgtaacaaacatgactcacacggacgccgtgaatctgctccgcgcggcctcaaaaacagttagactggttatcggccgagttcttgaattgccaaggatcccaatgctgccccacctcctcccagacatcaccttgacctgtaataaggaggagctggggttctctctatgtggagggcatgattctctttaccaggtggtttatattagcgatatcaatcctagatcagtagcagctattgaaggaaatcttcaacttctggatgtgatacactacgtcaacggggtctctactcagggaatgacgctagaggaagtaaatcgcgctctcgacatgagcctaccatctctggttctaaaggcaaccaggaacgaccttccggtggtgccctccagcaagaggtctgcagtgtctgccccgaagagcacaaaaggaaatggctcttatagtgtagggtcctgcagtcagcccgcgttgacaccgaatgacagcttttccacagtggcaggcgaagaaatcaacgaaatcagttatccaaagggcaaatgctcgacatatcagatcaagggcagccctaacttgaccttaccgaaggagtcctatatccaggaggacgatatctacgacgacagtcaggaggccgaggttattcagagcctcctggatgtcgtggatgaggaagctcagaatctcctgaacgaaaacaatgcagccgggtacagctgtggtcctggaacactgaagatgaacggtaaactgtccgaggagcgcacagaggataccgattgcgacggaagtcctcttcccgagtatttcactgaagcgacaaagatgaacggttgcgaagaatactgcgaggagaaggtgaagagtgaaagcctgatacagaagcctcaggagaagaaaacagacgacgacgaaataacgtggggcaacgacgaactgcccatcgagcgcactaatcatgaagatagcgacaaggaccatagcttcttaacaaacgatgaattagccgtgctgccggtggtgaaggtcctcccatcgggaaaatacaccggagctaacttgaaaagtgtcatcagggtgttgcgcggcctgttagaccagggcataccaagtaaggaactcgagaacctacaggagttgaaacctcttgaccagtgcctcattggccaaacgaaggaaaacaggaggaaaaaccggtacaaaaatatactgccatacgacgcgaccagggtcccactgggagacgaaggtggatatataaatgcttcctttattaagatacccgtgggcaaggaggaatttgtgtacattgcttgtcagggaccactgcctacgaccgtcggcgatttttggcagatgatctgggagcagaaatctaccgtgattgccatgatgacacaggaggtggaaggcgaaaagatcaaatgccagaggtattggccgaatattctcggaaagacaacaatggtgtccaatagacttcgtttggctctagtcagaatgcagcaattaaaagggtttgtggtgcgggcaatgaccctggaagacatacagacccgagaggtgagacacatcagccatctaaacttcaccgcttggcctgatcacgacaccccctctcaaccggatgatctgctaacattcatcagttacatgcggcatatccaccgttccggacctatcatcacacactgctctgccgggatcggtagatccggcactctgatttgcattgacgtggtgctcggactcatctcccaggatctggacttcgatatttccgatctcgtgcgttgcatgcggctgcaaagacacggcatggtgcagaccgaggatcagtacatattttgctaccaggtgatactgtacgtgctcacgcgcctgcaagcagaagaagagcagaaacaacaaccacaactgctgaagtag

SEQ ID NO: 326345 - DNA, 7472 bp, Artificial Sequence
  derived and/or modified sequence
atgcacgtttctctggcagaggccttagaagtgcggggaggtcccctccaggaggaagaaatctgggcggtgttaaatcagagcgcagagtccctgcaagagttattcaggaaggtatcactggccgatcccgctgccttaggtttcattattagcccctggagccttctgctcctccctagcgggagcgtctcgttcacggatgaaaacatcagtaatcaggatctgcgggctttcacagcacccgaggtcttgcagaatcagagtctgaccagtctgtccgacgttgaaaaaattcacatttactctctggggatgacattgtattggggtgccgattacgaagtcccacagagccagccgatcaagctgggagatcatctaaacagcatcctgctgggaatgtgcgaggacgtcatttatgctcgtgtttccgtaaggaccgttctcgacgcctgttctgctcacattcggaactcaaattgcgccccttctttttcttatgtcaagcaccttgtgaagctggtattgggtaacctgtccggtactgatcagctttcatgtaattctgagcaaaagccggaccgttcccaggccattcgggaccgactcagaggtaaggggctcccaaccggaagaagcagtaccagtgatgtgctggacatccaaaaaccccctctcagccaccaaaccttcctgaataaaggcttgagcaagagtatgggattcctttccattaaggacactcaagacgaaaattattttaaggacatcctgagtgacaactccggacgagaagactcggaaaacaccttctcaccttaccagtttaaaacatccggtccagaaaagaagccaattccaggcatcgacgttctttccaaaaagaagatatgggcaagttctatggacctgctgtgcactgctgaccgggacttctcgagcggtgagacagccacgtatcggcgatgccacccagaagccgtgactgtacgtacgagtactactccccgtaagaaggaagccagatatagcgacggttctatagccctggacattttcggccctcagaaaatggacccaatataccacacacgtgagttgcccacgtcttctgccatcagctctgccctggatcggatcagagagcgacaaaaaaagctacaggttctgcgagaagcgatgaacgtggaagagcccgtgcggcgatataaaacctatcatggtgatgttttctcaacaagctctgaatcacctagtatcatcagctcagagtcagactttcgtcaggttagaaggagtgaggcgtcaaaacggttcgaaagtagctcgggactgcccggagttgatgaaacactgtcccagggccagagtcagcgaccctccagacagtatgagactcccttcgaaggaaacctgataaatcaggagatcatgttgaaaagacaggaggaggagctgatgcagcttcaggccaagatggcgctaagacaaagccgcctttccctataccctggagacactattaaggcaagcatgttagacattacgcgggatcccctccgcgagatagctctggaaactgccatgactcagcggaaactgaggaacttttttggtccggagttcgttaaaatgactattgaaccttttataagtctcgatttgccgaggtcaattctcaccaaaaagggcaaaaacgaggacaaccggcgaaaggtaaatattatgcttctcaatgggcagaggttggaactcacgtgcgatacaaagactatctgcaaggacgtgttcgacatggtggtggcccatatcggattggtcgagcaccatctattcgccctggctacattgaaagacaacgaatattttttcgtggatcctgatctgaaactgacaaaggtggccccagaagggtggaaagaggaacctaaaaaaaaaactaaggcaactgtgaactttactctcttcttcaggataaagttcttcatggacgacgtctcactgatccagcacaccctgacctgccatcagtattacctacagctgcgtaaggatatcctggaggaaagaatgcactgcgatgatgagactagcctgctgctggcttctctggccctgcaggcggagtacggcgactatcagcctgaagtccacggcgtttcctacttcaggatggaacactatctgcccgctcgtgttatggaaaagctggatctctcgtacatcaaagaagagctgcctaaactgcataacacctacgtgggggcttccgagaaggagaccgaactcgagtttttgaaggtgtgccagcgactcaccgagtatggggtgcacttccaccgagttcaccccgaaaaaaagtcacagaccgggattcttctcggcgtttgctctaagggcgtcttggtgtttgaggtgcacaatggtgttcgcacactggtgttgcggttcccttggcgcgagacaaaaaaaatctccttctccaaaaaaaagattactctgcagaacacatctgatggcatcaagcacggtttccagacagacaattccaagatttgtcagtatctgctgcacctctgttcgtatcaacataaatttcagctccagatgcgggcacgtcaaagcaaccaggacgcacaggatattgagagggcaagcttccgatcactgaacttgcaggctgagtccgttcggggattcaacatggggagagccatatccacaggatcgctggcatcttctactctgaacaaacttgccgtgagaccgctttcagtacaagctgagatccttaaaaggttaagctgctcagaattgtcgctttatcagcctttgcaaaactccagtaaggaaaagaacgataaagcaagctgggaagagaagccacgggagatgagcaagagttaccatgacctttcccaagccagcctctatccccacagaaagaacgtcatcgtaaacatggaaccacccccacaaactgtcgctgaactggtcggcaagccctctcaccagatgtccaggagtgacgcggagtccctggcaggtgtgacgaagctcaataatagcaagtctgtggcctccctcaaccgtagccctgagcgccgtaagcacgagtccgattcttcaagtatcgaggaccccggacaggcttatgtgctgggcatgactatgcactcctctggcaacagcagttcccaggttcctctgaaagaaaacgatgtactgcacaaacgttggtctattgtgtcctctccagagagagaaatcacgctggtgaacctcaaaaaagacgcgaaatatggacttgggttccagattataggcggagaaaaaatggggaggctggatctcggcatttttattagcagcgtggcacccggaggacccgcagacctcgacggttgtctgaagccaggggatcgactaattagtgtgaattccgtcagcctggaaggcgtgagccatcatgccgcaatagaaatactccagaatgctcctgaagatgtgactctggtcatatcacagcccaaggaaaaaatatcaaaggtgcccagcactcctgtccatctgacaaatgaaatgaagaattatatgaagaaatcttcatatatgcaggactccgccattgatagcagctctaaggaccaccattggagtcggggtactttgaggcatatcagtgagaattccttcggtcccagtggcggactccgcgaggggtctctgagttcccaggattccaggactgagtcagcttcattgtctcagagccaggtgaacggattctttgcatcccaccttggggaccaaacttggcaggaatctcagcatggttctccctctccgtctgtcataagcaaggcgacagagaaggagactttcactgactcgaaccagtctaaaacaaaaaagccaggcatcagcgacgtcacagactattccgatagaggagattcagatatggatgaggctacatacagctcttcccaagatcaccagacccccaagcaggagagctcctcttccgtcaatacctcaaataagatgaactttaaaactttctcatcctctcctccaaagccaggcgatatattcgaggttgaattagcaaagaatgataatagccttggcattagcgtgacagtcttgtttgacaagggcggtgtgaataccagcgtgcgacatggcggaatttatgtgaaggctgtgattccacaaggggcagccgagtcagacgggaggatccacaagggcgaccgggtgttggctgtgaacggcgtgtccctggagggtgcgacccataagcaggcggtggagaccctaaggaacactggacaggtggtgcacctgctcctcgagaaggggcaatcacctaccagcaaggagcacgtgcccgtgaccccgcagtgcaccctgtccgatcagaatgctcaggggcagggtcccgagaaagttaaaaagaccacccaggtgaaagactattcatttgttacagaggaaaacacttttgaagtgaagctgttcaagaactccagtgggcttgggttttcttttagccgagaagataatttgatccctgagcagatcaacgccagcatcgtccgagttaagaaacttttccctggacagcccgctgccgaaagcggtaaaattgacgtgggcgatgtgatactcaaagtgaacggcgcttctctgaagggcctctcacagcaggaagtgatatcagcattacgcggaactgccccagaggtgttcctgctgctttgcagacccccaccaggcgtgcttcctgaaatcgacactgcactgctcactcccctccagagccctgcccaggtgctgcccaacagtagtaaagactcaagtcagccttcctgcgtggaacagtccacatctagcgacgagaacgagatgagtgataaatctaaaaagcagtgcaagagtccctcgcggagagacagctacagcgattctagcggctcaggagaggacgacctggtcactgccccagctaatatctctaactcaacatggtccagcgctttgcaccagaccctgtctaatatggtgagtcaggcacagtctcaccacgaggcccctaagtcacaagaagataccatctgtacaatgttctactatccacagaaaatccctaataaacctgaatttgaggattccaatcccagcccccttccgccagacatggccccaggccagtcgtaccagccacagagtgagtcggcttccagttcaagtatggataaatatcatatacaccacatctccgagcctacacgccaggaaaactggacacccctcaaaaacgacctggagaatcatctggaggacttcgagctggaggtggagctcctgatcaccctgatcaaatcagagaaggggtcattgggctttactgtcaccaaaggaaatcagcgtattggatgctacgtgcatgatgtcatccaggaccccgcaaaaagtgacggacgactgaagcccggagaccggttgatcaaggttaacgatactgacgtcacgaacatgactcacactgacgccgtgaatcttcttagagcagcctccaaaactgtgagactcgtgataggtagagttctggaactccctcgcattccgatgcttccacacctgcttccagatattaccctgacatgcaacaaagaggaacttggcttcagtctgtgcgggggacacgattcattgtaccaagtggtgtacatcagtgacattaatcccaggagtgtggccgcaattgaaggaaacctccagctattggatgtcatccactatgtcaatggagtcagcacccagggtatgacattggaagaggtaaaccgggcattagacatgagtctgccctctctcgtgcttaaagcaacaaggaatgacctgccagtagtcccatcctcaaagcgttcagccgtgtctgccccaaaatctacgaagggaaatggctcgtatagtgtcggctcatgcagtcagccggctcttactcccaacgactcttttagtaccgtcgcaggcgaggagatcaacgagatcagctaccccaaaggcaaatgctccacctatcagattaaaggaagtcctaacctcaccttacctaaagaaagttatatccaggaagacgacatttacgatgactcccaagaagctgaggtcatccaatccctcctggatgtagtcgacgaggaggcccagaatttgctgaatgagaataacgctgccggatattcctgcggccctggaactctaaaaatgaatggaaagttaagtgaggagcgcaccgaagacaccgattgtgacggctctccccttcccgaatattttacagaagcgacaaagatgaatggttgcgaggagtattgcgaggagaaggtaaagagcgaaagcttaattcagaagccccaggaaaaaaagacagacgacgatgagatcacctggggtaatgatgagctgcccattgaacgcacaaatcacgaggactctgataaggaccattccttcttgacgaacgacgagttggctgtgctgcccgtcgtgaaggtgctacccagcggcaaatatacaggagctaatctgaagtcggtgattcgcgtcctccgtgggctgctcgaccaggggatccctagtaaggagttagagaatctccaagagctgaagcctctggaccaatgcctcataggccagactaaggagaataggcgcaagaaccgatacaagaatatcttgccgtacgacgcaacgagggtacccctcggcgacgagggcggatacattaatgcaagctttatcaaaattcctgttgggaaggaggaattcgtgtacattgcctgtcagggcccacttcctacaaccgtaggcgatttctggcagatgatttgggagcaaaagtctactgtgattgctatgatgacccaggaggtggaaggcgagaagatcaaatgccagcgatattggcctaatattttgggcaaaacaacaatggtgagtaatcgcctgcggctggccctggtgcgcatgcagcagctgaaggggtttgtggtcagggccatgaccctggaggacatacagacgagggaagtgcgtcacatctcacatctgaacttcaccgcctggccggatcacgacacccctagtcagcccgacgatctgctaacatttattagctatatgagacacattcatcgatcaggaccaataatcacacactgcagcgcaggaatcggacgttccggaactctgatttgcattgacgtagttctgggactgatttcgcaggatttggacttcgatataagcgacttagtgcggtgcatgcgtttgcagcgccacggaatggtccagactgaggaccaatatatattctgttaccaggtcatcctctacgtcctcaccagactccaagccgaagaggaacagaaacagcaaccccagctgttaaaata

SEQ ID NO: 326346 - DNA, 7472 bp, Artificial Sequence
  derived and/or modified sequence
atgcatgtttctctggctgaggctttagaggtccgcggtggtcctctgcaggaggaggaaatctgggcagttctgaatcaatctgccgaatcactgcaggagctgtttcggaaggtgtcgctcgccgacccagctgctctaggcttcattatttccccgtggagtctcttgctgctacctagtggatccgtgtctttcaccgacgaaaatattagcaatcaggacttacgcgcatttactgctcctgaggtccttcagaaccagagcctgacatctctgtccgacgtcgaaaaaattcacatctattccttggggatgaccctctattggggcgcagactacgaggtcccccagtcccagccaattaagctgggcgatcatctgaacagtatcctgttaggaatgtgtgaggatgtgatttacgctcgtgtttcagtcagaaccgttctcgatgcatgctctgcgcatattcgcaactcaaactgcgccccatcgttctcctacgttaaacacctcgttaaacttgttctaggcaatttgtctgggacagaccagttgagttgcaacagcgagcaaaaaccagaccgcagtcaagccatcagggatcgacttaggggaaagggcctgcccacagggagatctagcacgtcagacgtgctcgatatccagaaaccacctctgtctcatcagactttcctgaacaagggcctttctaaatctatggggttcctgtccattaaggacacgcaagatgagaactacttcaaggacatcctctccgataattccggcagggaagattcggagaacacgttctcaccgtaccagtttaaaacctctggacctgaaaaaaagcctattcccggaattgacgtcctgtcaaagaaaaagatatgggccagctctatggacctactttgtaccgcggaccgggattttagcagcggagaaaccgcaacgtacagaagatgtcatcccgaggctgttacagttcggacatctacaactcctcggaagaaagaagcgaggtactctgatgggagtatcgcactggatatctttggccctcagaaaatggaccctatctatcacacgagggagttgcccacttcctcagccatttcttccgcactagatcgaattagagaacgccaaaaaaagctgcaggtgctgcgggaggcgatgaatgtggaggagcctgtcaggcgttacaagacataccatggggatgtgttttccacgagttccgagagcccatcaattatcagcagcgagagcgacttccggcaggtgcggaggagcgaggccagcaagagatttgaaagctcgagcggtttgccaggagtggacgagacgctctctcaaggtcagagtcaacgtccctcgaggcagtatgaaacaccatttgagggcaatcttatcaaccaggaaatcatgctcaagaggcaggaggaggagctcatgcagctgcaggcaaagatggccctgcgccagtccaggctttccctgtaccccggagatacaatcaaggcaagcatgttagatattactagggacccgctgcgggaaatcgctctggaaaccgccatgactcagcgcaagctgcgtaatttttttgggccagagttcgtgaagatgactatcgagccgtttatctccttggatctgccacggagcatcctgaccaaaaaaggcaagaacgaagataatcgccgaaaggtgaatatcatgcttctgaacggacagagactcgagctcacgtgcgatactaaaaccatctgtaaggacgtatttgatatggtagtggcccatatcggattagtggaacaccatttgtttgcgctggctactctgaaagataacgaatactttttcgtggatccagacctgaaactgacgaaagtggcccctgagggttggaaggaagaacctaagaaaaagacaaaggcgacagtgaatttcaccttattctttaggatcaagttcttcatggatgacgttagcctgatccagcacacactgacatgccaccagtactatctgcagttgcgcaaggacatattggaggaacggatgcactgtgacgatgagaccagccttctgttggcctcactggcactgcaagcagaatatggcgactatcaacctgaggtccacggagtttcatactttagaatggaacattatctgccagcacgggtcatggaaaagctcgacctcagctacatcaaggaagaactgccaaagctgcataatacatacgtaggggctagtgaaaaggaaacagagctcgagtttctgaaggtatgtcagcgattaaccgagtatggcgtccactttcacagggttcaccccgaaaaaaaatctcagactgggatccttcttggggtgtgttccaaaggcgtgctggtgttcgaagtgcataacggagttaggacgctcgtgctgcggttcccctggagggaaacaaagaagatttccttctctaagaagaaaattactctgcaaaacaccagtgacggaatcaaacacgggtttcagacagacaattcgaagatctgccaatatctgctgcatctctgctcatatcagcacaaattccagctgcaaatgcgggctagacaaagcaatcaggacgcccaggacatcgagagggccagtttcagaagcttgaatctccaggctgaaagtgtgaggggttttaacatggggagggccatatccaccggaagcctggcttcaagcactttaaataagctggccgtgcgccctctgtccgtgcaggcagaaatcctgaagagactctcttgttctgagttgagtctctaccaacccctgcagaacagtagcaaagaaaagaacgacaaggcaagctgggaggagaaaccgcgagagatgagcaaatcgtaccacgatctgagccaggctagtctgtaccctcaccggaaaaacgtgatagtgaatatggagccaccaccacaaacagtagccgaactggtcggtaaaccatctcaccaaatgtccagaagcgacgctgaaagcctggccggagtgaccaagctcaataactcaaaatcagtggcctcccttaacaggtcgcctgagcgaaggaagcatgaatcagactcttctagtattgaggaccctggacaggcctacgtgctggggatgacgatgcactcgagtggcaacagctcatcccaagtgcccctaaaagagaacgatgtcctgcataaacggtggagtatcgttagctccccggagagagagattacactggttaatttgaaaaaggatgctaaatacggtcttggcttccagatcatcgggggagagaaaatgggccgtctcgatctgggaatatttatctcttccgtggctccaggcggtcccgcagatcttgacgggtgtcttaagccaggagaccggctgattagcgtaaactccgtgagcctagagggagtcagtcaccatgccgcaatcgaaattctgcagaatgctcctgaagatgtgacacttgtaatcagccagccaaaggaaaagatcagcaaagtcccatctacgccggtccatctgacaaacgagatgaagaactacatgaaaaagagctcttatatgcaggattccgctattgatagttcatcaaaagatcatcattggtcccgcggaacactgcgtcacatttcagagaatagctttggaccgtctggcggattacgggagggttcgctcagttcacaggattcgcgaacagagtcagcctccctgtcacaaagccaagtgaatgggttctttgcatctcatctcggcgatcaaacttggcaggaaagccagcatggaagtccttccccgtctgtcatcagcaaggccactgaaaaggagaccttcaccgactccaatcaatctaagaccaagaaacctggaattagcgacgttacagattactcagaccggggagatagcgatatggacgaagctacctacagctcctcccaggaccatcagacacctaaacaggagagcagttcgtctgttaacacctcgaacaagatgaatttcaaaaccttctcttcctcgcctcccaagcccggtgatattttcgaggttgaactggccaaaaacgataattctttggggatttcagtaaccgtacttttcgataagggtggcgttaacacgagtgtaaggcacggtggaatctacgtgaaggccgttatcccgcagggcgctgccgagtccgatggccgaatccacaagggggacagagtgttagccgtcaacggtgtgagtctggagggggctacccataaacaggctgtcgaaaccctcagaaatactggccaggtggtacacttactccttgaaaagggacagtcgcccacttccaaggagcacgtgcccgtcacccctcagtgcactttatccgaccaaaacgcccagggccaaggtcccgaaaaagtgaagaaaaccactcaggttaaggactactcttttgtcactgaagagaacacctttgaggtgaagctctttaaaaattcatcaggcctggggttcagctttagtagggaggataaccttatccctgagcagatcaacgcgagcatcgtgcgcgtgaagaaacttttcccgggacaaccggctgccgagtctggaaaaatcgatgtgggcgacgtcatcttgaaagtaaacggagcctccttgaaggggttatcccaacaggaggtgatctccgccctccgtggaaccgctccggaggtgtttctgctgctttgccgacctcccccaggcgtactgccagagatagatacggccttgctgaccccactgcaatcccctgcccaggtcttgccaaattctagcaaggacagctcacaaccatcctgtgtggagcagtcgacctctagtgacgagaacgaaatgagtgataagagtaaaaagcagtgtaaaagcccaagccgcagggatagctacagcgatagtagcgggagtggggaggacgatctggtgaccgccccagcaaacatatccaatagcacttggagttctgctcttcaccagaccctgagcaacatggtgagccaagcccagagtcaccacgaggcccctaagtcccaggaagatactatttgtactatgttctactacccacaaaaaatcccaaacaaacctgagttcgaggactcaaacccatcaccgctgcctccggacatggcccctggccaatcataccagccccagtccgaatcagcctcgtcatcatccatggacaagtatcacatccaccacatcagcgagcccactcgacaagagaactggacgcccctcaaaaacgatctagagaaccacctggaggacttcgagctagaggtagagctccttattacactaatcaaatctgaaaaaggatcactcggctttacagtgacaaaagggaaccagagaatcggttgttatgtccacgacgtgatacaggaccccgctaaaagcgacggccgactcaaacctggtgatcgattgataaaggttaatgatactgatgtcacgaacatgacacatacggacgccgtaaacttgctgagagccgcatctaagaccgttagactcgtgatcggtagggtccttgagctgcctaggattcctatgctgcctcacctcctgccagacattaccctgacctgcaataaagaagagttggggttcagtctatgtggcggtcatgacagcctgtaccaagtggtgtatataagcgacatcaacccccgttcagtggctgccatcgaggggaatttgcagctcttagatgttatccactacgttaatggggtgagcactcagggaatgactcttgaagaagtgaacagggcactcgatatgtccctgccatctctggtgctcaaggccacaaggaatgatcttccagttgtgccgtcatctaaaagaagcgccgtcagtgccccaaaaagcactaagggcaacgggtcgtactccgtgggtagctgctcacagccagccctgacccctaacgattcattctctacggtggcaggcgaggagatcaatgagatctcctaccccaaaggaaaatgcagtacataccaaatcaaaggttcccctaatctgacactaccaaaggagtcatacattcaggaagacgatatttacgatgatagccaggaggccgaggttatacagtcattactggacgtggtcgacgaggaggcccagaatctgctcaatgaaaacaatgcggcaggctactcctgtgggccaggaaccctgaaaatgaatgggaagcttagcgaagagaggaccgaagataccgattgcgatgggagccctctccccgagtactttactgaggccactaagatgaatggttgcgaagagtactgtgaggagaaggtgaagtcagagagcctcattcagaagccacaagaaaaaaagacggatgatgatgaaatcacatggggtaacgatgagctcccgatcgagcgcacaaatcacgaggactccgataaagaccatagttttctgactaacgatgagctggcagtgctcccagtggttaaagttctgcctagtggaaaatacacaggggcaaacctgaagagcgtcatcagggtgctccgaggattgctggatcagggtatcccgtccaaagaactcgagaatctgcaggagctgaaacccctggatcaatgtctcattggacagacaaaagaaaaccgtcgcaagaatcgttataaaaatatcttaccatacgatgctacaagggtccctctgggtgatgagggaggatacattaacgcgtcctttattaagattcctgtgggcaaggaggaatttgtctacattgcctgccagggcccacttcccactactgttggggacttctggcagatgatttgggaacagaaatccaccgttatcgcaatgatgacccaggaagtcgagggtgaaaagatcaagtgtcaaagatattggccaaatattcttggcaaaacaacgatggtgtctaacagattacggctagctttagtccgcatgcaacagctcaaaggctttgtcgtgcgcgctatgactctcgaagacatccaaacgagagaggtccggcatatttcccatcttaacttcactgcctggcctgatcacgacactcccagccagccggatgatctactcacttttatctcctacatgaggcacattcacagatcgggtccgattatcacgcactgttccgccggaatcggaaggtccggtaccctgatttgtatagacgtggttttgggactgatatcacaagacctcgattttgacatttcagacttggttagatgtatgcggttgcagcggcacgggatggtgcaaacagaggaccaatacattttttgttaccaggttatcctctatgtgttaacacgactacaggcagaggaagaacaaaagcaacagccccaactgctcaagta

SEQ ID NO: 326347 - DNA, 8573 bp, Artificial Sequence
  derived and/or modified sequence
gagtagctccagcggccacgctgaggcgagggtgacacaccatgctcacggcccctggagaccgtcgtgctggcgagccgtgctccgtagctccccggtccgcctcggcagcggtcagagtcgcctacaggagttgagccgcccgcgccagaaggttttggcgaagctcttggagaggcgtcgagcacagtagggcggcgggggtgcgttgagcgctcgggggtcaggcagtcggccgggatcgccgctggggagcgtttccgaggcgaggaggaggaggaggagatgctgctcctcttctccccctccccaggctccttctacagctccttcagcccacgcccgcagccgcttgtgggagaagtggtggtggctctcggcgcccgcggcggctgccggcggcccgccccgacgccgcgtccctgcagccctcgcccggcgctccagtagcaggacccggtctcgggaccagccggtaatatgcacgtgtcactagctgaggccctggaggttcggggtggaccacttcaggaggaagaaatatgggctgtattaaatcaaagtgctgaaagtctccaagaattattcagaaaagtaagcctagctgatcctgctgcccttggcttcatcatttctccatggtctctgctgttgctgccatctggtagtgtgtcatttacagatgaaaatatttccaatcaggatcttcgagcattcactgcaccagaggttcttcaaaatcagtcactaacttctctctcagatgttgaaaagatccacatttattctcttggaatgacactgtattggggggctgattatgaagtgcctcagagccaacctattaagcttggagatcatctcaacagcatactgcttggaatgtgtgaggatgttatttacgctcgagtttctgttcggactgtgctggatgcttgcagtgcccacattaggaatagcaattgtgcaccctcattttcctacgtgaaacacttggtaaaactggttctgggaaatctttctgggacagatcagctttcctgtaacagtgaacaaaagcctgatcgaagccaggctattcgagatcgattgcgaggaaaaggattaccaacaggaagaagctctacttctgatgtactagacatacaaaagcctccactctctcatcagacctttcttaacaaagggcttagtaaatctatgggatttctgtccatcaaagatacacaagatgagaattatttcaaggacattttatcagataattctggacgtgaagattctgaaaatacattctccccttaccagttcaaaactagtggcccagaaaaaaaacccatccctggcattgatgtgctttctaagaagaagatctgggcttcatccatggacttgctttgtacagctgacagagacttctcttcaggagagactgccacatatcgtcgttgtcaccctgaggcagtaacagtgcggacttcaactactcctagaaaaaaggaggcaagatactcagatggaagtatagccttggatatctttggccctcagaaaatggatccaatatatcacactcgagaattgcccacctcctcagcaatatcaagtgctttggaccgaatccgagagagacaaaagaaacttcaggttctgagggaagccatgaatgtagaagaaccagttcgaagatacaaaacttatcatggtgatgtctttagtacctccagtgaaagtccatctattatttcctctgaatcagatttcagacaagtgagaagaagtgaagcctcaaagaggtttgaatccagcagtggtctcccaggggtagatgaaaccttaagtcaaggccagtcacagagaccgagcagacaatatgaaacaccctttgaaggcaacttaattaatcaagagatcatgctaaaacggcaagaggaagaactgatgcagctacaagccaaaatggcccttagacagtctcggttgagcctatatccaggagacacaatcaaagcgtccatgcttgacatcaccagggatccgttaagagaaattgccctagaaacagccatgactcaaagaaaactgaggaatttctttggccctgagtttgtgaaaatgacaattgaaccatttatatctttggatttgccacggtctattcttactaagaaagggaagaatgaggataaccgaaggaaagtaaacataatgcttctgaacgggcaaagactggaactgacctgtgataccaaaactatatgtaaagatgtgtttgatatggttgtggcacatattggcttagtagagcatcatttgtttgctttagctaccctcaaagataatgaatatttctttgttgatcctgacttaaaattaaccaaagtggccccagagggatggaaagaagaaccaaagaaaaagaccaaagccactgttaattttactttgtttttcagaattaaattttttatggatgatgttagtctaatacaacatactctgacgtgtcatcagtattaccttcagcttcgaaaagatattttggaggaaaggatgcactgtgatgatgagacttccttattgctggcatccttggctctccaggctgagtatggagattatcaaccagaggttcatggtgtgtcttactttagaatggagcactatttgcccgccagagtgatggagaaacttgatttatcctatatcaaagaagagttacccaaattgcataatacctatgtgggagcttctgaaaaagagacagagttagaatttttaaaggtctgccaaagactgacagaatatggagttcattttcaccgagtgcaccctgagaagaagtcacaaacaggaatattgcttggagtctgttctaaaggtgtccttgtgtttgaagttcacaatggagtgcgcacattggtccttcgctttccatggagggaaaccaagaaaatatctttttctaaaaagaaaatcacattgcaaaatacatcagatggaataaaacatggcttccagacagacaacagtaagatatgccagtacctgctgcacctctgctcttaccagcataagttccagctacagatgagagcaagacagagcaaccaagatgcccaagatattgagagagcttcgtttaggagcctgaatctccaagcagagtctgttagaggatttaatatgggacgagcaatcagcactggcagtctggccagcagcaccctcaacaaacttgctgttcgacctttatcagttcaagctgagattctgaagaggctatcctgctcagagctgtcgctttaccagccattgcaaaacagttcaaaagagaagaatgacaaagcttcatgggaggaaaagcctagagagatgagtaaatcataccatgatctcagtcaggcctctctctatccacatcggaaaaatgtcattgttaacatggaacccccaccacaaaccgttgcagagttggtgggaaaaccttctcaccagatgtcaagatctgatgcagaatctttggcaggagtgacaaaacttaataattcaaagtctgttgcgagtttaaatagaagtcctgaaaggaggaaacatgaatcagactcctcatccattgaagaccctgggcaagcatatgttctaggaatgactatgcatagttctggaaactcttcatcccaagtacccttaaaagaaaatgatgtgctacacaaaagatggagcatagtatcttcaccagaaagggagatcaccttagtgaacctgaaaaaagatgcaaagtatggcttgggatttcaaattattggtggggagaagatgggaagactggacctaggcatatttatcagttcagttgcccctggaggaccagctgacttggatggatgcttgaagccaggagaccgtttgatatctgtgaatagtgtgagtctggagggagtcagccaccatgctgcaattgaaattttgcaaaatgcacctgaagatgtgacacttgttatctctcagccaaaagaaaagatatccaaagtgccttctactcctgtgcatctcaccaatgagatgaaaaactacatgaagaaatcttcctacatgcaagacagtgctatagattcttcttccaaggatcaccactggtcacgtggtaccctgaggcacatctcggagaactcctttgggccatctgggggcctgcgggaaggaagcctgagttctcaagattccaggactgagagtgccagcttgtctcaaagccaggtcaatggtttctttgccagccatttaggtgaccaaacctggcaggaatcacagcatggcagcccttccccatctgtaatatccaaagccaccgagaaagagactttcactgatagtaaccaaagcaaaactaaaaagccaggcatttctgatgtaactgattactcagaccgtggagattcagacatggatgaagccacttactccagcagtcaggatcatcaaacaccaaaacaggaatcttcctcttcagtgaatacatccaacaagatgaattttaaaactttttcttcatcacctcctaagcctggagatatctttgaggttgaactggctaaaaatgataacagcttggggataagtgtcacggtactgtttgacaagggaggtgtgaatacgagtgtcagacatggtggcatttatgtgaaagctgttattccccagggagcagcagagtctgatggtagaattcacaaaggtgatcgcgtcctagctgtcaatggagttagtctagaaggagccacccataagcaagctgtggaaacactgagaaatacaggacaggtggttcatctgttattagaaaagggacaatctccaacatctaaagaacatgtcccggtaaccccacagtgtaccctttcagatcagaatgcccaaggtcaaggcccagaaaaagtgaagaaaacaactcaggtcaaagactacagctttgtcactgaagaaaatacatttgaggtaaaattatttaaaaatagctcaggtctaggattcagtttttctcgagaagataatcttataccggagcaaattaatgccagcatagtaagggttaaaaagctctttcctggacagccagcagcagaaagtggaaaaattgatgtaggagatgttatcttgaaagtgaatggagcctctttgaaaggactatctcagcaggaagtcatatctgctctcaggggaactgctccagaagtattcttgcttctctgcagacctccacctggtgtgctaccggaaattgatactgcgcttttgaccccacttcagtctccagcacaagtacttccaaacagcagtaaagactcttctcagccatcatgtgtggagcaaagcaccagctcagatgaaaatgaaatgtcagacaaaagcaaaaaacagtgcaagtccccatccagaagagacagttacagtgacagcagtgggagtggagaagatgacttagtgacagctccagcaaacatatcaaattcgacctggagttcagctttgcatcagactctaagcaacatggtatcacaggcacagagtcatcatgaagcacccaagagtcaagaagataccatttgtaccatgttttactatcctcagaaaattcccaataaaccagagtttgaggacagtaatccttcccctctaccaccggatatggctcctgggcagagttatcaaccccaatcagaatctgcttcctctagttcgatggataagtatcatatacatcacatttctgaaccaactagacaagaaaactggacacctttgaaaaatgacttggaaaatcaccttgaagactttgaactggaagtagaactcctcattaccctaattaaatcagaaaaaggaagcctgggttttacagtaaccaaaggcaatcagagaattggttgttatgttcatgatgtcatacaggatccagccaaaagtgatggaaggctaaaacctggggaccggctcataaaggttaatgatacagatgttactaatatgactcatacagatgcagttaatctgctccgggctgcatccaaaacagtcagattagttattggacgagttctagaattacccagaataccaatgttgcctcatttgctaccggacataacactaacgtgcaacaaagaggagttgggtttttccttatgtggaggtcatgacagcctttatcaagtggtatatattagtgatattaatccaaggtccgtcgcagccattgagggtaatctccagctattagatgtcatccattatgtgaacggagtcagcacacaaggaatgaccttggaggaagttaacagagcattagacatgtcacttccttcattggtattgaaagcaacaagaaatgatcttccagtggtccccagctcaaagaggtctgctgtttcagctccaaagtcaaccaaaggcaatggttcctacagtgtggggtcttgcagccagcctgccctcactcctaatgattcattctccacggttgctggggaagaaataaatgaaatatcgtaccccaaaggaaaatgttctacttatcagataaagggatcaccaaacttgactctgcccaaagaatcttatatacaagaagatgacatttatgatgattcccaagaagctgaagttatccagtctctgctggatgttgtggatgaggaagcccagaatcttttaaacgaaaataatgcagcaggatactcctgtggtccaggtacattaaagatgaatgggaagttatcagaagagagaacagaagatacagactgcgatggttcacctttacctgagtattttactgaggccaccaaaatgaatggctgtgaagaatattgtgaagaaaaagtaaaaagtgaaagcttaattcagaagccacaagaaaagaagactgatgatgatgaaataacatggggaaatgatgagttgccaatagagagaacaaaccatgaagattctgataaagatcattcctttctgacaaacgatgagctcgctgtactccctgtcgtcaaagtgcttccctctggtaaatacacgggtgccaacttaaaatcagtcattcgagtcctgcggggtttgctagatcaaggaattccttctaaggagctggagaatcttcaagaattaaaacctttggatcagtgtctaattgggcaaactaaggaaaacagaaggaagaacagatataaaaatatacttccctatgatgctacaagagtgcctcttggagatgaaggtggctatatcaatgccagcttcattaagataccagttgggaaagaagagttcgtttacattgcctgccaaggaccactgcctacaactgttggagacttctggcagatgatttgggagcaaaaatccacagtgatagccatgatgactcaagaagtagaaggagaaaaaatcaaatgccagcgctattggcccaacatcctaggcaaaacaacaatggtcagcaacagacttcgactggctcttgtgagaatgcagcagctgaagggctttgtggtgagggcaatgacccttgaagatattcagaccagagaggtgcgccatatttctcatctgaatttcactgcctggccagaccatgatacaccttctcaaccagatgatctgcttacttttatctcctacatgagacacatccacagatcaggcccaatcattacgcactgcagtgctggcattggacgttcagggaccctgatttgcatagatgtggttctgggattaatcagtcaggatcttgattttgacatctctgatttggtgcgctgcatgagactacaaagacacggaatggttcagacagaggatcaatatattttctgctatcaagtcatcctttatgtcctgacacgtcttcaagcagaagaagagcaaaaacagcagcctcagcttctgaagtgacatgaaaagagcctctggatgcatttccatttctctccttaacctccagcagactcctgctctctatccaaaataaagatcacagagcagcaagttcatacaacatgcatgttctcctctatcttagaggggtattcttcttgaaaataaaaaatattgaaatgctgtatttttacagctactttaacctatgataattatttacaaaattttaacactaaccaaacaatgcagatcttagggatgattaaaggcagcatttgatgatagcagacattgttacaaggacatggtgagtctatttttaatgcaccaatcttgtttatagcaaaaatgttttccaatattttaataaagtagttattttataggggatacttgaaaccagtatttaagctttaaatgacagtaatattggcatagaaaaaagtagcaaatgtttactgtatcaatttctaatgtttactatatagaatttcctgtaatatatttatatactttttcatgaaaatggagttatcagttatctgtttgttactgcatcatctgtttgtaatcattatctcactttgtaaataaaaacacaccttaaaacatgaacaagccaaaactgtgtgcag

SEQ ID NO: 326348 - DNA, 8076 bp, Artificial Sequence
  derived and/or modified sequence
gtaatatgcacgtgtcactagctgaggccctggaggttcggggtggaccacttcaggaggaagaaatatgggctgtattaaatcaaagtgctgaaagtctccaagaattattcagaaaagtaagcctagctgatcctgctgcccttggcttcatcatttctccatggtctctgctgttgctgccatctggtagtgtgtcatttacagatgaaaatatttccaatcaggatcttcgagcattcactgcaccagaggttcttcaaaatcagtcactaacttctctctcagatgttgaaaagatccacatttattctcttggaatgacactgtattggggggctgattatgaagtgcctcagagccaacctattaagcttggagatcatctcaacagcatactgcttggaatgtgtgaggatgttatttacgctcgagtttctgttcggactgtgctggatgcttgcagtgcccacattaggaatagcaattgtgcaccctcattttcctacgtgaaacacttggtaaaactggttctgggaaatctttctgggacagatcagctttcctgtaacagtgaacaaaagcctgatcgaagccaggctattcgagatcgattgcgaggaaaaggattaccaacaggaagaagctctacttctgatgtactagacatacaaaagcctccactctctcatcagacctttcttaacaaagggcttagtaaatctatgggatttctgtccatcaaagatacacaagatgagaattatttcaaggacattttatcagataattctggacgtgaagattctgaaaatacattctccccttaccagttcaaaactagtggcccagaaaaaaaacccatccctggcattgatgtgctttctaagaagaagatctgggcttcatccatggacttgctttgtacagctgacagagacttctcttcaggagagactgccacatatcgtcgttgtcaccctgaggcagtaacagtgcggacttcaactactcctagaaaaaaggaggcaagatactcagatggaagtatagccttggatatctttggccctcagaaaatggatccaatatatcacactcgagaattgcccacctcctcagcaatatcaagtgctttggaccgaatccgagagagacaaaagaaacttcaggttctgagggaagccatgaatgtagaagaaccagttcgaagatacaaaacttatcatggtgatgtctttagtacctccagtgaaagtccatctattatttcctctgaatcagatttcagacaagtgagaagaagtgaagcctcaaagaggtttgaatccagcagtggtctcccaggggtagatgaaaccttaagtcaaggccagtcacagagaccgagcagacaatatgaaacaccctttgaaggcaacttaattaatcaagagatcatgctaaaacggcaagaggaagaactgatgcagctacaagccaaaatggcccttagacagtctcggttgagcctatatccaggagacacaatcaaagcgtccatgcttgacatcaccagggatccgttaagagaaattgccctagaaacagccatgactcaaagaaaactgaggaatttctttggccctgagtttgtgaaaatgacaattgaaccatttatatctttggatttgccacggtctattcttactaagaaagggaagaatgaggataaccgaaggaaagtaaacataatgcttctgaacgggcaaagactggaactgacctgtgataccaaaactatatgtaaagatgtgtttgatatggttgtggcacatattggcttagtagagcatcatttgtttgctttagctaccctcaaagataatgaatatttctttgttgatcctgacttaaaattaaccaaagtggccccagagggatggaaagaagaaccaaagaaaaagaccaaagccactgttaattttactttgtttttcagaattaaattttttatggatgatgttagtctaatacaacatactctgacgtgtcatcagtattaccttcagcttcgaaaagatattttggaggaaaggatgcactgtgatgatgagacttccttattgctggcatccttggctctccaggctgagtatggagattatcaaccagaggttcatggtgtgtcttactttagaatggagcactatttgcccgccagagtgatggagaaacttgatttatcctatatcaaagaagagttacccaaattgcataatacctatgtgggagcttctgaaaaagagacagagttagaatttttaaaggtctgccaaagactgacagaatatggagttcattttcaccgagtgcaccctgagaagaagtcacaaacaggaatattgcttggagtctgttctaaaggtgtccttgtgtttgaagttcacaatggagtgcgcacattggtccttcgctttccatggagggaaaccaagaaaatatctttttctaaaaagaaaatcacattgcaaaatacatcagatggaataaaacatggcttccagacagacaacagtaagatatgccagtacctgctgcacctctgctcttaccagcataagttccagctacagatgagagcaagacagagcaaccaagatgcccaagatattgagagagcttcgtttaggagcctgaatctccaagcagagtctgttagaggatttaatatgggacgagcaatcagcactggcagtctggccagcagcaccctcaacaaacttgctgttcgacctttatcagttcaagctgagattctgaagaggctatcctgctcagagctgtcgctttaccagccattgcaaaacagttcaaaagagaagaatgacaaagcttcatgggaggaaaagcctagagagatgagtaaatcataccatgatctcagtcaggcctctctctatccacatcggaaaaatgtcattgttaacatggaacccccaccacaaaccgttgcagagttggtgggaaaaccttctcaccagatgtcaagatctgatgcagaatctttggcaggagtgacaaaacttaataattcaaagtctgttgcgagtttaaatagaagtcctgaaaggaggaaacatgaatcagactcctcatccattgaagaccctgggcaagcatatgttctaggaatgactatgcatagttctggaaactcttcatcccaagtacccttaaaagaaaatgatgtgctacacaaaagatggagcatagtatcttcaccagaaagggagatcaccttagtgaacctgaaaaaagatgcaaagtatggcttgggatttcaaattattggtggggagaagatgggaagactggacctaggcatatttatcagttcagttgcccctggaggaccagctgacttggatggatgcttgaagccaggagaccgtttgatatctgtgaatagtgtgagtctggagggagtcagccaccatgctgcaattgaaattttgcaaaatgcacctgaagatgtgacacttgttatctctcagccaaaagaaaagatatccaaagtgccttctactcctgtgcatctcaccaatgagatgaaaaactacatgaagaaatcttcctacatgcaagacagtgctatagattcttcttccaaggatcaccactggtcacgtggtaccctgaggcacatctcggagaactcctttgggccatctgggggcctgcgggaaggaagcctgagttctcaagattccaggactgagagtgccagcttgtctcaaagccaggtcaatggtttctttgccagccatttaggtgaccaaacctggcaggaatcacagcatggcagcccttccccatctgtaatatccaaagccaccgagaaagagactttcactgatagtaaccaaagcaaaactaaaaagccaggcatttctgatgtaactgattactcagaccgtggagattcagacatggatgaagccacttactccagcagtcaggatcatcaaacaccaaaacaggaatcttcctcttcagtgaatacatccaacaagatgaattttaaaactttttcttcatcacctcctaagcctggagatatctttgaggttgaactggctaaaaatgataacagcttggggataagtgtcacggtactgtttgacaagggaggtgtgaatacgagtgtcagacatggtggcatttatgtgaaagctgttattccccagggagcagcagagtctgatggtagaattcacaaaggtgatcgcgtcctagctgtcaatggagttagtctagaaggagccacccataagcaagctgtggaaacactgagaaatacaggacaggtggttcatctgttattagaaaagggacaatctccaacatctaaagaacatgtcccggtaaccccacagtgtaccctttcagatcagaatgcccaaggtcaaggcccagaaaaagtgaagaaaacaactcaggtcaaagactacagctttgtcactgaagaaaatacatttgaggtaaaattatttaaaaatagctcaggtctaggattcagtttttctcgagaagataatcttataccggagcaaattaatgccagcatagtaagggttaaaaagctctttcctggacagccagcagcagaaagtggaaaaattgatgtaggagatgttatcttgaaagtgaatggagcctctttgaaaggactatctcagcaggaagtcatatctgctctcaggggaactgctccagaagtattcttgcttctctgcagacctccacctggtgtgctaccggaaattgatactgcgcttttgaccccacttcagtctccagcacaagtacttccaaacagcagtaaagactcttctcagccatcatgtgtggagcaaagcaccagctcagatgaaaatgaaatgtcagacaaaagcaaaaaacagtgcaagtccccatccagaagagacagttacagtgacagcagtgggagtggagaagatgacttagtgacagctccagcaaacatatcaaattcgacctggagttcagctttgcatcagactctaagcaacatggtatcacaggcacagagtcatcatgaagcacccaagagtcaagaagataccatttgtaccatgttttactatcctcagaaaattcccaataaaccagagtttgaggacagtaatccttcccctctaccaccggatatggctcctgggcagagttatcaaccccaatcagaatctgcttcctctagttcgatggataagtatcatatacatcacatttctgaaccaactagacaagaaaactggacacctttgaaaaatgacttggaaaatcaccttgaagactttgaactggaagtagaactcctcattaccctaattaaatcagaaaaaggaagcctgggttttacagtaaccaaaggcaatcagagaattggttgttatgttcatgatgtcatacaggatccagccaaaagtgatggaaggctaaaacctggggaccggctcataaaggttaatgatacagatgttactaatatgactcatacagatgcagttaatctgctccgggctgcatccaaaacagtcagattagttattggacgagttctagaattacccagaataccaatgttgcctcatttgctaccggacataacactaacgtgcaacaaagaggagttgggtttttccttatgtggaggtcatgacagcctttatcaagtggtatatattagtgatattaatccaaggtccgtcgcagccattgagggtaatctccagctattagatgtcatccattatgtgaacggagtcagcacacaaggaatgaccttggaggaagttaacagagcattagacatgtcacttccttcattggtattgaaagcaacaagaaatgatcttccagtggtccccagctcaaagaggtctgctgtttcagctccaaagtcaaccaaaggcaatggttcctacagtgtggggtcttgcagccagcctgccctcactcctaatgattcattctccacggttgctggggaagaaataaatgaaatatcgtaccccaaaggaaaatgttctacttatcagataaagggatcaccaaacttgactctgcccaaagaatcttatatacaagaagatgacatttatgatgattcccaagaagctgaagttatccagtctctgctggatgttgtggatgaggaagcccagaatcttttaaacgaaaataatgcagcaggatactcctgtggtccaggtacattaaagatgaatgggaagttatcagaagagagaacagaagatacagactgcgatggttcacctttacctgagtattttactgaggccaccaaaatgaatggctgtgaagaatattgtgaagaaaaagtaaaaagtgaaagcttaattcagaagccacaagaaaagaagactgatgatgatgaaataacatggggaaatgatgagttgccaatagagagaacaaaccatgaagattctgataaagatcattcctttctgacaaacgatgagctcgctgtactccctgtcgtcaaagtgcttccctctggtaaatacacgggtgccaacttaaaatcagtcattcgagtcctgcggggtttgctagatcaaggaattccttctaaggagctggagaatcttcaagaattaaaacctttggatcagtgtctaattgggcaaactaaggaaaacagaaggaagaacagatataaaaatatacttccctatgatgctacaagagtgcctcttggagatgaaggtggctatatcaatgccagcttcattaagataccagttgggaaagaagagttcgtttacattgcctgccaaggaccactgcctacaactgttggagacttctggcagatgatttgggagcaaaaatccacagtgatagccatgatgactcaagaagtagaaggagaaaaaatcaaatgccagcgctattggcccaacatcctaggcaaaacaacaatggtcagcaacagacttcgactggctcttgtgagaatgcagcagctgaagggctttgtggtgagggcaatgacccttgaagatattcagaccagagaggtgcgccatatttctcatctgaatttcactgcctggccagaccatgatacaccttctcaaccagatgatctgcttacttttatctcctacatgagacacatccacagatcaggcccaatcattacgcactgcagtgctggcattggacgttcagggaccctgatttgcatagatgtggttctgggattaatcagtcaggatcttgattttgacatctctgatttggtgcgctgcatgagactacaaagacacggaatggttcagacagaggatcaatatattttctgctatcaagtcatcctttatgtcctgacacgtcttcaagcagaagaagagcaaaaacagcagcctcagcttctgaagtgacatgaaaagagcctctggatgcatttccatttctctccttaacctccagcagactcctgctctctatccaaaataaagatcacagagcagcaagttcatacaacatgcatgttctcctctatcttagaggggtattcttcttgaaaataaaaaatattgaaatgctgtatttttacagctactttaacctatgataattatttacaaaattttaacactaaccaaacaatgcagatcttagggatgattaaaggcagcatttgatgatagcagacattgttacaaggacatggtgagtctatttttaatgcaccaatcttgtttatagcaaaaatgttttccaatattttaataaagtagttattttataggggatacttgaaaccagtatttaagctttaaatgacagtaatattggcatagaaaaaagtagcaaatgtttactgtatcaatttctaatgtttactatatagaatttcctgtaatatatttatatactttttcatgaaaatggagttatcagttatctgtttgttactgcatcatctgtttgtaatcattatctcactttgtaaataaaaacacaccttaaaacatg

SEQ ID NO: 326349 - DNA, 7473 bp, Artificial Sequence
  derived and/or modified sequence
atgcacgtgagcctggccgaggccctggaggtgagaggcggccccctgcaggaggaggagatctgggccgtgctgaaccagagcgccgagagcctgcaggagctgttcagaaaggtgagcctggccgaccccgccgccctgggcttcatcatcagcccctggagcctgctgctgctgcccagcggcagcgtgagcttcaccgacgagaacatcagcaaccaggacctgagagccttcaccgcccccgaggtgctgcagaaccagagcctgaccagcctgagcgacgtggagaagatccacatctacagcctgggcatgaccctgtactggggcgccgactacgaggtgccccagagccagcccatcaagctgggcgaccacctgaacagcatcctgctgggcatgtgcgaggacgtgatctacgccagagtgagcgtgagaaccgtgctggacgcctgcagcgcccacatcagaaacagcaactgcgcccccagcttcagctacgtgaagcacctggtgaagctggtgctgggcaacctgagcggcaccgaccagctgagctgcaacagcgagcagaagcccgacagaagccaggccatcagagacagactgagaggcaagggcctgcccaccggcagaagcagcaccagcgacgtgctggacatccagaagccccccctgagccaccagaccttcctgaacaagggcctgagcaagagcatgggcttcctgagcatcaaggacacccaggacgagaactacttcaaggacatcctgagcgacaacagcggcagagaggacagcgagaacaccttcagcccctaccagttcaagaccagcggccccgagaagaagcccatccccggcatcgacgtgctgagcaagaagaagatctgggccagcagcatggacctgctgtgcaccgccgacagagacttcagcagcggcgagaccgccacctacagaagatgccaccccgaggccgtgaccgtgagaaccagcaccacccccagaaagaaggaggccagatacagcgacggcagcatcgccctggacatcttcggcccccagaagatggaccccatctaccacaccagagagctgcccaccagcagcgccatcagcagcgccctggacagaatcagagagagacagaagaagctgcaggtgctgagagaggccatgaacgtggaggagcccgtgagaagatacaagacctaccacggcgacgtgttcagcaccagcagcgagagccccagcatcatcagcagcgagagcgacttcagacaggtgagaagaagcgaggccagcaagagattcgagagcagcagcggcctgcccggcgtggacgagaccctgagccagggccagagccagagacccagcagacagtacgagacccccttcgagggcaacctgatcaaccaggagatcatgctgaagagacaggaggaggagctgatgcagctgcaggccaagatggccctgagacagagcagactgagcctgtaccccggcgacaccatcaaggccagcatgctggacatcaccagagaccccctgagagagatcgccctggagaccgccatgacccagagaaagctgagaaacttcttcggccccgagttcgtgaagatgaccatcgagcccttcatcagcctggacctgcccagaagcatcctgaccaagaagggcaagaacgaggacaacagaagaaaggtgaacatcatgctgctgaacggccagagactggagctgacctgcgacaccaagaccatctgcaaggacgtgttcgacatggtggtggcccacatcggcctggtggagcaccacctgttcgccctggccaccctgaaggacaacgagtacttcttcgtggaccccgacctgaagctgaccaaggtggcccccgagggctggaaggaggagcccaagaagaagaccaaggccaccgtgaacttcaccctgttcttcagaatcaagttcttcatggacgacgtgagcctgatccagcacaccctgacctgccaccagtactacctgcagctgagaaaggacatcctggaggagagaatgcactgcgacgacgagaccagcctgctgctggccagcctggccctgcaggccgagtacggcgactaccagcccgaggtgcacggcgtgagctacttcagaatggagcactacctgcccgccagagtgatggagaagctggacctgagctacatcaaggaggagctgcccaagctgcacaacacctacgtgggcgccagcgagaaggagaccgagctggagttcctgaaggtgtgccagagactgaccgagtacggcgtgcacttccacagagtgcaccccgagaagaagagccagaccggcatcctgctgggcgtgtgcagcaagggcgtgctggtgttcgaggtgcacaacggcgtgagaaccctggtgctgagattcccctggagagagaccaagaagatcagcttcagcaagaagaagatcaccctgcagaacaccagcgacggcatcaagcacggcttccagaccgacaacagcaagatctgccagtacctgctgcacctgtgcagctaccagcacaagttccagctgcagatgagagccagacagagcaaccaggacgcccaggacatcgagagagccagcttcagaagcctgaacctgcaggccgagagcgtgagaggcttcaacatgggcagagccatcagcaccggcagcctggccagcagcaccctgaacaagctggccgtgagacccctgagcgtgcaggccgagatcctgaagagactgagctgcagcgagctgagcctgtaccagcccctgcagaacagcagcaaggagaagaacgacaaggccagctgggaggagaagcccagagagatgagcaagagctaccacgacctgagccaggccagcctgtacccccacagaaagaacgtgatcgtgaacatggagccccccccccagaccgtggccgagctggtgggcaagcccagccaccagatgagcagaagcgacgccgagagcctggccggcgtgaccaagctgaacaacagcaagagcgtggccagcctgaacagaagccccgagagaagaaagcacgagagcgacagcagcagcatcgaggaccccggccaggcctacgtgctgggcatgaccatgcacagcagcggcaacagcagcagccaggtgcccctgaaggagaacgacgtgctgcacaagagatggagcatcgtgagcagccccgagagagagatcaccctggtgaacctgaagaaggacgccaagtacggcctgggcttccagatcatcggcggcgagaagatgggcagactggacctgggcatcttcatcagcagcgtggcccccggcggccccgccgacctggacggctgcctgaagcccggcgacagactgatcagcgtgaacagcgtgagcctggagggcgtgagccaccacgccgccatcgagatcctgcagaacgcccccgaggacgtgaccctggtgatcagccagcccaaggagaagatcagcaaggtgcccagcacccccgtgcacctgaccaacgagatgaagaactacatgaagaagagcagctacatgcaggacagcgccatcgacagcagcagcaaggaccaccactggagcagaggcaccctgagacacatcagcgagaacagcttcggccccagcggcggcctgagagagggcagcctgagcagccaggacagcagaaccgagagcgccagcctgagccagagccaggtgaacggcttcttcgccagccacctgggcgaccagacctggcaggagagccagcacggcagccccagccccagcgtgatcagcaaggccaccgagaaggagaccttcaccgacagcaaccagagcaagaccaagaagcccggcatcagcgacgtgaccgactacagcgacagaggcgacagcgacatggacgaggccacctacagcagcagccaggaccaccagacccccaagcaggagagcagcagcagcgtgaacaccagcaacaagatgaacttcaagaccttcagcagcagcccccccaagcccggcgacatcttcgaggtggagctggccaagaacgacaacagcctgggcatcagcgtgaccgtgctgttcgacaagggcggcgtgaacaccagcgtgagacacggcggcatctacgtgaaggccgtgatcccccagggcgccgccgagagcgacggcagaatccacaagggcgacagagtgctggccgtgaacggcgtgagcctggagggcgccacccacaagcaggccgtggagaccctgagaaacaccggccaggtggtgcacctgctgctggagaagggccagagccccaccagcaaggagcacgtgcccgtgaccccccagtgcaccctgagcgaccagaacgcccagggccagggccccgagaaggtgaagaagaccacccaggtgaaggactacagcttcgtgaccgaggagaacaccttcgaggtgaagctgttcaagaacagcagcggcctgggcttcagcttcagcagagaggacaacctgatccccgagcagatcaacgccagcatcgtgagagtgaagaagctgttccccggccagcccgccgccgagagcggcaagatcgacgtgggcgacgtgatcctgaaggtgaacggcgccagcctgaagggcctgagccagcaggaggtgatcagcgccctgagaggcaccgcccccgaggtgttcctgctgctgtgcagacccccccccggcgtgctgcccgagatcgacaccgccctgctgacccccctgcagagccccgcccaggtgctgcccaacagcagcaaggacagcagccagcccagctgcgtggagcagagcaccagcagcgacgagaacgagatgagcgacaagagcaagaagcagtgcaagagccccagcagaagagacagctacagcgacagcagcggcagcggcgaggacgacctggtgaccgcccccgccaacatcagcaacagcacctggagcagcgccctgcaccagaccctgagcaacatggtgagccaggcccagagccaccacgaggcccccaagagccaggaggacaccatctgcaccatgttctactacccccagaagatccccaacaagcccgagttcgaggacagcaaccccagccccctgccccccgacatggcccccggccagagctaccagccccagagcgagagcgccagcagcagcagcatggacaagtaccacatccaccacatcagcgagcccaccagacaggagaactggacccccctgaagaacgacctggagaaccacctggaggacttcgagctggaggtggagctgctgatcaccctgatcaagagcgagaagggcagcctgggcttcaccgtgaccaagggcaaccagagaatcggctgctacgtgcacgacgtgatccaggaccccgccaagagcgacggcagactgaagcccggcgacagactgatcaaggtgaacgacaccgacgtgaccaacatgacccacaccgacgccgtgaacctgctgagagccgccagcaagaccgtgagactggtgatcggcagagtgctggagctgcccagaatccccatgctgccccacctgctgcccgacatcaccctgacctgcaacaaggaggagctgggcttcagcctgtgcggcggccacgacagcctgtaccaggtggtgtacatcagcgacatcaaccccagaagcgtggccgccatcgagggcaacctgcagctgctggacgtgatccactacgtgaacggcgtgagcacccagggcatgaccctggaggaggtgaacagagccctggacatgagcctgcccagcctggtgctgaaggccaccagaaacgacctgcccgtggtgcccagcagcaagagaagcgccgtgagcgcccccaagagcaccaagggcaacggcagctacagcgtgggcagctgcagccagcccgccctgacccccaacgacagcttcagcaccgtggccggcgaggagatcaacgagatcagctaccccaagggcaagtgcagcacctaccagatcaagggcagccccaacctgaccctgcccaaggagagctacatccaggaggacgacatctacgacgacagccaggaggccgaggtgatccagagcctgctggacgtggtggacgaggaggcccagaacctgctgaacgagaacaacgccgccggctacagctgcggccccggcaccctgaagatgaacggcaagctgagcgaggagagaaccgaggacaccgactgcgacggcagccccctgcccgagtacttcaccgaggccaccaagatgaacggctgcgaggagtactgcgaggagaaggtgaagagcgagagcctgatccagaagccccaggagaagaagaccgacgacgacgagatcacctggggcaacgacgagctgcccatcgagagaaccaaccacgaggacagcgacaaggaccacagcttcctgaccaacgacgagctggccgtgctgcccgtggtgaaggtgctgcccagcggcaagtacaccggcgccaacctgaagagcgtgatcagagtgctgagaggcctgctggaccagggcatccccagcaaggagctggagaacctgcaggagctgaagcccctggaccagtgcctgatcggccagaccaaggagaacagaagaaagaacagatacaagaacatcctgccctacgacgccaccagagtgcccctgggcgacgagggcggctacatcaacgccagcttcatcaagatccccgtgggcaaggaggagttcgtgtacatcgcctgccagggccccctgcccaccaccgtgggcgacttctggcagatgatctgggagcagaagagcaccgtgatcgccatgatgacccaggaggtggagggcgagaagatcaagtgccagagatactggcccaacatcctgggcaagaccaccatggtgagcaacagactgagactggccctggtgagaatgcagcagctgaagggcttcgtggtgagagccatgaccctggaggacatccagaccagagaggtgagacacatcagccacctgaacttcaccgcctggcccgaccacgacacccccagccagcccgacgacctgctgaccttcatcagctacatgagacacatccacagaagcggccccatcatcacccactgcagcgccggcatcggcagaagcggcaccctgatctgcatcgacgtggtgctgggcctgatcagccaggacctggacttcgacatcagcgacctggtgagatgcatgagactgcagagacacggcatggtgcagaccgaggaccagtacatcttctgctaccaggtgatcctgtacgtgctgaccagactgcaggccgaggaggagcagaagcagcagccccagctgctgaagtag

SEQ ID NO: 326350 - protein, 139 aa, Artificial Sequence
  derived and/or modified sequence
MHVSLAEALEVRGGPLQEEEIWAVLNQSAESLQELFRKVSLADPAALGFIISPWSLLLLPSGSVSFTDENISNQDLRAFTAPEVLQNQSLTSLSDVEKIHIYSLGMTLYWGADYEVPQSQPIKLGDHLNSILLGMCEDV

SEQ ID NO: 326351 - DNA, 7305 bp, Artificial Sequence
  derived and/or modified sequence
cagttcctctttaccaaagtgtcactggctgatcctgctgccttgggattcattatcagtccatggagcctactcttactccccagcggctcagtcagcttcactgatgagaacatttcaaatcaggacctcagggcatttacagcaccagaagtccttcagaatcagtcgttgacctccctcagcgatgtggaaaagattcacatttattccttaggaatgactctttattggggagccgactatgaggttccccagtcccaaccgatcaaactgggtgaccatctgaattctatcctgctcggtatgtgcgaggatgtcatttacgcccgggtctccgtgaggacagtgctcgatgcctgtagcgctcatatccgcaacagcaactgtgccccatccttcagctacgtgaaacacctcgtgaagctggtcctcggcaatctcagcgggacagatcagctcagctgcaattctgagcagaaaccagatcggagccaggcaatcagagaccgccttaggggaaagggactccccacggggcggagctcaacctccgacgtgcttgacatacagaaacccccactctctcatcagacattcctgaacaagggcctgtccaagagtatggggtttctgtctattaaagacacccaggacgagaattatttcaaagatattttgagtgacaactccgggagagaggactcagaaaatacattttccccataccagttcaaaacctccggaccagagaaaaaaccgatccctgggatagacgtgttatccaaaaagaagatatgggcatcgtcaatggacctcctctgcactgcggacagagatttcagtagcggcgaaaccgcaacctatagaaggtgccatcctgaggcagtaactgtacggacctctacgaccccaagaaaaaaggaagcccgatacagtgacggatctatcgcattagacatcttcgggccgcaaaagatggatcccatataccacaccagggaattgcccacctcttcggccatctcaagcgcattagacaggattagagagcgacagaaaaaacttcaggtgctgagggaagccatgaatgtcgaagagccagttaggcggtataagacctaccatggcgacgtattctcaacgagctcagaatctccttcgattatctccagcgagtcagactttcggcaggttcgtaggagcgaagcttcaaaaagattcgaaagctcttccgggcttcctggcgttgacgaaaccctgtcccaggggcaaagccagcgccccagcaggcagtacgaaacgccctttgagggcaatcttatcaatcaggagatcatgctgaagagacaggaggaggaacttatgcaactgcaggctaagatggccttgaggcagtcccggctttccctatatcccggcgacaccattaaagcctctatgttagacatcacccgagaccccctacgcgagatcgccctggagacggctatgactcagcggaagttgagaaacttttttggacctgagttcgttaagatgaccattgagcccttcatttccctggatctgccccggtctattctgaccaaaaagggaaaaaatgaagataatcgacgaaaagtgaacataatgctgttaaacggacaaagactcgagctgacctgcgacactaagaccatatgcaaggacgtttttgatatggttgttgctcacatcggtctcgtggagcatcacctctttgctctggctaccttgaaggacaatgagtatttttttgtggatcctgacctcaagctgactaaggtggctccagaggggtggaaggaggagcctaaaaagaagacgaaagcaacagtcaactttactctgttttttaggattaaattcttcatggatgatgtcagcctcatacagcacacccttacttgccatcaatactatctgcagcttcggaaggacattttagaggagaggatgcattgcgacgacgagacatccctgcttctcgcttctctggctctgcaagctgaatatggagattaccagccagaagttcacggagtctcctactttcggatggaacactatctgcctgccagagtgatggagaagctggacctatcttatattaaggaggaactgccaaaacttcacaatacctatgttggagcatcagaaaaggagacagagctggagtttctaaaggtttgtcaaaggttaacggagtacggcgtgcatttccatcgcgtgcacccggagaagaaaagtcagaccggaatcctgctgggagtttgttctaagggcgtgctggtgtttgaggtgcacaacggggttcgcacactcgtgctccgattcccttggagggaaaccaagaaaatctcttttagcaagaaaaagataactctccagaatacttccgacgggattaaacatggatttcagaccgacaacagcaagatttgtcagtatctactgcacctgtgctcgtaccaacacaaatttcaactgcagatgcgcgcgagacagtctaaccaggacgcacaggatattgagcgcgcctcgtttaggagcttaaatctccaggccgaatccgtgcgcggatttaacatgggcagggccatatcaacaggatccttggccagtagcactttgaataaactcgccgttcggcccctgtctgttcaggcggaaattctcaagcggctcagttgtagcgaactatccttataccagccactgcagaacagttcaaaagagaaaaatgacaaggctagttgggaggaaaaaccaagagaaatgtctaaaagttaccatgatttgtcccaagccagcctttaccctcacagaaagaacgtaatagtcaatatggaaccaccccctcagacagttgctgaactggtcgggaagccaagccaccaaatgtcccggtccgacgccgaatctctcgccggcgtgacaaagttgaataattcaaaatctgtggcttcactgaatcgaagtccagagcgtcggaaacacgagtcagatagctcttctatagaagacccaggtcaagcctatgtactggatgtgctccacaagcgttggtctattgtttcctcacctgaacgagagatcactctggtgaatctgaaaaaagatgcaaagtatggactcgggttccagataatcggaggggagaaaatgggtcgcctcgacttaggtatttttatttcatctgtagcacctggcggaccggctgatcttgatggatgtctgaaacctggcgataggctgattagtgtcaattccgtgagtttggagggtgtgtctcaccacgctgcaattgagattctgcagaacgcacctgaagatgtgaccctcgtaatcagtcagcctaaggaaaagatatcaaaggtgcccagcacccccgtgcacttgaccaacgagatgaaaaattatatgaaaaagagcagttatatgcaagactcagccatcgacagcagctctaaagaccaccattggagccggggcacgcttcgccatatcagcgaaaattcgtttggccccagcggcggcctgcgggagggcagcctgagctctcaagacagcagaacggaaagtgcctctctcagccagagccaggttaatggctttttcgctagccaccttggtgatcagacctggcaggagtcccaacacggcagcccctctccatcggtcatttccaaagccaccgaaaaggagactttcacagactcaaaccaatccaagacaaagaagcccggcattagtgacgttaccgattacagcgaccgcggtgactccgatatggatgaagccacctacagcagttctcaggaccatcagacccctaagcaggaatcatcatccagtgtcaacacttcaaacaaaatgaactttaagacctttagctcctcaccaccaaaacctggggacatttttgaggtggaactggctaaaaacgacaactcattgggaattagtgtaacggggggagtgaatacaagtgttcgccatggcgggatatacgtgaaggctgttatcccccagggtgcagcagagagcgatgggcgcatccacaaaggagatcgcgtcctggccgttaacggcgtgagcctcgagggtgctacccacaagcaggccgtagagaccttaaggaataccggccaggtagtccatctgttgttggagaaggggcaatcacccacgtccaaagaacatgtgcctgtcactccacagtgcaccctgtctgaccagaatgcacaagggcagggccccgaaaaggtgaaaaagaccactcaggtgaaagactactctttcgtgacggaagagaatactttcgaggtgaaattgttcaagaactcttctgggctcggattttcattcagcagggaggacaatctcattcccgaacagattaatgccagcatcgtccgtgtaaaaaagttgttccctggacagcccgctgctgagtccgggaagattgatgttggcgacgtaatattgaaggttaatggggctagcttgaaaggcctgagccagcaggaggttatcagcgcgctcagaggaacggccccagaggtgtttttattattgtgtcgcccaccccctggagtgctcccagagatcgataccgcgctgctgacgccactgcagtcaccagcgcaggtcctccccaattcttctaaggactcatcacagcctagttgtgtggagcagagtacctcgagcgatgagaatgagatgagtgacaagtctaaaaaacagtgtaagtcgccatcccgacgtgacagctacagtgactcttcggggagtggagaggacgacctcgtcacagcccccgccaatatatcgaatagcacctggagcagtgcccttcaccagaccctcagcaacatggtcagtcaagcccagtcacatcacgaggcccccaagagtcaagaggatacaatctgtacaatgttctattacccacagaaaatccctaataagccggaattcgaggacagcaaccctagtcctcttccaccagacatggcaccaggacagtcttatcaaccccagtcagaatccgcctctagcagctccatggataagtaccatatccatcatatctctgagcccacacgccaggagaattggacccctctgaaaaatgacctcgagaaccatttggaggattttgaactcgaggtagagctgttaatcacgttaatcaaaagcgagaagggaagtctgggctttaccgtgaccaaaggaaaccagcggattggctgctacgtccacgatgtaatccaggatcctgccaaatccgatggacgacttaaaccaggcgatcggctgatcaaggtaaacgacacagatgtcaccaatatgacccacacagacgccgtaaatttactgcgagctgcgtccaagaccgtccggctcgtgataggccgggttttggagttgccgcgaatccctatgctgcctcacctactccctgacattaccctgacgtgcaacaaagaagaactgggcttttcattgtgcggaggacatgattcgctgtaccaggtggtttacatcagtgacattaatccacggagcgtagcagctatcgaggggaatctccaattgctcgatgtcattcactatgtgaacggcgtgagcacccagggcatgacgctggaagaggtcaaccgcgctttagatatgtccctgccttctctcgttttgaaagcaacccgcaatgacctgccagtcgtcccaagtagtaagaggtcggccgtctctgccccaaagtccacgaaaggaaatggcagctactctgttgggagctgttcacagcctgccctgacacccaatgactcgttttccaccgtggcaggggaggagatcaatgaaatttcctaccctaagggtaaatgctcgacataccagatcaaggggtccccaaatctcacattaccaaaggagagctacatccaggaagatgacatctacgatgatagccaggaggccgaagtcatccagtctttgttggacgtcgtggacgaggaggcccagaatcttctcaatgagaataatgcggcggggtactcatgtggccccggaacactgaaaatgaacggtaagctgagtgaagagcgcactgaagataccgattgtgacggcagtccccttcctgagtatttcaccgaggcaacaaagatgaacggatgcgaagaatactgcgaagagaaggtaaagtccgagtcactaattcaaaaaccgcaggagaaaaagactgacgatgacgaaattacatggggaaatgatgaactccccatagagaggaccaaccacgaggattctgacaaggatcattccttcttgacgaacgatgagttggccgtccttcctgtggtgaaagtgctgcctagtggcaagtacactggagccaacctcaagagtgtgataagagtgctgcgtgggctgctcgatcagggcattccttccaaggagcttgagaatctgcaggagttgaagcccctggaccaatgcctgatcggacaaaccaaagaaaatcgccgcaagaatcgatacaaaaatatcctgccatatgatgcaacaagggtcccgcttggcgatgagggcggatatatcaatgcatctttcattaagatcccagttggcaaggaggagttcgtctacattgcatgccagggtcccctaccgacgaccgtgggggacttctggcagatgatctgggagcagaagagcaccgtcattgcaatgatgacacaggaggttgagggagagaagatcaagtgccagagatactggcccaacatcctgggcaagacaaccatggtcagcaacagactgagattggccttggtgaggatgcagcaacttaaggggttcgtggtgagagcaatgacgctggaggacatccagacccgggaggtaagacatatcagccatctgaattttacagcctggcctgatcatgacacaccttctcagcctgatgacttgcttacattcatcagctacatgaggcatatacacaggtccggaccgataatcacccactgttcagctggcatcggcaggagcgggacactgatctgtatagacgtggtgctgggattgatctcccaggatctcgacttcgacatctccgaccttgtgcggtgcatgaggctgcagcggcacggaatggtgcagacagaggatcaatatattttttgctaccaggttatcctctacgtgctgaccaggctccaggctgaggaggagcagaaacaacagccccagcttctcaagtag

SEQ ID NO: 326352 - DNA, 7401 bp, Artificial Sequence
  derived and/or modified sequence
atgcatgtttctctggcggaggcattagaagtcaggggagggcctttgcaggaggaggaaatctgggctgtgttaaatcagagtgcggagtcactccaggaacttttccgcaaagtcagccttgccgatcccgccgctctaggcttcattatttctccgtggagtctgctgctgctaccttctggcagcgtaagctttaccgatgagaacattagcaaccaggacctgagggctttcactgctccagaagtgttacagaaccagagtctgacttctctgtccgacgtggaaaagattcacatctactctcttgggatgaccttgtactggggagcagactatgaagtgcctcagtcacagcccatcaaattgggggaccacctgaattccatattgttgggcatgtgcgaagatgtgatctacgcacgggtcagtgttcggaccgtgttagacgcgtgcagcgcccacatccggaatagcaactgtgccccttcttttagttacgtgaaacacctggttaagttagtccttgggaatctgtccggcacagaccagctgtcttgcaattctgagcagaagcccgacagatcacaggctatacgtgatcggctgagggggaagggcctgcccaccggacgctcctcaacctctgatgttctggacatacagaaaccccccctttcccaccagaccttcttaaataagggcttgtctaagagcatgggattccttagtatcaaagacacccaggatgagaattacttcaaggatatcctgagcgacaacagcggccgcgaagacagcgagaacaccttttctccatatcagtttaagacttcaggacctgagaagaaacctatacccggcattgatgtgctatccaagaagaagatctgggcaagcagcatggacctcctgtgtactgcagacagggacttttctagcggcgaaactgctacctacaggcgttgtcaccctgaggctgtgacagtgcgaacttctacaactcctcgcaagaaagaagctcgatattctgatggaagcatagccctcgatatattcggaccacagaagatggaccctatctaccacacccgggaactcccgacatcatccgccatcagcagcgccctggaccgcatcagagaacgccagaaaaaattgcaggtcctccgggaagcgatgaatgtggaagaacccgttcgccggtataagacatatcacggcgacgtctttagcaccagcagcgaaagccctagtatcataagttcagaaagcgatttccgacaggtgcgccgctctgaagcatccaagaggttcgaatccagttctggtttgcctggggtagatgagacactgagtcagggtcagagccagcgtccctctcggcagtacgagacgcccttcgagggaaatctgattaaccaagaaatcatgctcaagcggcaggaggaggagctgatgcaattgcaggctaaaatggcgctgcgtcaaagcagactatctttgtatcctggagatacaatcaaggcatccatgctggatattacacgcgacccgctcagggagatcgcgctagaaactgctatgacacagcgcaagctcagaaactttttcggcccggaattcgtaaagatgactattgaaccgtttatcagcttggacctgcctcgttctatcttgactaagaagggcaaaaacgaggacaaccggagaaaagtcaatatcatgctccttaatggccagagactcgagttgacctgtgacactaaaaccatttgtaaagatgtgtttgacatggttgtcgcacatattgggctcgttgaacaccacctcttcgcactagctacattgaaggacaacgagtacttctttgtggacccggatcttaaactgacaaaggtggccccagaaggatggaaagaggaaccaaaaaaaaaaactaaggcaactgtgaacttcacccttttttttcgcattaagttcttcatggatgatgtttctctaatccagcatacgcttacatgtcatcagtactacttgcagctgcgaaaggatattctcgaggagcgcatgcactgtgacgatgagacctcccttctgttggcaagcttagctctgcaggccgaatacggcgattaccagccagaggtccacggcgtgtcatacttcaggatggagcactacctcccagcccgggtaatggaaaaactggatctctcttacatcaaagaagaacttccgaaactgcacaatacctacgttggcgccagtgagaaagagactgagctcgaatttttgaaagtgtgccagcggctgacagagtatggggttcactttcatagagttcatccagagaagaaatcgcagaccggcatcttactcggggtatgctctaaaggcgttttagtcttcgaagtgcataacggagtgcggactctggtattacggttcccctggagggagaccaagaaaatcagcttcagtaaaaagaaaattacactccaaaacacgtctgatggcataaaacacggcttccagactgacaacagcaagatctgtcaatacctactgcacttgtgttcataccagcataagttccagctgcagatgcgggcccggcagtctaatcaggacgcacaggatatcgagagggcctcgttcagatcgctgaacctgcaggctgaaagcgtgcgcggcttcaacatgggtcgggccatatcaacaggcagtcttgcgtcctccaccctcaataaactggctgtgagacctctctccgtgcaggcggagatcctcaaaaggctcagttgtagcgagcttagcctctaccagccgctccagaactcatctaaagagaagaacgacaaggcaagctgggaagagaaacccagggagatgagcaagtcctatcacgacctgtctcaagctagcttatacccacatcgaaaaaatgtcattgtcaacatggaaccccctccacaaaccgtggctgaattagttggcaaaccaagtcatcagatgtccagaagtgatgcagagagtctggccggagttacaaagttaaacaactcgaaatcagtggcttcgctgaacaggtcgccagagagacgcaaacacgagtcagactcgtcaagtattgaggatcccggccaagcgtacgtgttagatgtgctgcataaacgctggagcattgtctcctctccagaaagagaaattaccttggttaatttaaagaaggatgccaagtacggccttggtttccagataatcggaggagagaagatggggcgactggacctgggtatcttcatttcaagtgtagcccccggtggacctgctgacctggacggctgcttaaaaccaggcgaccgtttaataagtgtcaatagcgtctcgctcgagggtgtcagtcaccacgccgccatcgagattctccagaatgccccggaagatgttaccctagtgatctcgcagcccaaagaaaaaatttcgaaggtgcctagcacccccgtacacctaacaaacgagatgaagaactacatgaagaagagtagctacatgcaggattctgcaattgacagttcttccaaagaccaccattggtcccggggcacccttaggcacatctctgagaacagcttcggaccaagcggggggctgagagaaggcagtcttagctcacaggattcaagaacagagtccgcctccctctcccaatcccaggtgaacggtttcttcgcttctcaccttggcgaccaaacgtggcaggaatctcagcatggttcaccgtcaccctccgtgataagcaaagcaacagagaaggagacttttactgactctaaccagagtaaaacgaaaaagccaggcatctctgacgtcactgactacagtgatagaggagactcggacatggatgaggccacatattcaagctcccaagatcatcagactcctaaacaggagtcttcatcctccgtgaacaccagcaataagatgaatttcaagacctttagcagctctcccccaaagcccggtgacatatttgaggtagagctggcaaagaatgataattccctggggatctcagtgacgggtggggtcaacacatccgttcgccatggcgggatctatgtaaaagccgtgatacctcagggtgccgcggaaagtgatggtagaatccataagggggaccgggtccttgccgtcaacggggtgagtctggagggagctacacacaagcaggcggtagagaccttgcgcaataccggacaggtcgtgcacctgctgcttgagaaaggccagtcccccacgagcaaggagcacgttccagtgaccccccagtgcacattgtctgaccagaacgcacagggacaaggccctgaaaaggtcaagaaaactactcaggtcaaggattattctttcgtcactgaagaaaatacctttgaggtgaagctcttcaagaacagctccggcctggggttcagcttctcccgcgaggacaatctgatacccgaacaaataaacgcatctatcgtccgcgttaagaagttgttccctggccagcccgctgccgagagcggcaagattgatgttggcgatgtgatcctaaaggtcaatggcgccagcttgaaggggctgtctcagcaggaggtcatctctgcgcttagggggaccgccccggaggtgtttctgcttctgtgccggcctccaccgggcgtgctgcccgaaatagacaccgcactcctgactccgctccagtctccagcacaggtactcccaaactccagcaaagactcctctcaaccctcctgcgtggagcaatcgacttcctccgacgagaatgagatgtccgacaaatccaaaaagcagtgtaaatctccctctagaagggatagctactcagacagcagcggatccggagaagacgatctcgtgaccgcccctgctaacatcagtaattccacctggagctccgctctgcaccagaccctgtctaacatggtttcacaggcccagtcacaccacgaagctcccaagagtcaagaggacacgatctgcaccatgttttactatccccagaagattcccaacaagccagagttcgaagatagcaatccaagcccgttacctcctgatatggctcccggacagtcttaccaaccgcagtcggaatccgcctcaagctcatcaatggacaaataccatatacaccatatctccgaacccacacgccaggagaattggacgcctctgaagaacgatctagagaatcacctcgaagacttcgagctagaggtggagctcctgattactttgatcaaatccgagaagggcagcttggggtttacagtgaccaagggaaaccaacgaatcggctgctacgtgcacgacgtgatccaagaccctgccaagtctgacgggcgtctgaagccgggagacagattgataaaagtgaacgatacggatgttactaacatgacccatacagatgccgtaaatttactgcgggcagcctccaaaaccgtacggttggttattggacgggtgctggagctcccaagaatacctatgctgccacacctgctgcccgatatcaccttaacatgcaataaggaagaattgggctttagtctgtgcggcggccacgacagcctttatcaagtcgtgtatattagtgatatcaatccccggtctgtggcggcaattgagggcaacttacagctgttagatgtgatccactatgtgaacggagtgtccacccagggtatgacattggaagaagtcaatagagccctggatatgagcctcccaagtctggtgttaaaagctacacggaacgatttgccagtcgtaccgtctagcaagaggagtgctgttagcgctcccaaatctacgaaagggaacggttcctacagtgtcggtagttgctcgcagccagcactgactccaaatgatagcttctccaccgttgccggcgaggaaattaatgaaattagttaccccaaaggcaagtgttcaacttatcagataaagggctcccccaatctaacactgcccaaggaatcatatatacaggaggatgacatctacgacgacagccaggaggcagaagtaattcagagcctcctagatgttgtcgacgaggaggctcaaaaccttctcaacgaaaacaacgcagcagggtactcttgcggtccagggaccttgaagatgaacggaaaattgtctgaggagcggactgaggacacagactgcgacggttcaccactgccggagtactttacagaggctacaaagatgaacgggtgtgaggaatattgcgaagagaaagttaagtcagagtcactcatccaaaagcctcaagaaaagaagacagacgacgatgagattacttgggggaatgatgagctccctatagaaaggactaaccacgaagactcagacaaggaccactcgtttttaaccaacgacgagttggcagtcctgcctgtcgttaaagtcttgccttctggtaaatataccggtgccaatcttaagtcagtaatcagggtgctgaggggcctgctggaccagggcataccttctaaagagttggaaaacctccaggagctcaagccattggaccagtgtctgatagggcagaccaaggaaaataggcggaagaacaggtacaaaaacatccttccttatgatgcaacccgggtcccactcggcgatgagggaggatacatcaatgcaagtttcatcaagataccagtgggcaaagaggagttcgtgtatattgcctgccagggccccctccccactacggtgggcgacttctggcagatgatatgggagcagaaatcaaccgtgatcgccatgatgacacaggaggtcgagggcgagaagattaaatgtcaacggtactggccaaatatccttggcaagacaactatggtatcaaaccgacttcggctcgctctcgtgagaatgcagcaactgaagggcttcgtcgtccgggccatgaccctcgaggacatacagacgagggaagtcagacacatctcacatctgaactttaccgcatggccagatcacgatacaccctcccagcccgacgacctgttaacttttatatcttacatgcgtcatatccatcggtccggacctataattacacactgctccgcggggatcggtcggtccggaacacttatatgcatcgacgtcgtgttaggcttaatatctcaggacctggatttcgacatcagcgacctggtgaggtgcatgaggttgcagaggcacgggatggtgcaaaccgaggaccaatacatcttctgttatcaggtcattctctacgtgcttaccaggctccaagcagaagaggaacagaagcagcaacctcagctgcttaaatag

SEQ ID NO: 326353 - DNA, 7305 bp, Artificial Sequence
  derived and/or modified sequence
cagttcctgttcaccaaggtgtccctggccgaccctgctgccctgggcttcatcatcagcccctggagcctgctgctgctgcccagcggctctgtgtccttcacagatgagaacatcagcaaccaggacctgcgggccttcaccgcccctgaggtgctgcagaaccagagcctgaccagcctgagtgatgtggagaagatccacatctacagcctgggcatgaccctgtactggggcgctgactatgaggtgccccagagccagcccatcaagctgggggaccacctgaacagcatcctgctgggcatgtgtgaagatgtgatctatgcccgggtgtctgtgaggacagtgctggatgcctgcagcgcccacatccggaacagcaactgtgcccccagcttctcctatgtgaagcacctggtgaagctggtgctgggcaacctgtctggaacagaccagctgagctgcaacagcgagcagaagccagacaggagccaggccatccgggaccggctgcggggcaagggcctgcccaccggccgcagcagcaccagtgatgtgctggacatccagaagccacccctgagccaccagaccttcctgaacaagggcctgagcaagtccatgggcttcctgagcatcaaggacacccaggatgagaactacttcaaggacatcctgagtgacaacagcggccgggaggacagcgagaacaccttcagcccctaccagttcaagaccagcggccctgagaagaagcccatccctggcattgatgtgctgagcaagaagaagatctgggccagctccatggacctgctgtgcacagctgaccgggacttcagcagtggagaaacagccacctaccgccgctgccaccctgaggccgtgacagtgaggaccagcaccacccccaggaagaaggaggcccgctacagtgatggcagcatcgccctggacatcttcggcccccagaagatggaccccatctaccacacccgggagctgcccaccagcagcgccatcagcagcgccctggaccgcatccgggagcggcagaagaagctgcaggtgctgcgggaggccatgaatgtggaggagcctgtgcggcgctacaagacctaccatggagatgtgttcagcaccagcagcgagagccccagcatcatcagcagcgagagtgacttccggcaggtgcggcgctctgaggccagcaagagatttgagagcagcagcggcctgcccggggtggatgagaccctgagccagggccagagccagaggcccagccggcagtatgagaccccatttgagggcaacctgatcaaccaggagatcatgctgaagaggcaggaggaggagctgatgcagctgcaggccaagatggccctgcggcagagccggctgagcctgtacccaggggacaccatcaaggcctccatgctggacatcacccgggaccccctgcgggagatcgccctggagacagccatgacccagaggaagctgaggaacttctttggacctgagtttgtgaagatgaccatcgagcccttcatcagcctggacctgcccaggagcatcctgaccaagaagggcaagaatgaagacaacagaaggaaggtgaacatcatgctgctgaatggccagaggctggagctgacctgtgacaccaagaccatctgcaaggatgtgtttgacatggtggtggcccacatcggcctggtggagcaccacctgtttgccctggccaccctgaaggacaatgagtacttctttgtggaccctgacctgaagctgaccaaggtggcccctgagggctggaaggaggagcccaagaagaagaccaaggccaccgtgaacttcaccctcttcttccgcatcaagttcttcatggatgatgtgtccctcatccagcacaccctgacctgccaccagtactacctgcagctgaggaaggacatcctggaggagaggatgcactgtgatgatgagaccagcctgctgctggccagcctggccctgcaggccgagtatggagactaccagcctgaggtgcatggagtgtcctacttcaggatggagcactacctgcctgcccgggtgatggagaagctggacctgagctacatcaaggaggagctgcccaagctgcacaacacctacgtgggcgccagcgagaaggagacagagctggagttcctgaaggtgtgccagaggctgacagaatatggagtgcacttccaccgggtgcaccctgagaagaagagccagacaggcatcctgctgggcgtgtgcagcaagggcgtgctggtgtttgaggtgcacaatggagtgaggaccctggtgctgcgcttcccctggagggagaccaagaagatctccttcagcaagaagaagatcaccctgcagaacaccagtgatggcatcaagcacggcttccagacagacaacagcaagatctgccagtacctgctgcacctgtgcagctaccagcacaagttccagctgcagatgagggcccggcagagcaaccaggatgcccaggacatcgagcgggccagcttccgcagcctgaacctgcaggccgagagcgtgcggggcttcaacatgggccgggccatcagcacaggcagcctggccagcagcaccctgaacaagctggccgtgcggcccctgtctgtgcaggccgagatcctgaagaggctgagctgcagcgagctgagcctgtaccagcccctgcagaacagcagcaaggagaagaatgacaaggcctcctgggaggagaagccccgggagatgagcaagagctaccatgacctgagccaggccagcctgtacccccacaggaagaatgtcatcgtgaacatggagcccccaccccagacagtggccgagctggtgggcaagcccagccaccagatgagcagaagtgatgctgagagcctggccggcgtgaccaagctgaacaacagcaagtctgtggccagcctgaacagaagccctgagaggaggaagcatgaaagtgacagcagcagcattgaagatcctggccaggcctacgtgctggatgtgctgcacaagcgctggagcatcgtgagcagccctgagcgggagatcaccctggtgaacctgaagaaggatgccaagtatggcctgggcttccagatcatcggcggggagaagatgggccgcctggacctgggcatcttcatcagctctgtggcccctgggggccctgctgacctggatggctgcctgaagccaggggacaggctcatctctgtgaacagcgtgtccctggagggcgtgagccaccacgccgccatcgagatcctgcagaatgccccagaagatgtgaccctggtgatcagccagcccaaggagaagatcagcaaggtgcccagcacccctgtgcacctgaccaatgagatgaagaactacatgaagaagagcagctacatgcaggacagcgccatcgacagcagcagcaaggaccaccactggagccggggcaccctgcggcacatcagtgaaaattcctttggccccagcggcggcctgcgggagggcagcctgagcagccaggacagcaggacagagagcgccagcctgagccagagccaggtgaatggcttctttgccagccacctgggggaccagacctggcaggagagccagcacggcagccccagccccagcgtcatcagcaaggccacagagaaggagaccttcacagacagcaaccagagcaagaccaagaagccaggcatcagtgatgtgacagactacagcgacagaggagacagcgacatggatgaggccacctacagcagcagccaggaccaccagacccccaagcaggagagcagcagctctgtgaacaccagcaacaagatgaacttcaagaccttcagcagcagcccccccaagccaggggacatctttgaggtggagctggccaagaatgacaacagcctgggcatctctgtgactggaggagtgaacacctctgtgagacatggaggcatctacgtgaaggccgtcatcccccagggcgctgctgagagtgatggccgcatccacaagggggacagagtgctggccgtgaatggagtgtccctggagggcgccacccacaagcaggccgtggagaccctgaggaacacaggccaggtggtgcacctgctgctggagaagggccagagccccaccagcaaggagcacgtgcctgtgaccccccagtgcaccctgagtgaccagaatgcccagggccagggccctgagaaggtgaagaagaccacccaggtgaaggactacagctttgtgacagaggagaacacctttgaggtgaagctgttcaagaacagcagcggcctgggcttctccttcagccgggaggacaacctgatccctgagcagatcaatgccagcatcgtgcgggtgaagaagctgtttcctggccagcctgctgctgagagcggcaagattgatgtgggagatgtgatcctgaaggtgaatggagccagcctgaagggcctgagccagcaggaggtgatcagcgccctgcggggcacagcccctgaggtgttcctgctgctgtgcaggcctcctcctggggtgctgcctgagattgacacagccctgctgacccccctgcagagccctgcccaggtgctgcccaacagcagcaaggacagcagccagcccagctgtgtggagcagagcaccagcagtgatgaaaatgagatgtctgacaagagcaagaagcagtgcaagagccccagcagaagagacagctacagcgacagcagcggcagcggagaagatgacctggtgacagccccagccaacatcagcaacagcacctggagcagcgccctgcaccagaccctgagcaacatggtgtcccaggcccagagccaccacgaggcccccaagagccaggaggacaccatctgcaccatgttctactacccccagaagatccccaacaagccagagtttgaggacagcaaccccagccccctgcccccagacatggcccctggccagagctaccagccccagagcgagagcgccagcagcagctccatggacaagtaccacatccaccacatcagcgagcccacccggcaggagaactggacccccctgaagaatgacctggagaaccacctggaggactttgagctggaggtggagctgctgatcaccctcatcaagtctgagaagggcagcctgggcttcaccgtgaccaagggcaaccagagaattggctgctacgtgcatgatgtgatccaggaccctgccaagagtgatggccgcctgaagccaggggacaggctcatcaaggtgaatgacacagatgtgaccaacatgacccacacagatgctgtgaacctgctgcgggccgccagcaagacagtgcggctggtgattggccgggtgctggagctgccccgcatccccatgctgccccacctgctgcctgacatcaccctgacctgcaacaaggaggagctgggcttcagcctgtgtggcggccatgacagcctgtaccaggtggtgtacatcagtgacatcaaccccaggtctgtggccgccatcgagggcaacctgcagctgctggatgtgatccactacgtgaatggagtgtccacccagggcatgaccctggaggaggtgaacagagccctggacatgagcctgcccagcctggtgctgaaggccaccagaaatgacctgcctgtggtgcccagcagcaagaggtctgctgtgtctgcccccaagagcaccaagggaaatggcagctacagcgtgggcagctgcagccagcctgccctgaccccaaatgacagcttcagcacagtggccggggaggagatcaatgagatctcctaccccaagggcaagtgcagcacctaccagatcaagggcagccccaacctgaccctgcccaaggagagctacatccaggaggatgacatctatgatgacagccaggaggccgaggtgatccagagcctgctggatgtggtggatgaggaggcccagaacctgctgaatgaaaataatgctgctggctacagctgtggccctggcaccctgaagatgaatggcaagctgtctgaggagaggacagaggacacagactgtgatggcagccccctgcctgagtacttcacagaggccaccaagatgaatggctgtgaggagtactgtgaggagaaggtgaagtctgagagcctcatccagaagccccaggagaagaagacagatgatgatgagatcacctggggcaatgatgagctgcccattgaaagaaccaaccatgaagattctgacaaggaccacagcttcctgaccaatgatgagctggccgtgctgcctgtggtgaaggtgctgcccagcggcaagtacaccggggccaacctgaagagcgtcatccgggtgctgcggggcctgctggaccagggcatccccagcaaggagctggagaacctgcaggagctgaagcccctggaccagtgcctgattggccagaccaaggaaaatagaaggaagaaccgctacaagaacatcctgccctatgatgccaccagggtgcccctgggagatgaaggaggctacatcaatgccagcttcatcaagatccctgtgggcaaggaggagtttgtgtacatcgcctgccagggccccctgcccaccaccgtgggggacttctggcagatgatctgggagcagaagagcaccgtcatcgccatgatgacccaggaggtggagggggagaagatcaagtgccagcgctactggcccaacatcctgggcaagaccaccatggtgagcaaccggctgcggctggccctggtgaggatgcagcagctgaagggctttgtggtgcgggccatgaccctggaggacatccagacccgggaggtgcgccacatcagccacctgaacttcaccgcctggccagaccatgacacccccagccagccagatgacctgctgaccttcatctcctacatgaggcacatccacaggagcggccccatcatcacccactgcagcgctggcatcggccgcagcggcaccctcatctgcattgatgtggtgctgggcctcatcagccaggacctggactttgacatcagtgacctggtgcgctgcatgaggctgcagagacatggcatggtgcagacagaggaccagtacatcttctgctaccaggtgatcctgtatgtgctgacccggctgcaggccgaggaggagcagaagcagcagccccagctgctgaagtag

SEQ ID NO: 326354 - DNA, 7401 bp, Artificial Sequence
  derived and/or modified sequence
atgcacgtgtccctggccgaggccctggaggtgcggggcggccccctgcaggaggaggagatctgggccgtgctgaaccagagcgctgagagcctgcaggagctgttcaggaaggtgtccctggccgaccctgctgccctgggcttcatcatcagcccctggagcctgctgctgctgcccagcggctctgtgtccttcacagatgagaacatcagcaaccaggacctgcgggccttcaccgcccctgaggtgctgcagaaccagagcctgaccagcctgagtgatgtggagaagatccacatctacagcctgggcatgaccctgtactggggcgctgactatgaggtgccccagagccagcccatcaagctgggggaccacctgaacagcatcctgctgggcatgtgtgaagatgtgatctatgcccgggtgtctgtgaggacagtgctggatgcctgcagcgcccacatccggaacagcaactgtgcccccagcttctcctatgtgaagcacctggtgaagctggtgctgggcaacctgtctggaacagaccagctgagctgcaacagcgagcagaagccagacaggagccaggccatccgggaccggctgcggggcaagggcctgcccaccggccgcagcagcaccagtgatgtgctggacatccagaagccacccctgagccaccagaccttcctgaacaagggcctgagcaagtccatgggcttcctgagcatcaaggacacccaggatgagaactacttcaaggacatcctgagtgacaacagcggccgggaggacagcgagaacaccttcagcccctaccagttcaagaccagcggccctgagaagaagcccatccctggcattgatgtgctgagcaagaagaagatctgggccagctccatggacctgctgtgcacagctgaccgggacttcagcagtggagaaacagccacctaccgccgctgccaccctgaggccgtgacagtgaggaccagcaccacccccaggaagaaggaggcccgctacagtgatggcagcatcgccctggacatcttcggcccccagaagatggaccccatctaccacacccgggagctgcccaccagcagcgccatcagcagcgccctggaccgcatccgggagcggcagaagaagctgcaggtgctgcgggaggccatgaatgtggaggagcctgtgcggcgctacaagacctaccatggagatgtgttcagcaccagcagcgagagccccagcatcatcagcagcgagagtgacttccggcaggtgcggcgctctgaggccagcaagagatttgagagcagcagcggcctgcccggggtggatgagaccctgagccagggccagagccagaggcccagccggcagtatgagaccccatttgagggcaacctgatcaaccaggagatcatgctgaagaggcaggaggaggagctgatgcagctgcaggccaagatggccctgcggcagagccggctgagcctgtacccaggggacaccatcaaggcctccatgctggacatcacccgggaccccctgcgggagatcgccctggagacagccatgacccagaggaagctgaggaacttctttggacctgagtttgtgaagatgaccatcgagcccttcatcagcctggacctgcccaggagcatcctgaccaagaagggcaagaatgaagacaacagaaggaaggtgaacatcatgctgctgaatggccagaggctggagctgacctgtgacaccaagaccatctgcaaggatgtgtttgacatggtggtggcccacatcggcctggtggagcaccacctgtttgccctggccaccctgaaggacaatgagtacttctttgtggaccctgacctgaagctgaccaaggtggcccctgagggctggaaggaggagcccaagaagaagaccaaggccaccgtgaacttcaccctcttcttccgcatcaagttcttcatggatgatgtgtccctcatccagcacaccctgacctgccaccagtactacctgcagctgaggaaggacatcctggaggagaggatgcactgtgatgatgagaccagcctgctgctggccagcctggccctgcaggccgagtatggagactaccagcctgaggtgcatggagtgtcctacttcaggatggagcactacctgcctgcccgggtgatggagaagctggacctgagctacatcaaggaggagctgcccaagctgcacaacacctacgtgggcgccagcgagaaggagacagagctggagttcctgaaggtgtgccagaggctgacagaatatggagtgcacttccaccgggtgcaccctgagaagaagagccagacaggcatcctgctgggcgtgtgcagcaagggcgtgctggtgtttgaggtgcacaatggagtgaggaccctggtgctgcgcttcccctggagggagaccaagaagatctccttcagcaagaagaagatcaccctgcagaacaccagtgatggcatcaagcacggcttccagacagacaacagcaagatctgccagtacctgctgcacctgtgcagctaccagcacaagttccagctgcagatgagggcccggcagagcaaccaggatgcccaggacatcgagcgggccagcttccgcagcctgaacctgcaggccgagagcgtgcggggcttcaacatgggccgggccatcagcacaggcagcctggccagcagcaccctgaacaagctggccgtgcggcccctgtctgtgcaggccgagatcctgaagaggctgagctgcagcgagctgagcctgtaccagcccctgcagaacagcagcaaggagaagaatgacaaggcctcctgggaggagaagccccgggagatgagcaagagctaccatgacctgagccaggccagcctgtacccccacaggaagaatgtcatcgtgaacatggagcccccaccccagacagtggccgagctggtgggcaagcccagccaccagatgagcagaagtgatgctgagagcctggccggcgtgaccaagctgaacaacagcaagtctgtggccagcctgaacagaagccctgagaggaggaagcatgaaagtgacagcagcagcattgaagatcctggccaggcctacgtgctggatgtgctgcacaagcgctggagcatcgtgagcagccctgagcgggagatcaccctggtgaacctgaagaaggatgccaagtatggcctgggcttccagatcatcggcggggagaagatgggccgcctggacctgggcatcttcatcagctctgtggcccctgggggccctgctgacctggatggctgcctgaagccaggggacaggctcatctctgtgaacagcgtgtccctggagggcgtgagccaccacgccgccatcgagatcctgcagaatgccccagaagatgtgaccctggtgatcagccagcccaaggagaagatcagcaaggtgcccagcacccctgtgcacctgaccaatgagatgaagaactacatgaagaagagcagctacatgcaggacagcgccatcgacagcagcagcaaggaccaccactggagccggggcaccctgcggcacatcagtgaaaattcctttggccccagcggcggcctgcgggagggcagcctgagcagccaggacagcaggacagagagcgccagcctgagccagagccaggtgaatggcttctttgccagccacctgggggaccagacctggcaggagagccagcacggcagccccagccccagcgtcatcagcaaggccacagagaaggagaccttcacagacagcaaccagagcaagaccaagaagccaggcatcagtgatgtgacagactacagcgacagaggagacagcgacatggatgaggccacctacagcagcagccaggaccaccagacccccaagcaggagagcagcagctctgtgaacaccagcaacaagatgaacttcaagaccttcagcagcagcccccccaagccaggggacatctttgaggtggagctggccaagaatgacaacagcctgggcatctctgtgactggaggagtgaacacctctgtgagacatggaggcatctacgtgaaggccgtcatcccccagggcgctgctgagagtgatggccgcatccacaagggggacagagtgctggccgtgaatggagtgtccctggagggcgccacccacaagcaggccgtggagaccctgaggaacacaggccaggtggtgcacctgctgctggagaagggccagagccccaccagcaaggagcacgtgcctgtgaccccccagtgcaccctgagtgaccagaatgcccagggccagggccctgagaaggtgaagaagaccacccaggtgaaggactacagctttgtgacagaggagaacacctttgaggtgaagctgttcaagaacagcagcggcctgggcttctccttcagccgggaggacaacctgatccctgagcagatcaatgccagcatcgtgcgggtgaagaagctgtttcctggccagcctgctgctgagagcggcaagattgatgtgggagatgtgatcctgaaggtgaatggagccagcctgaagggcctgagccagcaggaggtgatcagcgccctgcggggcacagcccctgaggtgttcctgctgctgtgcaggcctcctcctggggtgctgcctgagattgacacagccctgctgacccccctgcagagccctgcccaggtgctgcccaacagcagcaaggacagcagccagcccagctgtgtggagcagagcaccagcagtgatgaaaatgagatgtctgacaagagcaagaagcagtgcaagagccccagcagaagagacagctacagcgacagcagcggcagcggagaagatgacctggtgacagccccagccaacatcagcaacagcacctggagcagcgccctgcaccagaccctgagcaacatggtgtcccaggcccagagccaccacgaggcccccaagagccaggaggacaccatctgcaccatgttctactacccccagaagatccccaacaagccagagtttgaggacagcaaccccagccccctgcccccagacatggcccctggccagagctaccagccccagagcgagagcgccagcagcagctccatggacaagtaccacatccaccacatcagcgagcccacccggcaggagaactggacccccctgaagaatgacctggagaaccacctggaggactttgagctggaggtggagctgctgatcaccctcatcaagtctgagaagggcagcctgggcttcaccgtgaccaagggcaaccagagaattggctgctacgtgcatgatgtgatccaggaccctgccaagagtgatggccgcctgaagccaggggacaggctcatcaaggtgaatgacacagatgtgaccaacatgacccacacagatgctgtgaacctgctgcgggccgccagcaagacagtgcggctggtgattggccgggtgctggagctgccccgcatccccatgctgccccacctgctgcctgacatcaccctgacctgcaacaaggaggagctgggcttcagcctgtgtggcggccatgacagcctgtaccaggtggtgtacatcagtgacatcaaccccaggtctgtggccgccatcgagggcaacctgcagctgctggatgtgatccactacgtgaatggagtgtccacccagggcatgaccctggaggaggtgaacagagccctggacatgagcctgcccagcctggtgctgaaggccaccagaaatgacctgcctgtggtgcccagcagcaagaggtctgctgtgtctgcccccaagagcaccaagggaaatggcagctacagcgtgggcagctgcagccagcctgccctgaccccaaatgacagcttcagcacagtggccggggaggagatcaatgagatctcctaccccaagggcaagtgcagcacctaccagatcaagggcagccccaacctgaccctgcccaaggagagctacatccaggaggatgacatctatgatgacagccaggaggccgaggtgatccagagcctgctggatgtggtggatgaggaggcccagaacctgctgaatgaaaataatgctgctggctacagctgtggccctggcaccctgaagatgaatggcaagctgtctgaggagaggacagaggacacagactgtgatggcagccccctgcctgagtacttcacagaggccaccaagatgaatggctgtgaggagtactgtgaggagaaggtgaagtctgagagcctcatccagaagccccaggagaagaagacagatgatgatgagatcacctggggcaatgatgagctgcccattgaaagaaccaaccatgaagattctgacaaggaccacagcttcctgaccaatgatgagctggccgtgctgcctgtggtgaaggtgctgcccagcggcaagtacaccggggccaacctgaagagcgtcatccgggtgctgcggggcctgctggaccagggcatccccagcaaggagctggagaacctgcaggagctgaagcccctggaccagtgcctgattggccagaccaaggaaaatagaaggaagaaccgctacaagaacatcctgccctatgatgccaccagggtgcccctgggagatgaaggaggctacatcaatgccagcttcatcaagatccctgtgggcaaggaggagtttgtgtacatcgcctgccagggccccctgcccaccaccgtgggggacttctggcagatgatctgggagcagaagagcaccgtcatcgccatgatgacccaggaggtggagggggagaagatcaagtgccagcgctactggcccaacatcctgggcaagaccaccatggtgagcaaccggctgcggctggccctggtgaggatgcagcagctgaagggctttgtggtgcgggccatgaccctggaggacatccagacccgggaggtgcgccacatcagccacctgaacttcaccgcctggccagaccatgacacccccagccagccagatgacctgctgaccttcatctcctacatgaggcacatccacaggagcggccccatcatcacccactgcagcgctggcatcggccgcagcggcaccctcatctgcattgatgtggtgctgggcctcatcagccaggacctggactttgacatcagtgacctggtgcgctgcatgaggctgcagagacatggcatggtgcagacagaggaccagtacatcttctgctaccaggtgatcctgtatgtgctgacccggctgcaggccgaggaggagcagaagcagcagccccagctgctgaagtag

SEQ ID NO: 326355 - DNA, 7305 bp, Artificial Sequence
  derived and/or modified sequence
cagttcctgttcaccaaggtgagcctggccgaccccgccgccctggggttcattatatccccctggtctctcctgctgctcccctcagggagtgtgtccttcaccgatgaaaatatctctaatcaagatttgagggcttttacggccccagaggtgttacagaatcagtccttgaccagtctgtccgacgttgaaaaaattcatatatatagtctgggcatgacactgtattggggcgccgattacgaagtaccgcagtcccaacccattaagctaggcgatcatctcaacagtatactcctcgggatgtgtgaggatgtgatttatgcaagggtctctgtgcgcaccgtgctggacgcctgctctgcacacattagaaactccaactgcgctccttcgttcagctacgttaagcatctggtcaagctcgtgctaggcaatctgagtgggaccgatcaactctcctgcaattcggagcaaaaacctgaccgctcccaggctattagggataggttacggggcaaaggattacctacagggagaagctccacctccgatgtgctggacattcagaagccccccttaagccatcagacttttcttaataagggtctatctaaatcaatggggttcctctcaataaaggacacacaagatgagaattacttcaaggatattcttagcgacaattcaggtagagaggactcagagaacaccttttcaccttaccagtttaagacgagcgggccagagaaaaagccaatcccgggaatagatgtgctgtcaaaaaagaaaatctgggccagcagcatggacctcctgtgtacagccgatcgcgattttagcagtggcgaaaccgccacctaccgccggtgtcatcccgaggctgttacagtgcgcacgtccaccactcctaggaagaaggaggctcggtactccgacggttctatcgcccttgacatcttcggtccgcagaagatggatccaatctaccatacccgtgagctccctacatcaagtgccataagcagcgccctggaccgaattcgggagcgccagaaaaagcttcaagtattgagggaagcaatgaacgtggaggaacctgtgagacgttataagacctaccacggggacgtgttttccacaagtagtgaatcaccgtccataatctcaagcgagtccgactttagacaggttaggaggagcgaagcctccaagcggttcgagtcttcaagcggcctccccggagttgatgaaactctgagccagggtcagtcacagaggccatcacgacagtacgaaacccctttcgagggaaaccttatcaaccaggagatcatgttgaagcgacaggaggaagagctgatgcagctccaggcaaagatggcactccggcagagtcgcctgtcgctgtatccgggagatactatcaaggcctcaatgctagatataacccgggatcccctgagagaaatcgctctggagacggcgatgacacagcgcaagttaaggaatttctttggacccgagtttgtaaagatgaccattgaaccctttatctccttggatttgcctcgctctatcctgaccaaaaaagggaagaatgaagacaacagacggaaagtaaacatcatgctgctcaacggacaaagactggagctcacctgtgacaccaagaccatttgcaaagatgtgttcgatatggtagtagcccacataggcttggtggaacaccacctcttcgccttagcgaccctcaaggataatgaatatttcttcgtggatcctgacttaaagctgacaaaggttgcaccagaggggtggaaggaagagcctaaaaagaagacaaaggctaccgtcaattttacgttgttttttcgcattaaatttttcatggacgatgtgtccctgattcaacacaccctcacatgccaccagtattaccttcaactgagaaaagacattctcgaggaacggatgcattgcgatgacgaaacatccctgttgttggcctcgctggccctgcaggccgaatatggtgactatcaacctgaggtgcacggcgtctcttatttccggatggagcactatctgcctgccagagtgatggaaaaactggacctgtcctacatcaaagaagaattgcccaaactacacaacacctatgtgggggcatcagaaaaggagaccgagttggagttcttgaaggtttgtcagaggctgaccgaatacggcgttcattttcacagggtgcaccctgaaaaaaagagccagacaggaattctgttgggggtgtgcagcaagggcgtgctggttttcgaagtacataacggtgtgagaaccttggttctgcgctttccttggcgggaaactaagaaaatctccttttctaaaaagaaaattacgctccagaataccagcgatggcataaaacacggcttccagactgacaactcaaagatctgccagtatctactgcatttgtgtagctatcagcataagtttcaactgcaaatgcgtgcacggcagtcgaaccaggacgcacaggacattgagcgcgcaagtttccgtagcttgaacttacaggccgaatctgtccgtgggtttaacatgggaagagccatcagcactgggtcgttggccagttcaaccctgaacaaactggctgtcagacccctcagtgttcaagcggagatactgaagaggttgtcatgctccgaactctctctgtatcagccactacaaaatagcagcaaggagaagaatgacaaagcaagttgggaggagaagcctagagagatgagcaagagctaccatgatctgtcacaagcatccctgtatcctcacagaaagaacgtcatcgtgaacatggagccaccacctcagaccgtggccgaactcgtcgggaagccctctcaccagatgtcccgttcagatgcagaaagtctcgccggggtcactaagctgaacaattccaaatccgtggcttcactgaaccggtcaccggaacgccgcaagcacgagtctgatagctctagtatcgaggaccccgggcaggcctacgtcctggatgtccttcataagcgatggtccattgtttcctcacctgaaagagaaatcaccttggtgaacttgaagaaagatgcaaaatatgggctcggcttccagatcattggcggagagaaaatgggccgcctggatcttggcatttttattagttctgtggctcccggcgggccagcagacctcgatggatgtctgaagcctggcgataggttgatctcagtcaactctgtctcgctggagggtgtatcacaccacgccgccattgagattcttcagaacgcacctgaggacgtaactttggtcatatcccagcctaaggaaaagatttccaaagttccatctactcctgtccacctaacaaacgaaatgaagaactacatgaaaaagtcttcctatatgcaagacagtgcgatagactcctccagtaaggaccaccattggtctagaggcacccttcggcatatctcagagaactccttcggcccttccgggggcctgagggaaggatcactgagctctcaagattctcggaccgaaagcgcctccctttctcagtctcaggtgaatggattctttgcttcgcacctgggagatcagacctggcaagaaagtcagcacggcagtccctctccgtccgtgatctctaaggcaaccgaaaaggaaaccttcaccgacagtaatcaaagcaaaaccaaaaaaccgggcattagcgacgtaacggattactccgatcggggggatagtgacatggacgaggctacatattcttcatcccaggaccatcaaacccctaaacaagagtcttccagcagcgttaatacttctaacaaaatgaattttaagacatttagtagcagtcctcctaagccgggagacattttcgaagtggaactggccaagaacgataactctttgggcatttccgtgaccggtggcgtgaatacctctgtccgacacggcggtatctacgtcaaggccgtgatccctcagggtgccgctgagtctgacggacgaattcacaaaggggatcgcgtgcttgccgtgaatggagtgtcactggaaggggccacccacaagcaggctgtggagactttgaggaatactgggcaggttgttcatttgctgcttgagaaaggacagtcaccaacatcaaaggaacacgtgcccgtgacgccccagtgcaccctgagcgatcagaatgctcagggtcagggacctgagaaggttaaaaaaacaacccaggtgaaggactatagtttcgtaaccgaggagaatacatttgaggtgaagctgttcaagaatagctctggtctaggcttcagcttctcccgggaggacaatctcattccagaacagatcaatgcttcgattgtgcgagttaagaagctgttccccgggcagccggctgccgagagcggcaagattgacgtcggggatgtgattctcaaggttaatggggcaagccttaaggggcttagtcagcaagaagtgatatccgctttgcggggaactgcccccgaggtcttcttattgctctgtaggccccctccaggcgtcctgccagaaatcgatacagcgctgctgacgcccctgcagagtcctgcgcaggtgctgccaaactctagcaaagactcctcgcagccctcatgcgttgagcagtccacatcctccgacgaaaatgagatgagtgacaaatctaaaaagcagtgcaagtccccgtcccgacgggacagctactctgacagctccggatcaggcgaagatgatcttgtcactgccccagccaacatctctaactccacttggtcctcagcgctgcaccagacactgagcaatatggtatctcaggcacagtcccaccatgaggcccctaagtcccaggaagacaccatctgcactatgttttattatcctcagaaaatcccaaacaagcctgagtttgaggacagcaatccatctcccctcccacccgacatggcgcctggtcagtcttaccagcctcagtcagaaagcgcctccagttcttcaatggacaagtaccacatacaccatataagtgagcccacacgtcaagagaactggaccccgttgaagaatgatctggaaaaccatctggaagattttgaactcgaagtcgagttactcatcacactgataaaaagcgaaaagggatccctgggcttcactgtgactaaaggtaatcagcgaattggctgttatgttcacgacgtcatccaggatcccgctaaatcggatggcaggctgaagcctggcgatcggctcatcaaggtcaatgatacggatgttaccaatatgactcacaccgatgctgttaatttgctgagagccgcaagtaaaacagtccgcctggtaattggaagggtcctggaactcccccgcatccccatgctgcctcacctgttgcctgacataacattaacttgtaacaaagaggaactgggcttcagcctgtgcggcggacacgattcactctaccaggttgtgtatatctctgacatcaatcctcgctccgtggcagcaatcgagggcaatctgcagttgctggacgttatacattacgtaaacggggtgtccacccagggcatgacgctggaagaggtgaatcgggccttggatatgtccctaccaagtcttgtcttgaaagctacgcgcaacgacctgccggtggtgcccagttcaaaaaggtctgcagtttcggccccgaaaagtacaaagggtaatggttcttacagcgtcggatcttgctcgcagccagccctcacacctaacgattctttcagcactgtggcgggcgaggagataaacgaaatatcctatcccaagggcaagtgctccacctaccagattaaaggtagtccgaatctcacactgccaaaggagagttatattcaggaggatgatatttatgacgacagccaggaggctgaagtcatacagtctcttcttgacgtggtagatgaagaagctcagaacctccttaacgaaaataatgccgccggctactcttgcggcccaggaactctgaagatgaatggaaagttatcagaagagcggaccgaggacaccgactgcgacggtagtccgctgcccgagtacttcacggaagccaccaaaatgaacggatgcgaagaatactgtgaagagaaggtgaagagcgagagcctcatacagaagccacaagagaagaagaccgacgacgacgagattacctggggaaacgacgagctccccatcgaaagaacgaaccatgaggacagcgataaagaccacagcttcttgactaatgacgagctcgccgtacttccagtcgtaaaggtgcttccaagcggtaaatacactggggcaaacttgaagtctgtgattcgcgtactgagaggtctgctggatcagggaattcccagcaaggaactcgagaatctgcaggagctaaagccactggaccaatgtctgatcggacagaccaaagaaaataggcggaaaaatcgctataagaacatcctgccttacgatgctaccagagtaccattaggcgacgaagggggttatattaatgcaagctttatcaaaattccagtaggcaaggaagagttcgtttacatcgcttgtcaaggacctctgcccactacggtcggagacttctggcagatgatctgggagcagaagtcaacagtgatcgcaatgatgacccaggaggtggagggtgaaaagatcaaatgtcaacgatactggcctaatattctaggcaaaacaactatggtctctaaccggctgagattggccctggttcggatgcagcagctgaagggattcgttgttagggcaatgaccctggaggatatccagaccagagaggtgaggcacatctcgcatctgaattttacagcgtggcctgaccatgataccccaagtcagccggacgatctgctaacttttatctcgtacatgcggcacatccatcgctcagggcccatcatcactcactgtagtgctggcataggccgatctgggactttgatctgcattgacgttgtgttaggcctgattagtcaggacttagactttgacatttccgacctggttcggtgcatgcgcttgcagcgtcacggcatggtccagacagaggaccagtacatcttctgctaccaagtcatcttgtatgtgctcactcggctacaggccgaagaagaacaaaagcagcagccccagttgctcaagtag

SEQ ID NO: 326356 - DNA, 7401 bp, Artificial Sequence
  derived and/or modified sequence
atgcacgtgagcctggccgaggccctggaggtgcggggcggccccttgcaggaggaagagatctgggctgttcttaatcaatcggccgagtcactgcaggaactattcaggaaggtgtctctagctgaccctgctgcattggggttcattatcagtccttggagtctcctcttgctccctagcggtagcgtgagcttcaccgacgagaacatttctaaccaggacctgagagcctttactgctccagaagtactccagaaccagagcctaacgtcactatccgatgtagaaaaaatccatatttatagtttgggcatgactctgtactggggcgcggattatgaggtgccacagtcccaaccaatcaagttaggagaccatttgaattcaatccttctgggtatgtgcgaagacgtgatttatgcccgcgtctcagtacgcaccgtcctcgatgcctgctccgcacatattagaaattctaactgcgctcccagtttcagctacgtgaaacacctcgtcaagctggtgctcggaaatcttagtggaacagatcagctcagctgcaacagcgagcagaagccagaccgcagtcaggcaataagggatcgcctgcgcgggaaagggttaccaaccggaagaagctcgacttccgacgtgctcgatattcagaaacctccactaagtcaccagacattcctgaataaaggactcagcaagagcatgggtttcctgtctatcaaagatactcaggacgaaaattacttcaaggatattctcagtgacaatagcggcagagaagactcagagaacacctttagcccctatcaattcaaaacaagcggccccgagaagaagcccattcccggaatcgacgtgttatctaaaaaaaagatctgggccagcagcatggacctcctgtgcactgctgacagagacttttcatcaggggagaccgccacataccggcgttgtcaccccgaggcagtgaccgtgaggacctccaccacaccccgaaagaaagaggctaggtacagcgatggctctatcgcactagacatctttggcccacaaaagatggatccaatctaccacacccgggagttacctacttcttccgctatttctagtgccctggaccgaatccgcgaaagacagaagaaactacaggttcttcgggaggccatgaatgtggaagagcctgttcgtcggtacaaaacctaccatggagacgtattctccacttcgagtgagtctccctctattatctcgagcgagagtgactttagacaagtaagacgctcagaagcctcgaaaaggtttgagagctcctctggtctgcccggggtggatgagacactaagccagggacagagccaaaggccctcaagacagtacgagacccctttcgaaggtaatctcattaatcaggaaatcatgttaaaaaggcaggaagaagagttgatgcaactgcaggcgaagatggctttacggcaatcccggctatctctttacccgggggatacgatcaaggcatccatgcttgacattacgcgggaccctctgcgtgagattgccttggaaactgcgatgacccaacgtaaattacgcaattttttcgggcccgagttcgtaaaaatgactatcgagccctttatctcgctggacctgcccagatctattctgaccaaaaagggtaaaaacgaggacaatcggagaaaggtgaatatcatgctactgaatggacaacgcttagagctgacatgcgataccaaaacaatctgtaaggacgtattcgatatggtggttgcccacattggattagtggaacatcacttgttcgcacttgccacacttaaagataatgaatacttcttcgtggatccagatctgaagctcaccaaggtcgctccagagggctggaaggaagagcctaagaaaaagacgaaggcaacagtcaactttaccttgttcttcaggatcaaattctttatggacgacgtgtccctgattcagcacaccctgacctgtcaccaatactatctgcagttgcggaaggatattttagaggaacgcatgcattgcgatgacgagacttctttgctgctcgcctcactggctctccaagccgagtatggggactaccaaccagaagttcatggtgtctcgtatttcagaatggagcactatctgcctgcacgagtgatggagaaactggacctttcatacatcaaggaggagctacccaaattacataacacatatgtgggtgcttcagaaaaggagacagaactcgagttcctgaaggtttgccaaagattgactgagtacggagttcacttccaccgggttcatccggaaaagaaatcgcaaaccgggatcctgctgggggtctgctcgaaaggcgtgcttgtcttcgaagtgcacaacggagtgaggacattggtcctgaggttcccgtggcgcgagaccaaaaaaatttctttcagtaagaaaaaaatcacactgcaaaacacaagtgatggcattaagcatggcttccagacagataacagtaaaatatgccagtatctcctgcatctctgcagctaccagcataagttccagctccagatgagagctcgccagagtaaccaggacgcccaagatatcgagagagccagttttaggtctctgaatctccaggctgaatccgtgaggggctttaacatgggacgcgccataagcacaggcagcctggccagcagcacattgaacaagcttgccgtgcgtccactctctgtacaagcagaaatacttaagcgccttagctgctccgaactcagcttgtaccagcctctgcagaattcaagtaaggagaagaacgataaagcctcctgggaggagaaaccccgggaaatgtcgaagagctatcacgacctgtcccaagcttcactctatcctcatagaaaaaacgtaatagttaacatggagccaccacctcagaccgtggccgagctggtcggcaagcccagtcatcagatgtccagaagcgatgccgagagtctggccggcgtcaccaagttaaataattcaaaatccgtggcaagtctcaatcggagccctgagagaaggaagcacgagtccgatagctctagtattgaagaccctgggcaggcttacgtgttggatgtgttgcacaaacggtggtccatagtaagcagccctgaaagggagataacactggtaaacctaaagaaggacgccaagtacgggcttggctttcagataattggcggagagaagatggggcgcttggatttaggtattttcatcagctccgtggcccccggtgggccggccgatttggatggctgtctgaaacctggggatcgactgattagtgtaaactcagtgtccctggaaggtgtctctcatcatgctgccatcgagattctccaaaatgctcccgaggacgtgaccctcgtgatatcacagccaaaggagaagatttctaaggtcccatccactccagtgcatctgaccaacgaaatgaagaactacatgaaaaagtcctcctatatgcaggactctgctatcgattcctccagtaaagaccatcactggtcaagggggacactccgccacatatccgaaaacagcttcgggccctccggcggtctgcgtgagggcagcctgtcaagtcaggactcacgcacggaatcggcaagtcttagccagagccaggtgaacggattcttcgcctctcatctcggcgatcagacgtggcaggaaagtcagcacgggtcgcctagtccatcagtgatcagcaaggcaaccgagaaggagacattcacagattccaatcagtctaaaacaaaaaagcctggaatttccgatgtgaccgactacagcgaccggggggactccgacatggatgaggcaacctattcatcatctcaagatcaccagacaccaaagcaagaaagcagttcctcagtgaatacctctaacaaaatgaatttcaagactttttcgtcatccccacctaagcctggagatatatttgaagttgaacttgctaaaaacgataattctctgggtatctctgtaaccgggggcgtgaacacctccgtccgacatggcgggatctacgtgaaggctgtcatcccccagggcgcagctgaatccgatgggcgcatccataaaggggaccgggttttagcggtcaacggagtgtcgctagagggagccacacacaagcaggccgtagaaacccttcgcaacaccggtcaggtggtccacttactccttgagaaagggcagtcccccacctccaaggaacacgtgcctgttacaccgcagtgcacactgagcgatcaaaatgcccagggccaaggtcctgagaaggtgaaaaagactacccaggtgaaagactactcatttgtgaccgaagagaacacatttgaggtgaaactgttcaaaaactcatcaggtctgggcttcagcttttctagagaggacaatctgattcctgagcagattaatgcatcaatcgtgagagtgaagaaactgttcccaggccagccagctgcagaaagtgggaagatagacgtcggcgatgtgatccttaaggtgaatggggcaagccttaagggactcagccagcaggaagtaatttctgcactgcgcggcactgccccagaggtgtttctcctgctgtgcagacctccgcccggcgtcctgcccgaaatcgataccgcactactcacacctctgcagagccccgctcaggtgctgccaaatagtagcaaagatagcagccagccctcttgtgtggagcagtcaacctccagtgacgagaatgaaatgagcgataagtcaaaaaaacagtgcaaaagtccaagccggagggactcttactccgatagctcaggtagtggagaggacgatctcgtgacggcccccgccaacatctcgaattctacgtggagtagcgccctgcatcagacactcagcaatatggtcagccaggcccagagccaccacgaggctcccaagagtcaagaggatacaatttgtactatgttttactatccgcagaagatccccaataaaccggagtttgaagatagtaacccaagcccgcttcctccagacatggctccaggtcagagttatcagccccagtcagagtctgcgagttcatccagtatggacaagtatcacatccatcacatttcagaaccaacacggcaagaaaattggaccccactcaaaaacgatctggagaatcacctagaggatttcgagctggaggtcgagctcctgatcacccttatcaagtccgaaaaaggctccttagggttcacggtgacaaagggcaaccagagaatcggctgttacgtgcacgacgtcattcaggatcccgccaagagcgacggaagactgaaacccggtgaccggttgatcaaagtgaacgacactgacgtcactaacatgactcatactgatgcagtcaatctgctccgagctgccagcaagacagtgcgacttgtcattgggagagtgttggaactgccccgcatccctatgcttccccacttactccctgatataaccctcacatgcaataaggaggaactaggattctctctgtgcgggggtcacgatagtttataccaggtcgtttacatttctgacataaatcccaggagcgtcgctgccatagaaggtaatcttcagctgctcgacgtgatccactatgtgaacggcgtgagcacgcagggaatgacactcgaggaggtgaatagagccctggacatgtctctgccatcactggtgctgaaagccacaaggaacgaccttcccgtcgtaccgtccagcaaacggtccgcagtttcagcacccaagtccacaaagggaaatggcagctattctgttggtagctgttcccagcctgcactgacccccaatgacagtttttcgacggtggctggggaagagatcaatgagatctcttatcccaagggtaagtgttcaacatatcagattaaaggatcaccaaacctgactcttccaaaggagtcctatatacaggaggacgatatatacgacgactctcaggaagcggaggtgatccagtccctgctggacgtagttgatgaggaagcacagaacctgctgaatgaaaacaatgctgcagggtacagttgcggcccaggcaccttaaaaatgaatgggaagctgagcgaggagcgtacagaagacactgattgcgacggatccccactgcctgagtacttcacagaggcgactaaaatgaatggctgcgaagaatattgtgaagagaaggttaagtcagagagcctgatacagaagccacaggagaagaaaacggatgacgacgagattacctgggggaacgacgaactccctatcgaacgaaccaatcatgaggattccgacaaggaccacagctttcttacaaacgatgagctggccgtgctgcctgttgtgaaggttctcccatcaggaaagtatacaggagcaaaccttaagtcagtaattagggtgttgagggggctgcttgaccaaggaattccttcaaaggaactggaaaatttgcaggagcttaagccccttgaccagtgcctgatcgggcagacaaaggaaaaccgtcgaaaaaatcgatacaaaaacatactcccgtacgatgcaacccgggttcctttgggggatgagggtggctacatcaatgcatcatttattaagatacctgtaggcaaggaagagtttgtatatattgcatgccagggtccgctacccacaaccgtcggggacttttggcaaatgatctgggagcagaaatctactgtcatagcaatgatgactcaagaagttgaaggcgagaaaatcaagtgtcagcgctactggcccaatattctgggaaagactacaatggtttcaaatcggctgcggctggcattagtccggatgcagcagctgaagggttttgtggtccgggctatgaccttggaggatattcagacaagagaggtcaggcacatctcccatctaaacttcacagcttggcctgatcatgacaccccatctcagccagatgacctactgacttttattagttacatgaggcacatccatcgctcgggacccattattacccattgcagtgccgggattggtcggagcggcaccctaatctgtattgacgtagttcttggccttatctcccaagacctggacttcgacatttcagatctggtgcggtgcatgcggctccagaggcatggaatggtacagactgaggatcaatacattttttgctaccaggtgattctttatgtcttaacccgtttgcaagcagaggaggaacagaagcaacaaccacaactgctcaagtag

SEQ ID NO: 326357 - DNA, 7304 bp, Artificial Sequence
  derived and/or modified sequence
cagtttctattcacgaaggtgtctctggccgatcctgctgccctcggctttataatatctccgtggtcccttctgctcctgccgagcggatccgtcagttttacagacgagaacatttcaaaccaggacctgagggcttttaccgcaccagaggttctgcagaatcaatcactgacgtctctgagcgacgtcgagaagatccatatatactcgctgggcatgaccttgtactggggtgccgattacgaggtaccacagagccagccaatcaagcttggggaccatctgaactccatactgcttggcatgtgcgaagacgttatttatgcacgcgtctcagtgagaacggtgctagacgcctgctctgctcacatcaggaatagcaactgcgccccatcctttagctacgtgaaacatctcgtgaaattggtccttggtaatctgtctggaacagaccagctgtcttgcaattctgaacagaagcccgacagatctcaagccattcgcgacaggctgcgtgggaagggcctccctactggtcgctctagcactagtgacgttttagatatccaaaaacccccattgagccaccaaacttttctgaataagggtttaagcaaaagtatgggcttcttatcgattaaggacactcaggatgaaaattattttaaagatatcctgagcgacaacagcggacgtgaagattctgagaataccttcagtccatatcagtttaagacctccggaccggagaagaagccaatccctgggatcgacgtgctctctaaaaagaagatatgggcatcatccatggatctgttgtgtacggccgaccgggactttagctccggcgagacggctacatatagaagatgccacccagaggcagtgactgtgagaacctcaactacacccaggaagaaagaggcccgttattcggatggaagtatcgccctggacatattcggcccacaaaaaatggatccgatctatcacactcgggagctgccgacgagctctgctatctcatcagcccttgacagaattcgtgaaagacagaaaaaactccaggtcttgcgggaagccatgaacgtggaagagcccgtgagacggtacaaaacctaccacggcgatgtcttcagcacgtcttctgaaagcccttctattatcagctctgagagcgacttcaggcaggtgcgtcgatccgaggcctccaaacggttcgagtctagtagtgggcttccgggagtggatgagacgctgtctcagggccaaagccagcgaccttcaagacagtatgaaacccccttcgaaggaaaccttattaaccaggagattatgctgaagcggcaggaggaggagctgatgcagctgcaggccaagatggcactgagacagtcccgcctgagtttatacccaggtgatactattaaggcctcgatgctcgatatcactcgagacccactccgggaaattgctcttgagacagcaatgacccagaggaaacttaggaatttcttcggaccagagttcgtgaagatgaccatcgaaccttttatctccttggacctccccaggtccatcttgacaaaaaagggcaagaacgaagataaccgaaggaaagttaacataatgctcctcaatggacaaaggctcgaactaacctgcgacactaaaactatctgcaaagacgtgttcgacatggttgttgcccatattggcctcgtggagcaccaccttttcgcactggctactctcaaagacaacgagtatttcttcgtcgacccagacctcaaactcaccaaagtggcgcctgaaggttggaaggaggagcctaaaaagaagaccaaagcaacggtgaattttacactgttctttcgcatcaaattctttatggacgacgtgagcttaattcagcacacgctgacgtgccatcagtattacctgcagctacgcaaagacatcttggaggaaaggatgcactgcgatgacgagacctcccttttgctcgcaagcctggctctccaggcagagtatggtgattaccagcccgaagtgcatggggtttcttactttcgtatggagcattacctccctgcccgagtgatggaaaagcttgatctatcctacatcaaggaggagctccctaagctgcacaatacttatgttggcgcatcagagaaggaaactgaactcgagttcttaaaagtatgtcagagattaacggagtacggcgtacactttcaccgggtccatccggagaaaaaatcccagaccggcattctgctgggggtgtgcagcaagggggtactggtttttgaggttcacaacggtgttaggactctagtccttaggttcccttggagggagactaagaagatctctttcagtaaaaaaaaaatcacgttacagaacacctccgacggcatcaaacatggtttccagactgacaattcgaagatctgccaatatctgctgcacttgtgcagctatcagcacaaatttcagctacaaatgagagctcggcagagcaaccaggacgcccaggatatcgagcgtgccagctttcgatctttaaacctgcaggcggagtctgtacgcggtttcaatatgggcagagctatcagcaccggctctctagcaagctctacactgaacaaactcgcggtgaggcctctatcggttcaagccgaaatcctcaaaagactcagctgctctgaactgtctctgtaccagccattacagaattctagcaaggaaaaaaatgataaggcaagctgggaggagaagccacgggagatgtcaaaatcataccatgatttgtcacaagcctcactttaccctcatcggaaaaacgtgatagttaacatggagcctcctcctcagacagtggctgagctcgtggggaaaccgtctcatcagatgtcacgctcagacgccgagtccctggcgggagtgacaaagctgaacaactccaaatcagtggcctcccttaaccgcagcccagaacgtagaaaacacgagtccgattcgtcctcaatcgaggaccctggacaggcttacgttctagacgtactccataaacggtggtctatcgtgagctcccctgagcgcgagataacactcgtcaatttgaagaaggatgccaagtatggcctcgggttccaaattatcgggggtgagaagatggggcgtctggatttgggtatttttatttcttctgtcgccccaggaggacctgcagatctggatggttgcctgaaacccggagaccggctgataagcgttaacagtgtctcactcgagggtgtgtcccaccacgccgcaatagagatcctgcaaaatgctccggaggacgtgacactggtgattagccaaccaaaagagaaaattagcaaggtcccttccactcctgtgcatctgactaatgaaatgaaaaattatatgaaaaagtcatcttatatgcaggactccgccatcgactcatctagtaaagaccatcactggagtcggggtaccctcagacacatttctgagaactcattcggtccatctggcggtctgcgcgaaggctccctgtccagccaggatagcaggactgagtcagcctccttgtcccagtctcaagtgaacggcttctttgcgtcgcacctgggggatcagacttggcaggaaagccagcacgggtccccgtcgccctccgtcataagtaaggccacggaaaaggagacttttacagactctaaccagtctaagacgaaaaaacccggtattagcgatgttaccgattactcagatcgcggagatagcgacatggacgaggccacttactcttctagtcaagaccatcagacacctaagcaagagagttcctccagtgttaatacttctaacaaaatgaatttcaaaactttttcatcttcaccgccaaagccaggcgacattttcgaagtggaactggccaaaaacgacaactcactgggcatttccgtgaccggtggagtaaataccagcgtgaggcatgggggtatatatgttaaggcagtcatccctcagggcgcagcggagtccgacggacggatccataagggcgatagggtgctggccgtgaacggtgtgtcactcgagggggctacccacaaacaagccgtggagactctccgcaacacgggccaggtggtgcatctgcttctcgaaaagggacagagccccacttctaaggagcacgtgcccgttactccacaatgtactttgagcgaccagaatgcccaagggcaagggcctgaaaaagttaaaaagactacgcaagtaaaggactacagctttgtcacagaagagaatactttcgaggtgaagctgttcaagaactcaagcggattggggttttcattcagcagggaggacaatctgatcccggaacagataaatgcctcaatcgtgagagtgaagaaactcttccctggtcagcccgcagcagaatcaggcaagattgatgtcggtgatgtgattttaaaggtaaacggagccagtctcaaggggctttcccaacaggaggtgatttccgctctcaggggcaccgctcctgaagtgtttctgctgctttgtaggcctccaccgggtgtgttgcctgaaatagacactgcattgctcacccccttgcagagccccgctcaggtgctgccaaatagctctaaagacagcagtcaaccgtcatgtgtagaacagagcacctcgtctgatgaaaatgagatgagcgataaaagcaaaaaacagtgtaagtccccaagtcgcagggatagttacagtgactcaagcggaagcggagaggacgacctggtgaccgccccagcaaacattagcaattcgacttggtcttccgccctgcaccagactctctcgaatatggttagccaagctcagagccaccacgaggcgccaaaatcacaggaagatactatttgtactatgttctactacccgcaaaagattccaaacaaaccagagtttgaagattcaaacccctccccactgccacctgatatggcgcctggacaatcgtaccagccacagtctgagtccgcctcctcgtccagtatggacaaatatcacattcatcatatcagcgagcccaccaggcaggaaaactggactcccctcaaaaatgatctggagaaccacctggaagacttcgagttggaggttgaactgctgatcacactcattaagtcagagaaaggcagcctggggttcaccgtcactaaaggaaatcaacgaatcggctgttacgtccatgatgtcatccaggacccggcaaagagcgatgggagacttaagccaggtgatagactgattaaggtgaatgacactgacgtgaccaatatgacccacacagacgcggttaatcttctccgcgctgcgagtaagaccgttaggctcgtcatcggcagggttctggagctgcccaggataccaatgttgcctcatctattacctgatataacgctgacttgtaacaaagaggaactcggcttttctctgtgcggagggcacgattcattgtatcaggtggtctatattagcgacattaatcccaggagtgtggctgcaatcgaggggaatctccagttactggacgtgattcattatgtcaatggggtatccacccagggcatgacattggaggaggtgaacagagccctggacatgtccctccccagtttggtgctgaaagccaccaggaacgacctgccggtcgtgcctagttcaaagcgaagtgcggtatccgctcctaagtcgacaaagggtaatggcagctattctgtgggctcatgcagtcagcccgctctcaccccaaatgattcattttccaccgtagcaggtgaggagattaacgagattagctatccaaaagggaagtgctctacataccagattaagggaagcccaaacttgactctaccaaaggaatcatatatacaggaggatgatatctatgatgatagtcaggaagctgaagtgatccagtcgctcctggacgtggttgatgaggaagctcagaacctgctgaacgagaacaatgctgccggatacagctgtgggcctggcaccctgaagatgaacggcaagctgagtgaggaacgcacagaggacaccgactgcgacgggtcgccacttccagaatactttactgaggcaactaaaatgaatggctgcgaagaatattgcgaggagaaggtcaagagtgagagcctgatacagaaaccacaggagaaaaaaacagatgacgatgaaatcacctggggcaatgatgagctgcccattgagcgcaccaatcatgaagattccgacaaagatcatagcttcctcacgaatgacgaactcgcagttttacctgtagtgaaggtgttaccctctggtaaatacaccggtgcgaatctgaagtcagttatcagagtgttgcgaggtctcttagatcagggcattcccagtaaagagcttgaaaatctgcaggagctcaaaccactggatcagtgtcttatcggtcagaccaaagagaatagacgtaagaaccgttacaagaacattctgccctacgatgctacacgcgtccccttgggggatgaaggaggttatatcaacgctagctttatcaaaatccccgtcggcaaagaggaattcgtttacatcgcctgtcaggggccactgcctaccacggttggtgacttttggcagatgatctgggaacagaagtcgacagtcatcgccatgatgacccaggaggttgaaggcgagaagataaagtgccaacggtactggcctaatatcctgggcaaaacaacaatggtgtctaaccggctcaggttggccctggtccggatgcaacagctcaaaggcttcgtggttagggcgatgacccttgaggatatccagacaagagaggtacggcatatctcccacctgaatttcacagcatggccagatcatgatactccctcccagcctgacgatcttttaacttttattagttacatgcgccacatccatagatccgggcctattatcactcattgctccgctgggatcggaaggtctggaaccctgatttgcattgacgttgtgctcggcctgattagtcaagatctggacttcgacatctcggaccttgtaaggtgcatgaggctacagcgccacggaatggtgcagaccgaggatcagtacatattttgctaccaggtgatactgtatgttctaacaagactgcaggctgaggaagagcagaaacagcaacctcaactgctaaaata

SEQ ID NO: 326358 - DNA, 7400 bp, Artificial Sequence
  derived and/or modified sequence
atgcacgtaagcctggctgaggcactggaagttcgcggaggcccattgcaagaggaggagatctgggcagtgcttaatcaatcggcagaaagcctacaagagttgttccgcaaagtgtcgttagctgatccagccgctttgggttttattatctctccatggagtctgcttctgctcccttcaggttccgtttcctttacagacgaaaatatatctaaccaggatctgcgagcgttcaccgcgccagaggtcttgcagaaccaatcactgacgagtctgagcgatgtggaaaaaatccatatatattcactgggaatgacgctttactggggggcagattacgaggtgcctcaatcccagcctattaagctcggcgaccatttgaacagcatactgttgggcatgtgtgaagacgtgatttacgcgagagtgtcagttcgcacagttctggatgcctgtagtgcccacatcaggaatagcaactgcgcaccatcttttagttacgtgaagcacctggtgaaacttgtcctgggtaatctatccggaacagaccaactgagttgcaattctgagcaaaagccagaccgcagtcaggccattcgcgatcggctccggggaaaagggctgccaactggcagatcttcaacaagtgacgttctggacatccagaaaccacctctgtcgcaccagactttcctgaataaaggcctcagtaagtctatgggattcctctccatcaaggacacacaggatgaaaactacttcaaggacattctctcagataactcgggcagggaggatagtgagaacacctttagtccatatcagttcaaaacatccggtcctgagaaaaagccgatccctggcatcgatgttctgtctaagaagaagatatgggctagctctatggatttactttgtactgctgatagagattttagttccggagaaactgccacttaccgccgatgccaccctgaagctgtcacagtgagaaccagcaccactcctcgcaagaaggaagccaggtacagtgatgggtccatagcactcgacatcttcgggccacagaaaatggatccaatataccacactcgcgagctacccacttccagtgcaatcagcagcgccctggaccgcattagagagcgacagaagaagttacaggtgctccgggaggccatgaacgtcgaggaaccagtgcgcagatacaagacataccatggagatgttttcagcaccagctcagagtctccaagcatcatttcctctgagagcgattttcgacaggtgaggaggagtgaagctagcaagagattcgagagctcctcagggctaccaggggtggatgaaacactctcacagggccaatcccagaggcctagccgccagtacgagacaccattcgaaggaaacctgatcaaccaggagataatgttaaaaaggcaggaggaagagctcatgcagcttcaggccaaaatggctttgaggcagagcagactaagtctttaccctggagacaccatcaaggcttctatgctggatataacccgcgatcctcttagggagatcgctttagagactgcaatgacccagcggaagttgcggaacttttttggccctgaattcgtgaagatgaccatcgaacctttcattagcctcgacctccctcgcagcatactgacaaagaaaggcaaaaatgaggacaaccggaggaaagttaacatcatgctcctgaatgggcagagactggagttaacctgtgataccaaaacgatctgcaaggacgtctttgacatggttgtggctcatatcggcctggtagagcatcatttgttcgctctggctaccctgaaagacaacgagtacttttttgtggatcctgacctgaaacttaccaaggtcgctcccgaggggtggaaggaggaaccaaagaagaaaacaaaggccaccgtgaatttcactctgttttttagaataaaattttttatggacgacgtgtccctgatacagcacaccctgacctgtcaccaatactacctccagttacgtaaggacattctggaggagcgaatgcactgcgacgatgagaccagcctactgctggcttccctggcattacaggccgaatacggtgactaccagcccgaagtccatggggtgtcgtattttaggatggagcactatttaccggcaagggtaatggaaaaactggacctctcctacattaaagaggaactccccaaactgcacaacacttatgtcggagcttctgagaaagaaacagagctagaattcctgaaggtgtgccagcggttaacggaatacggggtgcactttcatcgagtacatccagagaagaagagtcaaaccggcatcttgctaggcgtgtgtagtaaaggggtcttagtgtttgaagtacacaacggcgttagaactctggtgcttcgctttccctggcgggaaacgaaaaaaatttctttttctaagaaaaagattaccttacagaacacaagcgacggcattaagcacggcttccagacggacaattcaaaaatctgccagtatctgctgcacttgtgtagttatcaacataagttccaactgcagatgagagctcggcagtctaaccaggacgctcaggatatcgaaagggcgtctttcaggtccttgaacctacaagccgaatctgtgagaggctttaatatggggagagctatttctactggatctctggccagtagtacactaaacaagctggctgtccggcctctatccgtgcaagctgagatcctgaagagactttcctgtagcgagctgtcactctaccaaccattgcaaaattcatcaaaggagaagaatgacaaggcttcttgggaagagaaacccagagagatgtcaaagagctaccatgacctgtcccaggcctccctctacccccacagaaaaaatgtgattgtgaacatggaacctccccctcaaacagtggccgaactggtggggaaaccatcacaccaaatgtctagatccgatgccgagagcttagccggagtgacaaagctgaacaacagtaagtccgttgccagcctgaatcgcagtcctgaaaggcgaaagcatgaaagtgatagctcgtctatcgaggaccctggccaggcctacgtcttggacgtactccacaagcggtggtcaatcgtctcatctcctgagcgagagatcactctggtgaatctgaagaaagatgctaagtatggcctcggctttcaaatcataggaggcgagaaaatgggtcgcctcgatctaggcatcttcatttcctccgtggcacctgggggtcccgcagacctggatggctgcctgaagccaggggacaggctaatatccgtaaatagcgtaagtctggaaggggtctcacaccatgcagccatcgaaattctccagaacgcccctgaggacgtgacactcgtgatctctcagccaaaggagaaaataagcaaagtccccagcacgcccgttcatctgacaaacgaaatgaaaaattatatgaagaagtcaagctacatgcaggattctgcgatcgattcctcctccaaagaccatcattggtcacgtggcactctaagacatattagcgaaaattcatttggaccctcaggtggtttgcgggaaggcagcttgagctcccaggatagccgaaccgagagcgctagcctttcgcaaagccaggtaaacggctttttcgcttctcacctaggagaccagacctggcaggaatcgcagcatggcagtcctagcccaagtgtcatttctaaggcaaccgagaaggagacctttactgattctaatcaatctaaaacaaaaaagcctggcatcagcgatgtgacagactactccgatcgcggagatagtgatatggacgaggctacatacagttcctcacaggatcaccaaactcccaagcaagaatcctcaagcagcgtgaacacaagtaataagatgaacttcaaaacattctccagtagtccacctaagccaggagacatctttgaggttgagcttgccaaaaacgacaatagcttgggaatctcagtgaccggcggtgtgaacacgagtgttaggcatggcggaatatacgtaaaggcagttattccccagggggcagcagaatctgacggcaggatccacaaaggagaccgggtgctggctgttaacggggtcagcctggagggtgctacgcacaaacaggccgtcgagaccctaaggaatacgggccaagtggtgcatctgctgcttgagaaggggcagagtcctacatccaaggaacacgtgcccgttactccacaatgcacacttagcgaccagaacgcgcagggccagggcccagaaaaagtgaaaaagacgacacaggtgaaggattacagctttgtgacagaggagaatacttttgaagtcaagctcttcaagaactcctctggcctggggttttccttcagtcgggaggacaacttgatccctgaacagattaacgcgtccatagtgcgtgtgaaaaagctgttccccggtcagcctgcggcagaatccggaaagatcgatgtgggcgacgtcatccttaaggtgaacggagccagcttaaaggggctgtcccagcaggaggtgattagcgcccttagaggcacagctcccgaggtatttttgctcctctgtagacccccacccggtgtgctaccagaaatcgacaccgccttgctaacacccctgcaatccccggctcaggtcttacctaattccagcaaggactcatctcagcctagttgcgtagaacagagcacatctagcgacgagaatgagatgagtgataaaagcaaaaaacagtgcaagtctccttctagacgggactcttactcagatagctcaggaagtggcgaggacgacttggttacggctccagccaacatcagcaattcgacatggtcgtcagctctacaccaaaccctgtccaacatggttagtcaagcccagtctcatcacgaagcccctaaatcccaggaggataccatctgcacaatgttttattaccctcagaaaatacctaataagcctgagttcgaagacagtaacccatccccattacctcctgacatggcccctgggcagtcataccagccacaatccgagtccgcatcttcttcatccatggacaaataccacatccaccacatttctgagcctacccgccaggaaaactggactccgttgaagaacgatctggagaaccatctggaagacttcgaactggaagttgaactgctcattaccctcatcaagtctgaaaaagggagcctaggcttcacggtaaccaagggcaaccagcgcattggctgttatgtccacgatgtaattcaggaccccgctaagtctgacggcagactcaagcccggtgatcgccttatcaaggttaatgacacggacgtgacaaacatgactcatacggatgccgtgaacttgcttcgcgctgcttctaaaacggtgagactcgtaattggcagagtccttgagctgcccagaatccccatgcttccacacctcctgccagatataactctgacatgcaacaaagaagaactggggttctccttatgtgggggtcacgactctttataccaggtcgtttatatatccgacatcaatccaagatctgtggctgcgattgaaggaaacctgcagttattggacgtgatccattatgtcaatggcgtgtccacgcaaggtatgacgctcgaagaagtgaatcgcgctcttgacatgtcattgccgtctctggtgctaaaagcaaccaggaacgacctcccagttgtcccttcgtcgaagcggtcagccgtctccgcgcctaagtccactaaaggtaacggctcatactctgttggctcttgtagccagcccgctctcacccccaacgactccttcagtactgtcgccggagaggagatcaacgagatttcttaccctaagggtaagtgctcaacgtatcagattaaaggatcccccaatttgaccttgcctaaggagtcttacatccaagaggacgatatctacgacgacagtcaagaagcggaggtaatacagagcctgttagatgtcgtggacgaggaagcacaaaatctgcttaacgagaataatgccgcaggttacagttgtggccctgggacattgaagatgaatggcaaactgtcagaggagcgcacagaggacacagattgcgacggttctccattgcctgaatatttcaccgaagctacaaagatgaacgggtgcgaagaatactgcgaggagaaagttaaatcagaaagcttgatacaaaaaccccaagaaaagaaaaccgacgatgacgaaattacatggggcaatgacgagctgccgatcgagagaacaaatcatgaagactccgataaggatcattccttcctgacgaacgacgaacttgccgtgttgcccgtagtgaaggttctgccaagcggtaaatacacaggcgcaaacctgaagtctgtcatccgagtcctcagagggctgctcgaccaggggatcccgtctaaagaattagagaacctgcaagagctgaagcctcttgatcagtgtctcattggacagactaaggagaatcgaaggaagaacagatacaagaatatcctcccttacgacgccacaagagtacctcttggtgatgagggtgggtacattaacgcaagttttatcaagattccagtggggaaggaagaattcgtgtacatcgcctgtcaaggtcctctgcctactaccgtgggcgacttttggcagatgatatgggagcagaagtccacagtgattgcaatgatgacccaagaggtggagggcgaaaagatcaagtgtcaacggtattggcccaatattctggggaaaacaacgatggtgtccaacaggttgcgcttggccctggttcgcatgcagcaacttaaaggtttcgtggtgagggccatgacactcgaagatatccagactagggaggtgaggcatataagccatctcaatttcacagcctggcccgatcacgacacccctagtcagccagacgacttactgaccttcatctcatacatgcgccacatacaccggtctggacccatcattacacattgttccgccggaattggacgcagcggcacactcatttgtatagatgtcgtcctggggctcatctctcaagacctggactttgatattagtgacctcgtaagatgtatgaggctgcagcggcacgggatggtacaaactgaggaccagtatattttttgctatcaggtgatattgtacgtgctaacccggttacaagccgaggaagagcagaagcaacagccacaattattgaagta

SEQ ID NO: 326359 - DNA, 7925 bp, Artificial Sequence
  derived and/or modified sequence
caattcttgtttaccaaggtaagcctagctgatcctgctgcccttggcttcatcatttctccatggtctctgctgttgctgccatctggtagtgtgtcatttacagatgaaaatatttccaatcaggatcttcgagcattcactgcaccagaggttcttcaaaatcagtcactaacttctctctcagatgttgaaaagatccacatttattctcttggaatgacactgtattggggggctgattatgaagtgcctcagagccaacctattaagcttggagatcatctcaacagcatactgcttggaatgtgtgaggatgttatttacgctcgagtttctgttcggactgtgctggatgcttgcagtgcccacattaggaatagcaattgtgcaccctcattttcctacgtgaaacacttggtaaaactggttctgggaaatctttctgggacagatcagctttcctgtaacagtgaacaaaagcctgatcgaagccaggctattcgagatcgattgcgaggaaaaggattaccaacaggaagaagctctacttctgatgtactagacatacaaaagcctccactctctcatcagacctttcttaacaaagggcttagtaaatctatgggatttctgtccatcaaagatacacaagatgagaattatttcaaggacattttatcagataattctggacgtgaagattctgaaaatacattctccccttaccagttcaaaactagtggcccagaaaaaaaacccatccctggcattgatgtgctttctaagaagaagatctgggcttcatccatggacttgctttgtacagctgacagagacttctcttcaggagagactgccacatatcgtcgttgtcaccctgaggcagtaacagtgcggacttcaactactcctagaaaaaaggaggcaagatactcagatggaagtatagccttggatatctttggccctcagaaaatggatccaatatatcacactcgagaattgcccacctcctcagcaatatcaagtgctttggaccgaatccgagagagacaaaagaaacttcaggttctgagggaagccatgaatgtagaagaaccagttcgaagatacaaaacttatcatggtgatgtctttagtacctccagtgaaagtccatctattatttcctctgaatcagatttcagacaagtgagaagaagtgaagcctcaaagaggtttgaatccagcagtggtctcccaggggtagatgaaaccttaagtcaaggccagtcacagagaccgagcagacaatatgaaacaccctttgaaggcaacttaattaatcaagagatcatgctaaaacggcaagaggaagaactgatgcagctacaagccaaaatggcccttagacagtctcggttgagcctatatccaggagacacaatcaaagcgtccatgcttgacatcaccagggatccgttaagagaaattgccctagaaacagccatgactcaaagaaaactgaggaatttctttggccctgagtttgtgaaaatgacaattgaaccatttatatctttggatttgccacggtctattcttactaagaaagggaagaatgaggataaccgaaggaaagtaaacataatgcttctgaacgggcaaagactggaactgacctgtgataccaaaactatatgtaaagatgtgtttgatatggttgtggcacatattggcttagtagagcatcatttgtttgctttagctaccctcaaagataatgaatatttctttgttgatcctgacttaaaattaaccaaagtggccccagagggatggaaagaagaaccaaagaaaaagaccaaagccactgttaattttactttgtttttcagaattaaattttttatggatgatgttagtctaatacaacatactctgacgtgtcatcagtattaccttcagcttcgaaaagatattttggaggaaaggatgcactgtgatgatgagacttccttattgctggcatccttggctctccaggctgagtatggagattatcaaccagaggttcatggtgtgtcttactttagaatggagcactatttgcccgccagagtgatggagaaacttgatttatcctatatcaaagaagagttacccaaattgcataatacctatgtgggagcttctgaaaaagagacagagttagaatttttaaaggtctgccaaagactgacagaatatggagttcattttcaccgagtgcaccctgagaagaagtcacaaacaggaatattgcttggagtctgttctaaaggtgtccttgtgtttgaagttcacaatggagtgcgcacattggtccttcgctttccatggagggaaaccaagaaaatatctttttctaaaaagaaaatcacattgcaaaatacatcagatggaataaaacatggcttccagacagacaacagtaagatatgccagtacctgctgcacctctgctcttaccagcataagttccagctacagatgagagcaagacagagcaaccaagatgcccaagatattgagagagcttcgtttaggagcctgaatctccaagcagagtctgttagaggatttaatatgggacgagcaatcagcactggcagtctggccagcagcaccctcaacaaacttgctgttcgacctttatcagttcaagctgagattctgaagaggctatcctgctcagagctgtcgctttaccagccattgcaaaacagttcaaaagagaagaatgacaaagcttcatgggaggaaaagcctagagagatgagtaaatcataccatgatctcagtcaggcctctctctatccacatcggaaaaatgtcattgttaacatggaacccccaccacaaaccgttgcagagttggtgggaaaaccttctcaccagatgtcaagatctgatgcagaatctttggcaggagtgacaaaacttaataattcaaagtctgttgcgagtttaaatagaagtcctgaaaggaggaaacatgaatcagactcctcatccattgaagaccctgggcaagcatatgttctagatgtgctacacaaaagatggagcatagtatcttcaccagaaagggagatcaccttagtgaacctgaaaaaagatgcaaagtatggcttgggatttcaaattattggtggggagaagatgggaagactggacctaggcatatttatcagttcagttgcccctggaggaccagctgacttggatggatgcttgaagccaggagaccgtttgatatctgtgaatagtgtgagtctggagggagtcagccaccatgctgcaattgaaattttgcaaaatgcacctgaagatgtgacacttgttatctctcagccaaaagaaaagatatccaaagtgccttctactcctgtgcatctcaccaatgagatgaaaaactacatgaagaaatcttcctacatgcaagacagtgctatagattcttcttccaaggatcaccactggtcacgtggtaccctgaggcacatctcggagaactcctttgggccatctgggggcctgcgggaaggaagcctgagttctcaagattccaggactgagagtgccagcttgtctcaaagccaggtcaatggtttctttgccagccatttaggtgaccaaacctggcaggaatcacagcatggcagcccttccccatctgtaatatccaaagccaccgagaaagagactttcactgatagtaaccaaagcaaaactaaaaagccaggcatttctgatgtaactgattactcagaccgtggagattcagacatggatgaagccacttactccagcagtcaggatcatcaaacaccaaaacaggaatcttcctcttcagtgaatacatccaacaagatgaattttaaaactttttcttcatcacctcctaagcctggagatatctttgaggttgaactggctaaaaatgataacagcttggggataagtgtcacgggaggtgtgaatacgagtgtcagacatggtggcatttatgtgaaagctgttattccccagggagcagcagagtctgatggtagaattcacaaaggtgatcgcgtcctagctgtcaatggagttagtctagaaggagccacccataagcaagctgtggaaacactgagaaatacaggacaggtggttcatctgttattagaaaagggacaatctccaacatctaaagaacatgtcccggtaaccccacagtgtaccctttcagatcagaatgcccaaggtcaaggcccagaaaaagtgaagaaaacaactcaggtcaaagactacagctttgtcactgaagaaaatacatttgaggtaaaattatttaaaaatagctcaggtctaggattcagtttttctcgagaagataatcttataccggagcaaattaatgccagcatagtaagggttaaaaagctctttcctggacagccagcagcagaaagtggaaaaattgatgtaggagatgttatcttgaaagtgaatggagcctctttgaaaggactatctcagcaggaagtcatatctgctctcaggggaactgctccagaagtattcttgcttctctgcagacctccacctggtgtgctaccggaaattgatactgcgcttttgaccccacttcagtctccagcacaagtacttccaaacagcagtaaagactcttctcagccatcatgtgtggagcaaagcaccagctcagatgaaaatgaaatgtcagacaaaagcaaaaaacagtgcaagtccccatccagaagagacagttacagtgacagcagtgggagtggagaagatgacttagtgacagctccagcaaacatatcaaattcgacctggagttcagctttgcatcagactctaagcaacatggtatcacaggcacagagtcatcatgaagcacccaagagtcaagaagataccatttgtaccatgttttactatcctcagaaaattcccaataaaccagagtttgaggacagtaatccttcccctctaccaccggatatggctcctgggcagagttatcaaccccaatcagaatctgcttcctctagttcgatggataagtatcatatacatcacatttctgaaccaactagacaagaaaactggacacctttgaaaaatgacttggaaaatcaccttgaagactttgaactggaagtagaactcctcattaccctaattaaatcagaaaaaggaagcctgggttttacagtaaccaaaggcaatcagagaattggttgttatgttcatgatgtcatacaggatccagccaaaagtgatggaaggctaaaacctggggaccggctcataaaggttaatgatacagatgttactaatatgactcatacagatgcagttaatctgctccgggctgcatccaaaacagtcagattagttattggacgagttctagaattacccagaataccaatgttgcctcatttgctaccggacataacactaacgtgcaacaaagaggagttgggtttttccttatgtggaggtcatgacagcctttatcaagtggtatatattagtgatattaatccaaggtccgtcgcagccattgagggtaatctccagctattagatgtcatccattatgtgaacggagtcagcacacaaggaatgaccttggaggaagttaacagagcattagacatgtcacttccttcattggtattgaaagcaacaagaaatgatcttccagtggtccccagctcaaagaggtctgctgtttcagctccaaagtcaaccaaaggcaatggttcctacagtgtggggtcttgcagccagcctgccctcactcctaatgattcattctccacggttgctggggaagaaataaatgaaatatcgtaccccaaaggaaaatgttctacttatcagataaagggatcaccaaacttgactctgcccaaagaatcttatatacaagaagatgacatttatgatgattcccaagaagctgaagttatccagtctctgctggatgttgtggatgaggaagcccagaatcttttaaacgaaaataatgcagcaggatactcctgtggtccaggtacattaaagatgaatgggaagttatcagaagagagaacagaagatacagactgcgatggttcacctttacctgagtattttactgaggccaccaaaatgaatggctgtgaagaatattgtgaagaaaaagtaaaaagtgaaagcttaattcagaagccacaagaaaagaagactgatgatgatgaaataacatggggaaatgatgagttgccaatagagagaacaaaccatgaagattctgataaagatcattcctttctgacaaacgatgagctcgctgtactccctgtcgtcaaagtgcttccctctggtaaatacacgggtgccaacttaaaatcagtcattcgagtcctgcggggtttgctagatcaaggaattccttctaaggagctggagaatcttcaagaattaaaacctttggatcagtgtctaattgggcaaactaaggaaaacagaaggaagaacagatataaaaatatacttccctatgatgctacaagagtgcctcttggagatgaaggtggctatatcaatgccagcttcattaagataccagttgggaaagaagagttcgtttacattgcctgccaaggaccactgcctacaactgttggagacttctggcagatgatttgggagcaaaaatccacagtgatagccatgatgactcaagaagtagaaggagaaaaaatcaaatgccagcgctattggcccaacatcctaggcaaaacaacaatggtcagcaacagacttcgactggctcttgtgagaatgcagcagctgaagggctttgtggtgagggcaatgacccttgaagatattcagaccagagaggtgcgccatatttctcatctgaatttcactgcctggccagaccatgatacaccttctcaaccagatgatctgcttacttttatctcctacatgagacacatccacagatcaggcccaatcattacgcactgcagtgctggcattggacgttcagggaccctgatttgcatagatgtggttctgggattaatcagtcaggatcttgattttgacatctctgatttggtgcgctgcatgagactacaaagacacggaatggttcagacagaggatcaatatattttctgctatcaagtcatcctttatgtcctgacacgtcttcaagcagaagaagagcaaaaacagcagcctcagcttctgaagtgacatgaaaagagcctctggatgcatttccatttctctccttaacctccagcagactcctgctctctatccaaaataaagatcacagagcagcaagttcatacaacatgcatgttctcctctatcttagaggggtattcttcttgaaaataaaaaatattgaaatgctgtatttttacagctactttaacctatgataattatttacaaaattttaacactaaccaaacaatgcagatcttagggatgattaaaggcagcatttgatgatagcagacattgttacaaggacatggtgagtctatttttaatgcaccaatcttgtttatagcaaaaatgttttccaatattttaataaagtagttattttataggggatacttgaaaccagtatttaagctttaaatgacagtaatattggcatagaaaaaagtagcaaatgtttactgtatcaatttctaatgtttactatatagaatttcctgtaatatatttatatactttttcatgaaaatggagttatcagttatctgtttgttactgcatcatctgtttgtaatcattatctcactttgtaaataaaaacacaccttaaaacatgaacaagccaaaactgtgtgcag

SEQ ID NO: 326360 - DNA, 8487 bp, Artificial Sequence
  derived and/or modified sequence
gagtagctccagcggccacgctgaggcgagggtgacacaccatgctcacggcccctggagaccgtcgtgctggcgagccgtgctccgtagctccccggtccgcctcggcagcggtcagagtcgcctacaggagttgagccgcccgcgccagaaggttttggcgaagctcttggagaggcgtcgagcacagtagggcggcgggggtgcgttgagcgctcgggggtcaggcagtcggccgggatcgccgctggggagcgtttccgaggcgaggaggaggaggaggagatgctgctcctcttctccccctccccaggctccttctacagctccttcagcccacgcccgcagccgcttgtgggagaagtggtggtggctctcggcgcccgcggcggctgccggcggcccgccccgacgccgcgtccctgcagccctcgcccggcgctccagtagcaggacccggtctcgggaccagccggtaatatgcacgtgtcactagctgaggccctggaggttcggggtggaccacttcaggaggaagaaatatgggctgtattaaatcaaagtgctgaaagtctccaagaattattcagaaaagtaagcctagctgatcctgctgcccttggcttcatcatttctccatggtctctgctgttgctgccatctggtagtgtgtcatttacagatgaaaatatttccaatcaggatcttcgagcattcactgcaccagaggttcttcaaaatcagtcactaacttctctctcagatgttgaaaagatccacatttattctcttggaatgacactgtattggggggctgattatgaagtgcctcagagccaacctattaagcttggagatcatctcaacagcatactgcttggaatgtgtgaggatgttatttacgctcgagtttctgttcggactgtgctggatgcttgcagtgcccacattaggaatagcaattgtgcaccctcattttcctacgtgaaacacttggtaaaactggttctgggaaatctttctgggacagatcagctttcctgtaacagtgaacaaaagcctgatcgaagccaggctattcgagatcgattgcgaggaaaaggattaccaacaggaagaagctctacttctgatgtactagacatacaaaagcctccactctctcatcagacctttcttaacaaagggcttagtaaatctatgggatttctgtccatcaaagatacacaagatgagaattatttcaaggacattttatcagataattctggacgtgaagattctgaaaatacattctccccttaccagttcaaaactagtggcccagaaaaaaaacccatccctggcattgatgtgctttctaagaagaagatctgggcttcatccatggacttgctttgtacagctgacagagacttctcttcaggagagactgccacatatcgtcgttgtcaccctgaggcagtaacagtgcggacttcaactactcctagaaaaaaggaggcaagatactcagatggaagtatagccttggatatctttggccctcagaaaatggatccaatatatcacactcgagaattgcccacctcctcagcaatatcaagtgctttggaccgaatccgagagagacaaaagaaacttcaggttctgagggaagccatgaatgtagaagaaccagttcgaagatacaaaacttatcatggtgatgtctttagtacctccagtgaaagtccatctattatttcctctgaatcagatttcagacaagtgagaagaagtgaagcctcaaagaggtttgaatccagcagtggtctcccaggggtagatgaaaccttaagtcaaggccagtcacagagaccgagcagacaatatgaaacaccctttgaaggcaacttaattaatcaagagatcatgctaaaacggcaagaggaagaactgatgcagctacaagccaaaatggcccttagacagtctcggttgagcctatatccaggagacacaatcaaagcgtccatgcttgacatcaccagggatccgttaagagaaattgccctagaaacagccatgactcaaagaaaactgaggaatttctttggccctgagtttgtgaaaatgacaattgaaccatttatatctttggatttgccacggtctattcttactaagaaagggaagaatgaggataaccgaaggaaagtaaacataatgcttctgaacgggcaaagactggaactgacctgtgataccaaaactatatgtaaagatgtgtttgatatggttgtggcacatattggcttagtagagcatcatttgtttgctttagctaccctcaaagataatgaatatttctttgttgatcctgacttaaaattaaccaaagtggccccagagggatggaaagaagaaccaaagaaaaagaccaaagccactgttaattttactttgtttttcagaattaaattttttatggatgatgttagtctaatacaacatactctgacgtgtcatcagtattaccttcagcttcgaaaagatattttggaggaaaggatgcactgtgatgatgagacttccttattgctggcatccttggctctccaggctgagtatggagattatcaaccagaggttcatggtgtgtcttactttagaatggagcactatttgcccgccagagtgatggagaaacttgatttatcctatatcaaagaagagttacccaaattgcataatacctatgtgggagcttctgaaaaagagacagagttagaatttttaaaggtctgccaaagactgacagaatatggagttcattttcaccgagtgcaccctgagaagaagtcacaaacaggaatattgcttggagtctgttctaaaggtgtccttgtgtttgaagttcacaatggagtgcgcacattggtccttcgctttccatggagggaaaccaagaaaatatctttttctaaaaagaaaatcacattgcaaaatacatcagatggaataaaacatggcttccagacagacaacagtaagatatgccagtacctgctgcacctctgctcttaccagcataagttccagctacagatgagagcaagacagagcaaccaagatgcccaagatattgagagagcttcgtttaggagcctgaatctccaagcagagtctgttagaggatttaatatgggacgagcaatcagcactggcagtctggccagcagcaccctcaacaaacttgctgttcgacctttatcagttcaagctgagattctgaagaggctatcctgctcagagctgtcgctttaccagccattgcaaaacagttcaaaagagaagaatgacaaagcttcatgggaggaaaagcctagagagatgagtaaatcataccatgatctcagtcaggcctctctctatccacatcggaaaaatgtcattgttaacatggaacccccaccacaaaccgttgcagagttggtgggaaaaccttctcaccagatgtcaagatctgatgcagaatctttggcaggagtgacaaaacttaataattcaaagtctgttgcgagtttaaatagaagtcctgaaaggaggaaacatgaatcagactcctcatccattgaagaccctgggcaagcatatgttctagatgtgctacacaaaagatggagcatagtatcttcaccagaaagggagatcaccttagtgaacctgaaaaaagatgcaaagtatggcttgggatttcaaattattggtggggagaagatgggaagactggacctaggcatatttatcagttcagttgcccctggaggaccagctgacttggatggatgcttgaagccaggagaccgtttgatatctgtgaatagtgtgagtctggagggagtcagccaccatgctgcaattgaaattttgcaaaatgcacctgaagatgtgacacttgttatctctcagccaaaagaaaagatatccaaagtgccttctactcctgtgcatctcaccaatgagatgaaaaactacatgaagaaatcttcctacatgcaagacagtgctatagattcttcttccaaggatcaccactggtcacgtggtaccctgaggcacatctcggagaactcctttgggccatctgggggcctgcgggaaggaagcctgagttctcaagattccaggactgagagtgccagcttgtctcaaagccaggtcaatggtttctttgccagccatttaggtgaccaaacctggcaggaatcacagcatggcagcccttccccatctgtaatatccaaagccaccgagaaagagactttcactgatagtaaccaaagcaaaactaaaaagccaggcatttctgatgtaactgattactcagaccgtggagattcagacatggatgaagccacttactccagcagtcaggatcatcaaacaccaaaacaggaatcttcctcttcagtgaatacatccaacaagatgaattttaaaactttttcttcatcacctcctaagcctggagatatctttgaggttgaactggctaaaaatgataacagcttggggataagtgtcacgggaggtgtgaatacgagtgtcagacatggtggcatttatgtgaaagctgttattccccagggagcagcagagtctgatggtagaattcacaaaggtgatcgcgtcctagctgtcaatggagttagtctagaaggagccacccataagcaagctgtggaaacactgagaaatacaggacaggtggttcatctgttattagaaaagggacaatctccaacatctaaagaacatgtcccggtaaccccacagtgtaccctttcagatcagaatgcccaaggtcaaggcccagaaaaagtgaagaaaacaactcaggtcaaagactacagctttgtcactgaagaaaatacatttgaggtaaaattatttaaaaatagctcaggtctaggattcagtttttctcgagaagataatcttataccggagcaaattaatgccagcatagtaagggttaaaaagctctttcctggacagccagcagcagaaagtggaaaaattgatgtaggagatgttatcttgaaagtgaatggagcctctttgaaaggactatctcagcaggaagtcatatctgctctcaggggaactgctccagaagtattcttgcttctctgcagacctccacctggtgtgctaccggaaattgatactgcgcttttgaccccacttcagtctccagcacaagtacttccaaacagcagtaaagactcttctcagccatcatgtgtggagcaaagcaccagctcagatgaaaatgaaatgtcagacaaaagcaaaaaacagtgcaagtccccatccagaagagacagttacagtgacagcagtgggagtggagaagatgacttagtgacagctccagcaaacatatcaaattcgacctggagttcagctttgcatcagactctaagcaacatggtatcacaggcacagagtcatcatgaagcacccaagagtcaagaagataccatttgtaccatgttttactatcctcagaaaattcccaataaaccagagtttgaggacagtaatccttcccctctaccaccggatatggctcctgggcagagttatcaaccccaatcagaatctgcttcctctagttcgatggataagtatcatatacatcacatttctgaaccaactagacaagaaaactggacacctttgaaaaatgacttggaaaatcaccttgaagactttgaactggaagtagaactcctcattaccctaattaaatcagaaaaaggaagcctgggttttacagtaaccaaaggcaatcagagaattggttgttatgttcatgatgtcatacaggatccagccaaaagtgatggaaggctaaaacctggggaccggctcataaaggttaatgatacagatgttactaatatgactcatacagatgcagttaatctgctccgggctgcatccaaaacagtcagattagttattggacgagttctagaattacccagaataccaatgttgcctcatttgctaccggacataacactaacgtgcaacaaagaggagttgggtttttccttatgtggaggtcatgacagcctttatcaagtggtatatattagtgatattaatccaaggtccgtcgcagccattgagggtaatctccagctattagatgtcatccattatgtgaacggagtcagcacacaaggaatgaccttggaggaagttaacagagcattagacatgtcacttccttcattggtattgaaagcaacaagaaatgatcttccagtggtccccagctcaaagaggtctgctgtttcagctccaaagtcaaccaaaggcaatggttcctacagtgtggggtcttgcagccagcctgccctcactcctaatgattcattctccacggttgctggggaagaaataaatgaaatatcgtaccccaaaggaaaatgttctacttatcagataaagggatcaccaaacttgactctgcccaaagaatcttatatacaagaagatgacatttatgatgattcccaagaagctgaagttatccagtctctgctggatgttgtggatgaggaagcccagaatcttttaaacgaaaataatgcagcaggatactcctgtggtccaggtacattaaagatgaatgggaagttatcagaagagagaacagaagatacagactgcgatggttcacctttacctgagtattttactgaggccaccaaaatgaatggctgtgaagaatattgtgaagaaaaagtaaaaagtgaaagcttaattcagaagccacaagaaaagaagactgatgatgatgaaataacatggggaaatgatgagttgccaatagagagaacaaaccatgaagattctgataaagatcattcctttctgacaaacgatgagctcgctgtactccctgtcgtcaaagtgcttccctctggtaaatacacgggtgccaacttaaaatcagtcattcgagtcctgcggggtttgctagatcaaggaattccttctaaggagctggagaatcttcaagaattaaaacctttggatcagtgtctaattgggcaaactaaggaaaacagaaggaagaacagatataaaaatatacttccctatgatgctacaagagtgcctcttggagatgaaggtggctatatcaatgccagcttcattaagataccagttgggaaagaagagttcgtttacattgcctgccaaggaccactgcctacaactgttggagacttctggcagatgatttgggagcaaaaatccacagtgatagccatgatgactcaagaagtagaaggagaaaaaatcaaatgccagcgctattggcccaacatcctaggcaaaacaacaatggtcagcaacagacttcgactggctcttgtgagaatgcagcagctgaagggctttgtggtgagggcaatgacccttgaagatattcagaccagagaggtgcgccatatttctcatctgaatttcactgcctggccagaccatgatacaccttctcaaccagatgatctgcttacttttatctcctacatgagacacatccacagatcaggcccaatcattacgcactgcagtgctggcattggacgttcagggaccctgatttgcatagatgtggttctgggattaatcagtcaggatcttgattttgacatctctgatttggtgcgctgcatgagactacaaagacacggaatggttcagacagaggatcaatatattttctgctatcaagtcatcctttatgtcctgacacgtcttcaagcagaagaagagcaaaaacagcagcctcagcttctgaagtgacatgaaaagagcctctggatgcatttccatttctctccttaacctccagcagactcctgctctctatccaaaataaagatcacagagcagcaagttcatacaacatgcatgttctcctctatcttagaggggtattcttcttgaaaataaaaaatattgaaatgctgtatttttacagctactttaacctatgataattatttacaaaattttaacactaaccaaacaatgcagatcttagggatgattaaaggcagcatttgatgatagcagacattgttacaaggacatggtgagtctatttttaatgcaccaatcttgtttatagcaaaaatgttttccaatattttaataaagtagttattttataggggatacttgaaaccagtatttaagctttaaatgacagtaatattggcatagaaaaaagtagcaaatgtttactgtatcaatttctaatgtttactatatagaatttcctgtaatatatttatatactttttcatgaaaatggagttatcagttatctgtttgttactgcatcatctgtttgtaatcattatctcactttgtaaataaaaacacaccttaaaacatgaacaagcc

SEQ ID NO: 326361 - DNA, 7305 bp, Artificial Sequence
  derived and/or modified sequence
cagttcctgttcaccaaggtgagcctggccgaccccgccgccctgggcttcatcatcagcccctggagcctgctgctgctgcccagcggcagcgtgagcttcaccgacgagaacatcagcaaccaggacctgagagccttcaccgcccccgaggtgctgcagaaccagagcctgaccagcctgagcgacgtggagaagatccacatctacagcctgggcatgaccctgtactggggcgccgactacgaggtgccccagagccagcccatcaagctgggcgaccacctgaacagcatcctgctgggcatgtgcgaggacgtgatctacgccagagtgagcgtgagaaccgtgctggacgcctgcagcgcccacatcagaaacagcaactgcgcccccagcttcagctacgtgaagcacctggtgaagctggtgctgggcaacctgagcggcaccgaccagctgagctgcaacagcgagcagaagcccgacagaagccaggccatcagagacagactgagaggcaagggcctgcccaccggcagaagcagcaccagcgacgtgctggacatccagaagccccccctgagccaccagaccttcctgaacaagggcctgagcaagagcatgggcttcctgagcatcaaggacacccaggacgagaactacttcaaggacatcctgagcgacaacagcggcagagaggacagcgagaacaccttcagcccctaccagttcaagaccagcggccccgagaagaagcccatccccggcatcgacgtgctgagcaagaagaagatctgggccagcagcatggacctgctgtgcaccgccgacagagacttcagcagcggcgagaccgccacctacagaagatgccaccccgaggccgtgaccgtgagaaccagcaccacccccagaaagaaggaggccagatacagcgacggcagcatcgccctggacatcttcggcccccagaagatggaccccatctaccacaccagagagctgcccaccagcagcgccatcagcagcgccctggacagaatcagagagagacagaagaagctgcaggtgctgagagaggccatgaacgtggaggagcccgtgagaagatacaagacctaccacggcgacgtgttcagcaccagcagcgagagccccagcatcatcagcagcgagagcgacttcagacaggtgagaagaagcgaggccagcaagagattcgagagcagcagcggcctgcccggcgtggacgagaccctgagccagggccagagccagagacccagcagacagtacgagacccccttcgagggcaacctgatcaaccaggagatcatgctgaagagacaggaggaggagctgatgcagctgcaggccaagatggccctgagacagagcagactgagcctgtaccccggcgacaccatcaaggccagcatgctggacatcaccagagaccccctgagagagatcgccctggagaccgccatgacccagagaaagctgagaaacttcttcggccccgagttcgtgaagatgaccatcgagcccttcatcagcctggacctgcccagaagcatcctgaccaagaagggcaagaacgaggacaacagaagaaaggtgaacatcatgctgctgaacggccagagactggagctgacctgcgacaccaagaccatctgcaaggacgtgttcgacatggtggtggcccacatcggcctggtggagcaccacctgttcgccctggccaccctgaaggacaacgagtacttcttcgtggaccccgacctgaagctgaccaaggtggcccccgagggctggaaggaggagcccaagaagaagaccaaggccaccgtgaacttcaccctgttcttcagaatcaagttcttcatggacgacgtgagcctgatccagcacaccctgacctgccaccagtactacctgcagctgagaaaggacatcctggaggagagaatgcactgcgacgacgagaccagcctgctgctggccagcctggccctgcaggccgagtacggcgactaccagcccgaggtgcacggcgtgagctacttcagaatggagcactacctgcccgccagagtgatggagaagctggacctgagctacatcaaggaggagctgcccaagctgcacaacacctacgtgggcgccagcgagaaggagaccgagctggagttcctgaaggtgtgccagagactgaccgagtacggcgtgcacttccacagagtgcaccccgagaagaagagccagaccggcatcctgctgggcgtgtgcagcaagggcgtgctggtgttcgaggtgcacaacggcgtgagaaccctggtgctgagattcccctggagagagaccaagaagatcagcttcagcaagaagaagatcaccctgcagaacaccagcgacggcatcaagcacggcttccagaccgacaacagcaagatctgccagtacctgctgcacctgtgcagctaccagcacaagttccagctgcagatgagagccagacagagcaaccaggacgcccaggacatcgagagagccagcttcagaagcctgaacctgcaggccgagagcgtgagaggcttcaacatgggcagagccatcagcaccggcagcctggccagcagcaccctgaacaagctggccgtgagacccctgagcgtgcaggccgagatcctgaagagactgagctgcagcgagctgagcctgtaccagcccctgcagaacagcagcaaggagaagaacgacaaggccagctgggaggagaagcccagagagatgagcaagagctaccacgacctgagccaggccagcctgtacccccacagaaagaacgtgatcgtgaacatggagccccccccccagaccgtggccgagctggtgggcaagcccagccaccagatgagcagaagcgacgccgagagcctggccggcgtgaccaagctgaacaacagcaagagcgtggccagcctgaacagaagccccgagagaagaaagcacgagagcgacagcagcagcatcgaggaccccggccaggcctacgtgctggacgtgctgcacaagagatggagcatcgtgagcagccccgagagagagatcaccctggtgaacctgaagaaggacgccaagtacggcctgggcttccagatcatcggcggcgagaagatgggcagactggacctgggcatcttcatcagcagcgtggcccccggcggccccgccgacctggacggctgcctgaagcccggcgacagactgatcagcgtgaacagcgtgagcctggagggcgtgagccaccacgccgccatcgagatcctgcagaacgcccccgaggacgtgaccctggtgatcagccagcccaaggagaagatcagcaaggtgcccagcacccccgtgcacctgaccaacgagatgaagaactacatgaagaagagcagctacatgcaggacagcgccatcgacagcagcagcaaggaccaccactggagcagaggcaccctgagacacatcagcgagaacagcttcggccccagcggcggcctgagagagggcagcctgagcagccaggacagcagaaccgagagcgccagcctgagccagagccaggtgaacggcttcttcgccagccacctgggcgaccagacctggcaggagagccagcacggcagccccagccccagcgtgatcagcaaggccaccgagaaggagaccttcaccgacagcaaccagagcaagaccaagaagcccggcatcagcgacgtgaccgactacagcgacagaggcgacagcgacatggacgaggccacctacagcagcagccaggaccaccagacccccaagcaggagagcagcagcagcgtgaacaccagcaacaagatgaacttcaagaccttcagcagcagcccccccaagcccggcgacatcttcgaggtggagctggccaagaacgacaacagcctgggcatcagcgtgaccggcggcgtgaacaccagcgtgagacacggcggcatctacgtgaaggccgtgatcccccagggcgccgccgagagcgacggcagaatccacaagggcgacagagtgctggccgtgaacggcgtgagcctggagggcgccacccacaagcaggccgtggagaccctgagaaacaccggccaggtggtgcacctgctgctggagaagggccagagccccaccagcaaggagcacgtgcccgtgaccccccagtgcaccctgagcgaccagaacgcccagggccagggccccgagaaggtgaagaagaccacccaggtgaaggactacagcttcgtgaccgaggagaacaccttcgaggtgaagctgttcaagaacagcagcggcctgggcttcagcttcagcagagaggacaacctgatccccgagcagatcaacgccagcatcgtgagagtgaagaagctgttccccggccagcccgccgccgagagcggcaagatcgacgtgggcgacgtgatcctgaaggtgaacggcgccagcctgaagggcctgagccagcaggaggtgatcagcgccctgagaggcaccgcccccgaggtgttcctgctgctgtgcagacccccccccggcgtgctgcccgagatcgacaccgccctgctgacccccctgcagagccccgcccaggtgctgcccaacagcagcaaggacagcagccagcccagctgcgtggagcagagcaccagcagcgacgagaacgagatgagcgacaagagcaagaagcagtgcaagagccccagcagaagagacagctacagcgacagcagcggcagcggcgaggacgacctggtgaccgcccccgccaacatcagcaacagcacctggagcagcgccctgcaccagaccctgagcaacatggtgagccaggcccagagccaccacgaggcccccaagagccaggaggacaccatctgcaccatgttctactacccccagaagatccccaacaagcccgagttcgaggacagcaaccccagccccctgccccccgacatggcccccggccagagctaccagccccagagcgagagcgccagcagcagcagcatggacaagtaccacatccaccacatcagcgagcccaccagacaggagaactggacccccctgaagaacgacctggagaaccacctggaggacttcgagctggaggtggagctgctgatcaccctgatcaagagcgagaagggcagcctgggcttcaccgtgaccaagggcaaccagagaatcggctgctacgtgcacgacgtgatccaggaccccgccaagagcgacggcagactgaagcccggcgacagactgatcaaggtgaacgacaccgacgtgaccaacatgacccacaccgacgccgtgaacctgctgagagccgccagcaagaccgtgagactggtgatcggcagagtgctggagctgcccagaatccccatgctgccccacctgctgcccgacatcaccctgacctgcaacaaggaggagctgggcttcagcctgtgcggcggccacgacagcctgtaccaggtggtgtacatcagcgacatcaaccccagaagcgtggccgccatcgagggcaacctgcagctgctggacgtgatccactacgtgaacggcgtgagcacccagggcatgaccctggaggaggtgaacagagccctggacatgagcctgcccagcctggtgctgaaggccaccagaaacgacctgcccgtggtgcccagcagcaagagaagcgccgtgagcgcccccaagagcaccaagggcaacggcagctacagcgtgggcagctgcagccagcccgccctgacccccaacgacagcttcagcaccgtggccggcgaggagatcaacgagatcagctaccccaagggcaagtgcagcacctaccagatcaagggcagccccaacctgaccctgcccaaggagagctacatccaggaggacgacatctacgacgacagccaggaggccgaggtgatccagagcctgctggacgtggtggacgaggaggcccagaacctgctgaacgagaacaacgccgccggctacagctgcggccccggcaccctgaagatgaacggcaagctgagcgaggagagaaccgaggacaccgactgcgacggcagccccctgcccgagtacttcaccgaggccaccaagatgaacggctgcgaggagtactgcgaggagaaggtgaagagcgagagcctgatccagaagccccaggagaagaagaccgacgacgacgagatcacctggggcaacgacgagctgcccatcgagagaaccaaccacgaggacagcgacaaggaccacagcttcctgaccaacgacgagctggccgtgctgcccgtggtgaaggtgctgcccagcggcaagtacaccggcgccaacctgaagagcgtgatcagagtgctgagaggcctgctggaccagggcatccccagcaaggagctggagaacctgcaggagctgaagcccctggaccagtgcctgatcggccagaccaaggagaacagaagaaagaacagatacaagaacatcctgccctacgacgccaccagagtgcccctgggcgacgagggcggctacatcaacgccagcttcatcaagatccccgtgggcaaggaggagttcgtgtacatcgcctgccagggccccctgcccaccaccgtgggcgacttctggcagatgatctgggagcagaagagcaccgtgatcgccatgatgacccaggaggtggagggcgagaagatcaagtgccagagatactggcccaacatcctgggcaagaccaccatggtgagcaacagactgagactggccctggtgagaatgcagcagctgaagggcttcgtggtgagagccatgaccctggaggacatccagaccagagaggtgagacacatcagccacctgaacttcaccgcctggcccgaccacgacacccccagccagcccgacgacctgctgaccttcatcagctacatgagacacatccacagaagcggccccatcatcacccactgcagcgccggcatcggcagaagcggcaccctgatctgcatcgacgtggtgctgggcctgatcagccaggacctggacttcgacatcagcgacctggtgagatgcatgagactgcagagacacggcatggtgcagaccgaggaccagtacatcttctgctaccaggtgatcctgtacgtgctgaccagactgcaggccgaggaggagcagaagcagcagccccagctgctgaagtag

SEQ ID NO: 326362 - DNA, 7401 bp, Artificial Sequence
  derived and/or modified sequence
atgcacgtgagcctggccgaggccctggaggtgagaggcggccccctgcaggaggaggagatctgggccgtgctgaaccagagcgccgagagcctgcaggagctgttcagaaaggtgagcctggccgaccccgccgccctgggcttcatcatcagcccctggagcctgctgctgctgcccagcggcagcgtgagcttcaccgacgagaacatcagcaaccaggacctgagagccttcaccgcccccgaggtgctgcagaaccagagcctgaccagcctgagcgacgtggagaagatccacatctacagcctgggcatgaccctgtactggggcgccgactacgaggtgccccagagccagcccatcaagctgggcgaccacctgaacagcatcctgctgggcatgtgcgaggacgtgatctacgccagagtgagcgtgagaaccgtgctggacgcctgcagcgcccacatcagaaacagcaactgcgcccccagcttcagctacgtgaagcacctggtgaagctggtgctgggcaacctgagcggcaccgaccagctgagctgcaacagcgagcagaagcccgacagaagccaggccatcagagacagactgagaggcaagggcctgcccaccggcagaagcagcaccagcgacgtgctggacatccagaagccccccctgagccaccagaccttcctgaacaagggcctgagcaagagcatgggcttcctgagcatcaaggacacccaggacgagaactacttcaaggacatcctgagcgacaacagcggcagagaggacagcgagaacaccttcagcccctaccagttcaagaccagcggccccgagaagaagcccatccccggcatcgacgtgctgagcaagaagaagatctgggccagcagcatggacctgctgtgcaccgccgacagagacttcagcagcggcgagaccgccacctacagaagatgccaccccgaggccgtgaccgtgagaaccagcaccacccccagaaagaaggaggccagatacagcgacggcagcatcgccctggacatcttcggcccccagaagatggaccccatctaccacaccagagagctgcccaccagcagcgccatcagcagcgccctggacagaatcagagagagacagaagaagctgcaggtgctgagagaggccatgaacgtggaggagcccgtgagaagatacaagacctaccacggcgacgtgttcagcaccagcagcgagagccccagcatcatcagcagcgagagcgacttcagacaggtgagaagaagcgaggccagcaagagattcgagagcagcagcggcctgcccggcgtggacgagaccctgagccagggccagagccagagacccagcagacagtacgagacccccttcgagggcaacctgatcaaccaggagatcatgctgaagagacaggaggaggagctgatgcagctgcaggccaagatggccctgagacagagcagactgagcctgtaccccggcgacaccatcaaggccagcatgctggacatcaccagagaccccctgagagagatcgccctggagaccgccatgacccagagaaagctgagaaacttcttcggccccgagttcgtgaagatgaccatcgagcccttcatcagcctggacctgcccagaagcatcctgaccaagaagggcaagaacgaggacaacagaagaaaggtgaacatcatgctgctgaacggccagagactggagctgacctgcgacaccaagaccatctgcaaggacgtgttcgacatggtggtggcccacatcggcctggtggagcaccacctgttcgccctggccaccctgaaggacaacgagtacttcttcgtggaccccgacctgaagctgaccaaggtggcccccgagggctggaaggaggagcccaagaagaagaccaaggccaccgtgaacttcaccctgttcttcagaatcaagttcttcatggacgacgtgagcctgatccagcacaccctgacctgccaccagtactacctgcagctgagaaaggacatcctggaggagagaatgcactgcgacgacgagaccagcctgctgctggccagcctggccctgcaggccgagtacggcgactaccagcccgaggtgcacggcgtgagctacttcagaatggagcactacctgcccgccagagtgatggagaagctggacctgagctacatcaaggaggagctgcccaagctgcacaacacctacgtgggcgccagcgagaaggagaccgagctggagttcctgaaggtgtgccagagactgaccgagtacggcgtgcacttccacagagtgcaccccgagaagaagagccagaccggcatcctgctgggcgtgtgcagcaagggcgtgctggtgttcgaggtgcacaacggcgtgagaaccctggtgctgagattcccctggagagagaccaagaagatcagcttcagcaagaagaagatcaccctgcagaacaccagcgacggcatcaagcacggcttccagaccgacaacagcaagatctgccagtacctgctgcacctgtgcagctaccagcacaagttccagctgcagatgagagccagacagagcaaccaggacgcccaggacatcgagagagccagcttcagaagcctgaacctgcaggccgagagcgtgagaggcttcaacatgggcagagccatcagcaccggcagcctggccagcagcaccctgaacaagctggccgtgagacccctgagcgtgcaggccgagatcctgaagagactgagctgcagcgagctgagcctgtaccagcccctgcagaacagcagcaaggagaagaacgacaaggccagctgggaggagaagcccagagagatgagcaagagctaccacgacctgagccaggccagcctgtacccccacagaaagaacgtgatcgtgaacatggagccccccccccagaccgtggccgagctggtgggcaagcccagccaccagatgagcagaagcgacgccgagagcctggccggcgtgaccaagctgaacaacagcaagagcgtggccagcctgaacagaagccccgagagaagaaagcacgagagcgacagcagcagcatcgaggaccccggccaggcctacgtgctggacgtgctgcacaagagatggagcatcgtgagcagccccgagagagagatcaccctggtgaacctgaagaaggacgccaagtacggcctgggcttccagatcatcggcggcgagaagatgggcagactggacctgggcatcttcatcagcagcgtggcccccggcggccccgccgacctggacggctgcctgaagcccggcgacagactgatcagcgtgaacagcgtgagcctggagggcgtgagccaccacgccgccatcgagatcctgcagaacgcccccgaggacgtgaccctggtgatcagccagcccaaggagaagatcagcaaggtgcccagcacccccgtgcacctgaccaacgagatgaagaactacatgaagaagagcagctacatgcaggacagcgccatcgacagcagcagcaaggaccaccactggagcagaggcaccctgagacacatcagcgagaacagcttcggccccagcggcggcctgagagagggcagcctgagcagccaggacagcagaaccgagagcgccagcctgagccagagccaggtgaacggcttcttcgccagccacctgggcgaccagacctggcaggagagccagcacggcagccccagccccagcgtgatcagcaaggccaccgagaaggagaccttcaccgacagcaaccagagcaagaccaagaagcccggcatcagcgacgtgaccgactacagcgacagaggcgacagcgacatggacgaggccacctacagcagcagccaggaccaccagacccccaagcaggagagcagcagcagcgtgaacaccagcaacaagatgaacttcaagaccttcagcagcagcccccccaagcccggcgacatcttcgaggtggagctggccaagaacgacaacagcctgggcatcagcgtgaccggcggcgtgaacaccagcgtgagacacggcggcatctacgtgaaggccgtgatcccccagggcgccgccgagagcgacggcagaatccacaagggcgacagagtgctggccgtgaacggcgtgagcctggagggcgccacccacaagcaggccgtggagaccctgagaaacaccggccaggtggtgcacctgctgctggagaagggccagagccccaccagcaaggagcacgtgcccgtgaccccccagtgcaccctgagcgaccagaacgcccagggccagggccccgagaaggtgaagaagaccacccaggtgaaggactacagcttcgtgaccgaggagaacaccttcgaggtgaagctgttcaagaacagcagcggcctgggcttcagcttcagcagagaggacaacctgatccccgagcagatcaacgccagcatcgtgagagtgaagaagctgttccccggccagcccgccgccgagagcggcaagatcgacgtgggcgacgtgatcctgaaggtgaacggcgccagcctgaagggcctgagccagcaggaggtgatcagcgccctgagaggcaccgcccccgaggtgttcctgctgctgtgcagacccccccccggcgtgctgcccgagatcgacaccgccctgctgacccccctgcagagccccgcccaggtgctgcccaacagcagcaaggacagcagccagcccagctgcgtggagcagagcaccagcagcgacgagaacgagatgagcgacaagagcaagaagcagtgcaagagccccagcagaagagacagctacagcgacagcagcggcagcggcgaggacgacctggtgaccgcccccgccaacatcagcaacagcacctggagcagcgccctgcaccagaccctgagcaacatggtgagccaggcccagagccaccacgaggcccccaagagccaggaggacaccatctgcaccatgttctactacccccagaagatccccaacaagcccgagttcgaggacagcaaccccagccccctgccccccgacatggcccccggccagagctaccagccccagagcgagagcgccagcagcagcagcatggacaagtaccacatccaccacatcagcgagcccaccagacaggagaactggacccccctgaagaacgacctggagaaccacctggaggacttcgagctggaggtggagctgctgatcaccctgatcaagagcgagaagggcagcctgggcttcaccgtgaccaagggcaaccagagaatcggctgctacgtgcacgacgtgatccaggaccccgccaagagcgacggcagactgaagcccggcgacagactgatcaaggtgaacgacaccgacgtgaccaacatgacccacaccgacgccgtgaacctgctgagagccgccagcaagaccgtgagactggtgatcggcagagtgctggagctgcccagaatccccatgctgccccacctgctgcccgacatcaccctgacctgcaacaaggaggagctgggcttcagcctgtgcggcggccacgacagcctgtaccaggtggtgtacatcagcgacatcaaccccagaagcgtggccgccatcgagggcaacctgcagctgctggacgtgatccactacgtgaacggcgtgagcacccagggcatgaccctggaggaggtgaacagagccctggacatgagcctgcccagcctggtgctgaaggccaccagaaacgacctgcccgtggtgcccagcagcaagagaagcgccgtgagcgcccccaagagcaccaagggcaacggcagctacagcgtgggcagctgcagccagcccgccctgacccccaacgacagcttcagcaccgtggccggcgaggagatcaacgagatcagctaccccaagggcaagtgcagcacctaccagatcaagggcagccccaacctgaccctgcccaaggagagctacatccaggaggacgacatctacgacgacagccaggaggccgaggtgatccagagcctgctggacgtggtggacgaggaggcccagaacctgctgaacgagaacaacgccgccggctacagctgcggccccggcaccctgaagatgaacggcaagctgagcgaggagagaaccgaggacaccgactgcgacggcagccccctgcccgagtacttcaccgaggccaccaagatgaacggctgcgaggagtactgcgaggagaaggtgaagagcgagagcctgatccagaagccccaggagaagaagaccgacgacgacgagatcacctggggcaacgacgagctgcccatcgagagaaccaaccacgaggacagcgacaaggaccacagcttcctgaccaacgacgagctggccgtgctgcccgtggtgaaggtgctgcccagcggcaagtacaccggcgccaacctgaagagcgtgatcagagtgctgagaggcctgctggaccagggcatccccagcaaggagctggagaacctgcaggagctgaagcccctggaccagtgcctgatcggccagaccaaggagaacagaagaaagaacagatacaagaacatcctgccctacgacgccaccagagtgcccctgggcgacgagggcggctacatcaacgccagcttcatcaagatccccgtgggcaaggaggagttcgtgtacatcgcctgccagggccccctgcccaccaccgtgggcgacttctggcagatgatctgggagcagaagagcaccgtgatcgccatgatgacccaggaggtggagggcgagaagatcaagtgccagagatactggcccaacatcctgggcaagaccaccatggtgagcaacagactgagactggccctggtgagaatgcagcagctgaagggcttcgtggtgagagccatgaccctggaggacatccagaccagagaggtgagacacatcagccacctgaacttcaccgcctggcccgaccacgacacccccagccagcccgacgacctgctgaccttcatcagctacatgagacacatccacagaagcggccccatcatcacccactgcagcgccggcatcggcagaagcggcaccctgatctgcatcgacgtggtgctgggcctgatcagccaggacctggacttcgacatcagcgacctggtgagatgcatgagactgcagagacacggcatggtgcagaccgaggaccagtacatcttctgctaccaggtgatcctgtacgtgctgaccagactgcaggccgaggaggagcagaagcagcagccccagctgctgaagtag

SEQ ID NO: 326363 - protein, 2294 aa, Artificial Sequence
  derived and/or modified sequence
MHVSLAEALEVRGGPLQEEEIWAVLNQSAESLQELFRKVSLADPAALGFIISPWSLLLLPSGSVSFTDENISNQDLRAFTAPEVLQNQSLTSLSDVEKIHIYSLGMTLYWGADYEVPQSQPIKLGDHLNSILLGMCEDVIYARVSVRTVLDACSAHIRNSNCAPSFSYVKHLVKLVLGNLSGTDQLSCNSEQKPDRSQAIRDRLRGKGLPTGRSSTSDVLDIQKPPLSHQTFLNKGLSKSMGFLSIKDTQDENYFKDILSDNSGREDSENTFSPYQFKTSGPEKKPIPGIDVLSKKKIWASSMDLLCTADRDFSSGETATYRRCHPEAVTVRTSTTPRKKEARYSDGSIALDIFGPQKMDPIYHTRELPTSSAISSALDRIRERQKKLQVLREAMNVEEPVRRYKTYHGDVFSTSSESPSIISSESDFRQVRRSEASKRFESSSGLPGVDETLSQGQSQRPSRQYETPFEGNLINQEIMLKRQEEELMQLQAKMALRQSRLSLYPGDTIKASMLDITRDPLREIALETAMTQRKLRNFFGPEFVKMTIEPFISLDLPRSILTKKGKNEDNRRKVNIMLLNGQRLELTCDTKTICKDVFDMVVAHIGLVEHHLFALATLKDNEYFFVDPDLKLTKVAPEGWKEEPKKKTKATVNFTLFFRIKFFMDDVSLIQHTLTCHQYYLQLRKDILEERMHCDDETSLLLASLALQAEYGDYQPEVHGVSYFRMEHYLPARVMEKLDLSYIKEELPKLHNTYVGASEKETELEFLKVCQRLTEYGVHFHRVHPEKKSQTGILLGVCSKGVLVFEVHNGVRTLVLRFPWRETKKISFSKKKITLQNTSDGIKHGFQTDNSKICQYLLHLCSYQHKFQLQMRARQSNQDAQDIDVLHKRWSIVSSPEREITLVNLKKDAKYGLGFQIIGGEKMGRLDLGIFISSVAPGGPADLDGCLKPGDRLISVNSVSLEGVSHHAAIEILQNAPEDVTLVISQPKEKISKVPSTPVHLTNEMKNYMKKSSYMQDSAIDSSSKDHHWSRGTLRHISENSFGPSGGLREGSLSSQDSRTESASLSQSQVNGFFASHLGDQTWQESQHGSPSPSVISKATEKETFTDSNQSKTKKPGISDVTDYSDRGDSDMDEATYSSSQDHQTPKQESSSSVNTSNKMNFKTFSSSPPKPGDIFEVELAKNDNSLGISVTGGVNTSVRHGGIYVKAVIPQGAAESDGRIHKGDRVLAVNGVSLEGATHKQAVETLRNTGQVVHLLLEKGQSPTSKEHVPVTPQCTLSDQNAQGQGPEKVKKTTQVKDYSFVTEENTFEVKLFKNSSGLGFSFSREDNLIPEQINASIVRVKKLFPGQPAAESGKIDVGDVILKVNGASLKGLSQQEVISALRGTAPEVFLLLCRPPPGVLPEIDTALLTPLQSPAQVLPNSSKDSSQPSCVEQSTSSDENEMSDKSKKQCKSPSRRDSYSDSSGSGEDDLVTAPANISNSTWSSALHQTLSNMVSQAQSHHEAPKSQEDTICTMFYYPQKIPNKPEFEDSNPSPLPPDMAPGQSYQPQSESASSSSMDKYHIHHISEPTRQENWTPLKNDLENHLEDFELEVELLITLIKSEKGSLGFTVTKGNQRIGCYVHDVIQDPAKSDGRLKPGDRLIKVNDTDVTNMTHTDAVNLLRAASKTVRLVIGRVLELPRIPMLPHLLPDITLTCNKEELGFSLCGGHDSLYQVVYISDINPRSVAAIEGNLQLLDVIHYVNGVSTQGMTLEEVNRALDMSLPSLVLKATRNDLPVVPSSKRSAVSAPKSTKGNGSYSVGSCSQPALTPNDSFSTVAGEEINEISYPKGKCSTYQIKGSPNLTLPKESYIQEDDIYDDSQEAEVIQSLLDVVDEEAQNLLNENNAAGYSCGPGTLKMNGKLSEERTEDTDCDGSPLPEYFTEATKMNGCEEYCEEKVKSESLIQKPQEKKTDDDEITWGNDELPIERTNHEDSDKDHSFLTNDELAVLPVVKVLPSGKYTGANLKSVIRVLRGLLDQGIPSKELENLQELKPLDQCLIGQTKENRRKNRYKNILPYDATRVPLGDEGGYINASFIKIPVGKEEFVYIACQGPLPTTVGDFWQMIWEQKSTVIAMMTQEVEGEKIKCQRYWPNILGKTTMVSNRLRLALVRMQQLKGFVVRAMTLEDIQTREVRHISHLNFTAWPDHDTPSQPDDLLTFISYMRHIHRSGPIITHCSAGIGRSGTLICIDVVLGLISQDLDFDISDLVRCMRLQRHGMVQTEDQYIFCYQVILYVLTRLQAEEEQKQQPQLLK

SEQ ID NO: 326364 - DNA, 6885 bp, Artificial Sequence
  derived and/or modified sequence
atgcacgtctccctcgcagaggccctggaagtaagaggcgggccgcttcaggaggaagaaatttgggccgtgctgaaccagtcggcagagagcctacaggagctgttccgtaaggtgtcactggccgacccagccgcactgggcttcatcatatccccatggtctctgctgctgctgcctagtggctcagtgtcctttacagatgagaatataagtaaccaggatctgcgagcttttaccgccccagaagttctgcagaaccaatcccttacgagcctctccgacgttgagaagatacatatttactcactggggatgacactatactggggggccgactatgaggtaccacagagtcaacctatcaaactcggcgaccacctgaatagtatccttctgggcatgtgtgaggatgttatttacgcccgggtgtccgttcggactgtcttggacgcttgctccgcccatatcaggaattccaattgtgccccttccttcagctatgtcaagcatctggtgaaactcgtgctggggaatctgtcgggaactgaccagctgtcctgtaacagcgaacagaagcctgatcggagccaggccattcgcgatagactcaggggtaaggggcttccaactggaagaagttctacgtccgatgtgttagatattcagaaaccacctctcagccaccagacctttctgaacaaaggactgagcaagagcatgggtttcctaagtattaaagatacccaggatgaaaattattttaaagacatcttatcagataacagtggtcgggaggacagcgaaaatacgttcagcccttaccagtttaagaccagtggacccgagaaaaagccaattcctggtatcgatgtgttgtctaaaaagaagatctgggccagtagcatggacctgttgtgcactgccgatcgagacttttcatctggagaaacagctacctatagacgctgtcatccagaagccgtaacagtgagaaccagtaccactccccgcaagaaggaagcgaggtacagcgatggctcaatcgcactcgatatcttcggccctcagaaaatggaccccatctaccatacaagagagctgccaaccagctcagcaataagtagtgcactcgatagaataagggaacgccaaaaaaagctgcaggtgctacgtgaggcgatgaatgtcgaggagcctgtgcgtcggtataaaacatatcacggagatgtctttagcacctcctctgaaagcccatcaattatcagttccgaaagcgatttccggcaggtgaggaggtccgaagcttccaaacggtttgagtcttcctcaggtctgcctggggttgatgaaacactgagccaaggccagtcccagcgcccaagccggcaatatgagactccctttgaaggcaacctcatcaaccaagagatcatgttgaagcgccaggaagaagagctgatgcaacttcaagccaaaatggcgcttcgtcagagtagactaagcctctaccccggagacaccattaaggcttccatgctagatattacacgagacccgctgagagagattgccttggagaccgccatgacccagagaaagctccggaacttctttggacctgagttcgtaaagatgaccatcgaaccctttatatctctggaccttccaaggagcattctgaccaagaagggaaagaacgaagataaccgcaggaaggttaatattatgttgcttaatggccagcggctggaactcacctgcgatacgaagactatctgcaaggatgttttcgacatggtggtggcccacattggccttgtggaacaccacctgttcgcgttggcaacacttaaggataacgagtacttctttgttgaccctgacttaaagctgaccaaggtagcaccagagggctggaaagaggagcccaaaaagaagaccaaggcaaccgtgaactttactctattctttaggataaagttctttatggatgacgtcagcttgatccagcatactctcacatgccaccagtactatctgcaactccggaaggatattctggaggagcggatgcattgtgatgacgagaccagcctgttgctggcctcacttgcgctacaggcagagtatggggactatcagcccgaggtacacggggtgagctacttcaggatggaacattatctgccagctagggtaatggaaaagctggacttgtcatacatcaaagaagagctcccaaagctgcacaatacatacgtgggcgcctctgaaaaggagaccgagctggagtttttgaaggtctgtcagcgacttacagaatatggtgtccacttccacagagtacatcctgagaagaagtcgcagactggtattttgctcggcgtctgttcaaagggggttttagtgttcgaggtgcataacggagtgcgcaccctggttctacgcttcccctggagagagactaagaaaatttcattctcaaaaaagaagattacactacagaatacctcagatggcattaagcacggcttccagactgacaattccaagatttgccagtatctcctgcatctttgctcctaccagcataaattccagctccagatgagagctcgccagagcaaccaggatgctcaggatattgatgtgctgcataagcgctggagtatagtcagctcacccgaacgggagatcaccctggttaatctgaagaaagacgcaaagtacggtctcggattccagatcattgggggggaaaagatggggaggctggatctgggaatcttcatatcttcagtcgcacccggcggccctgcagatcttgacgggtgcttgaaaccaggcgacagactcatatctgtgaatagtgtttctctggaaggtgtgtcccaccacgccgccattgagattctgcagaatgcgcctgaagatgtgacactggtgatatcccaacccaaggagaaaatcagcaaggtgcccagcacaccggtccacctgacaaatgagatgaagaattacatgaaaaagtccagctatatgcaggactctgctattgacagctcttcgaaagaccaccactggagccggggtacgctgaggcatatctctgaaaacagcttcggtccgtctggagggctacgtgaaggttctctttcaagtcaggattctcgaacggagagtgctagcttatcacaatcccaagtaaatggcttttttgcctcccacctgggggaccagacctggcaagagtcccagcatggcagcccttcccccagcgtcatctccaaggccacggagaaggaaacgttcaccgactcgaaccaaagcaaaactaagaagccagggatcagcgatgtgaccgactattccgaccgaggggatagcgatatggacgaagccacgtacagttcctcacaggaccaccagacaccaaagcaggagtcctcttcctcagttaacacttccaataaaatgaattttaagacctttagtagcagcccccccaagccaggcgatatcttcgaagtggagctggccaagaacgacaactcactgggcatttcagttaccggtggggtgaacacaagcgtgagacacggcgggatctacgttaaagcggttattcctcagggcgctgccgaatcagacggccgaatccacaaaggcgacagggtgctcgcggtgaatggagtctctctggagggagcaacacacaaacaggctgtcgaaacgctacgtaacactggccaggtggtgcatctcctcctggaaaagggccagtctcccacttcaaaagagcacgtgccagtaacgccacagtgcacacttagtgaccagaacgcccagggtcagggacctgagaaggtcaagaaaacgactcaggtcaaggattactcattcgtgactgaggagaatacattcgaagtaaagctgtttaagaatagctctggcctggggttcagctttagtcgtgaagacaatttgattcccgagcagatcaacgcgagcattgtgcgggtcaagaagttgttccctggtcagccagctgcagagtcagggaaaattgacgtgggggacgtgatcttaaaagtcaatggcgcctctctgaaggggttatcgcagcaggaggtgatttccgccctgcgtggaacagcccccgaggtgtttctgcttctgtgccgcccaccacctggagtgctgccggagatcgatacggccctgctgacacctctgcagtccccagcgcaggtcttgccaaacagcagtaaggacagttcccagccctcctgtgtggaacagtcaacttcgagcgacgagaacgaaatgtccgacaagagtaagaaacagtgtaaatcacctagtcgccgagactcttattccgatagttctggcagcggtgaggacgatcttgtcacggcccctgctaacatttctaactccacgtggagctccgccctccaccaaacactgtctaatatggtgagtcaggctcaatctcaccacgaggcccccaaaagccaggaagacaccatatgcactatgttttactacccacagaaaatcccgaataagccggagttcgaagattccaacccttcacccttacctcccgatatggcacctgggcaaagctaccagccgcaaagtgaatccgcttcatcatcgtctatggataaataccacatccaccacatctccgaaccaacgagacaagagaactggacaccacttaaaaacgacctggaaaatcacctggaagactttgagctggaagtggagctactaatcactctcattaaatctgagaagggctccctcggatttacagtgaccaaaggaaatcagcgcataggatgctatgtccacgacgtgatacaagaccccgctaagtcagatggcaggctgaagcctggtgaccggttgattaaggtcaacgacactgatgttacaaacatgacacatactgatgctgtcaacctgctcagagctgcatctaagactgtgagattggtgattggccgcgtgctcgagctgccccgcatcccaatgctaccgcatctgctcccagatattacgctgacctgcaataaagaggagctgggcttcagcctgtgcggcgggcatgattcgctttaccaagtggtgtacatcagcgatatcaatcccagatccgtagctgccattgaagggaatctacagctcctggatgtgattcactacgtgaatggagtttctacacaagggatgacccttgaggaggtgaaccgggccttggatatgtcgctgcccagtcttgtgctgaaagctacaaggaacgatttacccgtcgtgccctctagcaagaggagcgctgtgagtgccccgaaaagtactaagggaaatggtagttattccgttggtagctgctctcagccagccctcacaccaaacgacagtttctccaccgtggctggtgaggagatcaacgagatctcctatcccaagggcaagtgtagcacatatcaaatcaaagggtcaccaaacttgactcttcccaaagagtcgtatatacaggaggatgacatatatgacgacagtcaggaagcggaggttatccaaagccttctcgacgtggtggacgaggaagcccagaaccttcttaatgaaaataatgcggcagggtattcctgcggccccggcacactgaagatgaatggcaaattgagcgaagagaggacagaagacaccgactgtgacggtagtcccctgccagaatatttcactgaggccactaagatgaatgggtgcgaagaatactgcgaagaaaaagtgaaatctgagagcctgattcaaaaaccccaggagaagaaaaccgatgatgacgagatcacctggggaaacgacgaacttccaattgagcggacaaatcacgaggactccgacaaagaccattcattcttgacaaacgatgagctggccgtgctccctgtagtgaaagtccttcccagtggaaagtataccggggctaacctgaagtctgtgattcgggtcctgaggggtttactggaccagggaattcccagtaaagaacttgagaacctgcaggagctgaaacctctggatcagtgtctgatcgggcagaccaaggagaatagacgaaaaaatcggtacaagaacatattaccttatgatgccacccgagtccctctgggggatgaaggggggtatattaatgcctcttttattaaaatacctgtggggaaggaagaattcgtctacatcgcttgtcagggccccctgcctactacagtgggagatttctggcaaatgatctgggaacagaagtcaacagtcatagccatgatgacccaagaggtggagggcgaaaagatcaaatgtcagaggtattggccaaacattctgggtaagaccaccatggtatccaatcgtcttcggctggctcttgtgaggatgcagcagctcaagggctttgtggtgcgtgcaatgactcttgaagacatacagactcgggaagtgcggcacatttcccacctgaacttcaccgcctggccggaccatgacactcctagccagccagatgacctccttacttttatatcgtatatgagacacatacataggagcgggcctattataacccattgctcagcaggcattggtcggtcaggcacgctgatctgcattgatgtcgttctcgggctcattagtcaagatctggactttgatatatccgatttggtgaggtgcatgcgcctgcaaagacacgggatggtccaaactgaggaccagtatattttctgttaccaggtgatactgtatgtgctgacccgcctccaggctgaagaggaacagaagcagcagcctcagctgctgaaatag

SEQ ID NO: 326365 - DNA, 6885 bp, Artificial Sequence
  derived and/or modified sequence
atgcacgtgtccctggccgaggccctggaggtgcggggcggccccctgcaggaggaggagatctgggccgtgctgaaccagagcgctgagagcctgcaggagctgttcaggaaggtgtccctggccgaccctgctgccctgggcttcatcatcagcccctggagcctgctgctgctgcccagcggctctgtgtccttcacagatgagaacatcagcaaccaggacctgcgggccttcaccgcccctgaggtgctgcagaaccagagcctgaccagcctgagtgatgtggagaagatccacatctacagcctgggcatgaccctgtactggggcgctgactatgaggtgccccagagccagcccatcaagctgggggaccacctgaacagcatcctgctgggcatgtgtgaagatgtgatctatgcccgggtgtctgtgaggacagtgctggatgcctgcagcgcccacatccggaacagcaactgtgcccccagcttctcctatgtgaagcacctggtgaagctggtgctgggcaacctgtctggaacagaccagctgagctgcaacagcgagcagaagccagacaggagccaggccatccgggaccggctgcggggcaagggcctgcccaccggccgcagcagcaccagtgatgtgctggacatccagaagccacccctgagccaccagaccttcctgaacaagggcctgagcaagtccatgggcttcctgagcatcaaggacacccaggatgagaactacttcaaggacatcctgagtgacaacagcggccgggaggacagcgagaacaccttcagcccctaccagttcaagaccagcggccctgagaagaagcccatccctggcattgatgtgctgagcaagaagaagatctgggccagctccatggacctgctgtgcacagctgaccgggacttcagcagtggagaaacagccacctaccgccgctgccaccctgaggccgtgacagtgaggaccagcaccacccccaggaagaaggaggcccgctacagtgatggcagcatcgccctggacatcttcggcccccagaagatggaccccatctaccacacccgggagctgcccaccagcagcgccatcagcagcgccctggaccgcatccgggagcggcagaagaagctgcaggtgctgcgggaggccatgaatgtggaggagcctgtgcggcgctacaagacctaccatggagatgtgttcagcaccagcagcgagagccccagcatcatcagcagcgagagtgacttccggcaggtgcggcgctctgaggccagcaagagatttgagagcagcagcggcctgcccggggtggatgagaccctgagccagggccagagccagaggcccagccggcagtatgagaccccatttgagggcaacctgatcaaccaggagatcatgctgaagaggcaggaggaggagctgatgcagctgcaggccaagatggccctgcggcagagccggctgagcctgtacccaggggacaccatcaaggcctccatgctggacatcacccgggaccccctgcgggagatcgccctggagacagccatgacccagaggaagctgaggaacttctttggacctgagtttgtgaagatgaccatcgagcccttcatcagcctggacctgcccaggagcatcctgaccaagaagggcaagaatgaagacaacagaaggaaggtgaacatcatgctgctgaatggccagaggctggagctgacctgtgacaccaagaccatctgcaaggatgtgtttgacatggtggtggcccacatcggcctggtggagcaccacctgtttgccctggccaccctgaaggacaatgagtacttctttgtggaccctgacctgaagctgaccaaggtggcccctgagggctggaaggaggagcccaagaagaagaccaaggccaccgtgaacttcaccctcttcttccgcatcaagttcttcatggatgatgtgtccctcatccagcacaccctgacctgccaccagtactacctgcagctgaggaaggacatcctggaggagaggatgcactgtgatgatgagaccagcctgctgctggccagcctggccctgcaggccgagtatggagactaccagcctgaggtgcatggagtgtcctacttcaggatggagcactacctgcctgcccgggtgatggagaagctggacctgagctacatcaaggaggagctgcccaagctgcacaacacctacgtgggcgccagcgagaaggagacagagctggagttcctgaaggtgtgccagaggctgacagaatatggagtgcacttccaccgggtgcaccctgagaagaagagccagacaggcatcctgctgggcgtgtgcagcaagggcgtgctggtgtttgaggtgcacaatggagtgaggaccctggtgctgcgcttcccctggagggagaccaagaagatctccttcagcaagaagaagatcaccctgcagaacaccagtgatggcatcaagcacggcttccagacagacaacagcaagatctgccagtacctgctgcacctgtgcagctaccagcacaagttccagctgcagatgagggcccggcagagcaaccaggatgcccaggacattgatgtgctgcacaagcgctggagcatcgtgagcagccctgagcgggagatcaccctggtgaacctgaagaaggatgccaagtatggcctgggcttccagatcatcggcggggagaagatgggccgcctggacctgggcatcttcatcagctctgtggcccctgggggccctgctgacctggatggctgcctgaagccaggggacaggctcatctctgtgaacagcgtgtccctggagggcgtgagccaccacgccgccatcgagatcctgcagaatgccccagaagatgtgaccctggtgatcagccagcccaaggagaagatcagcaaggtgcccagcacccctgtgcacctgaccaatgagatgaagaactacatgaagaagagcagctacatgcaggacagcgccatcgacagcagcagcaaggaccaccactggagccggggcaccctgcggcacatcagtgaaaattcctttggccccagcggcggcctgcgggagggcagcctgagcagccaggacagcaggacagagagcgccagcctgagccagagccaggtgaatggcttctttgccagccacctgggggaccagacctggcaggagagccagcacggcagccccagccccagcgtcatcagcaaggccacagagaaggagaccttcacagacagcaaccagagcaagaccaagaagccaggcatcagtgatgtgacagactacagcgacagaggagacagcgacatggatgaggccacctacagcagcagccaggaccaccagacccccaagcaggagagcagcagctctgtgaacaccagcaacaagatgaacttcaagaccttcagcagcagcccccccaagccaggggacatctttgaggtggagctggccaagaatgacaacagcctgggcatctctgtgactggaggagtgaacacctctgtgagacatggaggcatctacgtgaaggccgtcatcccccagggcgctgctgagagtgatggccgcatccacaagggggacagagtgctggccgtgaatggagtgtccctggagggcgccacccacaagcaggccgtggagaccctgaggaacacaggccaggtggtgcacctgctgctggagaagggccagagccccaccagcaaggagcacgtgcctgtgaccccccagtgcaccctgagtgaccagaatgcccagggccagggccctgagaaggtgaagaagaccacccaggtgaaggactacagctttgtgacagaggagaacacctttgaggtgaagctgttcaagaacagcagcggcctgggcttctccttcagccgggaggacaacctgatccctgagcagatcaatgccagcatcgtgcgggtgaagaagctgtttcctggccagcctgctgctgagagcggcaagattgatgtgggagatgtgatcctgaaggtgaatggagccagcctgaagggcctgagccagcaggaggtgatcagcgccctgcggggcacagcccctgaggtgttcctgctgctgtgcaggcctcctcctggggtgctgcctgagattgacacagccctgctgacccccctgcagagccctgcccaggtgctgcccaacagcagcaaggacagcagccagcccagctgtgtggagcagagcaccagcagtgatgaaaatgagatgtctgacaagagcaagaagcagtgcaagagccccagcagaagagacagctacagcgacagcagcggcagcggagaagatgacctggtgacagccccagccaacatcagcaacagcacctggagcagcgccctgcaccagaccctgagcaacatggtgtcccaggcccagagccaccacgaggcccccaagagccaggaggacaccatctgcaccatgttctactacccccagaagatccccaacaagccagagtttgaggacagcaaccccagccccctgcccccagacatggcccctggccagagctaccagccccagagcgagagcgccagcagcagctccatggacaagtaccacatccaccacatcagcgagcccacccggcaggagaactggacccccctgaagaatgacctggagaaccacctggaggactttgagctggaggtggagctgctgatcaccctcatcaagtctgagaagggcagcctgggcttcaccgtgaccaagggcaaccagagaattggctgctacgtgcatgatgtgatccaggaccctgccaagagtgatggccgcctgaagccaggggacaggctcatcaaggtgaatgacacagatgtgaccaacatgacccacacagatgctgtgaacctgctgcgggccgccagcaagacagtgcggctggtgattggccgggtgctggagctgccccgcatccccatgctgccccacctgctgcctgacatcaccctgacctgcaacaaggaggagctgggcttcagcctgtgtggcggccatgacagcctgtaccaggtggtgtacatcagtgacatcaaccccaggtctgtggccgccatcgagggcaacctgcagctgctggatgtgatccactacgtgaatggagtgtccacccagggcatgaccctggaggaggtgaacagagccctggacatgagcctgcccagcctggtgctgaaggccaccagaaatgacctgcctgtggtgcccagcagcaagaggtctgctgtgtctgcccccaagagcaccaagggaaatggcagctacagcgtgggcagctgcagccagcctgccctgaccccaaatgacagcttcagcacagtggccggggaggagatcaatgagatctcctaccccaagggcaagtgcagcacctaccagatcaagggcagccccaacctgaccctgcccaaggagagctacatccaggaggatgacatctatgatgacagccaggaggccgaggtgatccagagcctgctggatgtggtggatgaggaggcccagaacctgctgaatgaaaataatgctgctggctacagctgtggccctggcaccctgaagatgaatggcaagctgtctgaggagaggacagaggacacagactgtgatggcagccccctgcctgagtacttcacagaggccaccaagatgaatggctgtgaggagtactgtgaggagaaggtgaagtctgagagcctcatccagaagccccaggagaagaagacagatgatgatgagatcacctggggcaatgatgagctgcccattgaaagaaccaaccatgaagattctgacaaggaccacagcttcctgaccaatgatgagctggccgtgctgcctgtggtgaaggtgctgcccagcggcaagtacaccggggccaacctgaagagcgtcatccgggtgctgcggggcctgctggaccagggcatccccagcaaggagctggagaacctgcaggagctgaagcccctggaccagtgcctgattggccagaccaaggaaaatagaaggaagaaccgctacaagaacatcctgccctatgatgccaccagggtgcccctgggagatgaaggaggctacatcaatgccagcttcatcaagatccctgtgggcaaggaggagtttgtgtacatcgcctgccagggccccctgcccaccaccgtgggggacttctggcagatgatctgggagcagaagagcaccgtcatcgccatgatgacccaggaggtggagggggagaagatcaagtgccagcgctactggcccaacatcctgggcaagaccaccatggtgagcaaccggctgcggctggccctggtgaggatgcagcagctgaagggctttgtggtgcgggccatgaccctggaggacatccagacccgggaggtgcgccacatcagccacctgaacttcaccgcctggccagaccatgacacccccagccagccagatgacctgctgaccttcatctcctacatgaggcacatccacaggagcggccccatcatcacccactgcagcgctggcatcggccgcagcggcaccctcatctgcattgatgtggtgctgggcctcatcagccaggacctggactttgacatcagtgacctggtgcgctgcatgaggctgcagagacatggcatggtgcagacagaggaccagtacatcttctgctaccaggtgatcctgtatgtgctgacccggctgcaggccgaggaggagcagaagcagcagccccagctgctgaagtag

SEQ ID NO: 326366 - DNA, 6885 bp, Artificial Sequence
  derived and/or modified sequence
atgcacgtgagcctggccgaggccctggaggtgcggggcggccccctccaggaggaggagatttgggccgtcctgaaccaatccgctgagagtttacaggaacttttcagaaaggtgtcgctcgcagacccggccgcactaggattcatcatttcgccatggagtcttttgctactccctagcgggtccgtgagtttcaccgacgagaacatctccaaccaggatctcagggccttcactgcccccgaggtgctgcagaatcagtccctcacctccctttctgacgtggaaaagatacatatttattcccttgggatgaccctgtactggggcgctgattacgaggtgcctcaatcccagccgatcaaactgggggatcacctcaactctatcctgcttggaatgtgcgaagacgtcatctatgcaagagttagtgtccgaacggttttggacgcatgttcggcccacattaggaactccaattgcgccccttctttttcctatgtcaaacacctagtgaaactggtcctgggcaatctgtccggtaccgaccagctgtcctgtaattccgaacaaaagcccgaccgaagtcaggcaatacgcgatagactgaggggaaaaggccttcctaccggaaggtcttctacatcggatgtcttggacatccaaaagccccccctatcccaccagacgttcctgaataaaggactgtcaaagtctatggggtttctgtcaattaaagatacccaagacgaaaattatttcaaggatatcctgagtgataatagcgggagggaggattctgagaatactttctcgccatatcagtttaaaacgtcaggtcctgagaagaagcccataccagggatcgatgttctgtccaaaaaaaagatttgggcttcttcaatggatctgttgtgtactgccgaccgcgatttcagctccggcgaaaccgctacttaccgaagatgccatcctgaggcggttactgttaggacctccacaacccctagaaaaaaggaggcgcggtactcagacgggtcgatcgccctggatatttttggcccccagaaaatggatccaatttaccacacaagagaactgcctacctctagcgctatctctagcgccttagatcggatcagagagagacagaagaagctccaagtgctgcgagaagctatgaatgtggaagagcccgtgagacggtataaaacgtatcacggtgatgtattcagcacctctagcgagtctcccagtatcatctcctctgaatctgattttagacaggtcagacgctcagaggcgtccaagcggtttgagagctcatccggactgcccggggtggacgagactctctcccagggccagagccaacgccccagtcgtcagtacgagacgccctttgaggggaatctaatcaaccaggaaattatgctgaagagacaggaagaagaacttatgcagttgcaggcaaaaatggcgttgcgccagagtaggttatcactctaccccggagataccatcaaggcctcaatgctggacataaccagggaccccctcagggaaatagccctggaaactgccatgacgcagcggaagctgcggaacttcttcggtcctgagtttgtgaagatgacaattgagccgtttattagtctggacctccccagatcgatcctaaccaagaagggcaaaaacgaagacaatcggaggaaggtcaatataatgttattaaatggccagcggcttgaattaacctgcgacaccaagaccatttgtaaagatgtctttgacatggtggtagcccatatcggtttggtagaacatcatctcttcgccctcgccaccctcaaggacaacgaatacttttttgtcgaccccgatttaaagctcaccaaggtggccccagaggggtggaaggaggaacccaaaaaaaagactaaggcgaccgtgaatttcactcttttctttagaattaagtttttcatggatgatgtcagcctgatacagcatactctgacttgccatcagtactacttacagctacgaaaagatatcctggaggagcgcatgcactgtgacgatgagacatcgttgcttctggcttctctggctttgcaagccgaatatggtgattatcaacccgaggtgcacggagtcagctacttcagaatggagcactacctccccgctagggtgatggaaaagctggatctctcttacatcaaggaggagttgcctaagcttcataacacatatgtcggggctagtgagaaggagacagagctggaatttctgaaagtgtgccagcgcctgacagagtacggtgtgcactttcaccgggtgcacccagaaaaaaagtcacagacaggcattctgctcggagtctgcagcaagggtgtgctcgtgttcgaagtccacaacggggtgcgtaccctggtgctaagattcccctggagagagacaaaaaaaattagtttttctaaaaagaaaattaccctccaaaataccagtgatggaattaaacacggcttccagactgataattcaaaaatctgtcagtacctccttcacctctgttcctaccagcacaaattccagctacaaatgcgcgcacgacagagcaaccaggacgctcaggacatcgacgtgctacataaacgctggagcatcgtgtcctctcccgaaagggagatcactctggtgaacctcaaaaaggacgctaagtacggacttgggtttcagattattggtggggagaaaatgggcagactcgacttgggaatcttcatttcctctgtggctccgggagggcccgctgatctggacggctgtctgaagccaggtgatcgcttaattagtgtaaacagtgtcagcctggaaggagtatcacatcatgctgcgatcgagatcctccagaatgcaccagaggacgtgacattagtgatcagccagccaaaggaaaagatttcaaaggtgccctctacaccggtgcatttaactaatgaaatgaaaaactacatgaagaagagcagctatatgcaggattcggcaatcgacagcagttccaaagatcaccattggtctaggggcactctgcgccacatctccgaaaactcattcggccccagcggcgggctgagggagggaagcctttcttcccaggactccaggacggagtccgcatcattgtcccaatcccaagttaatggattcttcgccagccacctgggcgaccagacctggcaggagtcccaacacggcagccccagtccatcagtgatctctaaggcaaccgaaaaggagacctttacagacagcaatcagtctaaaacgaaaaagcctggcatcagcgacgttaccgattacagcgacaggggcgattcagatatggacgaagccacttactcatcctctcaggaccatcagacgcctaaacaggagagcagttcttctgtcaacacaagcaataaaatgaacttcaaaactttcagttcgtccccacctaaacccggagacatttttgaagttgagcttgcgaagaacgacaatagcttaggcatttcagtgaccggcggagtgaacacctcagtgcgccatggcggtatttatgtgaaggcagtcattccacagggagccgccgaatctgacgggcgcattcacaaaggcgaccgggttttagctgtgaatggcgtgagcctagaaggagccacccataaacaggccgtcgagacgctgaggaataccggacaggtggtgcatttgttgttagaaaagggccagtccccaacaagcaaagagcacgttcccgtgaccccccagtgcaccctgtcagatcagaacgcccagggccaaggcccagaaaaagtgaaaaaaacaacacaggtgaaagactattcattcgtgactgaggagaacacattcgaagtcaaattgttcaagaattccagcggcctcggcttctcattctcgagagaagataatttaatccctgagcagataaatgcctctatcgtacgtgtcaaaaagctctttcccggccagccagcagccgaatctggtaagattgacgtaggcgacgtcatcctgaaagttaatggagccagccttaaaggtctgagccagcaagaggtgatcagtgctttacgaggcaccgcaccagaggttttcttgcttctgtgtaggcccccccctggggtgctccccgagattgacacggcactgctgaccccactgcagtcacccgcccaggtgttacccaactcgagcaaggactcttcccaacccagctgtgtcgaacaatctacaagctcagacgagaacgagatgtcagataaatccaaaaaacagtgtaaatctccctcacggcgcgacagctacagcgattcttcgggaagcggcgaagatgaccttgtgactgctccagctaacatttccaatagcacctggtcttctgctctgcatcagaccctgagcaatatggtgtctcaggctcaatcccatcacgaagcaccaaagagccaggaagacacaatctgtacgatgttctactatcctcagaagattcccaataaacccgagttcgaggactctaatccatctcctttgccacccgacatggctcctggacagtcttaccaaccacagagtgagagcgcctcgtcaagtagtatggataaataccatatccatcacatttcagaaccaacgcggcaagagaattggactcctctcaagaacgacctggagaatcatcttgaggattttgagttagaggtcgagctcctcatcactctgatcaaaagtgagaaaggctccctgggtttcactgttaccaagggaaaccagcggattgggtgctatgtacatgatgtcatccaagacccggctaaatcagacggacggctcaagcctggcgaccgcctgatcaaggttaacgataccgatgtaacaaacatgacccataccgacgccgtgaatctcctccgcgccgctagtaagaccgtaaggctggtgatcggccgcgttctggaactcccacggattcccatgctgccccatcttttgccggatatcacccttacttgtaataaggaggagctgggcttcagtctgtgcggcgggcatgactctctgtaccaagtcgtttatatcagcgacattaaccctaggagtgtcgccgccatagaggggaacctgcagctcctagatgtgatccactacgtgaacggcgttagcacacaggggatgaccctcgaggaagtcaatagagcccttgacatgagccttccatccctagtcctgaaggcaactaggaatgaccttcctgtggttccatctagcaagcgctccgccgtcagtgccccgaaaagtactaagggaaacggatcatactcagtcgggagttgctcccaaccagccttaacgccaaatgacagcttttcaactgtcgcaggggaagagattaacgaaatcagctaccccaagggaaagtgctctacctatcagatcaagggaagtcccaatctgaccttacccaaggagagctatattcaagaggacgatatctacgacgactctcaggaagccgaggtgatccaatcactgctggacgttgtagatgaagaagcccaaaatctcctgaacgagaataacgctgcaggttatagttgtggacccggtacgttgaaaatgaatgggaaattgtcagaagaacggaccgaagataccgactgtgatgggtctcctctgccggaatacttcacagaagccaccaagatgaacggatgtgaagagtactgcgaggagaaggttaaatcggaatccctgattcaaaagccgcaggaaaaaaagaccgatgacgacgagattacatggggtaacgacgagcttcctatcgagcgcaccaatcatgaggacagtgataaggatcattcattcttgacgaacgatgaattggccgtgcttcccgtggtcaaagttctccctagtggaaagtacaccggagctaacctgaagtccgttattagggtgctgcgggggctgttggaccagggaataccctccaaagaactggaaaacctacaagagctgaagcccctggaccagtgcctaattggacagactaaagaaaacaggagaaaaaacagatataaaaacatcttgccctatgacgccacacgggtgccacttggagacgaaggaggatacattaacgcaagttttatcaagattcccgtggggaaagaagagtttgtctacatagcctgtcaaggccccctgcccactactgtgggagatttttggcagatgatttgggagcagaaatccactgtgatcgccatgatgacccaagaggtggagggagagaagatcaagtgtcagcgctattggccaaacattctaggtaagactactatggtgagcaatcgtctcagattagcactggttagaatgcagcagctcaaagggtttgtagttagggctatgactctagaagatatccagacacgtgaggttagacacatttctcaccttaatttcactgcatggccagaccatgatactccctcacaacccgacgacctgctgacctttatctcgtacatgaggcacattcatagaagtggtcctattatcacgcactgcagtgcggggatcggcaggtccggtactctgatttgcattgacgttgtgctaggcctgatcagtcaggatctggacttcgacatctcagacttagtgcgatgcatgagacttcagcgccatggtatggtccagacagaggatcaatacatattttgctatcaagtgatcctgtacgtcctcactcgcctacaggcagaggaggagcagaagcagcaaccacagctgttaaagtag

SEQ ID NO: 326367 - DNA, 6884 bp, Artificial Sequence
  derived and/or modified sequence
atgcacgtttctctggccgaggccctggaagtgcggggtggcccactgcaggaagaagagatctgggcagtccttaaccaatcagccgagagccttcaagagctgttcagaaaggtcagtttagctgaccccgctgctctgggtttcattatctccccttggtccctgctgctcctgccatcaggctccgtatctttcaccgacgagaatatttcaaatcaggatctgagagccttcacagctcccgaggtgctacagaaccagagcttaaccagcttatcggacgtggagaagattcatatctactcgctggggatgacactttattggggagcggactacgaagttcctcagtcccagcctataaaactgggcgaccaccttaattctatactcctcgggatgtgcgaggatgtcatctatgcaagggtgtccgtgcgtactgtgctggatgcatgtagtgcccacatccggaactctaactgtgctccctcattctcatacgtcaaacatcttgtgaagcttgtgctgggcaatttaagcggtacagaccagctgagttgcaattccgaacagaaaccggacagatcccaggccatccgcgaccgactgcggggtaagggcctcccaactgggagatctagtacctcagacgttctggacatccaaaagcctccactcagccatcagaccttcttaaataagggattgtctaagtcaatggggttcctctcaattaaggatacccaagacgagaactattttaaagacattttgtcggacaacagcggcagagaggattctgagaataccttttccccttaccaattcaagacttctgggcctgaaaaaaaacccatacccggaatagatgtgctgagcaagaagaaaatctgggctagttctatggacctgctttgcaccgctgacagagatttcagttccggagagaccgcaacttatcgcaggtgtcatcctgaggccgtcactgtgcgcacctctacaactccaagaaaaaaggaagcaagatattccgatggctccatcgcgcttgatatcttcgggcctcagaaaatggaccctatttaccacacacgagagctgccaacatcatctgctataagctctgccttggaccgcatcagagaaaggcagaagaaactgcaagtcctgagggaagccatgaatgttgaggagcctgttcgaagatataagacataccatggtgatgtcttttccaccagctctgaatccccttccataattagctctgagagtgattttcgacaagtgaggcgctccgaggcctctaagcgttttgaatcatcttctggccttcccggagtagacgagacgttgagtcagggtcagagtcagagaccctcacgccagtatgagacccccttcgaagggaacttgattaaccaggaaatcatgctcaagcggcaggaagaggagttgatgcagcttcaggcaaagatggcactacgtcaaagtcgactcagcctgtatccgggagataccatcaaagcctcaatgcttgacattacccgggaccctctgcgggagatcgctttagaaacagctatgacgcaacgcaaactgagaaatttcttcggcccagagttcgtgaagatgacaatcgaacctttcatttctctcgatctgccaaggagtatccttacgaagaagggcaagaatgaagataaccgtaggaaagtgaatatcatgctgctgaacggtcagcgacttgagctcacttgcgacacaaagactatctgcaaggacgtgttcgatatggtggtagctcacataggacttgtggagcaccacttgtttgccctggccacactgaaagacaacgaatatttttttgtcgatcccgacctgaagttgactaaggttgctcctgaaggatggaaagaggagcccaaaaaaaagaccaaagctacagtgaactttaccctatttttccgcatcaagttttttatggacgacgtctccctgatccagcatactctgacatgccaccaatattatctacagctgcgtaaagacattctggaagaacggatgcactgcgacgatgagacaagcctgctcctggcaagcctggccctgcaggctgaatacggagactatcagcccgaggttcacggtgtgagctacttcagaatggagcactatctgcccgcacgtgtcatggagaagctggacctctcctacataaaggaagagctgcctaaactgcacaatacatatgtaggggcatctgagaaagagaccgagctcgagtttctgaaggtttgtcaaagactgaccgaatatggcgtgcacttccatcgcgtgcaccctgaaaaaaagagccagaccggcatcctccttggcgtgtgttctaaaggcgttctggtgtttgaggtgcataatggtgtgagaacacttgtcctccggtttccttggcgggagacgaagaaaatatcattctccaagaagaaaataactttacagaacacaagtgacgggatcaagcatgggttccagacagataacagtaagatctgtcagtacttactgcacctgtgctcctaccagcacaagttccagctacagatgagagctcgtcagtcaaaccaggatgctcaggacatcgacgtcttacataagcggtggtccattgtgagctccccagaacgcgaaatcactcttgtgaatctgaaaaaggatgccaagtacggactcggctttcaaattattggcggtgagaagatgggcagactggacctgggaatctttatctcaagcgtggccccagggggacctgctgatttagatggctgtctgaaacctggagatagactcatttccgtgaactccgtgtcattggagggcgtcagtcatcatgccgcaatcgagatcctccagaatgcacccgaagacgtcactctggtgatctcccagcctaaggagaagatttctaaggtcccgtctactcccgtgcacctgaccaacgaaatgaagaattacatgaagaaaagttcctatatgcaggattctgcaatcgactcctcctccaaggaccatcactggtctcggggaacgctgaggcacatttcagagaatagctttggcccttcaggcggtcttcgagagggaagcctgtccagccaggactccaggacagaatccgcctcgctgtctcagagtcaggttaacgggttctttgcatctcacctgggggaccagacatggcaagagtcgcaacatgggtccccctcacctagcgtaatctccaaagcgacagagaaggagacctttacagatagtaatcagtccaagactaagaaaccaggcatttctgacgtaacggattattcagaccggggagactctgacatggatgaggccacctacagttcctcccaagaccaccagactcccaaacaagagtcatcctcctcagtgaacacctctaacaaaatgaacttcaagacattctcttcaagcccgccaaagccaggggacattttcgaagtggagctcgccaaaaacgataacagtttgggaatctctgttactggtggcgtcaataccagtgtgcgtcacgggggtatctatgttaaggctgttatcccacagggagcagccgaaagtgatggcagaatccacaagggtgatagggttctcgcagtgaatggagtttcgctggagggagcaacacacaagcaagctgtagagacactgaggaatactggtcaagttgtgcatttacttcttgagaagggacagagccccacaagcaaagagcatgtgcctgttacaccccagtgcaccttaagcgaccagaatgcccagggacagggccctgagaaagtgaaaaagactacccaagttaaggactactcatttgtgaccgaggagaacaccttcgaggttaagctcttcaagaattctagcggcttaggcttttcattttctagggaagacaacctgatcccagaacagatcaacgcgtcgatcgttagggtgaagaagctctttcctggtcaacccgcagcggaaagtgggaaaatagacgttggcgacgtgatcctcaaggttaacggagctagcctaaaaggcttgagccagcaggaggtgatcagcgccctcagagggaccgcgcctgaggtattcttgcttctatgcagaccgccaccaggcgttcttcccgagatcgacactgctctgttgacaccgctgcaaagcccagctcaggtgctccccaactcgtccaaggactcaagtcagccttcctgtgtggaacagtctactagtagtgatgagaatgaaatgtcggataaatctaagaagcagtgcaagagtccttcccgtcgggactcttattccgattcttcaggttccggggaggatgacttagttaccgcacctgcgaacatcagcaacagcacgtggagctcagccctgcatcagactctctccaacatggtttctcaagcccagtctcaccatgaagctcctaaatcacaggaggataccatctgcactatgttttactacccccaaaagattcctaacaagcccgaattcgaagattcaaaccccagccccctccccccagatatggcacccggtcagtcgtatcagccgcaatccgagtcagccagcagttcaagtatggataagtaccacatacatcacatttctgagccaacacgccaggaaaactggacccccctgaaaaacgatttggagaatcacctggaagactttgagcttgaagtggagttattgataaccttaataaagtcagagaaaggctccctcgggttcaccgtaactaagggcaatcagcggatcgggtgttatgtgcacgatgtgattcaggatcccgctaaatctgacggtcgcctcaagcctggagatcggctgatcaaggtcaacgataccgatgtcaccaacatgacccatactgacgctgtaaacctcctgcgtgccgctagtaagaccgttaggttagtaatcggccgagtcctagaactgccacggatcccgatgctccctcatcttctgcctgatataaccctgacgtgcaataaggaggaattgggcttctccctgtgtgggggtcacgactccctgtaccaggtggtttacatctctgacattaacccaaggtccgtcgccgctatcgagggcaatctgcagttgttagacgtcatacattacgttaacggcgtttccactcaaggcatgaccctcgaggaggtgaacagggcattagatatgagccttccaagtctggtcttgaaagccacaaggaatgacctgcctgttgtgccatcctctaagagaagcgcagtctccgcccctaaaagtacaaaggggaacggttcttattcagtgggatcttgctctcagcctgctcttacccctaatgactcgttttcaacagttgcaggggaggaaatcaacgagatctcttatccaaaaggcaaatgttcgacatatcagattaagggtagtccgaacctcactctccctaaggaatcatacatacaagaggacgacatttacgacgattctcaggaagcagaagtcatccagtccctgctggacgttgttgatgaagaggctcaaaatctgctcaacgagaataacgcggcaggttactcatgcgggccaggaacactgaagatgaatggcaagctgagtgaggagcgaactgaggatactgattgtgatgggtcaccgcttcctgagtatttcacggaagccaccaaaatgaacggatgtgaagaatattgtgaggaaaaagttaagtcagagtcacttatacagaagcctcaagaaaagaagacagatgacgacgagatcacatggggcaacgatgagctccccatagagaggaccaatcacgaggacagcgataaagatcactcctttctgactaacgacgaactcgccgtcctaccagtggtaaaagtgttgcccagtggaaaatacaccggcgcaaacttgaaaagtgtaatccgggttctgcggggacttctcgaccagggtattcccagtaaagaactggagaaccttcaggaactgaaacccttggatcagtgccttatcggacagacgaaggagaaccggagaaagaatcgttacaaaaatatcctgccttacgacgcgacccgcgttccactcggagatgagggcggatatattaacgcttcttttatcaaaattcctgttggaaaggaagagttcgtgtacatagcatgccaaggtcccctacccacgaccgtaggagatttctggcaaatgatctgggagcagaagtctacggtcatcgcaatgatgactcaggaagtggagggggaaaaaataaagtgtcagagatactggcccaacatcctggggaaaacgacgatggtcagcaacagattacgccttgcgttggtgagaatgcagcaattaaagggattcgttgtgcgtgccatgactttggaagacattcagacaagggaagttaggcatatcagccacctgaattttacggcttggccagaccatgataccccatcccagcccgatgaccttctgaccttcattagctacatgcggcatatccataggagtgggccaatcattacacattgctctgcgggaattggcaggtccggcactctaatatgcattgatgtggtgctcgggctcatctcacaggacctagactttgacattagcgatctggtccgctgcatgcggctccaacggcacggtatggtgcagactgaagatcagtacattttctgctaccaggtgattctttacgtgctgactagactgcaagccgaggaggaacaaaagcagcagccccagctgttgaagta

SEQ ID NO: 326368 - DNA, 7546 bp, Artificial Sequence
  derived and/or modified sequence
cgtccctgcagccctcgcccggcgctccagtagcaggacccggtctcgggaccagccggtaatatgcacgtgtcactagctgaggccctggaggttcggggtggaccacttcaggaggaagaaatatgggctgtattaaatcaaagtgctgaaagtctccaagaattattcagaaaagtaagcctagctgatcctgctgcccttggcttcatcatttctccatggtctctgctgttgctgccatctggtagtgtgtcatttacagatgaaaatatttccaatcaggatcttcgagcattcactgcaccagaggttcttcaaaatcagtcactaacttctctctcagatgttgaaaagatccacatttattctcttggaatgacactgtattggggggctgattatgaagtgcctcagagccaacctattaagcttggagatcatctcaacagcatactgcttggaatgtgtgaggatgttatttacgctcgagtttctgttcggactgtgctggatgcttgcagtgcccacattaggaatagcaattgtgcaccctcattttcctacgtgaaacacttggtaaaactggttctgggaaatctttctgggacagatcagctttcctgtaacagtgaacaaaagcctgatcgaagccaggctattcgagatcgattgcgaggaaaaggattaccaacaggaagaagctctacttctgatgtactagacatacaaaagcctccactctctcatcagacctttcttaacaaagggcttagtaaatctatgggatttctgtccatcaaagatacacaagatgagaattatttcaaggacattttatcagataattctggacgtgaagattctgaaaatacattctccccttaccagttcaaaactagtggcccagaaaaaaaacccatccctggcattgatgtgctttctaagaagaagatctgggcttcatccatggacttgctttgtacagctgacagagacttctcttcaggagagactgccacatatcgtcgttgtcaccctgaggcagtaacagtgcggacttcaactactcctagaaaaaaggaggcaagatactcagatggaagtatagccttggatatctttggccctcagaaaatggatccaatatatcacactcgagaattgcccacctcctcagcaatatcaagtgctttggaccgaatccgagagagacaaaagaaacttcaggttctgagggaagccatgaatgtagaagaaccagttcgaagatacaaaacttatcatggtgatgtctttagtacctccagtgaaagtccatctattatttcctctgaatcagatttcagacaagtgagaagaagtgaagcctcaaagaggtttgaatccagcagtggtctcccaggggtagatgaaaccttaagtcaaggccagtcacagagaccgagcagacaatatgaaacaccctttgaaggcaacttaattaatcaagagatcatgctaaaacggcaagaggaagaactgatgcagctacaagccaaaatggcccttagacagtctcggttgagcctatatccaggagacacaatcaaagcgtccatgcttgacatcaccagggatccgttaagagaaattgccctagaaacagccatgactcaaagaaaactgaggaatttctttggccctgagtttgtgaaaatgacaattgaaccatttatatctttggatttgccacggtctattcttactaagaaagggaagaatgaggataaccgaaggaaagtaaacataatgcttctgaacgggcaaagactggaactgacctgtgataccaaaactatatgtaaagatgtgtttgatatggttgtggcacatattggcttagtagagcatcatttgtttgctttagctaccctcaaagataatgaatatttctttgttgatcctgacttaaaattaaccaaagtggccccagagggatggaaagaagaaccaaagaaaaagaccaaagccactgttaattttactttgtttttcagaattaaattttttatggatgatgttagtctaatacaacatactctgacgtgtcatcagtattaccttcagcttcgaaaagatattttggaggaaaggatgcactgtgatgatgagacttccttattgctggcatccttggctctccaggctgagtatggagattatcaaccagaggttcatggtgtgtcttactttagaatggagcactatttgcccgccagagtgatggagaaacttgatttatcctatatcaaagaagagttacccaaattgcataatacctatgtgggagcttctgaaaaagagacagagttagaatttttaaaggtctgccaaagactgacagaatatggagttcattttcaccgagtgcaccctgagaagaagtcacaaacaggaatattgcttggagtctgttctaaaggtgtccttgtgtttgaagttcacaatggagtgcgcacattggtccttcgctttccatggagggaaaccaagaaaatatctttttctaaaaagaaaatcacattgcaaaatacatcagatggaataaaacatggcttccagacagacaacagtaagatatgccagtacctgctgcacctctgctcttaccagcataagttccagctacagatgagagcaagacagagcaaccaagatgcccaagatattgatgtgctacacaaaagatggagcatagtatcttcaccagaaagggagatcaccttagtgaacctgaaaaaagatgcaaagtatggcttgggatttcaaattattggtggggagaagatgggaagactggacctaggcatatttatcagttcagttgcccctggaggaccagctgacttggatggatgcttgaagccaggagaccgtttgatatctgtgaatagtgtgagtctggagggagtcagccaccatgctgcaattgaaattttgcaaaatgcacctgaagatgtgacacttgttatctctcagccaaaagaaaagatatccaaagtgccttctactcctgtgcatctcaccaatgagatgaaaaactacatgaagaaatcttcctacatgcaagacagtgctatagattcttcttccaaggatcaccactggtcacgtggtaccctgaggcacatctcggagaactcctttgggccatctgggggcctgcgggaaggaagcctgagttctcaagattccaggactgagagtgccagcttgtctcaaagccaggtcaatggtttctttgccagccatttaggtgaccaaacctggcaggaatcacagcatggcagcccttccccatctgtaatatccaaagccaccgagaaagagactttcactgatagtaaccaaagcaaaactaaaaagccaggcatttctgatgtaactgattactcagaccgtggagattcagacatggatgaagccacttactccagcagtcaggatcatcaaacaccaaaacaggaatcttcctcttcagtgaatacatccaacaagatgaattttaaaactttttcttcatcacctcctaagcctggagatatctttgaggttgaactggctaaaaatgataacagcttggggataagtgtcacgggaggtgtgaatacgagtgtcagacatggtggcatttatgtgaaagctgttattccccagggagcagcagagtctgatggtagaattcacaaaggtgatcgcgtcctagctgtcaatggagttagtctagaaggagccacccataagcaagctgtggaaacactgagaaatacaggacaggtggttcatctgttattagaaaagggacaatctccaacatctaaagaacatgtcccggtaaccccacagtgtaccctttcagatcagaatgcccaaggtcaaggcccagaaaaagtgaagaaaacaactcaggtcaaagactacagctttgtcactgaagaaaatacatttgaggtaaaattatttaaaaatagctcaggtctaggattcagtttttctcgagaagataatcttataccggagcaaattaatgccagcatagtaagggttaaaaagctctttcctggacagccagcagcagaaagtggaaaaattgatgtaggagatgttatcttgaaagtgaatggagcctctttgaaaggactatctcagcaggaagtcatatctgctctcaggggaactgctccagaagtattcttgcttctctgcagacctccacctggtgtgctaccggaaattgatactgcgcttttgaccccacttcagtctccagcacaagtacttccaaacagcagtaaagactcttctcagccatcatgtgtggagcaaagcaccagctcagatgaaaatgaaatgtcagacaaaagcaaaaaacagtgcaagtccccatccagaagagacagttacagtgacagcagtgggagtggagaagatgacttagtgacagctccagcaaacatatcaaattcgacctggagttcagctttgcatcagactctaagcaacatggtatcacaggcacagagtcatcatgaagcacccaagagtcaagaagataccatttgtaccatgttttactatcctcagaaaattcccaataaaccagagtttgaggacagtaatccttcccctctaccaccggatatggctcctgggcagagttatcaaccccaatcagaatctgcttcctctagttcgatggataagtatcatatacatcacatttctgaaccaactagacaagaaaactggacacctttgaaaaatgacttggaaaatcaccttgaagactttgaactggaagtagaactcctcattaccctaattaaatcagaaaaaggaagcctgggttttacagtaaccaaaggcaatcagagaattggttgttatgttcatgatgtcatacaggatccagccaaaagtgatggaaggctaaaacctggggaccggctcataaaggttaatgatacagatgttactaatatgactcatacagatgcagttaatctgctccgggctgcatccaaaacagtcagattagttattggacgagttctagaattacccagaataccaatgttgcctcatttgctaccggacataacactaacgtgcaacaaagaggagttgggtttttccttatgtggaggtcatgacagcctttatcaagtggtatatattagtgatattaatccaaggtccgtcgcagccattgagggtaatctccagctattagatgtcatccattatgtgaacggagtcagcacacaaggaatgaccttggaggaagttaacagagcattagacatgtcacttccttcattggtattgaaagcaacaagaaatgatcttccagtggtccccagctcaaagaggtctgctgtttcagctccaaagtcaaccaaaggcaatggttcctacagtgtggggtcttgcagccagcctgccctcactcctaatgattcattctccacggttgctggggaagaaataaatgaaatatcgtaccccaaaggaaaatgttctacttatcagataaagggatcaccaaacttgactctgcccaaagaatcttatatacaagaagatgacatttatgatgattcccaagaagctgaagttatccagtctctgctggatgttgtggatgaggaagcccagaatcttttaaacgaaaataatgcagcaggatactcctgtggtccaggtacattaaagatgaatgggaagttatcagaagagagaacagaagatacagactgcgatggttcacctttacctgagtattttactgaggccaccaaaatgaatggctgtgaagaatattgtgaagaaaaagtaaaaagtgaaagcttaattcagaagccacaagaaaagaagactgatgatgatgaaataacatggggaaatgatgagttgccaatagagagaacaaaccatgaagattctgataaagatcattcctttctgacaaacgatgagctcgctgtactccctgtcgtcaaagtgcttccctctggtaaatacacgggtgccaacttaaaatcagtcattcgagtcctgcggggtttgctagatcaaggaattccttctaaggagctggagaatcttcaagaattaaaacctttggatcagtgtctaattgggcaaactaaggaaaacagaaggaagaacagatataaaaatatacttccctatgatgctacaagagtgcctcttggagatgaaggtggctatatcaatgccagcttcattaagataccagttgggaaagaagagttcgtttacattgcctgccaaggaccactgcctacaactgttggagacttctggcagatgatttgggagcaaaaatccacagtgatagccatgatgactcaagaagtagaaggagaaaaaatcaaatgccagcgctattggcccaacatcctaggcaaaacaacaatggtcagcaacagacttcgactggctcttgtgagaatgcagcagctgaagggctttgtggtgagggcaatgacccttgaagatattcagaccagagaggtgcgccatatttctcatctgaatttcactgcctggccagaccatgatacaccttctcaaccagatgatctgcttacttttatctcctacatgagacacatccacagatcaggcccaatcattacgcactgcagtgctggcattggacgttcagggaccctgatttgcatagatgtggttctgggattaatcagtcaggatcttgattttgacatctctgatttggtgcgctgcatgagactacaaagacacggaatggttcagacagaggatcaatatattttctgctatcaagtcatcctttatgtcctgacacgtcttcaagcagaagaagagcaaaaacagcagcctcagcttctgaagtgacatgaaaagagcctctggatgcatttccatttctctccttaacctccagcagactcctgctctctatccaaaataaagatcacagagcagcaagttcatacaacatgcatgttctcctctatcttagaggggtattcttcttgaaaataaaaaatattgaaatgctgtatttttacagctactttaacctatgataattatttacaaaattttaacactaaccaaacaatgcagatcttagggatgattaaaggcagcatttgatgatagcagacattgttacaaggacatggtgagtctatttttaatgcaccaatcttgtttatagcaaaaatgttttccaatattttaataaagtagttattttataggggatacttgaaaccagtatttaagctttaaatgacagtaatattggcatagaaaaaagtagcaaatgtttactgtatcaatttctaatgtttactatatagaatttcctgtaatatatttatatactttttcatgaaaatggagttatcagttatctgtttgttactgcatcatctgtttgtaatcattatctcactttgtaaataaaaacacaccttaaaacatg

SEQ ID NO: 326369 - DNA, 6885 bp, Artificial Sequence
  derived and/or modified sequence
atgcacgtgagcctggccgaggccctggaggtgagaggcggccccctgcaggaggaggagatctgggccgtgctgaaccagagcgccgagagcctgcaggagctgttcagaaaggtgagcctggccgaccccgccgccctgggcttcatcatcagcccctggagcctgctgctgctgcccagcggcagcgtgagcttcaccgacgagaacatcagcaaccaggacctgagagccttcaccgcccccgaggtgctgcagaaccagagcctgaccagcctgagcgacgtggagaagatccacatctacagcctgggcatgaccctgtactggggcgccgactacgaggtgccccagagccagcccatcaagctgggcgaccacctgaacagcatcctgctgggcatgtgcgaggacgtgatctacgccagagtgagcgtgagaaccgtgctggacgcctgcagcgcccacatcagaaacagcaactgcgcccccagcttcagctacgtgaagcacctggtgaagctggtgctgggcaacctgagcggcaccgaccagctgagctgcaacagcgagcagaagcccgacagaagccaggccatcagagacagactgagaggcaagggcctgcccaccggcagaagcagcaccagcgacgtgctggacatccagaagccccccctgagccaccagaccttcctgaacaagggcctgagcaagagcatgggcttcctgagcatcaaggacacccaggacgagaactacttcaaggacatcctgagcgacaacagcggcagagaggacagcgagaacaccttcagcccctaccagttcaagaccagcggccccgagaagaagcccatccccggcatcgacgtgctgagcaagaagaagatctgggccagcagcatggacctgctgtgcaccgccgacagagacttcagcagcggcgagaccgccacctacagaagatgccaccccgaggccgtgaccgtgagaaccagcaccacccccagaaagaaggaggccagatacagcgacggcagcatcgccctggacatcttcggcccccagaagatggaccccatctaccacaccagagagctgcccaccagcagcgccatcagcagcgccctggacagaatcagagagagacagaagaagctgcaggtgctgagagaggccatgaacgtggaggagcccgtgagaagatacaagacctaccacggcgacgtgttcagcaccagcagcgagagccccagcatcatcagcagcgagagcgacttcagacaggtgagaagaagcgaggccagcaagagattcgagagcagcagcggcctgcccggcgtggacgagaccctgagccagggccagagccagagacccagcagacagtacgagacccccttcgagggcaacctgatcaaccaggagatcatgctgaagagacaggaggaggagctgatgcagctgcaggccaagatggccctgagacagagcagactgagcctgtaccccggcgacaccatcaaggccagcatgctggacatcaccagagaccccctgagagagatcgccctggagaccgccatgacccagagaaagctgagaaacttcttcggccccgagttcgtgaagatgaccatcgagcccttcatcagcctggacctgcccagaagcatcctgaccaagaagggcaagaacgaggacaacagaagaaaggtgaacatcatgctgctgaacggccagagactggagctgacctgcgacaccaagaccatctgcaaggacgtgttcgacatggtggtggcccacatcggcctggtggagcaccacctgttcgccctggccaccctgaaggacaacgagtacttcttcgtggaccccgacctgaagctgaccaaggtggcccccgagggctggaaggaggagcccaagaagaagaccaaggccaccgtgaacttcaccctgttcttcagaatcaagttcttcatggacgacgtgagcctgatccagcacaccctgacctgccaccagtactacctgcagctgagaaaggacatcctggaggagagaatgcactgcgacgacgagaccagcctgctgctggccagcctggccctgcaggccgagtacggcgactaccagcccgaggtgcacggcgtgagctacttcagaatggagcactacctgcccgccagagtgatggagaagctggacctgagctacatcaaggaggagctgcccaagctgcacaacacctacgtgggcgccagcgagaaggagaccgagctggagttcctgaaggtgtgccagagactgaccgagtacggcgtgcacttccacagagtgcaccccgagaagaagagccagaccggcatcctgctgggcgtgtgcagcaagggcgtgctggtgttcgaggtgcacaacggcgtgagaaccctggtgctgagattcccctggagagagaccaagaagatcagcttcagcaagaagaagatcaccctgcagaacaccagcgacggcatcaagcacggcttccagaccgacaacagcaagatctgccagtacctgctgcacctgtgcagctaccagcacaagttccagctgcagatgagagccagacagagcaaccaggacgcccaggacatcgacgtgctgcacaagagatggagcatcgtgagcagccccgagagagagatcaccctggtgaacctgaagaaggacgccaagtacggcctgggcttccagatcatcggcggcgagaagatgggcagactggacctgggcatcttcatcagcagcgtggcccccggcggccccgccgacctggacggctgcctgaagcccggcgacagactgatcagcgtgaacagcgtgagcctggagggcgtgagccaccacgccgccatcgagatcctgcagaacgcccccgaggacgtgaccctggtgatcagccagcccaaggagaagatcagcaaggtgcccagcacccccgtgcacctgaccaacgagatgaagaactacatgaagaagagcagctacatgcaggacagcgccatcgacagcagcagcaaggaccaccactggagcagaggcaccctgagacacatcagcgagaacagcttcggccccagcggcggcctgagagagggcagcctgagcagccaggacagcagaaccgagagcgccagcctgagccagagccaggtgaacggcttcttcgccagccacctgggcgaccagacctggcaggagagccagcacggcagccccagccccagcgtgatcagcaaggccaccgagaaggagaccttcaccgacagcaaccagagcaagaccaagaagcccggcatcagcgacgtgaccgactacagcgacagaggcgacagcgacatggacgaggccacctacagcagcagccaggaccaccagacccccaagcaggagagcagcagcagcgtgaacaccagcaacaagatgaacttcaagaccttcagcagcagcccccccaagcccggcgacatcttcgaggtggagctggccaagaacgacaacagcctgggcatcagcgtgaccggcggcgtgaacaccagcgtgagacacggcggcatctacgtgaaggccgtgatcccccagggcgccgccgagagcgacggcagaatccacaagggcgacagagtgctggccgtgaacggcgtgagcctggagggcgccacccacaagcaggccgtggagaccctgagaaacaccggccaggtggtgcacctgctgctggagaagggccagagccccaccagcaaggagcacgtgcccgtgaccccccagtgcaccctgagcgaccagaacgcccagggccagggccccgagaaggtgaagaagaccacccaggtgaaggactacagcttcgtgaccgaggagaacaccttcgaggtgaagctgttcaagaacagcagcggcctgggcttcagcttcagcagagaggacaacctgatccccgagcagatcaacgccagcatcgtgagagtgaagaagctgttccccggccagcccgccgccgagagcggcaagatcgacgtgggcgacgtgatcctgaaggtgaacggcgccagcctgaagggcctgagccagcaggaggtgatcagcgccctgagaggcaccgcccccgaggtgttcctgctgctgtgcagacccccccccggcgtgctgcccgagatcgacaccgccctgctgacccccctgcagagccccgcccaggtgctgcccaacagcagcaaggacagcagccagcccagctgcgtggagcagagcaccagcagcgacgagaacgagatgagcgacaagagcaagaagcagtgcaagagccccagcagaagagacagctacagcgacagcagcggcagcggcgaggacgacctggtgaccgcccccgccaacatcagcaacagcacctggagcagcgccctgcaccagaccctgagcaacatggtgagccaggcccagagccaccacgaggcccccaagagccaggaggacaccatctgcaccatgttctactacccccagaagatccccaacaagcccgagttcgaggacagcaaccccagccccctgccccccgacatggcccccggccagagctaccagccccagagcgagagcgccagcagcagcagcatggacaagtaccacatccaccacatcagcgagcccaccagacaggagaactggacccccctgaagaacgacctggagaaccacctggaggacttcgagctggaggtggagctgctgatcaccctgatcaagagcgagaagggcagcctgggcttcaccgtgaccaagggcaaccagagaatcggctgctacgtgcacgacgtgatccaggaccccgccaagagcgacggcagactgaagcccggcgacagactgatcaaggtgaacgacaccgacgtgaccaacatgacccacaccgacgccgtgaacctgctgagagccgccagcaagaccgtgagactggtgatcggcagagtgctggagctgcccagaatccccatgctgccccacctgctgcccgacatcaccctgacctgcaacaaggaggagctgggcttcagcctgtgcggcggccacgacagcctgtaccaggtggtgtacatcagcgacatcaaccccagaagcgtggccgccatcgagggcaacctgcagctgctggacgtgatccactacgtgaacggcgtgagcacccagggcatgaccctggaggaggtgaacagagccctggacatgagcctgcccagcctggtgctgaaggccaccagaaacgacctgcccgtggtgcccagcagcaagagaagcgccgtgagcgcccccaagagcaccaagggcaacggcagctacagcgtgggcagctgcagccagcccgccctgacccccaacgacagcttcagcaccgtggccggcgaggagatcaacgagatcagctaccccaagggcaagtgcagcacctaccagatcaagggcagccccaacctgaccctgcccaaggagagctacatccaggaggacgacatctacgacgacagccaggaggccgaggtgatccagagcctgctggacgtggtggacgaggaggcccagaacctgctgaacgagaacaacgccgccggctacagctgcggccccggcaccctgaagatgaacggcaagctgagcgaggagagaaccgaggacaccgactgcgacggcagccccctgcccgagtacttcaccgaggccaccaagatgaacggctgcgaggagtactgcgaggagaaggtgaagagcgagagcctgatccagaagccccaggagaagaagaccgacgacgacgagatcacctggggcaacgacgagctgcccatcgagagaaccaaccacgaggacagcgacaaggaccacagcttcctgaccaacgacgagctggccgtgctgcccgtggtgaaggtgctgcccagcggcaagtacaccggcgccaacctgaagagcgtgatcagagtgctgagaggcctgctggaccagggcatccccagcaaggagctggagaacctgcaggagctgaagcccctggaccagtgcctgatcggccagaccaaggagaacagaagaaagaacagatacaagaacatcctgccctacgacgccaccagagtgcccctgggcgacgagggcggctacatcaacgccagcttcatcaagatccccgtgggcaaggaggagttcgtgtacatcgcctgccagggccccctgcccaccaccgtgggcgacttctggcagatgatctgggagcagaagagcaccgtgatcgccatgatgacccaggaggtggagggcgagaagatcaagtgccagagatactggcccaacatcctgggcaagaccaccatggtgagcaacagactgagactggccctggtgagaatgcagcagctgaagggcttcgtggtgagagccatgaccctggaggacatccagaccagagaggtgagacacatcagccacctgaacttcaccgcctggcccgaccacgacacccccagccagcccgacgacctgctgaccttcatcagctacatgagacacatccacagaagcggccccatcatcacccactgcagcgccggcatcggcagaagcggcaccctgatctgcatcgacgtggtgctgggcctgatcagccaggacctggacttcgacatcagcgacctggtgagatgcatgagactgcagagacacggcatggtgcagaccgaggaccagtacatcttctgctaccaggtgatcctgtacgtgctgaccagactgcaggccgaggaggagcagaagcagcagccccagctgctgaagtag

SEQ ID NO: 326370 - protein, 189 aa, Artificial Sequence
  derived and/or modified sequence
MTSGSVFFYILIFGKYFSHGGGQDVKCSLGYFPCGNITKCLPQLLHCNGVDDCGNQADEDNCGDNNGWSLQFDKYFASYYKMTSQYPFEAETPECLVGSVPVQCLCQGLELDCDETNLRAVPSVSSNVTAMSLQWNLIRKLPPDCFKNYHDLQKLYLQNNKITSISIYAFRGLNSLTKLSRAVKDGSEK

SEQ ID NO: 326371 - protein, 652 aa, Artificial Sequence
  derived and/or modified sequence
MTSQYPFEAETPECLVGSVPVQCLCQGLELDCDETNLRAVPSVSSNVTAMSLQWNLIRKLPPDCFKNYHDLQKLYLQNNKITSISIYAFRGLNSLTKLYLSHNRITFLKPGVFEDLHRLEWLIIEDNHLSRISPPTFYGLNSLILLVLMNNVLTRLPDKPLCQHMPRLHWLVMRKNKINHLNENTFAPLQKLDELDLGSNKIENLPPLIFKDLKELSQLNLSYNPIQKIQANQFDYLVKLKSLSLEGIEISNIQQRMFRPLMNLSHIYFKKFQYCGYAPHVRSCKPNTDGISSLENLLASIIQRVFVWVVSAVTCFGNIFVICMRPYIRSENKLYAMSIISLCCADCLMGIYLFVIGGFDLKFRGEYNKHAQLWMESTHCQLVGSLAILSTEVSVLLLTFLTLEKYICIVYPFRCVRPGKCRTITVLILIWITGFIVAFIPLSNKEFFKNYYGTNGVCFPLHSEDTESIGAQIYSVAIFLGINLAAFIIIVFSYGSMFYSVHQSAITATEIRNQVKKEMILAKRFFFIVFTDALCWIPIFVVKFLSLLQVEIPGTITSWVVIFILPINSALNPILYTLTTRPFKEMIHRFWYNYRQRKSMDSKGQKTYAPSFIWVEMWPLQEMPPELMKPDLFTYPCEMSLISQSTRLNSYS

SEQ ID NO: 326372 - DNA, 1959 bp, Artificial Sequence
  derived and/or modified sequence
atgaccagccagtaccccttcgaggccgagacccccgagtgcctggtgggcagcgtgcccgtgcagtgcctgtgccagggcctggagctggactgcgacgagaccaacctgagagccgtgcccagcgtgagcagcaacgtgaccgccatgagcctgcagtggaacctgatcagaaagctgccccccgactgcttcaagaactaccacgacctgcagaagctgtacctgcagaacaacaagatcaccagcatcagcatctacgccttcagaggcctgaacagcctgaccaagctgtacctgagccacaacagaatcaccttcctgaagcccggcgtgttcgaggacctgcacagactggagtggctgatcatcgaggacaaccacctgagcagaatcagcccccccaccttctacggcctgaacagcctgatcctgctggtgctgatgaacaacgtgctgaccagactgcccgacaagcccctgtgccagcacatgcccagactgcactggctggtgatgagaaagaacaagatcaaccacctgaacgagaacaccttcgcccccctgcagaagctggacgagctggacctgggcagcaacaagatcgagaacctgccccccctgatcttcaaggacctgaaggagctgagccagctgaacctgagctacaaccccatccagaagatccaggccaaccagttcgactacctggtgaagctgaagagcctgagcctggagggcatcgagatcagcaacatccagcagagaatgttcagacccctgatgaacctgagccacatctacttcaagaagttccagtactgcggctacgccccccacgtgagaagctgcaagcccaacaccgacggcatcagcagcctggagaacctgctggccagcatcatccagagagtgttcgtgtgggtggtgagcgccgtgacctgcttcggcaacatcttcgtgatctgcatgagaccctacatcagaagcgagaacaagctgtacgccatgagcatcatcagcctgtgctgcgccgactgcctgatgggcatctacctgttcgtgatcggcggcttcgacctgaagttcagaggcgagtacaacaagcacgcccagctgtggatggagagcacccactgccagctggtgggcagcctggccatcctgagcaccgaggtgagcgtgctgctgctgaccttcctgaccctggagaagtacatctgcatcgtgtaccccttcagatgcgtgagacccggcaagtgcagaaccatcaccgtgctgatcctgatctggatcaccggcttcatcgtggccttcatccccctgagcaacaaggagttcttcaagaactactacggcaccaacggcgtgtgcttccccctgcacagcgaggacaccgagagcatcggcgcccagatctacagcgtggccatcttcctgggcatcaacctggccgccttcatcatcatcgtgttcagctacggcagcatgttctacagcgtgcaccagagcgccatcaccgccaccgagatcagaaaccaggtgaagaaggagatgatcctggccaagagattcttcttcatcgtgttcaccgacgccctgtgctggatccccatcttcgtggtgaagttcctgagcctgctgcaggtggagatccccggcaccatcaccagctgggtggtgatcttcatcctgcccatcaacagcgccctgaaccccatcctgtacaccctgaccaccagacccttcaaggagatgatccacagattctggtacaactacagacagagaaagagcatggacagcaagggccagaagacctacgcccccagcttcatctgggtggagatgtggcccctgcaggagatgccccccgagctgatgaagcccgacctgttcacctacccctgcgagatgagcctgatcagccagagcaccagactgaacagctacagctag

SEQ ID NO: 326373 - DNA, 1959 bp, Artificial Sequence
  derived and/or modified sequence
atgactagtcagtatccctttgaggccgagactccagaatgcctggtgggcagtgtacctgtccagtgcttatgccaggggctcgagctggattgcgatgaaacgaacctgcgagccgtgccttctgtgtctagcaacgtgacagctatgtctctgcagtggaatttaattagaaaactccccccagactgctttaaaaattaccatgatttgcagaaattgtacctccaaaacaacaagatcaccagcattagcatctatgcattcaggggtttgaattctctaacgaagttgtatctgagtcacaatagaataacatttctgaaaccaggcgtttttgaggaccttcaccgactcgagtggttgatcatcgaggacaaccacctgagtcgcatttccccccccacgttttacgggttgaactctctgattcttctcgtgctgatgaacaatgtcctgaccagattaccagacaaaccgttatgccaacacatgccaagactccactggctggtgatgcggaagaacaaaatcaaccacctgaacgagaacactttcgcacctctccagaagctggatgaactggatttggggagcaataagattgagaatctcccaccacttatctttaaggacctgaaagaactatctcaacttaacctgagctataacccgatccagaagatccaggccaaccaattcgactacttggtcaagctaaaaagcctgtccctggagggcatagagatctcaaatatccagcagcgcatgttccgtcccctgatgaacctttctcatatctacttcaagaagttccagtattgtgggtatgccccacacgtgcgatcttgcaaacccaacacagacggtatttcaagcctagagaatttgctcgcttcaattatccagcgagtctttgtctgggtggtgtcggcggttacgtgcttcgggaacatcttcgttatttgcatgcgcccttacatccgctctgaaaacaaactctatgcaatgagcattatctcactctgttgcgccgattgtctgatgggtatctacctctttgtaatcggaggcttcgatttgaagtttagaggtgagtacaataaacacgcccaattgtggatggagtccacacactgccagctagtggggtctcttgccatcctgagcaccgaagtgagcgtacttttactgacatttttaacgctagagaagtacatttgcattgtgtatcctttccgctgcgtgcggcccgggaagtgccggaccataaccgttcttatcttaatctggataacagggtttatagttgcatttatcccactcagcaataaagagttttttaaaaattactatggtaccaatggagtgtgctttcctcttcactccgaggacacggagtccataggggctcagatttattcagtggccatattcctaggaattaatttagccgcgttcatcatcatcgtgttcagttatgggtccatgttttattcagtgcatcagtccgccatcacagctactgagataaggaaccaggtgaagaaggaaatgattctggccaaacgttttttctttatcgtctttaccgatgctctgtgttggatccccatcttcgtggtgaagttcctcagcctgttacaggtggaaatccccggcaccatcaccagctgggtggtgatctttattttaccaataaacagcgccctcaaccccattttatatactcttacgacgcgacctttcaaagagatgattcatagattctggtacaattaccgtcagaggaagagtatggacagcaaagggcagaaaacctacgccccctcatttatatgggtggagatgtggccattgcaggagatgccccctgagcttatgaaaccagacttattcacttatccatgtgagatgagccttatttcccagtccaccaggctcaactcatactcctag

SEQ ID NO: 326374 - DNA, 1959 bp, Artificial Sequence
  derived and/or modified sequence
atgaccagccagtacccctttgaagctgagaccccagaatgtctggtgggctctgtgcctgtgcagtgcctgtgccagggcctggagctggactgtgatgagaccaacctgcgggctgtgcccagcgtgagcagcaatgtgacagccatgagcctgcagtggaacctgatcaggaagctgcccccagactgcttcaagaactaccatgacctgcagaagctgtacctgcagaacaacaagatcaccagcatcagcatctatgccttccggggcctgaacagcctgaccaagctgtacctgagccacaaccgcatcaccttcctgaagccaggagtgtttgaggacctgcaccggctggagtggctgatcatcgaggacaaccacctgagccgcatcagcccccccaccttctacggcctgaacagcctcatcctgctggtgctgatgaacaacgtgctgacccggctgcctgacaagcccctgtgccagcacatgccccggctgcactggctggtgatgaggaagaacaagatcaaccacctgaatgaaaacacctttgcccccctgcagaagctggatgagctggacctgggcagcaacaagattgagaacctgcccccactcatcttcaaggacctgaaggagctgagccagctgaacctgagctacaaccccatccagaagatccaggccaaccagtttgactacctggtgaagctgaagagcctgagcctggagggcatcgagatcagcaacatccagcagaggatgttccggcccctgatgaacctgagccacatctacttcaagaagttccagtactgcggctacgccccccacgtgcgcagctgcaagcccaacacagatggcatcagcagcctggagaacctgctggccagcatcatccagagggtgtttgtgtgggtggtgtctgctgtgacctgcttcggcaacatcttcgtcatctgcatgaggccctacatccgctctgagaacaagctgtatgccatgagcatcatcagcctgtgctgtgccgactgcctgatgggcatctacctgtttgtgattggaggctttgacctgaagttccggggggagtacaacaagcacgcccagctgtggatggagagcacccactgccagctggtgggcagcctggccatcctgagcacagaggtgtctgtgctgctgctgaccttcctgaccctggagaagtacatctgcatcgtgtaccccttccgctgtgtgcggcctgggaagtgcaggaccatcaccgtgctgatcctgatctggatcaccggcttcatcgtggccttcatccccctgagcaacaaggagttcttcaagaactactacggcaccaatggagtgtgcttccccctgcacagcgaggacacagagagcattggagcccagatctacagcgtggccatcttcctgggcatcaacctggccgccttcatcatcatcgtgttctcctatggctccatgttctacagcgtgcaccagagcgccatcacagccacagagatccggaaccaggtgaagaaggagatgatcctggccaagcgcttcttcttcatcgtgttcacagatgccctgtgctggatccccatctttgtggtgaagttcctgagcctgctgcaggtggagatccctggcaccatcacctcctgggtggtgatcttcatcctgcccatcaacagcgccctgaaccccatcctgtacaccctgaccacccggcccttcaaggagatgatccaccgcttctggtacaactaccggcagaggaagtccatggacagcaagggccagaagacctacgcccccagcttcatctgggtggagatgtggcccctgcaggagatgcctcctgagctgatgaagccagacctcttcacctacccctgtgagatgagcctcatcagccagagcacccggctgaacagctacagctag

SEQ ID NO: 326375 - DNA, 1959 bp, Artificial Sequence
  derived and/or modified sequence
atgaccagccagtaccccttcgaggccgagacccccgagtgcctggtgggatctgtaccagttcagtgtctgtgccagggcctggagctcgactgcgacgagaccaacctgcgggctgtgcctagtgtgagctccaacgtgactgctatgagcctccaatggaatctgatacgcaagctgcccccagattgttttaagaactaccatgatttacagaaactgtacctgcagaataacaaaatcaccagcatttccatctatgcttttagaggactgaactcactgaccaagctgtacctgagccataataggatcacattccttaagccaggcgtgttcgaggacctgcatcggctggagtggctgatcatcgaagacaaccacttatcccgtataagtcctcccaccttctatggcttgaactctctcattttgctggtcctgatgaacaatgttcttacgagattgcctgataagcccctatgtcaacatatgcccaggctccactggctggttatgcgaaagaacaagataaaccacttaaatgaaaataccttcgcgcccctccagaagcttgatgagttggatctgggaagtaataagatcgaaaatctgccgcccctcatctttaaggacttaaaagaactctctcagctgaacctgagctacaacccaatccagaagatccaggctaatcagtttgactacttagtaaagctgaaatcactctcactggagggtatcgagattagcaacattcagcagcgcatgttcaggccactaatgaacttgagccacatatacttcaagaagttccagtattgtggatatgcaccacacgttaggtcttgcaagcccaataccgatgggatctcttccttggagaacctgctagcttcaatcattcagcgggtgttcgtctgggtggtatccgcggtgacttgtttcggcaatatttttgtgatctgcatgagaccttacatacgttctgagaataaattgtacgccatgtctattatttcattatgctgcgcagattgcctgatgggaatctacctgtttgtgatcggaggatttgacctgaaattccgcggagaatacaataagcacgctcagttgtggatggaaagcacccattgccagttggttggatcattggctatcctgtcgaccgaagtgtccgttctgctcttgacctttttgacattagaaaagtacatctgtattgtttacccatttcgctgcgtgaggcccggtaaatgtagaactattacagtcttgatactaatctggatcacaggatttattgtggcgtttatccccctcagcaacaaggaattttttaaaaattattacgggacaaatggcgtgtgcttcccgttgcatagcgaagacactgagtctatcggcgcgcaaatttactcggtggcaatatttctgggaattaatctggccgccttcatcataattgttttctcctatggatctatgttctacagcgtgcaccagagcgcaatcacagccactgaaattcgcaaccaagtcaaaaaggaaatgattctggctaagcgcttcttcttcatcgtgtttaccgacgccctgtgctggatccctattttcgtcgttaagttcttgagcctactccaagttgagatcccaggcacaatcacctcttgggtggtgatctttatattacctattaattctgctttaaatcctattctgtacactctgacaacccggcccttcaaggagatgattcaccgattctggtataattaccgtcagagaaaatccatggattcgaaaggacaaaagacctacgccccttcctttatctgggtggaaatgtggccattacaggagatgccccccgagctgatgaaaccagacttgtttacctatccttgcgagatgtccctcatttcacagagtacgcgcctgaacagctattcctag

SEQ ID NO: 326376 - DNA, 1959 bp, Artificial Sequence
  derived and/or modified sequence
atgacaagccagtatccgttcgaggcagaaacccccgaatgccttgtgggctctgtgccagtgcagtgcctgtgtcagggcttggagcttgattgtgatgagaccaatctgagagccgtaccctccgtgagctcaaacgtgaccgctatgagtctgcaatggaatctgatcaggaagttaccccctgactgctttaagaattaccacgacctgcagaagctgtacttgcagaacaataaaattacctcgatctccatttatgccttccgcggtctgaatagcttaaccaaactgtacttatcccataatagaattacctttctcaagccaggtgtatttgaggacctgcatcgacttgagtggttgataatcgaggacaaccacctttcccggatttctccgccaactttttacggcttgaattcgctcattctgctggtgctcatgaataacgtcctgactaggctgccagacaagcccctttgccaacacatgccacgtttacattggttagtgatgcgtaaaaataaaatcaatcatttgaacgagaatacctttgcccctttgcagaagctggacgaattagatctgggaagcaacaagatcgagaacctgccacctctgatcttcaaagacctgaaagagttatcccagttgaatctgagttacaaccctattcaaaagattcaagccaatcagttcgattaccttgtcaagctgaaatcgctgagtctcgagggcatcgaaatatctaatatccaacagaggatgtttaggcctcttatgaaccttagccatatctatttcaagaagttccagtactgcgggtacgcacctcatgttagatcttgcaaaccaaacactgacggtatatcttctctcgagaacctgttagcttctataatacagagagtgttcgtgtgggtggtgtccgcagtaacatgcttcgggaatatcttcgtaatatgcatgcgcccttacatccgaagcgagaataagctgtatgccatgtcaataatatccttgtgttgcgccgactgcttaatgggaatctacctgttcgtgatcggtggctttgacctgaagtttagaggcgaatataataaacatgcccagctatggatggagagtactcattgtcaactggtcggtagccttgctatcttgtcaaccgaggtttccgttctgctgctgactttcctgaccctggagaaatacatttgtattgtttatccatttagatgcgtgcgtcccggtaagtgtagaactatcaccgtgctaatcctgatctggattaccggctttattgtggcattcattcccctcagcaacaaggaattcttcaaaaattattatggcacgaacggagtgtgctttcctctgcattccgaagatactgaatcaatcggcgctcagatctactcagttgctatctttttgggcattaacctagccgctttcatcataatcgtgtttagctacggctccatgttttactccgtccatcagtccgcaattactgccaccgagattcgaaatcaagtgaaaaaggaaatgattctcgcaaaacggttctttttcattgtttttaccgacgctctctgctggatacccatctttgttgtgaaatttttgtcccttctgcaggtggaaatccccggaactatcacgtcctgggtcgtgatctttatcctccctatcaattctgcgcttaaccccatcctgtatacattgacaacacgcccatttaaagagatgattcataggttctggtacaattatcggcagcgaaaatccatggactctaaggggcagaaaacgtacgccccatcctttatttgggtagagatgtggcctctccaggaaatgcctcccgagctgatgaagccagacctgtttacctacccttgtgagatgtcactgatttcacagtctacgagactgaactcctattcatag

SEQ ID NO: 326377 - DNA, 3702 bp, Artificial Sequence
  derived and/or modified sequence
acacaaccactgtgagctgtatgcgattcagaaaccaagaccaaattttgctcactttcattaatcagttgctcagatagaaggaaatgacatctggttctgtcttcttctacatcttaatttttggaaaatatttacttcctcctgaagaatgaactttcaaacttttttattaacactccatctcccacctagaatcaaatagtattacaacagctggtactgcctcttccttcgacacagaagaaaacctaaaatccagtaagacagagtggcatgccaaatttgcccatcaatttattggcacattcaagaataaagcaaaactctactgaatatcgatatagtagtatctgcctctgaggattcttggtgcatatttttgcattctgccatgtttcgtccattttgcccctaccttgggcatttaaatataaagattcccatgagatcggatcaattcagctgtttatttctagaaatgtctataaagagaagaactaacaagagaaccatctttttatttttttaatttacttcctaaatataaatgaaggagaatctagaaccactgtcttcattggaaatcattgttccaaatgaaccgcaagtctgagtttataaagctgccatctccaatatgtctgttgagaaatatgtctatttacatacatcatgtttgtttctgaccttgtgggacaataacttggaatgccctgagcaacaaaaacataaaacactctgatgagacagcatctcatccttgcactgaaggatttcaaaagagggacagatcacccagaatggacatggtcatagaggaatttctcatgggggtggacaggatgtcaagtgctcccttggctatttcccctgtgggaacatcacaaagtgcttgcctcagctcctgcactgtaacggtgtggacgactgcgggaatcaggccgatgaggacaactgtggagacaacaatggatggtctctgcaatttgacaaatattttgccagttactacaaaatgacttcccaatatccttttgaggcagaaacacctgaatgtttggtcggttctgtgccagtgcaatgtctttgccaaggtctggagcttgactgtgatgaaaccaatttacgagctgttccatcggtttcttcaaatgtgactgcaatgtcacttcagtggaacttaataagaaagcttcctcctgattgcttcaagaattatcatgatcttcagaagctgtacctgcaaaacaataagattacatccatctccatctatgctttcagaggactgaatagccttactaaactgtatctcagtcataacagaataaccttcctgaagccgggtgtttttgaagatcttcacagactagaatggctgataattgaagataatcacctcagtcgaatttccccaccaacattttatggactaaattctcttattctcttagtcctgatgaataacgtcctcacccgtttacctgataaacctctctgtcaacacatgccaagactacattggctagtgatgaggaaaaacaaaattaatcacttaaatgaaaatacttttgcacctctccagaaactggatgaattggatttaggaagtaataagattgaaaatcttccaccgcttatattcaaggacctgaaggagctgtcacaattgaatctttcctataatccaatccagaaaattcaagcaaaccaatttgattatcttgtcaaactcaagtctctcagcctagaagggattgaaatttcaaatatccaacaaaggatgtttagacctcttatgaatctctctcacatatattttaagaaattccagtactgtgggtatgcaccacatgttcgcagctgtaaaccaaacactgatggaatttcatctctagagaatctcttggcaagcattattcagagagtatttgtctgggttgtatctgcagttacctgctttggaaacatttttgtcatttgcatgcgaccttatatcaggtctgagaacaagctgtatgccatgtcaatcatttctctctgctgtgccgactgcttaatgggaatatatttattcgtgatcggaggctttgacctaaagtttcgtggagaatacaataagcatgcgcagctgtggatggagagtactcattgtcagcttgtaggatctttggccattctgtccacagaagtatcagttttactgttaacatttctgacattggaaaaatacatctgcattgtctatccttttagatgtgtgagacctggaaaatgcagaacaattacagttctgattctcatttggattactggttttatagtggctttcattccattgagcaataaggaatttttcaaaaactactatggcaccaatggagtatgcttccctcttcattcagaagatacagaaagtattggagcccagatttattcagtggcaatttttcttggtattaatttggccgcatttatcatcatagttttttcctatggaagcatgttttatagtgttcatcaaagtgccataacagcaactgaaatacggaatcaagttaaaaaagagatgatccttgccaaacgttttttctttatagtatttactgatgcattatgctggatacccatttttgtagtgaaatttctttcactgcttcaggtagaaataccaggtaccataacctcttgggtagtgatttttattctgcccattaacagtgctttgaacccaattctctatactctgaccacaagaccatttaaagaaatgattcatcggttttggtataactacagacaaagaaaatctatggacagcaaaggtcagaaaacatatgctccatcattcatctgggtggaaatgtggccactgcaggagatgccacctgagttaatgaagccggaccttttcacatacccctgtgaaatgtcactgatttctcaatcaacgagactcaattcctattcatgactgactctgaaattcatttcttcgcagagaatactgtgggggtgcttcatgagggatttactggtatgaaatgaataccacaaaattaatttataataatagctaagataaatattttacaaggacatgaggaaaaataaaaatgactaatgctcttacaaagggaagtaattatatcaataatgtatatatattagtagacattttgcataagaaattaagagaaatctacttcagtaacattcattcatttttctaacatgcatttattgagtacccactactatgtgcatagcattgcaatatagtcctggaagtagacagtgcagaacctttcaatctgtagatggtgtttaatgacaaaagactatacaaagtccatctgcagttcctagtttaaagtagagctttacctgtcatgtgcatcagcaagaatcataggcacttttaaataaaggtttaaagttttggaatactcagtgtatttgcatcatagaaaatgtctgactgtttgcaaaataatattctgttttaagaatccatcttacctctctttaagtttccatacacttgagagccaacacaacatatttattactaaaaagatgctttgctagaaactcaaaaacagcacttcttttggcacttcctgcccagttttctctttgctttaaatgaacatcatcatatggaattggaataggagagtatgagtacggcagaga

SEQ ID NO: 326378 - DNA, 120 bp, Artificial Sequence
  derived and/or modified sequence
aaaaagcgcaaggaaaaaaaacgtgaaaagaggaggggtaaagaaagaaaagagctctttaaactggtgtcacacgtgctagagaaccgaatggggtggcagcaccttaaatggatgtag

SEQ ID NO: 326379 - DNA, 3057 bp, Artificial Sequence
  derived and/or modified sequence
atgagccccacccagtgggacttccccgtggagctgtgctgcagacccatggccttcgtgaccctgaccggcctggacgtggtgtacaacgccgtgcacagagccgtgtgggacgccttctgcgccaacagaagagccgacagagtgcccatcagcttcaaggtgctgcccggcgaccacgagtaccccaagtgcagacccaagagaaccagctacgagtggtacatccccaagggcatcctgaagaccggctggatgaacaagcacctgaacctggtgcccgccctggtggtggtgttctacgagctggactgggacgagccccagtggaaggagaagcagagcgagtgcgccaccagagtggagatcgtgagacagagcctgcagggcagaaacaccaaggtggccgtggtgctgatccagaagaagacccccctgccccccggcgaggacgtgatcgccagcgagagagccgccgccctgtgcaacgcctgcgagctgagcggcaagagcctgttcgtgctgccccacaccgaccacctggtgggctacatcatcagactggagaacgccttctacgagcacgcccagacctactactacaccgagatcagaagagtgaagagccacaaggagttcctgaacaagaccacccaccagctgctgttcgtgagacaccagttcaagatcgccttcttcagcgagctgaagcaggacacccagaacgccctgaagaactacagaaccgcctacaacctggtgcacgagctgagagcccacgagaccaacatcctggagatcaagaccatggccggcttcatcaactacaagatctgcagactgtgcttccagcacaacacccccctggacgccatcgcccagttcagaaagcacatcgacctgtgcaagaagaagatcggcagcgccgagctgagcttcgagcacgacgcctggatgagcaagcagttccaggccttcggcgacctgttcgacgaggccatcaagctgggcctgaccgccatccagacccagaaccccggcttctactaccagcaggccgcctactacgcccaggagagaaagcagctggccaagaccctgtgcaaccacgaggccagcgtgatgtaccccaaccccgaccccctggagacccagaccggcgtgctggacttctacggccagagaagctggagacagggcatcctgagcttcgacctgagcgaccccgagaaggagaaggtgggcatcctggccatccagctgaaggagagaaacgtggtgcacagcgagatcatcatcaccctgctgagcaacgccgtggcccagttcaagaagtacaagtgccccagaatgaagagccacctgatggtgcagatgggcgaggagtactactacgccaaggactacaccaaggccctgaagctgctggactacgtgatgtgcgactacagaagcgagggctggtggaccctgctgaccagcgtgctgaccaccgccctgaagtgcagctacctgatggcccagctgaaggactacatcacctacagcctggagctgctgggcagagccagcaccctgaaggacgaccagaagagcagaatcgagaagaacctgatcaacgtgctgatgaacgagagccccgaccccgagcccgactgcgacatcctggccgtgaagaccgcccagaagctgtgggccgacagaatcagcctggccggcagcaacatcttcaccatcggcgtgcaggacttcgtgcccttcgtgcagtgcaaggccaagttccacgcccccagcttccacgtggacgtgcccgtgcagttcgacatctacctgaaggccgactgcccccaccccatcagattcagcaagctgtgcgtgagcttcaacaaccaggagtacaaccagttctgcgtgatcgaggaggccagcaaggccaacgaggtgctggagaacctgacccagggcaagatgtgcctggtgcccggcaagaccagaaagctgctgttcaagttcgtggccaagaccgaggacgtgggcaagaagatcgagatcaccagcgtggacctggccctgggcaacgagaccggcagatgcgtggtgctgaactggcagggcggcggcggcgacgccgccagcagccaggaggccctgcaggccgccagaagcttcaagagaagacccaagctgcccgacaacgaggtgcactgggacagcatcatcatccaggccagcaccatgatcatcagcagagtgcccaacatcagcgtgcacctgctgcacgagccccccgccctgaccaacgagatgtactgcctggtggtgaccgtgcagagccacgagaagacccagatcagagacgtgaagctgaccgccggcctgaagcccggccaggacgccaacctgacccagaagacccacgtgaccctgcacggcaccgagctgtgcgacgagagctaccccgccctgctgaccgacatccccgtgggcgacctgcaccccggcgagcagctggagaagatgctgtacgtgagatgcggcaccgtgggcagcagaatgttcctggtgtacgtgagctacctgatcaacaccaccgtggaggagaaggagatcgtgtgcaagtgccacaaggacgagaccgtgaccatcgagaccgtgttccccttcgacgtggccgtgaagttcgtgagcaccaagttcgagcacctggagagagtgtacgccgacatccccttcctgctgatgaccgacctgctgagcgccagcccctgggccctgaccatcgtgagcagcgagctgcagctggcccccagcatgaccaccgtggaccagctggagagccaggtggacaacgtgatcctgcagaccggcgagagcgccagcgccctgtactacctgctggagaaggacctgagcaacggcgagtacccccaccaccacaactgccaccacagcgccgccagagactgcggcgagtaccccagcccctgcgagtgcagaagcgccgtgatctgggcctgccagagagtggtgacctgccaggtgagccccaccgagtag

SEQ ID NO: 326380 - DNA, 3057 bp, Artificial Sequence
  derived and/or modified sequence
atgagccctacgcaatgggacttcccagtcgagctctgttgtaggcctatggcgtttgtgaccctgacaggactggacgttgtttacaacgccgtacatcgagccgtctgggatgcattctgtgctaatagaagagcggatcgcgtgcctattagttttaaagtcttacccggggatcatgagtatcccaagtgcagaccaaaacggactagctacgaatggtacattccgaagggtattctcaaaaccggctggatgaataaacacctaaatcttgtgccagccctcgtggtggtattctacgagctggactgggacgagccccagtggaaagaaaagcagtctgaatgcgcaaccagagtggaaattgtgagacagtctctacagggtagaaataccaaggtggccgtcgtgctgatccagaaaaagacgcctctcccacctggagaagacgtcatcgcctccgagcgtgcggccgctctctgtaatgcatgtgagttaagcggtaagtctttattcgtcctgcctcacaccgaccaccttgtgggctacatcattcgccttgagaatgcgttttacgagcacgcgcagacgtactattacaccgaaatccgcagggtcaaatcgcataaagaatttctgaataagacaactcatcaactgctgttcgtgagacatcagttcaaaattgcattcttctctgaactgaaacaagatacccaaaatgcactcaaaaactacaggactgcatacaacctcgttcacgagctgagggcacacgaaacgaatatccttgagattaaaactatggccggcttcatcaactacaagatatgcagactgtgcttccagcataacacacccctcgatgctatcgctcagttccgcaagcacattgacctctgcaaaaagaaaatcggctccgcagaactgagcttcgagcatgatgcctggatgtcaaaacagttccaggccttcggcgatctatttgatgaagcaattaaactggggcttacagccatccaaacgcagaatccgggcttttattaccagcaggcagcatactacgcacaggaacgcaagcagctagccaagactctgtgcaaccatgaggcgagcgtgatgtaccccaaccctgatccactcgagactcagactggtgtgctggatttctacgggcagaggtcctggcggcagggcattcttagtttcgacctctcagatccagaaaaagagaaggtgggcatcttggcaatccagttaaaggaacgcaatgtggtgcacagcgagatcattattaccctgctgtctaacgcggttgctcagtttaagaagtataagtgcccaagaatgaagagccacctgatggttcaaatgggcgaagagtattattacgccaaagattacactaaagcgctaaagttgctggactacgtgatgtgcgattaccgttcagagggctggtggacactcctgacctccgtactgacgacagccttgaagtgcagttacctgatggcacagcttaaggactacattacatattctttggagttgctggggagggctagtacattaaaagacgatcagaaatcacggattgaaaagaacctcatcaacgtcctcatgaacgagagccccgatcccgagccagactgtgatatcttagccgttaagacagcacagaaattgtgggccgatcgcatatccttagccggtagtaacatcttcaccattggagttcaggatttcgtaccctttgtgcaatgtaaagcaaaatttcacgccccaagctttcacgtagatgtgcccgtgcaattcgatatttacctgaaggctgactgtcctcatccaatccggttctctaagttgtgcgttagtttcaataaccaggagtacaaccagttctgcgtcatcgaagaagctagcaaagccaacgaggtgctcgagaatcttacacaggggaagatgtgcctggtccctggtaaaaccaggaagctgctcttcaagttcgtcgcgaaaaccgaagacgtgggcaaaaagatagagattacatcagtggatttggccttgggcaatgaaaccggcaggtgcgtcgtcttgaactggcaaggcggaggcggagatgcagcaagctcccaagaagctctacaggccgccaggagcttcaagaggcgccccaagctgccggacaacgaagtgcactgggacagcatcatcattcaggcatctactatgatcatctcccgggtgccaaatatctctgtacacctgctccacgagccccctgccctgacaaacgagatgtattgcctggtcgtgaccgtgcagtcccatgagaagactcagatccgcgatgtcaagctgactgccggcctgaaacccggccaggatgcaaatctcacccagaaaacgcacgtgactctacatgggaccgagctgtgcgacgagtcatatcctgctctccttacagacatccctgtgggcgacctccatcctggtgagcagcttgagaaaatgctgtatgtcaggtgtgggactgtgggatcccgcatgtttttagtttacgtgagctacctgatcaacactactgtagaggagaaagagatcgtgtgcaagtgtcacaaagacgagaccgtgacaattgaaaccgtcttcccgttcgacgtggccgttaaattcgtgagcactaagtttgaacacctcgaacgggtttatgccgatattcctttccttcttatgacagacctgctgtcagcttcaccctgggccctcaccatcgtctctagtgagctacagctcgctccgagcatgacaaccgtcgaccagcttgaaagccaggtggataacgtgattttgcagactggtgagagcgcaagcgctttatattacctcctcgaaaaggacttgtctaatggtgaataccctcatcatcataactgccaccatagcgctgcccgtgattgtggtgaatacccaagtccctgcgaatgtaggagcgcagtgatttgggcttgccaaagagtggtcacgtgtcaggtgtccccaactgagtag

SEQ ID NO: 326381 - DNA, 3057 bp, Artificial Sequence
  derived and/or modified sequence
atgagccccacccagtgggacttccctgtggagctgtgctgccggcccatggcctttgtgaccctgaccggcctggatgtggtgtacaatgctgtgcacagagctgtgtgggatgccttctgtgccaacagaagagctgacagagtgcccatctccttcaaggtgctgcccggggaccacgagtaccccaagtgccggcccaagaggaccagctatgagtggtacatccccaagggcatcctgaagacaggctggatgaacaagcacctgaacctggtgcctgccctggtggtggtgttctatgagctggactgggatgagccccagtggaaggagaagcagagtgaatgtgccaccagggtggagatcgtgcggcagagcctgcagggcaggaacaccaaggtggccgtggtgctgatccagaagaagacccccctgcccccaggagaagatgtgattgccagcgagagagctgctgccctgtgcaatgcctgtgagctgagcggcaagagcctgtttgtgctgccccacacagaccacctggtgggctacatcatccggctggagaatgccttctatgaacatgcccagacctactactacacagagatcagaagagtgaagagccacaaggagttcctgaacaagaccacccaccagctgctgtttgtgcgccaccagttcaagatcgccttcttcagcgagctgaagcaggacacccagaatgccctgaagaactacagaacagcctacaacctggtgcatgagctgcgggcccacgagaccaacatcctggagatcaagaccatggccggcttcatcaactacaagatctgccgcctgtgcttccagcacaacacccccctggatgccatcgcccagttcaggaagcacatcgacctgtgcaagaagaagattggcagcgctgagctgagctttgaacatgatgcctggatgagcaagcagttccaggccttcggggacctgtttgatgaggccatcaagctgggcctgacagccatccagacccagaaccctggcttctactaccagcaggccgcctactatgcccaggagaggaagcagctggccaagaccctgtgcaaccacgaggcctctgtgatgtaccccaacccagaccccctggagacccagacaggagtgctggacttctacggccagaggtcctggaggcagggcatcctgagctttgacctgagtgaccctgagaaggagaaggtgggcatcctggccatccagctgaaggagagaaatgtggtgcacagcgagatcatcatcaccctgctgagcaatgctgtggcccagttcaagaagtacaagtgccccaggatgaagagccacctgatggtgcagatgggagaggagtactactatgccaaggactacaccaaggccctgaagctgctggactatgtgatgtgtgactacagaagtgagggctggtggaccctgctgacctctgtgctgaccacagccctgaagtgcagctacctgatggcccagctgaaggactacatcacctacagcctggagctgctgggccgggccagcaccctgaaggatgaccagaagagccgcatcgagaagaacctgatcaacgtgctgatgaatgaatctccagaccctgagccagactgtgacatcctggccgtgaagacagcccagaagctgtgggccgaccgcatcagcctggccggcagcaacatcttcaccatcggcgtgcaggactttgtgccctttgtgcagtgcaaggccaagttccacgcccccagcttccacgtggatgtgcctgtgcagtttgacatctacctgaaggctgactgcccccaccccatccgcttcagcaagctgtgtgtgtccttcaacaaccaggagtacaaccagttctgtgtgattgaggaggccagcaaggccaatgaggtgctggagaacctgacccagggcaagatgtgcctggtgcctgggaagaccaggaagctgctcttcaagtttgtggccaagacagaagatgtgggcaagaagattgagatcacctctgtggacctggccctgggcaatgaaacaggccgctgtgtggtgctgaactggcagggcggcggcggagatgctgccagcagccaggaggccctgcaggccgcccggagcttcaagagaagacccaagctgcctgacaatgaggtgcactgggacagcatcatcatccaggccagcaccatgatcatcagccgggtgcccaacatctctgtgcacctgctgcacgagcccccagccctgaccaatgagatgtactgcctggtggtgacagtgcagagccatgagaagacccagatcagagatgtgaagctgacagctggcctgaagccaggccaggatgccaacctgacccagaagacccacgtgaccctgcacggcacagagctgtgtgatgagagctacccagccctgctgacagacatccctgtgggggacctgcaccctggagagcagctggagaagatgctgtatgtgcgctgtggcaccgtgggcagcaggatgttcctggtgtatgtgtcctacctgatcaacaccaccgtggaggagaaggagatcgtgtgcaagtgccacaaggatgaaacagtgaccatcgagaccgtcttcccctttgatgtggccgtgaagtttgtgtccaccaagtttgagcacctggagcgggtgtatgctgacatccccttcctgctgatgacagacctgctgagcgccagcccctgggccctgaccatcgtgagcagcgagctgcagctggcccccagcatgaccaccgtggaccagctggagagccaggtggacaacgtcatcctgcagacaggagagagcgccagcgccctgtactacctgctggagaaggacctgagcaatggagagtacccccaccaccacaactgccaccacagcgctgcccgggactgtggggagtaccccagcccctgtgaatgtagatctgctgtgatctgggcctgccagagggtggtgacctgccaggtgagccccacagaatag

SEQ ID NO: 326382 - DNA, 3057 bp, Artificial Sequence
  derived and/or modified sequence
atgagccccacccagtgggacttccccgtggagctgtgctgccggcccatggcgttcgtgaccttgaccgggctggatgtcgtttataacgcggtacaccgagccgtttgggacgctttctgcgcaaatcgcagggcggatagagtgccaatatcattcaaggtgcttcctggggatcatgagtacccaaagtgccgtcccaagcgaacctcctatgagtggtatatccccaagggcattctgaaaactggttggatgaacaagcatctcaacttggtgccggccctggtggtcgtcttttatgagctggattgggacgagccccaatggaaagaaaaacaaagcgagtgcgctactcgagtcgagattgtgaggcagagcttgcagggacgcaacactaaggtagcagtggtgctcatccaaaagaagactccccttccacctggagaagacgttatcgcttctgagagggctgcagccctgtgtaatgcatgcgagctctcgggcaagtcactatttgtcctcccccacacagatcatctcgtgggctacattatcaggctggaaaacgctttttatgaacacgcccaaacgtattattacactgaaatccgcagagtcaaatcacacaaggagtttttgaacaaaactacacatcagctgttatttgtgcggcaccaattcaaaatcgccttctttagcgaactcaaacaggatacgcagaacgccctgaaaaactaccggaccgcttataacctagttcacgagctcagggctcacgaaactaatatactggagattaagactatggccggattcataaactacaagatctgccgactctgcttccaacacaacacccctttggatgccattgcccaattcaggaagcatattgacctctgcaaaaaaaaaatagggtctgccgagttgagctttgaacatgatgcgtggatgagcaaacagttccaggcattcggagacctgttcgatgaggcaatcaagctggggttaaccgccattcaaacccagaatcccggcttttattatcagcaggctgcttactacgcgcaagagaggaagcaactggcaaagactctgtgcaatcacgaggcttctgttatgtatcccaacccggatccgctcgaaacgcaaactggggtcctcgatttttatggacagagatcgtggcggcagggcatcttaagttttgatctgtctgatccagaaaaggagaaagtaggtatcttagccattcagctcaaggagaggaatgttgtgcattcagagatcattatcactcttcttagtaacgcagtggcccagtttaagaaatataagtgccctaggatgaaatcccatctcatggtgcagatgggcgaagagtactattatgcgaaggattacactaaagccttgaaattgctggattatgtcatgtgcgactaccgtagcgagggctggtggaccctcctgacgtccgtgctgacgaccgcgctcaaatgctcatacctcatggcacagctgaaggattacatcacatactcgctggaactgctcgggagagcatccacactgaaggatgaccaaaaaagtcggatagaaaagaatcttataaacgtgctcatgaacgaatcaccagaccctgagccagattgtgacatattggcagtaaagactgctcagaaattgtgggcagaccggatctctttggcagggagcaatatctttaccattggtgttcaggattttgttcctttcgtgcagtgcaaggccaagtttcacgcaccatcgtttcacgtcgatgttcctgtccagttcgacatttacctgaaagccgattgtccccatcctattaggttttcaaagctgtgcgtctcatttaataatcaggaatataatcaattctgtgtgatagaagaagcctctaaagccaacgaagtccttgaaaatctcacccaaggaaagatgtgcctggtcccaggcaaaacccgtaaactactattcaagtttgttgccaagaccgaagacgtgggcaaaaaaatcgagataacatctgtggacctggccctaggcaacgagaccggtagatgtgtggtcctgaactggcaagggggcggcggagacgcggctagctcccaagaggcccttcaggccgcccgaagtttcaaacggcgcccaaagctgcctgataacgaggtgcattgggattccatcatcattcaagcctccacaatgataatctcaagggtacctaacatcagcgtccatcttctccacgagcccccagcccttaccaatgagatgtattgccttgtggtgacggtccagtctcatgagaagacccagatcagggacgtgaaacttaccgcggggctgaagcctggccaagacgctaatctcactcagaagacacacgtaacgctgcacggtacggagctgtgcgacgaaagctatccagccctcctcaccgatattccggtgggcgatctccatcccggagaacagctggaaaaaatgctctatgtgcggtgcggcacagtgggatcacgcatgttcctggtgtacgtctcttacctaatcaacactactgtggaggagaaagagatcgtgtgtaaatgccataaagatgagactgtgacaatcgagaccgtttttccgttcgatgtagctgtgaagttcgtcagcaccaaattcgaacacctggagcgagtgtacgcagacattccctttctcctgatgacggacctcttatcagcctcgccctgggccctgaccattgtctctagcgagcttcagttagccccttccatgacaaccgttgatcaattagagtcacaggtggataacgtcatcctgcagacaggggaatctgcttctgctttgtattatctattggaaaaggacttgtccaatggcgagtacccccaccaccacaattgccaccattccgcggctagggattgtggggagtacccttctccatgtgagtgtcggagtgccgtaatctgggcatgccagcgcgtggtgacctgtcaggtgtcgcctaccgagtag

SEQ ID NO: 326383 - DNA, 3057 bp, Artificial Sequence
  derived and/or modified sequence
atgagcccgactcaatgggattttcccgtggaactctgctgccgcccaatggcatttgtgaccctgaccggactcgacgtcgtgtataacgccgtgcaccgggcagtttgggacgccttttgcgctaaccgacgcgcagatagggtccccatttccttcaaggttctgcctggggaccacgaatatccgaaatgtcggcctaaacggacctcatacgagtggtacatcccgaaggggattcttaagactggttggatgaacaagcacctaaatcttgtgcctgccttggttgtggtgttttatgaactggactgggatgagccccagtggaaggagaaacagtctgaatgtgctacaagagtcgaaatcgtgagacagagcctgcagggcaggaacactaaggtggccgtggtgctaatccagaaaaagactcccctcccccctggagaagatgtgatcgccagcgaacgagccgctgccctatgtaacgcatgcgagctgagcgggaagtcattgttcgtgctaccacatactgatcatctcgtgggatacatcattaggctggagaacgccttctatgagcacgctcaaacctactattataccgagattaggcgcgttaagtctcataaagagttcctcaacaaaaccactcaccagttgctattcgtcagacaccaattcaaaatcgctttcttttctgaattaaagcaggatacacaaaatgcgcttaaaaattataggacggcctataatctggtgcacgagctcagagcgcacgagaccaacattctggagatcaagaccatggccggatttatcaattacaaaatctgtagactgtgttttcaacacaatacccctttagatgccattgcccagttcaggaagcacattgatctgtgtaaaaaaaagatcggcagcgccgaactgtcctttgagcatgatgcgtggatgtccaagcagtttcaggccttcggggacctgtttgatgaggccattaaactgggactgacagcgattcagacgcaaaaccctggcttttactatcagcaggcagcgtattacgcccaggagaggaaacagcttgccaagaccctgtgcaatcatgaggctagtgttatgtatcccaatcccgatcccctggagactcagaccggcgtgctggacttttacggccagaggtcttggcgccaggggattctcagcttcgacctgagcgacccagagaaggagaaagtgggtatactggccatccaactgaaggagcggaatgttgttcattctgagataattatcaccctgctatccaacgccgtggcccaattcaagaaatacaaatgtcctagaatgaagtcgcatcttatggtccagatgggagaggaatactattatgctaaagactacacgaaggctctgaagttgctcgactacgttatgtgcgactatcggtccgagggctggtggacgctacttacaagcgtcctgactactgcactgaaatgctcttaccttatggctcaactcaaggattacatcacatattctctggagttattaggccgtgcctcaacactgaaggacgaccagaaatccagaattgaaaaaaaccttataaatgtgctgatgaacgagtcccccgatccggaaccagattgcgacatcctggctgtgaaaactgcacagaaactgtgggcagatagaattagtttagcgggttccaatatcttcaccattggggtccaggattttgttccgttcgttcagtgtaaggcgaaatttcacgcgccatccttccacgtggatgtgccagtgcagttcgacatttacctgaaagctgattgcccgcatcctattagattcagcaagctgtgcgtgtcctttaacaaccaggagtacaatcagttttgcgttattgaagaggctagcaaggcgaacgaggtcctggaaaacctgacacagggcaagatgtgcttagtccccggtaagacgaggaaacttctgttcaaatttgttgcaaaaaccgaggatgtgggcaaaaagatagaaatcacctctgtagatctcgccctgggcaatgaaacggggagatgcgtggtgcttaattggcaaggcggaggcggagatgccgcaagtagccaggaggccctgcaggcagcgagatctttcaagaggcgtcctaaattacccgataacgaggtccattgggactctataatcattcaggcctctacaatgattatcagccgcgtgcccaacatcagtgtacacctgctgcatgagcctcccgcactgaccaacgagatgtactgcctggtggttaccgtgcagagtcacgagaagactcagattcgtgacgtgaaacttacggccggactcaagcccggacaggatgcaaatctcacccagaaaacacacgtaacgctccatgggactgagttatgcgatgagagttaccccgcactgctgacagacatcccggtaggcgacctgcatcctggcgaacagcttgaaaagatgctgtatgttcgctgcggaacagtcgggtcaagaatgtttctggtttatgtcagctacctcataaacactaccgtcgaggaaaaggagattgtgtgtaagtgtcacaaagatgaaacggtaaccatcgagaccgtgttcccctttgatgtggccgtcaagttcgtgagtaccaaatttgaacacctcgagcgagtgtatgcagacatacctttcctgctgatgaccgacctgctgtccgccagcccctgggctttgaccatcgtaagcagcgaactgcagctcgcccctagcatgacgaccgttgaccagctggaatctcaggtggataacgtcatcctgcagaccggcgagagtgcaagtgctctctattatctgcttgaaaaagatctctcaaacggggagtatccccatcatcataattgccaccactccgctgcaagggattgcggagagtacccgagtccatgcgaatgccgttcagcggtcatctgggcatgccagagagtagtcacgtgccaggtttctcctacagaatag

SEQ ID NO: 326384 - DNA, 4466 bp, Artificial Sequence
  derived and/or modified sequence
gggtacagggaagtctcgcctgttggaactggctgtggggctgcggcggtggggacgggccacggcgttctgtgacatccccccgcctcccctcgtcttctcccggctggcggcgaccggcctcagctgcagcgggcccggggcgtggggcctgggttttttgtgacatcgtaaacatgagccccacacagtgggacttccctgtggaattatgttgccggcctatggcctttgttactctaacgggcctggatgtagtttataatgcagtccatcgagctgtctgggacgccttctgtgcaaatcggagagctgatcgagtaccaatttctttcaaggtgctcccaggtgaccatgagtatcccaaatgtagacccaagagaacttcatatgagtggtacattcctaaagggatcttaaagactggctggatgaataagcatctgaatctggtgccagccctggtggttgtgttctatgaactggactgggatgagcctcagtggaaagaaaagcagtctgagtgcgccaccagagtggaaatagtcaggcaaagtttacaaggaagaaacacaaaagttgcagtggttctgattcagaagaaaacccctttgcccccaggagaagatgtcattgcttcagaaagggctgcagctttatgcaatgcatgtgaactctcaggaaagtctttgtttgtactgccgcacactgaccaccttgtgggttatattataagattggaaaatgccttttatgaacatgcacagacttattactacactgagatcagaagagtgaaatctcataaagaatttttgaataaaacaacacaccagcttttatttgttaggcatcagttcaaaatagctttcttcagtgagttgaaacaagatacacaaaatgcgctgaagaattataggaccgcctataatcttgtacacgaattgagagcccatgaaactaatattctggaaattaagactatggcaggatttataaactacaagatctgtaggctgtgttttcaacacaacaccccattggatgcaattgctcagttccgaaaacacatcgacttgtgtaagaaaaagattggaagtgcagagctgtcttttgagcatgatgcatggatgtctaaacaattccaggcctttggagatttatttgatgaagctattaagttagggttaacagctattcaaactcagaatcctggtttctattaccagcaggcagcatactatgcccaggagcggaaacagcttgcaaaaaccctctgtaaccacgaagcttctgtaatgtatcccaatcctgatcccttagaaacacaaacaggcgttcttgacttttatggacaaagatcatggcgacaaggaatactaagttttgatctttctgatcctgaaaaagaaaaggtgggaattcttgccattcagctgaaggagagaaatgttgttcactctgagataatcataactcttctgagcaatgctgttgcacagttcaagaagtataagtgcccgcgaatgaaaagtcacctaatggttcagatgggagaggaatattattacgcaaaggattataccaaagctttgaagttgctggattatgtgatgtgtgattatcggagtgaaggatggtggactctgctcacttctgtattaactacagctctgaagtgctcctacctcatggcccaattaaaggattacattacttactccctagaactccttggtagagcttcaactctgaaagatgaccagaagtctcggatagaaaagaacctcataaatgttttaatgaatgaaagtcctgatccagaacccgactgtgatatcttagctgtgaaaactgctcagaagctgtgggcagaccgaatttctctggctggcagcaatattttcacaataggagtacaggactttgtgccatttgtgcagtgcaaagccaagtttcatgccccaagttttcatgttgatgttcctgttcagtttgatatttatctgaaggctgattgtccacatcccattaggttttccaagctctgtgtcagctttaataatcaggaatacaaccagttctgtgtaatagaagaagcatccaaagcaaatgaagttttagaaaatctgactcaaggaaagatgtgcctagttcctggcaaaacaagaaaactgttatttaagtttgttgcaaaaactgaagatgtgggaaagaaaattgagattacttcagtggatcttgctctgggcaatgagacgggaagatgtgtggttttaaattggcagggaggaggaggagatgctgcttcctcccaagaagccttacaggcagctcggtctttcaaaaggcgacctaagctacctgacaatgaagttcactgggacagcattataattcaggcaagcacaatgatcatatccagagtcccaaacatttctgtacatctgctacatgaaccccctgcactgactaatgaaatgtattgtttggttgtgactgttcagtcccatgaaaagacccaaatcagagatgtgaagctcaccgctggcttaaaaccaggacaggatgccaatttaactcagaagactcacgtgactcttcatggaacagaactgtgtgatgaatcctacccggctttactcactgacattcctgttggagacttacatccaggggaacagctggaaaaaatgttgtatgttcgctgtggaacagtgggttccagaatgtttcttgtatatgtttcttacctgataaatacaaccgttgaagaaaaagaaattgtttgcaagtgtcacaaggatgaaactgtaacaattgaaacagtctttccatttgatgttgcggttaaatttgtttctaccaagtttgagcacctggaaagggtttatgctgacatcccctttctgttgatgacggacctcttaagtgcctcaccctgggccctcactattgtttccagtgagctccagcttgctccatccatgaccacagtggaccagctcgagtctcaagtggacaatgttatcttacagactggagagagtgctagtgcattatattatctcttggaaaaggacctcagcaatggagaatatccccatcatcacaactgtcatcactctgccgcacgtgattgtggagaatatccctctccatgtgaatgcagatctgccgtcatttgggcgtgtcagagagtcgttacctgtcaagtatcacctacagaataagaccgacttagttcaagatgtagaaatttctgtggagcccagtgatgccttcatgttctcaggtctcaaacagattcgattacgtatcctccctggcacggagcaggaaatgctatataatttctatcctctgatggctggataccagcagctgccatctctcaacatcaacttgcttagatttcctaacttcacaaatcagctgctcaggcgttttatacctaccagtatttttgtcaagccacagggtcgactcatggatgatacctctattgctgctgcatgatgttcaagaccggcccttggctgttgttacagagatgttgggcagagctatgcaggtgtttcattgtgaactctagctttgatcatggtaaaaagttaaccttttctattttttaatggatgttataccaactattcagaggaactcatacttcaaaaatattaggaaaatctgtcttatagtttctctaataaatatctgaaatctcagtacgacatgaaagaatgtcagaccattgttattgttgaaagtcatttgatgaatggtaaattctatgaaaagtaagtgatttgcatgtataatatcaggaaaattaagcatcccaagtgtgactggacaaagagagcagatgcaccagtgcctgtgccataaagttccgaatcccccatgtgtctctttcagagctggccagaccggaaataaatcattctcataaattcagtgtgtactcagaacacatacacaacaacatagggagttgtatgactgatacggaaaacttccagaaagttttaatcaaagcagtttaattaaggtatcaaaaatatctttgcttactatcaagaagtgtcaaataggttcagcttgctgccaaaatatggatcatttatgaagcaggttcatattttagaggtgttaataaaatcctcatcggaaaagatccaaagtgcaaggatttgattataaacataatttcctagactgaaagtttttggaaaagatgcagggtctgagtcaggccttctggttatattgtgcagtttcaaaagaactatttaaaactcttgaaaactcatgtaaataaaaatcatagggtgaaaattgtatttgttaaaataccttaataatttaaaatgacctgatttcctggaaaattttattattcaaaaggtggaggcattgtaaaaaggaaatagtgatgtaaataaacatgttctctttcaagt

SEQ ID NO: 326385 - DNA, 423 bp, Artificial Sequence
  derived and/or modified sequence
atgtggccttttagattgcggtgccctatttacttcaagactcgcctactttactctagtagccaagacggcttcttgtccagctccacgaattattataaccatagaacctatccaggcctcgtgaattggttgttcgtgctgactgagccggaactaaccggagagcttggggatgatgaccgaaaggggatgcacacagggggaatcatccgctggcttggccgtcctagttcccaacttaagccaatctttcacgcagaggagcggagggtgcccccacccccagagaggctcgtgggacgggctagtcctagggagcaggccaccgtgtttaagcgcatctgtgcacccctgcacgctgaggtgttctgtcgcgcagggctgtgcgcctgtcacccagattgtacagcagctggatag

SEQ ID NO: 326386 - protein, 202 aa, Artificial Sequence
  derived and/or modified sequence
MSHYFYLTPQILLPFSPLTSQEFDLIRRKAGASWQDETRWSDSSVTTYTGSYRKKQLDKSMCSQFSFRAGQHEPECKQMSLTNSSACHLLCWAGTQETTDIKGLFPDITRPFKKSFDVKHGVAHQIWDFGDCFPTPPNYGKYCVRPKKPAQEALINYSRRGKGVLKHLHGRCDSESKVCSSEDSEADRYSDYGWGGPSSPFN

SEQ ID NO: 326387 - protein, 162 aa, Artificial Sequence
  derived and/or modified sequence
  misc_feature (1)..(1): Xaa can be any naturally occurring amino acid
XDSSVTTYTGSYRKKQLDKSMCSQFSFRAGQHEPECKQMSLTNSSACHLLCWAGTQETTDIKGLFPDITRPFKKSFDVKHGVAHQIWDFGDCFPTPPNYGKYCVRPKKPAQEALINYSRRGKGVLKHLHGRCDSESKVCSSEDSEADRYSDYGWGGPSSPFN

SEQ ID NO: 326388 - DNA, 846 bp, Artificial Sequence
  derived and/or modified sequence
atgtcacactacttctacttgactccacaaattcttctgccctttagccctcttacttctcaagagtttgatctgatcagacgcaaggctggagcatcttggcaggatgaaacacgatggtcagattcttccgtgacaacatacacaggcagttaccggaaaaaacaactggacaagtccatgtgcagccaattttcttttagagcaggacagcatgagcctgagtgtaaacagatgtcattgacaaacagttctgcctgtcatcttctctgctgggctggtacccaagagactacagatatcaaaggactattccctgatataaccaggccctttaaaaagtcatttgatgtcaagcatggagtggcacatcaaatttgggattttggtgattgttttccgacacctccaaattatggaaaatactgtgtgagacctaaaaagccagcacaggaggccctgataaactacagtcgacgagggaaaggtgtcctaaagcatcttcatggacggtgcgattctgaaagcaaggtttgctcatctgaggattcagaagctgatcgatactccgattatggctggggaggaccctcatcgccatttaactgagttggaaaatgaagccacaaggctggaggcgtggagtttgcttaataaacaactttgaggtatggggccctcccaacaccctccccccacccgccccgcccaggaacgtctggaccctggcaggttggctttctgggacaattccatgggcttcatttatcagttttttccctttttaattggtggagagagacaaaagtttttataatctttattaaattttcctttttaaataaa

SEQ ID NO: 326389 - DNA, 722 bp, Artificial Sequence
  derived and/or modified sequence
cagattcttccgtgacaacatacacaggcagttaccggaaaaaacaactggacaagtccatgtgcagccaattttcttttagagcaggacagcatgagcctgagtgtaaacagatgtcattgacaaacagttctgcctgtcatcttctctgctgggctggtacccaagagactacagatatcaaaggactattccctgatataaccaggccctttaaaaagtcatttgatgtcaagcatggagtggcacatcaaatttgggattttggtgattgttttccgacacctccaaattatggaaaatactgtgtgagacctaaaaagccagcacaggaggccctgataaactacagtcgacgagggaaaggtgtcctaaagcatcttcatggacggtgcgattctgaaagcaaggtttgctcatctgaggattcagaagctgatcgatactccgattatggctggggaggaccctcatcgccatttaactgagttggaaaatgaagccacaaggctggaggcgtggagtttgcttaataaacaactttgaggtatggggccctcccaacaccctccccccacccgccccgcccaggaacgtctggaccctggcaggttggctttctgggacaattccatgggcttcatttatcagttttttccctttttaattggtggagagagacaaaagtttttataatctttattaaattttcctttttaaat

SEQ ID NO: 326390 - DNA, 609 bp, Artificial Sequence
  derived and/or modified sequence
atgagccactacttctacctgaccccccagatcctgctgcccttcagccccctgaccagccaggagttcgacctgatcagaagaaaggccggcgccagctggcaggacgagaccagatggagcgacagcagcgtgaccacctacaccggcagctacagaaagaagcagctggacaagagcatgtgcagccagttcagcttcagagccggccagcacgagcccgagtgcaagcagatgagcctgaccaacagcagcgcctgccacctgctgtgctgggccggcacccaggagaccaccgacatcaagggcctgttccccgacatcaccagacccttcaagaagagcttcgacgtgaagcacggcgtggcccaccagatctgggacttcggcgactgcttccccaccccccccaactacggcaagtactgcgtgagacccaagaagcccgcccaggaggccctgatcaactacagcagaagaggcaagggcgtgctgaagcacctgcacggcagatgcgacagcgagagcaaggtgtgcagcagcgaggacagcgaggccgacagatacagcgactacggctggggcggccccagcagccccttcaactag

SEQ ID NO: 326391 - DNA, 489 bp, Artificial Sequence
  derived and/or modified sequence
tgagacagcagcgtgaccacctacaccggcagctacagaaagaagcagctggacaagagcatgtgcagccagttcagcttcagagccggccagcacgagcccgagtgcaagcagatgagcctgaccaacagcagcgcctgccacctgctgtgctgggccggcacccaggagaccaccgacatcaagggcctgttccccgacatcaccagacccttcaagaagagcttcgacgtgaagcacggcgtggcccaccagatctgggacttcggcgactgcttccccaccccccccaactacggcaagtactgcgtgagacccaagaagcccgcccaggaggccctgatcaactacagcagaagaggcaagggcgtgctgaagcacctgcacggcagatgcgacagcgagagcaaggtgtgcagcagcgaggacagcgaggccgacagatacagcgactacggctggggcggccccagcagccccttcaactag

SEQ ID NO: 326392 - DNA, 609 bp, Artificial Sequence
  derived and/or modified sequence
atgtcacactacttttatctcactccacaaattttgcttcccttctcaccgctcaccagccaggaatttgaccttatccgacgaaaagccggggcctcgtggcaagacgagacccggtggtcggacagcagcgttaccacgtacacgggttcctatcgaaaaaaacagttggacaagtcaatgtgtagccagttttccttcagagccggacaacacgagcccgagtgtaagcagatgagcctgaccaactcctctgcatgccacctgctatgctgggccggaacccaggagactaccgacataaaaggattgttcccagatatcacccgaccgtttaagaagtcattcgatgtcaaacatggcgtggcacaccagatctgggacttcggggattgtttccctactccacccaattatggcaaatattgtgtgcgccctaaaaagcccgcccaggaggccctgatcaattacagccgtagggggaaaggagtactcaagcatcttcatggaaggtgcgattctgaaagcaaggtctgttcatccgaagacagcgaagccgatagatactctgactacggatggggaggaccctcaagcccattcaattag

SEQ ID NO: 326393 - DNA, 489 bp, Artificial Sequence
  derived and/or modified sequence
taggattcctctgttacaacttatacggggagttaccgaaaaaaacagctggacaaatcaatgtgcagtcagttctcatttagagcagggcagcacgagcccgaatgtaaacagatgtcactgacaaactcttccgcttgccacctgctgtgctgggcaggtacccaggagactactgacattaaaggtctatttccggacatcacaaggcccttcaagaagtctttcgacgtgaagcatggagtcgcacatcaaatatgggactttggagactgtttcccgacccctcctaattatggaaaatattgcgttaggcccaaaaagcccgctcaggaagcattgatcaactattcaagacgcggaaagggcgtcctgaaacacctgcacggaagatgcgattcggagtccaaagtatgttcaagcgaggatagcgaggctgatagatactcagattatggatggggaggcccttctagtccattcaactag

SEQ ID NO: 326394 - DNA, 609 bp, Artificial Sequence
  derived and/or modified sequence
atgagccactacttctacctgaccccccagatcctgctgcccttcagccccctgaccagccaggagtttgacctgatccggaggaaggccggggcctcctggcaggatgagacccgctggagcgacagctctgtgaccacctacacaggcagctacaggaagaagcagctggacaagtccatgtgcagccagttctccttccgggccggccagcacgagcctgagtgcaagcagatgagcctgaccaacagcagcgcctgccacctgctgtgctgggccggcacccaggagaccacagacatcaagggcctcttcccagacatcacccggcccttcaagaagagctttgatgtgaagcacggcgtggcccaccagatctgggactttggagactgcttccccaccccacccaactacggcaagtactgtgtgcggcccaagaagccagcccaggaggccctgatcaactacagcagaagaggcaagggcgtgctgaagcacctgcacggccgctgtgacagcgagagcaaggtgtgcagcagcgaggacagcgaggccgaccgctacagcgactatggctggggcggccccagcagccccttcaactag

SEQ ID NO: 326395 - DNA, 489 bp, Artificial Sequence
  derived and/or modified sequence
tgagacagctctgtgaccacctacacaggcagctacaggaagaagcagctggacaagtccatgtgcagccagttctccttccgggccggccagcacgagcctgagtgcaagcagatgagcctgaccaacagcagcgcctgccacctgctgtgctgggccggcacccaggagaccacagacatcaagggcctcttcccagacatcacccggcccttcaagaagagctttgatgtgaagcacggcgtggcccaccagatctgggactttggagactgcttccccaccccacccaactacggcaagtactgtgtgcggcccaagaagccagcccaggaggccctgatcaactacagcagaagaggcaagggcgtgctgaagcacctgcacggccgctgtgacagcgagagcaaggtgtgcagcagcgaggacagcgaggccgaccgctacagcgactatggctggggcggccccagcagccccttcaactag

SEQ ID NO: 326396 - DNA, 609 bp, Artificial Sequence
  derived and/or modified sequence
atgagccactacttctacctgaccccccagatcctgctgcccttctcgccgctgacaagccaggaattcgacctgatcagacggaaggctggggccagttggcaggatgagaccagatggagcgattcttcagttaccacatacaccggctcatatcgtaaaaaacagcttgacaaaagcatgtgctcgcagttctctttccgtgcggggcagcatgagcctgaatgcaagcagatgtccctcacaaacagttctgcatgtcacttactctgctgggctggtactcaagagacaacggacatcaagggcctttttcctgacattacccgcccctttaaaaagtcgttcgacgtgaagcacggcgtcgcccaccagatctgggatttcggcgactgctttccgaccccaccgaattacgggaaatactgcgtccggcccaagaagccagcacaggaggctctgatcaactactcccgcagggggaagggagtgctgaaacatctgcacggcaggtgcgactcagagtcaaaggtgtgtagctccgaggattctgaggctgataggtactccgactatgggtggggagggccaagttccccttttaactag

SEQ ID NO: 326397 - DNA, 489 bp, Artificial Sequence
  derived and/or modified sequence
tgagacagcagcgtgaccacctacaccggcagctaccggaagaagcagctggataagtctatgtgctctcagttcagttttagggcagggcaacacgaacccgagtgtaaacaaatgtcactcacgaactcgtccgcctgccacctgttatgctgggctggcacccaagaaacaactgacataaaagggttattccccgatatcacaagaccttttaagaagtcattcgatgttaaacacggagtggctcaccagatttgggacttcggcgactgttttcctaccccgccgaactacggaaaatactgtgtgcggccaaagaagcctgctcaggaggcgctgataaactacagtagaaggggaaaaggggttctgaagcacctccacggtagatgcgactctgagagtaaagtctgttcttctgaggactcagaagcagatcggtacagcgactatgggtggggggggccgtcatccccgtttaactag

SEQ ID NO: 326398 - DNA, 609 bp, Artificial Sequence
  derived and/or modified sequence
atgtctcattatttctacctcacgccccagattctactgcctttctcacctctgacttcccaggagttcgatcttatcagaaggaaggcaggagcctcctggcaagacgaaactcggtggagcgactcatcagtgacaacttacaccggtagttatcggaagaaacagctggacaagtccatgtgttctcagtttagttttcgcgctggccagcatgaaccggagtgtaagcaaatgtcattgacgaacagtagcgcgtgtcacctcctctgttgggccggaacacaggagaccacagacatcaagggcttgtttccagacatcactagaccctttaagaaaagctttgacgttaagcatggtgtcgcgcatcaaatctgggatttcggtgattgttttcctacccccccaaattacggcaaatactgcgtcaggcctaagaaacctgcccaggaggcactaatcaactactctcgcaggggaaaaggtgtgctgaaacatctgcatgggagatgcgattctgaatcgaaagtgtgtagcagcgaggactcggaggcagacagatactctgactatggatgggggggtccctcctcgccattcaattag

SEQ ID NO: 326399 - DNA, 489 bp, Artificial Sequence
  derived and/or modified sequence
taagactcatcagtcaccacttataccggctcataccggaaaaagcaactcgataagtcaatgtgcagtcagttctcgttccgggctggacagcatgaacccgaatgcaagcagatgtcccttacgaattcatctgcctgtcacctcttatgttgggcgggaacccaggagacaaccgacatcaaagggctcttcccagacattactcggccttttaagaagagctttgatgttaagcacggcgtcgctcatcagatctgggactttggcgactgcttccctacacctccgaattatggcaagtactgcgtcaggcctaaaaagcccgcacaggaggccctgatcaactacagccgacgaggcaaaggggtgttaaagcatttacatggaagatgtgacagtgaatctaaggtgtgctcttccgaggactccgaggcagacagatattcagactatggttgggggggtcctagttccccttttaactag

SEQ ID NO: 326400 - DNA, 909 bp, Artificial Sequence
  derived and/or modified sequence
atggtgtatcagactagtctatgcagctgtagtgtgaacatcagagttcccaaccgtcactttgcagccgccacaaaaagtgccaaaaagaccaagaagggcgccaaggagaagacacccgatgaaaaaaaggatgagatagaaaaaattaaggcctacccatatatggaaggggagcccgaggatgatgtgtatcttaagaggctataccccagacagatctacgaggtagaaaaggccgtacatctgttgaaaaagtttcagatcttagactttacctcacccaaacaaagcgtctacctggatctgactctcgatatggctttgggaaaaaaaaagaacgtggaaccttttactagcgtgctctcgctcccttacccgtttgcgagtgagatcaataaggttgctgtgtttaccgaaaatgctagtgaggtaaaaattgctgaagagaatggagctgcgtttgccggagggacgagtctgatccaaaaaatctgggatgacgaaatagtcgccgacttttatgtggctgtcccggaaataatgcccgaactgaacaggctccgcaagaagctgaataaaaagtaccccaaactgtctcggaacagtattgggcgtgacatcccaaaaatgctcgaactgtttaagaacgggcacgagatcaaggtagacgaagaacgtgagaacttcctgcagactaagatagcaactctggatatgagtagcgatcagattgccgccaacttgcaggccgtgattaacgaggtttgccgccaccgccccctgaatctgggaccctttgtggtaagagcttttctgcgctccagtacttctgaaggccttttgttaaagatcgatcccctgttaccaaaggagatcaaatcccagcctaagaaaaagaaaaactag

SEQ ID NO: 326401 - DNA, 909 bp, Artificial Sequence
  derived and/or modified sequence
atggtgtaccagaccagcctgtgcagctgcagcgtgaacatccgggtgcccaacagacactttgctgctgccaccaagagcgccaagaagaccaagaagggggccaaggagaagaccccagatgagaagaaggatgaaattgagaagatcaaggcctacccctacatggagggggagccagaagatgatgtgtacctgaagaggctgtacccccggcagatctatgaggtggagaaggctgtgcacctgctgaagaagttccagatcctggacttcaccagccccaagcagagcgtgtacctggacctgaccctggacatggccctgggcaagaagaagaatgtggagcccttcacctctgtgctgagcctgccctacccctttgccagcgagatcaacaaggtggccgtgttcacagaaaatgccagcgaggtgaagattgctgaggagaatggagctgcctttgctgggggcaccagcctcatccagaagatctgggatgatgagatcgtggccgacttctacgtggccgtgcctgagatcatgcctgagctgaaccggctgaggaagaagctgaacaagaagtaccccaagctgagcagaaattccatcggccgggacatccccaagatgctggagctgttcaagaatggacatgagatcaaggtggatgaggagcgggagaacttcctgcagaccaagatcgccaccctggacatgagcagtgaccagattgctgccaacctgcaggccgtcatcaatgaggtgtgccgccaccggcccctgaacctgggcccctttgtggtgcgggccttcctgcggagcagcaccagcgagggcctgctgctgaagattgaccccctgctgcccaaggagatcaagagccagcccaagaagaagaagaactag

SEQ ID NO: 326402 - DNA, 909 bp, Artificial Sequence
  derived and/or modified sequence
atggtgtaccagaccagcctgtgcagctgcagcgtgaacatccgggtccctaacagacatttcgcagccgcgaccaagtcggcaaaaaagacgaagaaaggcgccaaggagaagacgcctgacgagaagaaggacgagatagaaaagataaaggcctatccgtatatggaaggtgaaccagaggatgacgtctacctgaaacggctgtacccccgccagatctatgaggtggagaaagcggtgcaccttctgaagaaattccagatcctggacttcacatcgcctaagcaatccgtgtatcttgatctgaccctggacatggccctgggaaagaagaaaaatgtcgaaccttttacatccgttctgtctctcccatacccatttgcgtcagaaattaacaaagtggccgtcttcactgaaaatgctagtgaagtcaaaattgctgaagaaaacggcgcggcgtttgccggaggcacatctctcatccagaagatctgggatgatgaaatcgtggccgatttttatgtcgctgtgccagaaattatgcctgagttgaatagactcagaaagaagctgaacaagaagtacccaaagctatctcgcaatagtattgggcgagacatacctaaaatgttggaacttttcaaaaacggccacgagatcaaggtcgatgaggagcgggagaactttttgcagacgaaaatcgctacgctggatatgtccagtgaccagatcgctgccaacctacaagccgttattaatgaggtgtgccgccacagacctcttaaccttgggccttttgtggtaagagctttcttgcggagctcgacttcagaaggcttacttctgaaaatagatccactgctcccaaaggagatcaaatcacagcctaagaaaaagaaaaactag

SEQ ID NO: 326403 - DNA, 909 bp, Artificial Sequence
  derived and/or modified sequence
atggtatatcagacaagcctgtgttcatgcagtgtgaatatcagagtgcccaaccgccattttgcagcggctacaaagagtgccaaaaagactaagaagggggctaaggagaagacaccagacgaaaaaaaagacgaaatagagaaaatcaaggcctacccatatatggagggagagcctgaggatgacgtctatctgaagaggctctacccaaggcaaatttatgaggttgagaaagcagtccacctgcttaaaaagttccagatactcgattttacttctccaaaacagtctgtgtacctggacctcacacttgacatggccctgggcaagaagaagaacgtcgaaccgttcaccagcgtgttgagcctgccctacccttttgcctccgaaataaataaggtggccgtgttcacagagaacgcctcagaagtgaaaatcgccgaggagaacggggcagcctttgccggtggcactagtttaatccagaagatttgggacgatgagatcgtggccgatttctacgtagccgtacctgaaattatgcctgagcttaatcgtctgcgcaagaaactgaataaaaaatatcccaaactgtccaggaattctatcggcagggacatcccgaagatgctggaactgttcaaaaatggccacgagataaaagtggatgaggagagggaaaatttccttcagaccaaaattgccaccttggatatgtccagcgaccaaattgcagccaatcttcaggcagttatcaatgaggtctgcaggcacagacccctgaacctgggcccattcgttgttagagctttccttaggtccagcacgtccgaagggctcctgctgaaaattgatccgctcctgccaaaggaaatcaagagtcagcctaaaaagaaaaaaaactag

SEQ ID NO: 326404 - DNA, 909 bp, Artificial Sequence
  derived and/or modified sequence
atggtgtaccagaccagcctgtgcagctgcagcgtgaacatcagagtgcccaacagacacttcgccgccgccaccaagagcgccaagaagaccaagaagggcgccaaggagaagacccccgacgagaagaaggacgagatcgagaagatcaaggcctacccctacatggagggcgagcccgaggacgacgtgtacctgaagagactgtaccccagacagatctacgaggtggagaaggccgtgcacctgctgaagaagttccagatcctggacttcaccagccccaagcagagcgtgtacctggacctgaccctggacatggccctgggcaagaagaagaacgtggagcccttcaccagcgtgctgagcctgccctaccccttcgccagcgagatcaacaaggtggccgtgttcaccgagaacgccagcgaggtgaagatcgccgaggagaacggcgccgccttcgccggcggcaccagcctgatccagaagatctgggacgacgagatcgtggccgacttctacgtggccgtgcccgagatcatgcccgagctgaacagactgagaaagaagctgaacaagaagtaccccaagctgagcagaaacagcatcggcagagacatccccaagatgctggagctgttcaagaacggccacgagatcaaggtggacgaggagagagagaacttcctgcagaccaagatcgccaccctggacatgagcagcgaccagatcgccgccaacctgcaggccgtgatcaacgaggtgtgcagacacagacccctgaacctgggccccttcgtggtgagagccttcctgagaagcagcaccagcgagggcctgctgctgaagatcgaccccctgctgcccaaggagatcaagagccagcccaagaagaagaagaactag

SEQ ID NO: 326405 - protein, 67 aa, Artificial Sequence
  derived and/or modified sequence
MDVFMKGLSKAKEGVVAAAEKTKQGVAEAAGKTKEGVLYVGSKTKEGVVHGVATVAEKTKEQVTNVG

SEQ ID NO: 326406 - protein, 140 aa, Artificial Sequence
  derived and/or modified sequence
MDVFMKGLSKAKEGVVAAAEKTKQGVAEAAGKTKEGVLYVGSKTKEGVVHGVATVAEKTKEQVTNVGGAVVTGVTAVAQKTVEGAGSIAAATGFVKKDQLGKNEEGAPQEGILEDMPVDPDNEAYEMPSEEGYQDYEPEA

SEQ ID NO: 326407 - protein, 126 aa, Artificial Sequence
  derived and/or modified sequence
MDVFMKGLSKAKEGVVAAAEKTKQGVAEAAGKTKEGVLYVVAEKTKEQVTNVGGAVVTGVTAVAQKTVEGAGSIAAATGFVKKDQLGKNEEGAPQEGILEDMPVDPDNEAYEMPSEEGYQDYEPEA

SEQ ID NO: 326408 - protein, 115 aa, Artificial Sequence
  derived and/or modified sequence
MDVFMKGLSKAKEGVVAAAEKTKQGVAEAAGKTKEGVLYVGSKTKEGVVHGVATVAEKTKEQVTNVGGAVVTGVTAVAQKTVEGAGSIAAATGFVKKDQLGKVWLCTFCVTFISW

SEQ ID NO: 326409 - DNA, 423 bp, Artificial Sequence
  derived and/or modified sequence
atggacgtgttcatgaagggcctgagcaaggccaaggagggcgtggtggccgccgccgagaagaccaagcagggcgtggccgaggccgccggcaagaccaaggagggcgtgctgtacgtgggcagcaagaccaaggagggcgtggtgcacggcgtggccaccgtggccgagaagaccaaggagcaggtgaccaacgtgggcggcgccgtggtgaccggcgtgaccgccgtggcccagaagaccgtggagggcgccggcagcatcgccgccgccaccggcttcgtgaagaaggaccagctgggcaagaacgaggagggcgccccccaggagggcatcctggaggacatgcccgtggaccccgacaacgaggcctacgagatgcccagcgaggagggctaccaggactacgagcccgaggcctag

SEQ ID NO: 326410 - DNA, 381 bp, Artificial Sequence
  derived and/or modified sequence
atggacgtgttcatgaagggcctgagcaaggccaaggagggcgtggtggccgccgccgagaagaccaagcagggcgtggccgaggccgccggcaagaccaaggagggcgtgctgtacgtggtggccgagaagaccaaggagcaggtgaccaacgtgggcggcgccgtggtgaccggcgtgaccgccgtggcccagaagaccgtggagggcgccggcagcatcgccgccgccaccggcttcgtgaagaaggaccagctgggcaagaacgaggagggcgccccccaggagggcatcctggaggacatgcccgtggaccccgacaacgaggcctacgagatgcccagcgaggagggctaccaggactacgagcccgaggcctag

SEQ ID NO: 326411 - DNA, 423 bp, Artificial Sequence
  derived and/or modified sequence
atggacgtgttcatgaaaggcttgtcgaaagccaaggaaggcgtagtggccgccgccgagaagaccaagcagggcgtggcagaggcagctggtaagaccaaagagggcgtcttatacgttgggtccaaaactaaagaaggggttgtccatggggtggcaactgtagccgagaaaacaaaggagcaggttaccaacgtcggtggcgctgtcgtcactggcgtaaccgccgtggcccagaagactgtggaaggggccggcagcatcgccgcggcaactggctttgtgaagaaggatcagctgggcaaaaacgaggagggggccccacaagagggcattctcgaggacatgccggtcgatccagataacgaggcatatgaaatgcccagcgaagaaggctaccaggactatgagcctgaagcctag

SEQ ID NO: 326412 - DNA, 423 bp, Artificial Sequence
  derived and/or modified sequence
atggatgtatttatgaaaggattatcaaaagcaaaggagggagtggtcgctgccgccgagaaaaccaaacagggcgtggctgaagccgccggtaaaacaaaggaaggagtgctttatgtcgggagcaagaccaaggaaggggtagtgcatggggttgctaccgtcgcagagaagacaaaggagcaggtcaccaatgttggtggggcagtggtcactggggttacagccgtggcacagaagaccgttgaaggtgcaggcagcatcgcagccgccaccggcttcgtgaaaaaggaccagctcggcaagaacgaagaaggcgccccacaggagggcatcctcgaagatatgcccgtagatccagacaacgaagcctacgaaatgcccagtgaagaggggtatcaggattatgaacctgaagcgtag

SEQ ID NO: 326413 - DNA, 381 bp, Artificial Sequence
  derived and/or modified sequence
atggacgtgttcatgaaaggattgtctaaagctaaggagggcgttgtagccgcagccgagaagaccaaacagggggtggcggaggcagcaggaaaaaccaaggagggggtactatatgtcgtggcagaaaagactaaggagcaagtgacaaatgtcgggggcgcggtggtgacaggtgttaccgctgtggcacagaaaaccgttgaaggtgcaggcagcatagctgctgctaccggctttgtcaagaaggatcagctcggaaagaacgaggagggggctccacaggagggcattctggaggatatgccagttgatcccgacaacgaggcttacgagatgccgtcagaggagggctatcaggactatgagccagaggcatag

SEQ ID NO: 326414 - DNA, 423 bp, Artificial Sequence
  derived and/or modified sequence
atggatgtctttatgaagggactgtctaaggctaaggaaggggtggtggcagccgctgagaaaacaaagcagggcgtggccgaggctgcgggtaagacgaaggagggggtgctgtacgtgggcagtaaaactaaggagggtgtggtgcatggggtggcaaccgtggcagaaaaaacgaaggaacaggttacgaacgtagggggggcagttgtgactggagtgacagccgtggctcagaagacagtcgagggcgctggatctattgcagcggcaaccggcttcgtgaagaaagatcagttagggaagaacgaagagggggcgccacaggagggtattttagaggatatgcctgttgatcctgacaatgaggcctacgaaatgcctagtgaggagggctatcaggactatgagccagaagcctag

SEQ ID NO: 326415 - DNA, 381 bp, Artificial Sequence
  derived and/or modified sequence
atggacgtattcatgaaggggctctccaaggctaaagaaggcgtcgtggctgcggccgagaagacgaaacagggagtggcggaggcagccggcaaaacaaaagagggggtgctttacgtggtggccgaaaagaccaaagagcaagtcacaaatgtgggaggtgccgtcgtcacaggtgttactgccgtggcgcaaaaaactgtggaaggcgctgggtcaatcgctgccgctacaggcttcgtcaagaaagatcagttaggcaagaacgaggaaggagcaccccaggaggggatcctcgaggatatgccggtggatcccgacaatgaagcctacgagatgccgtctgaagagggctaccaagactacgaacctgaggcctag

SEQ ID NO: 326416 - DNA, 423 bp, Artificial Sequence
  derived and/or modified sequence
atggacgtgttcatgaaaggcctgtccaaggcaaaggagggtgtggtggcagccgctgaaaaaactaaacagggcgtggccgaggctgccggcaaaactaaagaaggtgtgctatacgtcggctccaaaacaaaggaaggggtggttcatggcgttgcaaccgtcgcagaaaagactaaggaacaagtgaccaatgtgggcggggcagtggtgactggcgtcaccgccgtggcacagaagaccgtagagggcgccggctcaattgcggctgccaccggctttgtcaaaaaggatcagctcggtaagaatgaggaaggggcgccgcaggagggcatcctggaggatatgcctgtagatccagataacgaggcttacgagatgccatccgaagagggataccaggactacgaacccgaggcctag

SEQ ID NO: 326417 - DNA, 423 bp, Artificial Sequence
  derived and/or modified sequence
atggatgtattcatgaagggcttgtccaaagcaaaagagggtgtggtggccgccgcggaaaaaaccaaacagggggtcgccgaggccgccggaaagaccaaggagggggtgctgtacgtaggatccaaaactaaagaaggtgtagtacacggtgtcgccaccgttgccgagaagactaaagagcaggtgactaatgtgggcggggcagtggtgaccggggtgactgccgtagcacagaaaacggtagagggcgcgggatcgattgccgccgctactggcttcgttaaaaaggaccaactcggaaagaatgaagagggagctccacaggaagggatcttggaagatatgcccgtggatcccgataacgaagcttacgagatgccctctgaggagggataccaggactatgagcccgaagcctag

SEQ ID NO: 326418 - DNA, 423 bp, Artificial Sequence
  derived and/or modified sequence
atggatgtgttcatgaagggcctgagcaaggccaaggagggcgtggtggccgctgctgagaagaccaagcagggcgtggccgaggccgccggcaagaccaaggagggcgtgctgtatgtgggcagcaagaccaaggagggcgtggtgcacggcgtggccaccgtggccgagaagaccaaggagcaggtgaccaacgtgggcggcgctgtggtgactggagtgacagctgtggcccagaagacagtggagggcgccggcagcattgctgctgccaccggctttgtgaagaaggaccagctgggcaagaatgaggagggcgccccccaggagggcatcctggaggacatgcctgtggaccctgacaatgaggcctatgagatgcccagcgaggagggctaccaggactatgagcctgaggcctag

SEQ ID NO: 326419 - DNA, 381 bp, Artificial Sequence
  derived and/or modified sequence
atggatgtgttcatgaagggcctgagcaaggccaaggagggcgtggtggccgctgctgagaagaccaagcagggcgtggccgaggccgccggcaagaccaaggagggcgtgctgtatgtggtggccgagaagaccaaggagcaggtgaccaacgtgggcggcgctgtggtgactggagtgacagctgtggcccagaagacagtggagggcgccggcagcattgctgctgccaccggctttgtgaagaaggaccagctgggcaagaatgaggagggcgccccccaggagggcatcctggaggacatgcctgtggaccctgacaatgaggcctatgagatgcccagcgaggagggctaccaggactatgagcctgaggcctag

SEQ ID NO: 326420 - DNA, 423 bp, Artificial Sequence
  derived and/or modified sequence
atggacgtgttcatgaagggcctgagcaaggccaaggagggcgtggtcgctgccgccgaaaaaaccaaacaaggcgtagccgaagctgccggcaagactaaagaaggcgtgctttatgtcggctccaagaccaaagagggcgtcgtgcacggcgttgcaactgtagccgagaaaaccaaagaacaggtcaccaacgttggcggcgcggttgtcaccggggtaaccgccgttgcgcaaaaaacagttgagggcgcgggctccatagctgctgccacgggatttgtcaagaaagatcagctcggaaagaatgaggagggggctccacaggagggcattcttgaggacatgccagtcgaccctgacaatgaagcttatgagatgcccagtgaggaaggctaccaggactatgaacctgaggcctag

SEQ ID NO: 326421 - DNA, 423 bp, Artificial Sequence
  derived and/or modified sequence
atggacgtgttcatgaagggcctgagcaaggccaaggagggcgtggtggcggccgcagaaaaaacgaaacaaggcgttgccgaggccgcaggtaaaaccaaagagggcgtgctgtatgtgggttcaaaaaccaaggaaggagttgttcatggtgtggcaacagttgcagagaaaactaaggagcaggttacaaacgttgggggggctgtggtgacgggagtaacagcagttgcacaaaaaaccgtagagggtgctggcagtatagctgccgccactggcttcgttaaaaaggatcaactagggaagaatgaggaaggagctccacaagagggtatattagaggatatgccagtcgatcccgataatgaggcttacgaaatgccctctgaggagggataccaagactatgaacctgaggcctag

SEQ ID NO: 326422 - DNA, 381 bp, Artificial Sequence
  derived and/or modified sequence
atggacgtgttcatgaagggcctgagcaaggccaaggagggcgtggtagcagcggccgagaagacaaaacaaggagtcgcagaggctgcaggcaaaaccaaagagggtgttttgtatgtcgtggctgagaaaaccaaggagcaagtgacaaatgtaggcggggccgtggtgacgggggtgacagcagtggcacagaagacagtcgagggagctggcagcattgcggcagccacgggctttgttaaaaaggatcagctaggaaagaatgaggaaggtgcgccccaggagggcattctggaggatatgccagtggatccagacaatgaagcctatgagatgccttcagaggagggttaccaggactacgaacccgaggcatag

SEQ ID NO: 326423 - DNA, 423 bp, Artificial Sequence
  derived and/or modified sequence
atggacgtgttcatgaagggcctgagcaaggccaaggagggcgtggtcgctgccgctgagaaaaccaaacagggagtcgctgaggccgcaggaaagacaaaagagggggtgctgtacgtgggaagcaagaccaaagagggtgtcgtgcacggagtcgccaccgtcgctgagaagacaaaggaacaggtcacaaatgtcggcggtgcggtcgtaaccggggtgaccgccgtcgctcagaagactgtggagggtgcgggatctattgctgccgcaaccggtttcgttaaaaaagatcagctgggaaagaatgaggaaggcgccccacaagagggaattctcgaagatatgccagtcgaccctgacaacgaggcatatgagatgccctccgaggagggttaccaggactacgagccagaagcgtag

SEQ ID NO: 326424 - DNA, 381 bp, Artificial Sequence
  derived and/or modified sequence
atggacgtgttcatgaagggcctgagcaaggccaaggagggcgtggtcgccgccgcagagaaaacaaagcagggcgtggccgaggcggcggggaaaaccaaagaaggagtgctgtacgtcgttgccgagaaaactaaagagcaggtgactaacgtgggcggtgccgtggttacaggagtgactgccgtggctcagaaaaccgtcgaaggggcagggtccatcgcagcggccaccggcttcgttaagaaagatcagttgggaaaaaacgaggagggggccccccaggagggcatcctggaggacatgcctgtagatcctgacaacgaagcctacgagatgccatccgaggaaggttaccaagactatgagccggaagcgtag

SEQ ID NO: 326425 - DNA, 423 bp, Artificial Sequence
  derived and/or modified sequence
atggacgtgttcatgaagggcctgagcaaggccaaggagggcgtggtggctgcggcagaaaagactaaacagggtgtggccgaggctgcggggaaaaccaaggaaggtgtgctgtacgtgggctcaaaaaccaaagagggggttgttcatggggttgccactgtggccgagaagaccaaagaacaggtgacgaacgttggcggtgccgtagttaccggagtgaccgccgtggcccagaagacagtcgagggagcaggttcaatcgccgctgcaaccggttttgtgaagaaagaccagctggggaagaacgaggagggcgctcctcaggaaggcatcctcgaggatatgccagtggaccctgataatgaggcctatgagatgcccagcgaggagggctatcaggattacgagccggaggcatag

SEQ ID NO: 326426 - DNA, 423 bp, Artificial Sequence
  derived and/or modified sequence
atggacgtgttcatgaagggcctgagcaaggccaaggagggcgtggtggcagccgcggaaaaaacaaaacagggagtcgccgaggccgcaggcaaaacaaaggaaggcgtgctgtatgtgggaagtaagaccaaggagggcgtggtgcatggagtcgcaacagtagccgagaaaaccaaggaacaggtgacgaatgtcggcggtgcagtggtgaccggcgtaactgctgttgcacaaaagacggtcgaaggtgccggctcgattgctgccgcgacagggttcgtgaaaaaggaccagctgggtaagaacgaagagggcgcgcctcaggaaggcatccttgaagatatgcctgttgatcctgacaacgaagcctacgagatgccatctgaagaagggtaccaagattacgagcctgaagcttag

SEQ ID NO: 326427 - DNA, 423 bp, Artificial Sequence
  derived and/or modified sequence
atggatgtctttatgaaagggctctccaaggcaaaagaaggggtcgtggctgccgctgagaaaaccaagcagggggtggcagaggccgctgggaagaccaaagaaggcgtcctatatgtcggttctaagacaaaagaaggggtggtccatggcgtggctactgtagccgaaaagacaaaggagcaggttaccaacgtgggaggcgctgtggtgaccggcgtcacggccgtcgctcagaagaccgtcgaaggtgctggatcgattgccgcagccactggcttcgttaagaaggaccagctgggtaagaatgaggaaggggctcctcaagaagggattcttgaggatatgcccgtagatcccgacaacgaagcctacgaaatgccgtctgaggagggctatcaggactacgagccagaagcctag

SEQ ID NO: 326428 - DNA, 423 bp, Artificial Sequence
  derived and/or modified sequence
atggatgtgttcatgaaaggcctcagcaaggctaaggagggcgtggtggctgccgctgagaagacaaaacagggagtcgctgaggcagccggaaagaccaaagagggcgtgctctacgtcggctccaaaactaaggagggagtggtacatggtgtagcaacagtggccgagaagaccaaggaacaagtgaccaacgtcggcggtgccgttgttaccggtgtgaccgcagttgctcagaaaaccgtcgagggcgcaggcagcattgcagctgccactggctttgtcaagaaggaccagctggggaagaatgaggagggagctccccaagaaggtattctcgaagacatgcccgtggaccccgacaacgaggcttatgaaatgcccagcgaggagggatatcaagactacgaacctgaggcttag

SEQ ID NO: 326429 - DNA, 381 bp, Artificial Sequence
  derived and/or modified sequence
atggacgtgttcatgaagggtctgtctaaggccaaagaaggggttgttgcagctgctgaaaaaaccaaacagggtgtcgcagaggcggcaggaaagacaaaagaaggcgtgctgtatgtggtcgcggagaagaccaaggaacaagtgacaaacgtcggcggagccgtcgtgacgggcgtgactgctgtggctcagaaaaccgtggagggcgcaggttccattgctgctgcgacgggcttcgtaaaaaaggaccaattaggcaaaaacgaagaaggtgctcctcaggaaggaattctggaagatatgccagttgaccccgataacgaggcctatgaaatgccatcagaggagggttaccaggattacgaacctgaagcttag

SEQ ID NO: 326430 - DNA, 423 bp, Artificial Sequence
  derived and/or modified sequence
atggacgtatttatgaagggcctctcgaaggccaaagagggcgtagtggccgcagctgaaaaaacaaagcagggcgtggccgaagctgcgggaaagaccaaggagggcgtcttgtatgtggggtctaaaacgaaagagggagtggtgcacggagtggcaaccgtagccgagaaaaccaaggagcaggtgacaaacgtgggcggtgctgtagtgactggggtgactgcggtagcgcagaagaccgtggagggcgcaggcagtatcgccgctgctacaggatttgtcaagaaagatcaacttgggaaaaacgaggaaggagcacctcaggaaggcatcttggaagatatgccggtggaccccgacaatgaggcatatgaaatgccttcagaggaagggtatcaggactatgagcccgaggcctag

SEQ ID NO: 326431 - DNA, 381 bp, Artificial Sequence
  derived and/or modified sequence
atggacgtgtttatgaaggggttgagcaaggccaaagagggggtcgttgcagccgcagagaagaccaaacagggagtggcagaagctgctgggaagaccaaggagggggtcctgtacgtggtagctgaaaaaactaaggagcaggttaccaacgtgggtggagcggtagtaacaggagtaacagccgtagcccagaagacagtcgaaggcgctggaagcattgccgcagccactggcttcgtgaagaaagaccagctgggtaaaaatgaggagggcgctccccaggagggtattctggaggacatgcctgtggaccccgacaatgaggcgtatgagatgccttcagaagaaggctaccaagattacgaaccagaggcatag

SEQ ID NO: 326432 - DNA, 423 bp, Artificial Sequence
  derived and/or modified sequence
atggatgtgttcatgaagggcctgtccaaggctaaggaaggggtcgtggccgctgctgagaagactaaacaaggtgtcgctgaggccgctggaaagaccaaagagggcgtgctgtacgtagggtctaaaacaaaggagggagtagtgcacggcgtggccaccgtggccgaaaaaaccaaggagcaggtgaccaacgtgggcggagccgtggtgaccggagtcacagcagtggcacagaaaacagtggagggcgcaggatcaatagccgctgcaacaggatttgttaagaaagaccagttaggcaaaaacgaggagggcgcaccccaggaggggatacttgaggatatgccagttgacccagacaacgaggcatacgaaatgcccagcgaggagggatatcaggattacgagcccgaggcatag

SEQ ID NO: 326433 - DNA, 423 bp, Artificial Sequence
  derived and/or modified sequence
atggacgttttcatgaaaggactgtctaaagctaaagagggcgttgtagctgctgctgaaaaaacaaagcagggcgttgccgaggccgctggtaagactaaagaaggggtactgtacgtgggctcaaagactaaagagggtgtggtgcacggcgtcgccacagtggctgagaagaccaaagaacaagtgaccaacgtgggaggcgcagtggtaactggcgtgacggcggttgcccaaaaaaccgtagaaggagctggtagcattgctgcagcaacagggttcgtcaaaaaagatcagctagggaagaatgaggaaggagcaccccaagaggggattcttgaggatatgcccgttgatcctgataacgaagcctatgaaatgccttctgaagaggggtatcaagactacgaacccgaagcttag

SEQ ID NO: 326434 - DNA, 1087 bp, Artificial Sequence
  derived and/or modified sequence
gggaggagcttgcttctccattctggtgtgatccaggaacagctgtcttccagctctgaaagagtgtggtgtaaaggaattcattagccatggatgtattcatgaaaggactttcaaaggccaaggagggagttgtggctgctgctgagaaaaccaaacagggtgtggcagaagcagcaggaaagacaaaagagggtgttctctatgtaggctccaaaaccaaggagggagtggtgcatggtgtggcaacagtggctgagaagaccaaagagcaagtgacaaatgttggaggagcagtggtgacgggtgtgacagcagtagcccagaagacagtggagggagcagggagcattgcagcagccactggctttgtcaaaaaggaccagttgggcaagaatgaagaaggagccccacaggaaggaattctggaagatatgcctgtggatcctgacaatgaggcttatgaaatgccttctgaggaagggtatcaagactacgaacctgaagcctaagaaatatctttgctcccagtttcttgagatctgctgacagatgttccatcctgtacaagtgctcagttccaatgtgcccagtcatgacatttctcaaagtttttacagtgtatctcgaagtcttccatcagcagtgattgaagtatctgtacctgcccccactcagcatttcggtgcttccctttcactgaagtgaatacatggtagcagggtctttgtgtgctgtggattttgtggcttcaatctacgatgttaaaacaaattaaaaacacctaagtgactaccacttatttctaaatcctcactatttttttgttgctgttgttcagaagttgttagtgatttgctatcatatattataagatttttaggtgtcttttaatgatactgtctaagaataatgacgtattgtgaaatttgttaatatatataatacttaaaaatatgtgagcatgaaactatgcacctataaatactaaatatgaaattttaccattttgcgatgtgttttattcacttgtgtttgtatataaatggtgagaattaaaataaaacgttatctcattgcaaaaata

SEQ ID NO: 326435 - DNA, 1420 bp, Artificial Sequence
  derived and/or modified sequence
agagagggggcgagcgaccgagcgccgcgacgcggaagtgaggtgcgtgcgggctgcagcgcagaccccggcccggcccctccgagagcgtcctgggcgctccctcacgccttgccttcaagccttctgcctttccaccctcgtgagcggagaactgggagtggccattcgacgacaggttagcgggtttgcctcccactcccccagcctcgcgtcgccggctcacagcggcctcctctggggacagtcccccccgggtgccgcctccgcccttcctgtgcgctccttttccttcttctttcctattaaatattatttgggaattgtttaaattttttttttaaaaaaagagagaggcggggaggagtcggagttgtggagaagcagagggactcagtgtggtgtaaaggaattcattagccatggatgtattcatgaaaggactttcaaaggccaaggagggagttgtggctgctgctgagaaaaccaaacagggtgtggcagaagcagcaggaaagacaaaagagggtgttctctatgtaggctccaaaaccaaggagggagtggtgcatggtgtggcaacagtggctgagaagaccaaagagcaagtgacaaatgttggaggagcagtggtgacgggtgtgacagcagtagcccagaagacagtggagggagcagggagcattgcagcagccactggctttgtcaaaaaggaccagttgggcaagaatgaagaaggagccccacaggaaggaattctggaagatatgcctgtggatcctgacaatgaggcttatgaaatgccttctgaggaagggtatcaagactacgaacctgaagcctaagaaatatctttgctcccagtttcttgagatctgctgacagatgttccatcctgtacaagtgctcagttccaatgtgcccagtcatgacatttctcaaagtttttacagtgtatctcgaagtcttccatcagcagtgattgaagtatctgtacctgcccccactcagcatttcggtgcttccctttcactgaagtgaatacatggtagcagggtctttgtgtgctgtggattttgtggcttcaatctacgatgttaaaacaaattaaaaacacctaagtgactaccacttatttctaaatcctcactatttttttgttgctgttgttcagaagttgttagtgatttgctatcatatattataagatttttaggtgtcttttaatgatactgtctaagaataatgacgtattgtgaaatttgttaatatatataatacttaaaaatatgtgagcatgaaactatgcacctataaatactaaatatgaaattttaccattttgcgatgtgttttattcacttgtgtttgtatataaatggtgagaattaaaataaaacgttatctcattgcaaaaata

SEQ ID NO: 326436 - DNA, 3173 bp, Artificial Sequence
  derived and/or modified sequence
aggagaaggagaaggaggaggactaggaggaggaggacggcgacgaccagaaggggcccaagagagggggcgagcgaccgagcgccgcgacgcggaagtgaggtgcgtgcgggctgcagcgcagaccccggcccggcccctccgagagcgtcctgggcgctccctcacgccttgccttcaagccttctgcctttccaccctcgtgagcggagaactgggagtggccattcgacgacagtgtggtgtaaaggaattcattagccatggatgtattcatgaaaggactttcaaaggccaaggagggagttgtggctgctgctgagaaaaccaaacagggtgtggcagaagcagcaggaaagacaaaagagggtgttctctatgtagtggctgagaagaccaaagagcaagtgacaaatgttggaggagcagtggtgacgggtgtgacagcagtagcccagaagacagtggagggagcagggagcattgcagcagccactggctttgtcaaaaaggaccagttgggcaagaatgaagaaggagccccacaggaaggaattctggaagatatgcctgtggatcctgacaatgaggcttatgaaatgccttctgaggaagggtatcaagactacgaacctgaagcctaagaaatatctttgctcccagtttcttgagatctgctgacagatgttccatcctgtacaagtgctcagttccaatgtgcccagtcatgacatttctcaaagtttttacagtgtatctcgaagtcttccatcagcagtgattgaagtatctgtacctgcccccactcagcatttcggtgcttccctttcactgaagtgaatacatggtagcagggtctttgtgtgctgtggattttgtggcttcaatctacgatgttaaaacaaattaaaaacacctaagtgactaccacttatttctaaatcctcactatttttttgttgctgttgttcagaagttgttagtgatttgctatcatatattataagatttttaggtgtcttttaatgatactgtctaagaataatgacgtattgtgaaatttgttaatatatataatacttaaaaatatgtgagcatgaaactatgcacctataaatactaaatatgaaattttaccattttgcgatgtgttttattcacttgtgtttgtatataaatggtgagaattaaaataaaacgttatctcattgcaaaaatattttatttttatcccatctcactttaataataaaaatcatgcttataagcaacatgaattaagaactgacacaaaggacaaaaatataaagttattaatagccatttgaagaaggaggaattttagaagaggtagagaaaatggaacattaaccctacactcggaattccctgaagcaacactgccagaagtgtgttttggtatgcactggttccttaagtggctgtgattaattattgaaagtggggtgttgaagaccccaactactattgtagagtggtctatttctcccttcaatcctgtcaatgtttgctttacgtattttggggaactgttgtttgatgtgtatgtgtttataattgttatacatttttaattgagccttttattaacatatattgttatttttgtctcgaaataattttttagttaaaatctattttgtctgatattggtgtgaatgctgtacctttctgacaataaataatattcgaccatgaataaaaaaaaaaaaaaagtgggttcccgggaactaagcagtgtagaagatgattttgactacaccctccttagagagccataagacacattagcacatattagcacattcaaggctctgagagaatgtggttaactttgtttaactcagcattcctcactttttttttttaatcatcagaaattctctctctctctctctctttttctctcgctctctttttttttttttttttacaggaaatgcctttaaacatcgttggaactaccagagtcaccttaaaggagatcaattctctagactgataaaaatttcatggcctcctttaaatgttgccaaatatatgaattctaggatttttccttaggaaaggtttttctctttcagggaagatctattaactccccatgggtgctgaaaataaacttgatggtgaaaaactctgtataaattaatttaaaaattatttggtttctctttttaattattctggggcatagtcatttctaaaagtcactagtagaaagtataatttcaagacagaatattctagacatgctagcagtttatatgtattcatgagtaatgtgatatatattgggcgctggtgaggaaggaaggaggaatgagtgactataaggatggttaccatagaaacttccttttttacctaattgaagagagactactacagagtgctaagctgcatgtgtcatcttacactagagagaaatggtaagtttcttgttttatttaagttatgtttaagcaaggaaaggatttgttattgaacagtatatttcaggaaggttagaaagtggcggttaggatatattttaaatctacctaaagcagcatattttaaaaatttaaaagtattggtattaaattaagaaatagaggacagaactagactgatagcagtgacctagaacaatttgagattaggaaagttgtgaccatgaatttaaggatttatgtggatacaaattctcctttaaagtgtttcttcccttaatatttatctgacggtaatttttgagcagtgaattactttatatatcttaatagtttatttgggaccaaacacttaaacaaaaagttctttaagtcatataagccttttcaggaagcttgtctcatattcactcccgagacattcacctgccaagtggcctgaggatcaatccagtcctaggtttattttgcagacttacattctcccaagttattcagcctcatatgactccacggtcggctttaccaaaacagttcagagtgcactttggcacacaattgggaacagaacaatctaatgtgtggtttggtattccaagtggggtctttttcagaatctctgcactagtgtgagatgcaaacatgtttcctcatctttctggcttatccagtatgtagctatttgtgacataataaatatatacatatatgaaaata

SEQ ID NO: 326437 - DNA, 1290 bp, Artificial Sequence
  derived and/or modified sequence
gacaaatcagcggtgggggcggagagccgaggagaaggagaaggaggaggactaggaggaggaggacggcgacgaccagaaggggcccaagagagggggcgagcgaccgagcgccgcgacgcggaagtgaggtgcgtgcgggctgcagcgcagaccccggcccggcccctccgagagcgtcctgggcgctccctcacgccttgccttcaagccttctgcctttccaccctcgtgagcggagaactgggagtggccattcgacgacagtgtggtgtaaaggaattcattagccatggatgtattcatgaaaggactttcaaaggccaaggagggagttgtggctgctgctgagaaaaccaaacagggtgtggcagaagcagcaggaaagacaaaagagggtgttctctatgtaggctccaaaaccaaggagggagtggtgcatggtgtggcaacagtggctgagaagaccaaagagcaagtgacaaatgttggaggagcagtggtgacgggtgtgacagcagtagcccagaagacagtggagggagcagggagcattgcagcagccactggctttgtcaaaaaggaccagttgggcaagaatgaagaaggagccccacaggaaggaattctggaagatatgcctgtggatcctgacaatgaggcttatgaaatgccttctgaggaagggtatcaagactacgaacctgaagcctaagaaatatctttgctcccagtttcttgagatctgctgacagatgttccatcctgtacaagtgctcagttccaatgtgcccagtcatgacatttctcaaagtttttacagtgtatctcgaagtcttccatcagcagtgattgaagtatctgtacctgcccccactcagcatttcggtgcttccctttcactgaagtgaatacatggtagcagggtctttgtgtgctgtggattttgtggcttcaatctacgatgttaaaacaaattaaaaacacctaagtgactaccacttatttctaaatcctcactatttttttgttgctgttgttcagaagttgttagtgatttgctatcatatattataagatttttaggtgtcttttaatgatactgtctaagaataatgacgtattgtgaaatttgttaatatatataatacttaaaaatatgtgagcatgaaactatgcacctataaatactaaatatgaaattttaccattttgcgatgtgttttattcacttgtgtttgtatataaatggtgagaattaaaataaaacgttatctcattgcaaaaata

SEQ ID NO: 326438 - DNA, 411 bp, Artificial Sequence
  derived and/or modified sequence
taaaggaattcattagccatggatgtattcatgaaaggactttcaaaggccaaggagggagttgtggctgctgctgagaaaaccaaacagggtgtggcagaagcagcaggaaagacaaaagagggtgttctctatgtagtggctgagaagaccaaagagcaagtgacaaatgttggaggagcagtggtgacgggtgtgacagcagtagcccagaagacagtggagggagcagggagcattgcagcagccactggctttgtcaaaaaggaccagttgggcaagaatgaagaaggagccccacaggaaggaattctggaagatatgcctgtggatcctgacaatgaggcttatgaaatgccttctgaggaagggtatcaagactacgaacctgaagcctaagaaatatctttg

SEQ ID NO: 326439 - DNA, 570 bp, Artificial Sequence
  derived and/or modified sequence
ggaggacggcgacgaccagaaggggcccaagagagggggcgagcgaccgagcgccgcgacgcggaagtgagtgtggtgtaaaggaattcattagccatggatgtattcatgaaaggactttcaaaggccaaggagggagttgtggctgctgctgagaaaaccaaacagggtgtggcagaagcagcaggaaagacaaaagagggtgttctctatgtaggctccaaaaccaaggagggagtggtgcatggtgtggcaacagtggctgagaagaccaaagagcaagtgacaaatgttggaggagcagtggtgacgggtgtgacagcagtagcccagaagacagtggagggagcagggagcattgcagcagccactggctttgtcaaaaaggaccagttgggcaagaatgaagaaggagccccacaggaaggaattctggaagatatgcctgtggatcctgacaatgaggcttatgaaatgccttctgaggaagggtatcaagactacgaacctgaagcctaagaaatatctttgctcccagtttcttgagatctgctgacagatgttccatcc

SEQ ID NO: 326440 - DNA, 905 bp, Artificial Sequence
  derived and/or modified sequence
gatagctgagggcgggggtggatgttggatggattagaaccatcacacttgggcctgctgtttgcctgagtttgaaccacaccccgatgtggtgtaaaggaattcattagccatggatgtattcatgaaaggactttcaaaggccaaggagggagttgtggctgctgctgagaaaaccaaacagggtgtggcagaagcagcaggaaagacaaaagagggtgttctctatgtaggctccaaaaccaaggagggagtggtgcatggtgtggcaacagtggctgagaagaccaaagagcaagtgacaaatgttggaggagcagtggtgacgggtgtgacagcagtagcccagaagacagtggagggagcagggagcattgcagcagccactggctttgtcaaaaaggaccagttgggcaagaatgaagaaggagccccacaggaaggaattctggaagatatgcctgtggatcctgacaatgaggcttatgaaatgccttctgaggaagggtatcaagactacgaacctgaagcctaagaaatatctttgctcccagtttcttgagatctgctgacagatgttccatcctgtacaagtgctcagttccaatgtgcccagtcatgacatttctcaaagtttttacagtgtatctcgaagtcttccatcagcagtgattgaagtatctgtacctgcccccactcagcatttcggtgcttccctttcactgaagtgaatacatggtagcagggtctttgtgtgctgtggattttgtggcttcaatctacgatgttaaaacaaattaaaaacacctaagtgactaccacttatttctaaatcctcactatttttttgttgctgttgttcagaagttgttagtgatttgctatcatatattataagattttta

SEQ ID NO: 326441 - protein, 784 aa, Artificial Sequence
  derived and/or modified sequence
MPHTLWMVWVLGVIISLSKEESSNQASLSCDRNGICKGSSGSLNSIPSGLTEAVKSLDLSNNRITYISNSDLQRCVNLQALVLTSNGINTIEEDSFSSLGSLEHLDLSYNYLSNLSSSWFKPLSSLTFLNLLGNPYKTLGETSLFSHLTKLQILRVGNMDTFTKIQRKDFAGLTFLEELEIDASDLQSYEPKSLKSIQNVSHLILHMKQHILLLEIFVDVTSSVECLELRDTDLDTFHFSELSTGETNSLIKKFTFRNVKITDESLFQVMKLLNQISGLLELEFDDCTLNGVGNFRASDNDRVIDPGKVETLTIRRLHIPRFYLFYDLSTLYSLTERVKRITVENSKVFLVPCLLSQHLKSLEYLDLSENLMVEEYLKNSACEDAWPSLQTLILRQNHLASLEKTGETLLTLKNLTNIDISKNSFHSMPETCQWPEKMKYLNLSSTRIHSVTGCIPKTLEILDVSNNNLNLFSLNLPQLKELYISRNKLMTLPDASLLPMLLVLKISRNAITTFSKEQLDSFHTLKTLEAGGNNFICSCEFLSFTQEQQALAKVLIDWPANYLCDSPSHVRGQQVQDVRLSVSECHRTALVSGMCCALFLLILLTGVLCHRFHGLWYMKMMWAWLQAKRKPRKAPSRNICYDAFVSYSERDAYWVENLMVQELENFNPPFKLCLHKRDFIPGKWIIDNIIDSIEKSHKTVFVLSENFVKSEWCKYELDFSHFRLFDENNDAAILILLEPIEKKAIPQRFCKLRKIMNTKTYLEWPMDEAQREGFWVNLRAAIKS

SEQ ID NO: 326442 - DNA, 2355 bp, Artificial Sequence
  derived and/or modified sequence
atgccccacaccctgtggatggtgtgggtgctgggcgtgatcatcagcctgagcaaggaggagagcagcaaccaggccagcctgagctgcgacagaaacggcatctgcaagggcagcagcggcagcctgaacagcatccccagcggcctgaccgaggccgtgaagagcctggacctgagcaacaacagaatcacctacatcagcaacagcgacctgcagagatgcgtgaacctgcaggccctggtgctgaccagcaacggcatcaacaccatcgaggaggacagcttcagcagcctgggcagcctggagcacctggacctgagctacaactacctgagcaacctgagcagcagctggttcaagcccctgagcagcctgaccttcctgaacctgctgggcaacccctacaagaccctgggcgagaccagcctgttcagccacctgaccaagctgcagatcctgagagtgggcaacatggacaccttcaccaagatccagagaaaggacttcgccggcctgaccttcctggaggagctggagatcgacgccagcgacctgcagagctacgagcccaagagcctgaagagcatccagaacgtgagccacctgatcctgcacatgaagcagcacatcctgctgctggagatcttcgtggacgtgaccagcagcgtggagtgcctggagctgagagacaccgacctggacaccttccacttcagcgagctgagcaccggcgagaccaacagcctgatcaagaagttcaccttcagaaacgtgaagatcaccgacgagagcctgttccaggtgatgaagctgctgaaccagatcagcggcctgctggagctggagttcgacgactgcaccctgaacggcgtgggcaacttcagagccagcgacaacgacagagtgatcgaccccggcaaggtggagaccctgaccatcagaagactgcacatccccagattctacctgttctacgacctgagcaccctgtacagcctgaccgagagagtgaagagaatcaccgtggagaacagcaaggtgttcctggtgccctgcctgctgagccagcacctgaagagcctggagtacctggacctgagcgagaacctgatggtggaggagtacctgaagaacagcgcctgcgaggacgcctggcccagcctgcagaccctgatcctgagacagaaccacctggccagcctggagaagaccggcgagaccctgctgaccctgaagaacctgaccaacatcgacatcagcaagaacagcttccacagcatgcccgagacctgccagtggcccgagaagatgaagtacctgaacctgagcagcaccagaatccacagcgtgaccggctgcatccccaagaccctggagatcctggacgtgagcaacaacaacctgaacctgttcagcctgaacctgccccagctgaaggagctgtacatcagcagaaacaagctgatgaccctgcccgacgccagcctgctgcccatgctgctggtgctgaagatcagcagaaacgccatcaccaccttcagcaaggagcagctggacagcttccacaccctgaagaccctggaggccggcggcaacaacttcatctgcagctgcgagttcctgagcttcacccaggagcagcaggccctggccaaggtgctgatcgactggcccgccaactacctgtgcgacagccccagccacgtgagaggccagcaggtgcaggacgtgagactgagcgtgagcgagtgccacagaaccgccctggtgagcggcatgtgctgcgccctgttcctgctgatcctgctgaccggcgtgctgtgccacagattccacggcctgtggtacatgaagatgatgtgggcctggctgcaggccaagagaaagcccagaaaggcccccagcagaaacatctgctacgacgccttcgtgagctacagcgagagagacgcctactgggtggagaacctgatggtgcaggagctggagaacttcaacccccccttcaagctgtgcctgcacaagagagacttcatccccggcaagtggatcatcgacaacatcatcgacagcatcgagaagagccacaagaccgtgttcgtgctgagcgagaacttcgtgaagagcgagtggtgcaagtacgagctggacttcagccacttcagactgttcgacgagaacaacgacgccgccatcctgatcctgctggagcccatcgagaagaaggccatcccccagagattctgcaagctgagaaagatcatgaacaccaagacctacctggagtggcccatggacgaggcccagagagagggcttctgggtgaacctgagagccgccatcaagagctag

SEQ ID NO: 326443 - DNA, 2355 bp, Artificial Sequence
  derived and/or modified sequence
atgccacatacattgtggatggtgtgggtgctgggtgtgatcatctcactgtcgaaagaagagtcaagcaatcaggcatctctgagctgtgataggaatgggatctgtaaaggcagctctggatctctgaacagtattccatccggcctcaccgaggccgtgaagtcacttgatctgagcaataaccgcatcacttatatctccaactcggatcttcagcggtgcgtgaaccttcaagcgctggtgctgacatcaaatggcattaatacgatcgaggaagatagctttagttcccttggttcattggaacacctggatttatcgtataactacctctccaaccttagttctagctggtttaaaccactctcttcattgacctttctgaacttactagggaatccatacaagacattgggcgaaacgagcctgttttcccatttaacaaagttacagatactgagagtaggtaatatggatacattcaccaagatccaaagaaaagacttcgctgggctgacatttctcgaagaattggagatagacgcctctgacctgcaatcttacgagcctaagtctctcaaatcaatccagaacgtttctcaccttattcttcatatgaagcagcatatcctgctgcttgagattttcgtggacgttacatcttcggtggaatgcctggaactgagagacacggatttagatacatttcactttagcgagttaagcactggcgagaccaatagtttgatcaaaaagtttacatttcggaatgtcaagatcactgacgagagcctctttcaggtgatgaagctgctcaatcaaatctctggattgctggagttagagttcgacgactgtaccttaaatggtgtaggaaactttcgtgcttctgacaacgatagagtaattgatcctgggaaggtcgagactttgaccattcggcgcctgcatattccacggttctatctgttttatgatctttcaaccctttacagcctgactgagagagtcaagagaatcacagtcgagaactctaaagtctttctggtgccttgtctgctttcacaacacctaaaatctctggagtatcttgacctgtccgagaatctgatggtggaggagtatcttaagaattcagcttgcgaagatgcctggccaagccttcagacactgattctgcgccagaaccatcttgcttcactagagaagaccggtgagacactgctaactctgaagaacctcactaatatcgatatttccaagaatagctttcacagcatgcctgagacatgccaatggcccgagaagatgaagtacctcaatctcagctctacccggatccattccgttaccggctgcataccaaaaacactcgaaattctggacgtaagcaacaacaacctgaaccttttttccctgaacttgcctcagcttaaggagctgtacatctctcgcaataaactgatgaccctccctgatgcgtcgttgttgccgatgttgctggtcctgaaaatctcccgcaacgccattaccaccttcagtaaagagcagctcgattctttccataccctgaagacactggaggcaggagggaacaacttcatctgtagctgtgaattcctgagcttcacccaagagcaacaggctctggccaaggttttgatcgattggccagccaattacctctgtgacagtcctagccacgtgagggggcagcaggtgcaagacgttcgtctgtccgtatcagagtgccatcgaactgccctggtgtcaggcatgtgttgtgcactgttcctcctgatcctgttaactggagtgctatgccacaggtttcatggcctgtggtatatgaaaatgatgtgggcatggctgcaggctaagaggaagccaaggaaagccccaagccggaatatttgctacgatgcattcgtgtcctactctgagagagacgcgtactgggtcgagaatcttatggttcaggagttggagaactttaacccacccttcaagctgtgtctccacaaaagagactttatccccgggaaatggatcatagacaacatcatcgactcaatagaaaagagccataaaacagtgtttgtccttagtgagaacttcgtcaaatccgagtggtgcaagtatgaactggacttctcccatttcaggcttttcgacgagaacaacgatgcagccatcctcatactcctcgagcccatcgaaaaaaaggcgataccgcagagattctgtaaactaaggaagataatgaacaccaaaacctaccttgagtggcccatggacgaagcccagcgggagggattctgggtaaacttgagagcagccattaaaagctag

SEQ ID NO: 326444 - DNA, 2355 bp, Artificial Sequence
  derived and/or modified sequence
atgccccacaccctgtggatggtgtgggtgctgggcgtcatcatcagcctgagcaaggaggagagcagcaaccaggccagcctgagctgtgacagaaatggcatctgcaagggcagcagcggcagcctgaacagcatccccagcggcctgacagaagctgtgaagagcctggacctgagcaacaaccgcatcacctacatcagcaacagcgacctgcagagatgtgtgaacctgcaggccctggtgctgaccagcaatggcatcaacaccattgaagaagattccttcagcagcctgggcagcctggagcacctggacctgagctacaactacctgagcaacctgagcagctcctggttcaagcccctgagcagcctgaccttcctgaacctgctgggcaacccctacaagaccctgggggagaccagcctcttcagccacctgaccaagctgcagatcctgcgggtgggcaacatggacaccttcaccaagatccagaggaaggactttgctggcctgaccttcctggaggagctggagattgatgccagtgacctgcagagctatgagcccaagagcctgaagagcatccagaatgtgagccacctgatcctgcacatgaagcagcacatcctgctgctggagatctttgtggatgtgaccagctctgtggagtgcctggagctgcgggacacagacctggacaccttccacttcagcgagctgagcactggagagaccaacagcctcatcaagaagttcaccttcagaaatgtgaagatcacagatgagagcctcttccaggtgatgaagctgctgaaccagatcagcggcctgctggagctggagtttgatgactgcaccctgaatggagtgggcaacttccgggccagtgacaatgacagagtcatcgaccccgggaaggtggagaccctgaccatccggcggctgcacatcccccgcttctacctgttctatgacctgagcaccctgtacagcctgacagagcgggtgaagaggatcaccgtggagaacagcaaggtgttcctggtgccctgcctgctgagccagcacctgaagagcctggagtacctggacctgtctgagaacctgatggtggaggagtacctgaagaacagcgcctgtgaagatgcctggcccagcctgcagaccctcatcctgcggcagaaccacctggccagcctggagaagacaggagagaccctgctgaccctgaagaacctgaccaacatcgacatcagcaagaacagcttccacagcatgcctgagacctgccagtggccagagaagatgaagtacctgaacctgagcagcacccgcatccacagcgtgacaggctgcatccccaagaccctggagatcctggatgtgagcaacaacaacctgaacctcttcagcctgaacctgccccagctgaaggagctgtacatcagcaggaacaagctgatgaccctgcctgatgccagcctgctgcccatgctgctggtgctgaagatcagcagaaatgccatcaccaccttcagcaaggagcagctggacagcttccacaccctgaagaccctggaggccggcggcaacaacttcatctgcagctgtgagttcctgtccttcacccaggagcagcaggccctggccaaggtgctgattgactggccagccaactacctgtgtgacagccccagccacgtgcggggccagcaggtgcaggatgtgcggctgtctgtgtctgagtgccacaggacagccctggtgtctggcatgtgctgtgccctcttcctgctgatcctgctgactggagtgctgtgccaccgcttccacggcctgtggtacatgaagatgatgtgggcctggctgcaggccaagaggaagcccaggaaggcccccagcaggaacatctgctatgatgcctttgtgtcctacagcgagagagatgcctactgggtggagaacctgatggtgcaggagctggagaacttcaacccccccttcaagctgtgcctgcacaagagggacttcatccctgggaagtggatcatcgacaacatcatcgacagcattgagaagagccacaagacagtgtttgtgctgtctgaaaattttgtgaagtctgagtggtgcaagtatgagctggacttcagccacttccggctgtttgatgaaaataatgatgctgccatcctgatcctgctggagcccatcgagaagaaggccatcccccagcgcttctgcaagctgaggaagatcatgaacaccaagacctacctggagtggcccatggatgaggcccagcgggagggcttctgggtgaacctgcgggccgccatcaagagctag

SEQ ID NO: 326445 - DNA, 2355 bp, Artificial Sequence
  derived and/or modified sequence
atgccccacaccctgtggatggtgtgggtgctgggcgtgatcatcagtctgtccaaggaggagtccagtaaccaggccagcctgtcctgcgaccggaatggcatttgtaaaggatcaagtggaagtctgaattccatccctagcggcctgaccgaagctgttaagagcctcgatctgagtaacaataggatcacctatatcagcaactctgacctgcagcgatgcgttaacttgcaggccctggtactcactagcaacgggataaatactattgaagaagacagtttttcgtcgctagggagccttgaacatctggatctttcgtataactatctgagtaatctatccagctcctggttcaaacctctttcctccctcaccttcctcaacctattgggcaatccctataagacccttggcgagaccagcttgttttcccacctgacaaaactgcagatactcagggtgggcaacatggacactttcactaaaatccagagaaaagactttgcagggttgacatttttagaagaattagagatcgacgcttccgacctacagagttacgaacctaagagcctgaagagtatccagaatgtgtctcatcttatactccacatgaagcagcatatcttactactagagatctttgtggacgttaccagcagtgtggagtgtctggagttgcgggatacagatctggacaccttccatttttccgagctctctactggtgagacgaattctctgatcaagaaattcacctttcggaacgtaaaaataaccgacgagtctctattccaagtaatgaagctactgaaccagatctccggtctgttggagcttgagtttgacgactgcaccctgaatggggttggtaactttagagcttcagacaatgatagggtgattgatccgggcaaggtagagacactgactatcagaaggttacatatcccccggttttatctgttctatgacctgtccacactctattctctaaccgaaagagtcaaaaggattaccgtcgagaactcaaaagtatttctagtgccttgtctgctcagccagcacctaaaatcgttggaatatttagacctttctgaaaacctgatggtagaagaatatttgaagaatagcgcgtgcgaggacgcttggccctctctgcagacccttattctgcgtcagaaccacctggcaagcttggagaagactggcgagacgctgctcaccctcaagaatctgacgaatattgacatctccaagaacagttttcattccatgcccgagacgtgtcaatggcccgagaagatgaagtacttaaatctttctagtacacgcatccacagcgtgaccggatgcatacccaagacccttgagattctggatgtgtccaataataatctcaatctgttcagtctcaacctcccacagttaaaggaactgtacatatcccggaataagctcatgacactgcctgatgcttccctcctaccgatgttgctggttttgaagatctctagaaacgcaatcacaacattcagcaaagagcaattggacagcttccacaccctgaaaaccctggaggccggcggtaacaatttcatatgttcctgtgagtttctgagtttcacccaggagcagcaggcactcgcaaaagttttgatcgactggcccgccaactatctatgcgattccccctctcatgtaagagggcagcaggtgcaggatgtccggttatcagtgtccgagtgccaccggacagctctcgtatccggcatgtgctgcgcactgtttctgcttatccttcttaccggtgtcctctgccaccgattccacgggctgtggtacatgaaaatgatgtgggcatggttgcaggccaaaaggaaaccgcgcaaggccccttccagaaatatctgttatgatgccttcgtttcatatagtgagcgcgatgcatactgggttgagaacctgatggttcaggagctcgagaatttcaaccctcctttcaagttatgtctgcataagcgcgattttatcccagggaaatggattatagacaatatcattgatagtattgaaaagtctcataagacagtgtttgttttgtcagagaactttgtaaaatccgagtggtgtaaatatgaattagacttttcacacttcagactgttcgacgagaacaatgacgcagcgattcttattctgttagaaccaatcgagaagaaagctatcccgcagaggttttgtaagctccgaaaaatcatgaacacaaaaacttatctcgaatggcctatggatgaagcccaaagagagggcttctgggtcaaccttagagcagccattaaatcttag

SEQ ID NO: 326446 - DNA, 2355 bp, Artificial Sequence
  derived and/or modified sequence
atgccccacacactgtggatggtgtgggttcttggagtgataatcagcctctccaaggaggaatcgtctaatcaggccagcctgtcttgcgaccgaaacggcatctgtaaaggcagttctggctccctcaatagcatacctagcgggctaactgaagctgtgaagtcactcgacctctccaataaccgcatcacatatatcagcaactcagacctccagagatgtgtgaatcttcaggctctcgtgcttacaagcaacggcattaatactatagaggaggatagcttttcgagcttaggaagcctcgaacatctggatctgtcatacaactacctaagtaacctttcctcatcatggtttaaacctctctccagtctgacattcctgaacctgctgggcaatccctataaaactctgggcgagacttcgttgttctcccatttgacgaagctacaaattcttagggttgggaacatggacacattcactaagattcagcgcaaggactttgccggtctaacatttctggaagagctggaaatcgatgccagcgacctgcagtcttatgagcccaaatcactgaaatctattcagaatgtttcccacctgatccttcacatgaaacagcatatcctgctcttggaaatttttgtggatgtgacgtcatccgtcgagtgtctcgagctgagagacactgatctggatacgttccacttctcagaattgagcaccggagaaactaactccctgataaagaagtttacgttccgcaatgtgaaaatcactgacgaaagtttgttccaggtaatgaagctgctcaatcaaatttctggcctacttgaactggagttcgatgattgcacgcttaacggggtgggcaatttccgtgccagcgacaacgacagagtgattgatcctggcaaggtggagactttaaccatcagaagattacatatcccgaggttttacttgttctatgatctgagcacactgtattcattgaccgaacgagtgaagcgtattactgtcgagaacagcaaagtgttccttgtcccatgtctgctgtcccaacacttaaaaagtcttgaatacctggacttatctgagaacttgatggtggaggagtacctaaagaattctgcatgtgaagatgcctggccaagccttcagacactaatcctgcggcagaatcatttggctagcctcgagaagactggggagacccttctcacactgaagaatttaaccaacattgacatctctaaaaattccttccattcaatgcccgagacctgccagtggcccgagaaaatgaaatatctgaacctgtcttccactaggatccattccgttaccggatgcattccaaaaaccctggaaattcttgacgtgtcaaataacaatctcaatttgtttagccttaacctgcctcagctgaaagagttgtacatttctcggaacaagctcatgaccctccctgatgcgagcctgcttcctatgctcctggttttgaaaattagcaggaacgctattacaacattctctaaagagcaactggattcctttcataccttgaaaaccttggaggcgggaggaaacaattttatttgcagctgcgaattcttatctttcacacaggaacaacaggcccttgccaaggtgttgatagactggcccgctaactacctatgcgattcaccgtcacacgttcgagggcaacaggtccaagatgttcggttgagtgtgtccgagtgccacaggacggctctagtgtctgggatgtgctgtgccctgtttctcctcatcttgcttaccggagtgttgtgccaccgctttcacggcctttggtacatgaaaatgatgtgggcttggcttcaagccaagcggaagccaaggaaggccccttcccgaaacatttgctatgacgcatttgtctcctattccgaacgggacgcatactgggtggaaaatctgatggttcaggaactcgagaattttaatcctccattcaaactctgcttacacaaacgggacttcattccaggtaagtggataatagacaacattattgattctattgaaaagtctcacaagaccgtgttcgttctttcagaaaacttcgtcaaatccgagtggtgcaaatatgagctggactttagccacttccggctcttcgatgagaataacgatgctgctatcctgattctcttagaacccatcgaaaagaaggccatacctcagaggttttgtaagcttcggaaaattatgaacaccaaaacttatctcgagtggccgatggatgaagcccagagggaaggattctgggtaaacctgagggctgccatcaagtcttag

SEQ ID NO: 326447 - DNA, 4200 bp, Artificial Sequence
  derived and/or modified sequence
aagcactaatggactaagacaaaaagattccattatgaaagtgaaaaggcaaccgcagagtggcagaagcttttggagatgatgaatatgtttacttcctggattgcggtgatgataccatgagtgtatacatatgtgtgtatacataatgtatacaaattgtgttcattgattatgtacagtttctttgtataccaattataccttaataaagctaaggaaaaaaaaaagaaaatccagaataaatatgcatggtatgacccatttatttaaaaaaaaaaagagggaatgcgaagcagtggttttggtgcgaacacaaaaattctggcttcaacagcatttaaattcccaaaccaagcatgtttgtgttttaattctttgtggccataaattgtacagctcaggcctttatagtctctcagattctgtgaatgtggggaattagttttactcataaaaagttttgttcttggggataaattttttaaaaaaatttttgtatagttagcacactgagaaaatacagacaaaggcatacagatgcaagaaatgaggtagctgaatagaccaaagaatgatatagggcccagaaggtaggcaaagagaaagttgttgggtttatggttacaagtaaactagcagttgtggtgcagatagttttatttcccccacattaatctgaacagcccatccagacttaaacactgctttttgcatttacttctaggcaggaagacagggttctgatggtgtgagtctccttcaactcagcaaaccaccttggtctgcctcgagtttccaacacccctcctgcctgctagtgataggtgtgaggcaggttgatgaacatggaacttttttcttttggtcccaaagcatgctactcctggagtttcattcagtgaatgagaactatagtttggttctgtgagatctctatgaatcaaggcggccactgaagcggagaaaagaaatgcttaaatgttaagaaagtttgaagtgcagaaaaaggtgattgtaaatccatatggttaagcttagcccatttcttaaaaggcttgattgctcattcctccattcattgatttactcactcttccaatccatgttattgagtcttgctctgtaattccggatggttgtgcttttaagtactgcatagtggttgtatgtctgtgttagcattgctgaatgtatcagggaattcatttttttatccccattcattcgttccattcatctgtttctctctctctctctctttgtgtgtgtgtgtgtgtgtgtgtgtgtgtgtgtgtgtgtgtgtgttatgcctagaaaacatttctcaagaattagaattacgatatgctgtcaaacacaatgacttatttgaacctcttttatttgtaggttgaagcactggacaatgccacatactttgtggatggtgtgggtcttgggggtcatcatcagcctctccaaggaagaatcctccaatcaggcttctctgtcttgtgaccgcaatggtatctgcaagggcagctcaggatctttaaactccattccctcagggctcacagaagctgtaaaaagccttgacctgtccaacaacaggatcacctacattagcaacagtgacctacagaggtgtgtgaacctccaggctctggtgctgacatccaatggaattaacacaatagaggaagattctttttcttccctgggcagtcttgaacatttagacttatcctataattacttatctaatttatcgtcttcctggttcaagcccctttcttctttaacattcttaaacttactgggaaatccttacaaaaccctaggggaaacatctcttttttctcatctcacaaaattgcaaatcctgagagtgggaaatatggacaccttcactaagattcaaagaaaagattttgctggacttaccttccttgaggaacttgagattgatgcttcagatctacagagctatgagccaaaaagtttgaagtcaattcagaatgtaagtcatctgatccttcatatgaagcagcatattttactgctggagatttttgtagatgttacaagttccgtggaatgtttggaactgcgagatactgatttggacactttccatttttcagaactatccactggtgaaacaaattcattgattaaaaagtttacatttagaaatgtgaaaatcaccgatgaaagtttgtttcaggttatgaaacttttgaatcagatttctggattgttagaattagagtttgatgactgtacccttaatggagttggtaattttagagcatctgataatgacagagttatagatccaggtaaagtggaaacgttaacaatccggaggctgcatattccaaggttttacttattttatgatctgagcactttatattcacttacagaaagagttaaaagaatcacagtagaaaacagtaaagtttttctggttccttgtttactttcacaacatttaaaatcattagaatacttggatctcagtgaaaatttgatggttgaagaatacttgaaaaattcagcctgtgaggatgcctggccctctctacaaactttaattttaaggcaaaatcatttggcatcattggaaaaaaccggagagactttgctcactctgaaaaacttgactaacattgatatcagtaagaatagttttcattctatgcctgaaacttgtcagtggccagaaaagatgaaatatttgaacttatccagcacacgaatacacagtgtaacaggctgcattcccaagacactggaaattttagatgttagcaacaacaatctcaatttattttctttgaatttgccgcaactcaaagaactttatatttccagaaataagttgatgactctaccagatgcctccctcttacccatgttactagtattgaaaatcagtaggaatgcaataactacgttttctaaggagcaacttgactcatttcacacactgaagactttggaagctggtggcaataacttcatttgctcctgtgaattcctctccttcactcaggagcagcaagcactggccaaagtcttgattgattggccagcaaattacctgtgtgactctccatcccatgtgcgtggccagcaggttcaggatgtccgcctctcggtgtcggaatgtcacaggacagcactggtgtctggcatgtgctgtgctctgttcctgctgatcctgctcacgggggtcctgtgccaccgtttccatggcctgtggtatatgaaaatgatgtgggcctggctccaggccaaaaggaagcccaggaaagctcccagcaggaacatctgctatgatgcatttgtttcttacagtgagcgggatgcctactgggtggagaaccttatggtccaggagctggagaacttcaatccccccttcaagttgtgtcttcataagcgggacttcattcctggcaagtggatcattgacaatatcattgactccattgaaaagagccacaaaactgtctttgtgctttctgaaaactttgtgaagagtgagtggtgcaagtatgaactggacttctcccatttccgtctttttgatgagaacaatgatgctgccattctcattcttctggagcccattgagaaaaaagccattccccagcgcttctgcaagctgcggaagataatgaacaccaagacctacctggagtggcccatggacgaggctcagcgggaaggattttgggtaaatctgagagctgcgataaagtcctaggttcccatatttaagaccagtctttgtctagttgggatctttatgtcactagttatagttaagttcattcagacataattatataaaaactacgtggatgtaccgtcatttgaggacttgcttactaaaactacaaaacttcaaattttgtctggggtgctgttttataaacatatgccagatttaaaaattggtttttggtttttcttttttctatgagataaccatgatcataagtctattactgatatctgaatatagtcccttggtatccaagggaattggttgcaggatcctcgtggatatcaaaattcatagatgatcaagtcccttataagagtggcatagtatttgcatataacctgtgtacattctcctgtatactttaaatcatctctagattacttatgatacccaatacaatgtaaatactatgt

SEQ ID NO: 326448 - DNA, 619 bp, Artificial Sequence
  derived and/or modified sequence
cgtctctctgtggttcagtcacatttggggtaaaactggaaccgaagccctatagggtcccctgagggagagagtgggcatcgggcagccggggaaccgctttagtgataactttgactgcggttcccaggcggtgcagggtcagcggctcgcgccccggcgcgcgggctctctttttctctttctttctttccctctctctctttctaaacgaaggagcggtcggcgcgctaatgcatgagaaagagcaacttttcttaatttccaatcttggagacagcttttaatcagtgcgagacgcagagaagataaaaagagggtgatcggtttcacagggtccatggagggaagcccatccctgagacgcatgacagtgatgcgggagaagggccggcgccaggctgtcaggggcccggccttcatgttcaatgaccgcggcaccagcctcaccgccgaggaggagcgcttcctcgacgccgccgagtacggcaacatcccagtggtgcgcaagatgctggaggagtccaagacgctgaacgtcaactgcgtggactacatgggccagaacgcgctgcagctggctgtgggcaacgagcacctggaggtgaccgagctgctg

SEQ ID NO: 326449 - protein, 93 aa, Artificial Sequence
  derived and/or modified sequence
MEGSPSLRRMTVMREKGRRQAVRGPAFMFNDRGTSLTAEEERFLDAAEYGNIPVVRKMLEESKTLNVNCVDYMGQNALQLAVGNEHLEVTELL

SEQ ID NO: 326450 - protein, 265 aa, Artificial Sequence
  derived and/or modified sequence
MNMSVLTLQEYEFEKQFNENEAIQWMQENWKKSFLFSALYAAFIFGGRHLMNKRAKFELRKPLVLWSLTLAVFSIFGALRTGAYMVYILMTKGLKQSVCDQGFYNGPVSKFWAYAFVLSKAPELGDTIFIILRKQKLIFLHWYHHITVLLYSWYSYKDMVAGGGWFMTMNYGVHAVMYSYYALRAAGFRVSRKFAMFITLSQITQMLMGCVVNYLVFCWMQHDQCHSHFQNIFWSSLMYLSYLVLFCHFFFEAYIGKMRKTTKAE

SEQ ID NO: 326451 - protein, 108 aa, Artificial Sequence
  derived and/or modified sequence
MNMSVLTLQEYEFEKQFNENEAIQWMQENWKKSFLFSALYAAFIFGGRHLMNKRAKFELRKPLVLWSLTLAVFSIFGALRTGAYMVYILMTKGLKQSVCDQGFYNGPV

SEQ ID NO: 326452 - protein, 137 aa, Artificial Sequence
  derived and/or modified sequence
MNMSVLTLQEYEFEKQFNENEAIQWMQENWKKSFLFSALYAAFIFGGRHLMNKRAKFELRKPLVLWSLTLAVFSIFGALRTGAYMVYILMTKGLKQSVCDQGFYNGPVSKFWAYAFVLSKAPELGDTIFIILRKQKL

SEQ ID NO: 326453 - DNA, 798 bp, Artificial Sequence
  derived and/or modified sequence
atgaatatgagtgtcctgacccttcaagaatacgaattcgaaaaacagtttaacgaaaatgaggcgatccagtggatgcaggaaaattggaaaaagagcttcctgtttagtgccctctacgccgctttcatattcggcgggcggcacctgatgaacaaaagagccaagtttgagctgaggaagcctctggtcctgtggtctctgacacttgccgttttttccatcttcggtgcactaagaaccggagcctatatggtatatatcctcatgaccaagggccttaaacagtctgtgtgtgatcaagggttttataatgggcccgttagcaaattctgggcatacgcatttgtgctttcgaaggctcctgaattgggagacaccatcttcattatccttaggaaacaaaagcttattttccttcactggtatcatcacatcaccgtactgctctactcctggtacagttacaaagacatggtcgcagggggggggtggttcatgaccatgaactacggcgtccacgcagtcatgtactcatattatgcactgagagcagctggctttcgggtgtctagaaagtttgccatgttcattacactgagccagattacccagatgctgatgggttgtgtagtaaactaccttgtcttctgttggatgcaacatgatcagtgccactctcacttccagaatatcttctggtcatctctgatgtacctgtcctacctggtgttattttgccacttcttttttgaggcatatattggcaagatgagaaagaccacaaaggccgagtag

SEQ ID NO: 326454 - DNA, 798 bp, Artificial Sequence
  derived and/or modified sequence
atgaatatgtccgtgctgacgctacaggagtatgagttcgagaagcagtttaacgagaacgaggccatccagtggatgcaggagaattggaaaaaaagttttctgttcagcgcactgtacgccgctttcatatttgggggtcggcatctgatgaataaaagggctaagttcgagctcagaaaacctctggtcttgtggtctctaaccctagccgtgttttctatcttcggggcccttcgtacaggggcctatatggtctacatacttatgacaaagggtcttaaacagagcgtgtgcgaccagggcttctacaacgggcccgtgagtaaattttgggcttatgcatttgttctgtcaaaggctcctgagttaggtgatacaatcttcattatcttgcgcaaacagaaactcatttttctgcactggtaccatcacattactgttctgctgtatagttggtacagttataaggacatggttgccggcggcggctggttcatgacgatgaactacggcgtccacgcagtcatgtacagttactatgccttgcgcgcagcaggctttagggtctctagaaagtttgccatgttcatcaccttgtcccagattacacaaatgctgatgggatgtgtagtgaactatctggtgttttgctggatgcagcacgaccagtgtcactcccattttcagaatatcttctggagttctctgatgtacctcagttatctggtgctgttctgccatttcttcttcgaggcatatattggtaaaatgaggaagacaaccaaagccgaatag

SEQ ID NO: 326455 - DNA, 327 bp, Artificial Sequence
  derived and/or modified sequence
atgaacatgagtgtactaactctgcaggaatacgagttcgagaagcagtttaatgagaacgaagccatccagtggatgcaggagaactggaaaaagtctttcctgttttctgccttgtacgccgctttcatcttcgggggcaggcacttgatgaataagcgggccaagttcgagttacggaaaccacttgttctttggtctctcaccctggctgtgttcagtattttcggagctcttcggacgggagcgtacatggtgtacattctgatgacaaaaggtcttaagcagtctgtttgcgatcaggggttttacaacggccccgtatag

SEQ ID NO: 326456 - DNA, 414 bp, Artificial Sequence
  derived and/or modified sequence
atgaacatgtccgttttgaccttacaggagtacgagttcgagaagcagttcaacgaaaacgaagcgatccagtggatgcaagagaactggaaaaaatccttcctgttcagtgcattatacgctgcttttatctttggaggtcgtcacctcatgaacaagagggcaaaatttgaactgagaaagcccctagtgctgtggtcgctcacactggccgtgttctctatttttggagccctacgaaccggcgcatatatggtgtatattctgatgaccaaaggtctgaagcagagcgtgtgtgatcagggcttctacaacgggcctgtgagcaagttttgggcttatgctttcgttctgagtaaagcccctgaattaggagacactatattcatcatccttcggaaacagaaactgtag

SEQ ID NO: 326457 - DNA, 798 bp, Artificial Sequence
  derived and/or modified sequence
atgaacatgtctgtgctgaccctgcaggagtatgaatttgagaagcagttcaatgaaaatgaggccatccagtggatgcaggagaactggaagaagagcttcctgttcagcgccctgtatgctgccttcatctttggaggccgccacctgatgaacaagagggccaagtttgagctgaggaagcccctggtgctgtggagcctgaccctggccgtgttcagcatctttggagccctgaggactggagcctacatggtgtacatcctgatgaccaagggcctgaagcagagcgtgtgtgaccagggcttctacaatggacctgtgtccaagttctgggcctatgcctttgtgctgagcaaggcccctgagctgggggacaccatcttcatcatcctgaggaagcagaagctgatcttcctgcactggtaccaccacatcaccgtgctgctgtacagctggtacagctacaaggacatggtggccggcggcggctggttcatgaccatgaactatggagtgcatgctgtgatgtacagctactatgccctgcgggccgccggcttccgggtgtccaggaagtttgccatgttcatcaccctgagccagatcacccagatgctgatgggctgtgtggtgaactacctggtgttctgctggatgcagcacgaccagtgccacagccacttccagaacatcttctggagcagcctgatgtacctgagctacctggtgctcttctgccacttcttctttgaggcctacatcggcaagatgaggaagaccaccaaggccgagtag

SEQ ID NO: 326458 - DNA, 327 bp, Artificial Sequence
  derived and/or modified sequence
atgaacatgtctgtgctgaccctgcaggagtatgaatttgagaagcagttcaatgaaaatgaggccatccagtggatgcaggagaactggaagaagagcttcctgttcagcgccctgtatgctgccttcatctttggaggccgccacctgatgaacaagagggccaagtttgagctgaggaagcccctggtgctgtggagcctgaccctggccgtgttcagcatctttggagccctgaggactggagcctacatggtgtacatcctgatgaccaagggcctgaagcagagcgtgtgtgaccagggcttctacaatggacctgtgtag

SEQ ID NO: 326459 - DNA, 414 bp, Artificial Sequence
  derived and/or modified sequence
atgaacatgtctgtgctgaccctgcaggagtatgaatttgagaagcagttcaatgaaaatgaggccatccagtggatgcaggagaactggaagaagagcttcctgttcagcgccctgtatgctgccttcatctttggaggccgccacctgatgaacaagagggccaagtttgagctgaggaagcccctggtgctgtggagcctgaccctggccgtgttcagcatctttggagccctgaggactggagcctacatggtgtacatcctgatgaccaagggcctgaagcagagcgtgtgtgaccagggcttctacaatggacctgtgtccaagttctgggcctatgcctttgtgctgagcaaggcccctgagctgggggacaccatcttcatcatcctgaggaagcagaagctgtag

SEQ ID NO: 326460 - DNA, 798 bp, Artificial Sequence
  derived and/or modified sequence
atgaacatgagcgtgctgaccctgcaggagtacgagttcgagaagcagtttaacgaaaacgaagcaatccaatggatgcaggaaaactggaaaaagtctttcctgttctccgccctctacgccgccttcatattcggaggaaggcacctgatgaacaagcgggcgaaatttgagctccgcaagcctcttgtcctgtggtcactgacgttggccgtgttctcaattttcggggcgctcaggaccggggcctacatggtgtacatccttatgactaaagggttgaaacagagcgtgtgcgaccagggattttacaacggtccagtgagcaaattttgggcctacgctttcgtgctgtctaaagcaccagaactcggtgatactatttttattattctgcgaaagcagaaattaatatttctccattggtatcatcacattaccgtgctcctatattcctggtactcatacaaagatatggttgcggggggcggatggttcatgactatgaactacggtgttcacgctgttatgtatagttactacgcactgcgcgccgcgggcttccgcgtgtctcgcaagtttgcgatgttcattaccctgagccaaatcactcagatgctgatgggctgtgtggtgaactatctggtgttctgctggatgcagcacgaccagtgtcactctcattttcaaaacatattttggagttcactgatgtacctctcatatctcgttctcttctgccacttcttctttgaggcctacataggtaagatgagaaaaaccaccaaggctgaatag

SEQ ID NO: 326461 - DNA, 798 bp, Artificial Sequence
  derived and/or modified sequence
atgaacatgagcgtgctgaccctgcaggagtacgagttcgagaagcagttcaacgagaatgaggccatacagtggatgcaggaaaactggaagaaatcattcttattcagcgccctttatgctgcctttatctttggagggcggcacttaatgaataagagggccaaattcgagcttcgtaagcccctcgtcctctggtctctgactctggcagtttttagcatcttcggagccctccgaacaggcgcgtacatggtttacattttaatgaccaaggggctgaaacagtccgtttgtgaccagggcttctacaatgggcccgtcagcaaattctgggcctacgcctttgtattatctaaggcaccggagctgggcgatactatatttattatactccggaaacaaaagctgatttttctgcactggtatcaccatataaccgtgttgctgtattcctggtactcatacaaagacatggtggcaggcggcggttggttcatgacgatgaattatggagtgcacgctgtcatgtactcttattatgctctgagggcggctggtttcagggtttctcgaaaatttgccatgttcattactctctcacaaattacccagatgctcatgggatgcgtggttaattacttagtgttttgttggatgcagcacgaccaatgtcactcccattttcagaatattttttggagcagcttgatgtacctgtcttatcttgtgctcttttgtcacttcttcttcgaggcctatattggcaagatgcgaaagaccacgaaggccgagtag

SEQ ID NO: 326462 - DNA, 327 bp, Artificial Sequence
  derived and/or modified sequence
atgaacatgagcgtgctgaccctgcaggagtacgagttcgagaagcagttcaatgaaaatgaggccatccagtggatgcaggagaactggaaaaagagctttctattctctgccctctacgccgccttcatatttggtgggcgccaccttatgaacaaaagagccaaattcgagctgaggaagcctctggtgctgtggtctttaaccctggctgttttttccatttttggagcattgcgtacaggcgcctatatggtgtatattctgatgacaaagggtctcaagcagtctgtgtgcgaccaagggttttacaacgggcccgtctag

SEQ ID NO: 326463 - DNA, 414 bp, Artificial Sequence
  derived and/or modified sequence
atgaacatgagcgtgctgaccctgcaggagtacgagttcgagaagcaattcaacgaaaacgaggctatacagtggatgcaggagaactggaaaaagagcttcctgttttccgccttgtacgccgcatttatttttggagggagacatctgatgaataagcgcgccaagtttgaacttcggaagccattggtgttgtggtctctgactctggctgtgtttagcatatttggggctcttaggacaggggcttacatggtctacatcttgatgactaaagggctgaaacagtccgtttgtgatcaggggttttacaatgggccggtctccaaattttgggcctatgccttcgtcctgagcaaagcccccgaactgggagacacgatctttattattctgaggaagcagaagctctag

SEQ ID NO: 326464 - DNA, 798 bp, Artificial Sequence
  derived and/or modified sequence
atgaacatgtctgtgttaacattacaggaatatgaattcgagaaacagtttaacgagaatgaagctatccagtggatgcaggaaaattggaagaaaagtttcctattcagcgccttgtatgctgcattcatatttggtggcaggcatctgatgaacaagcgtgccaagtttgagctccggaaaccgctcgtgttgtggtccctcacgctggcggtgttcagcatctttggagctctccggaccggcgcttatatggtgtatatccttatgactaagggtctgaagcaatcagtgtgtgatcagggcttctacaacgggccagtctccaaattctgggcctacgctttcgttctgagtaaagcgccagaactgggcgatactattttcatcatactgcggaagcaaaagctcatctttttgcactggtaccaccatattacagtccttttgtactcttggtatagctataaagatatggtagctggagggggttggtttatgacaatgaactacggggttcacgccgtcatgtactcttactatgccctgagggccgctggtttccgcgttagtaggaagttcgctatgttcataacgttgagccaaattacccaaatgctcatgggctgcgtcgtgaattacttggtgttttgttggatgcagcacgaccagtgtcattcccacttccagaatatcttttggagctcccttatgtatttgtcctacttggtcctgttttgccacttctttttcgaggcctatatcggtaagatgagaaagacaaccaaagcagagtag

SEQ ID NO: 326465 - DNA, 798 bp, Artificial Sequence
  derived and/or modified sequence
atgaacatgtcagtactcacgttgcaggagtatgagttcgaaaagcagtttaatgagaatgaagccattcaatggatgcaggagaattggaagaagtctttcctctttagtgctctgtacgcagcattcattttcgggggtcgacatctgatgaataagagggcaaaattcgaactccgaaagcctctggtgctttggtctctcacgttagctgtcttttccatattcggagcgctgcgcacaggcgcttacatggtgtatattctgatgactaagggtctgaagcagagcgtgtgcgatcagggtttttacaatggacccgtatctaaattctgggcatacgcatttgtcttgtccaaggctccggagctcggcgatacgatctttattatactgcgtaaacagaaactcatattcctccactggtatcaccatatcacggtgctgttgtattcctggtacagctacaaagacatggtggccggaggtggttggtttatgaccatgaactacggcgtgcatgcagtgatgtacagctactacgcactgagggctgcaggttttagggtctctcgcaagtttgctatgtttatcactctcagccagatcacccaaatgcttatgggctgcgtggtgaattacctcgtcttctgttggatgcagcacgaccagtgtcactcacacttccaaaacatcttttggagctctctcatgtacctctcttacttggtgctgttttgccatttcttctttgaggcatacatcggtaaaatgcgtaaaactacaaaagccgagtag

SEQ ID NO: 326466 - DNA, 327 bp, Artificial Sequence
  derived and/or modified sequence
atgaatatgagcgtccttacccttcaggaatacgagttcgagaaacaatttaatgaaaacgaggccatccagtggatgcaagaaaactggaagaagagtttcctgtttagcgctttgtatgcagcctttatctttggcggtcggcatctgatgaataagagggcaaaatttgaactgcgcaaaccattggtgctgtggagtttgacactggccgtgtttagtatctttggggctttgaggaccggagcatatatggtctacattttgatgaccaagggcctaaaacagagcgtttgcgatcagggtttctacaatgggcctgtgtag

SEQ ID NO: 326467 - DNA, 414 bp, Artificial Sequence
  derived and/or modified sequence
atgaatatgagcgtgcttaccttgcaggagtatgaattcgagaaacagtttaacgaaaatgaagccattcagtggatgcaggaaaattggaaaaagagctttctgttcagtgccttgtatgccgcatttatatttggtggtcggcacttgatgaataagagggcaaaatttgagttgcggaaacctttggtcctctggtctttgaccctggccgtgttttcaatctttggcgcactgaggactggtgcctacatggtatacatccttatgaccaaaggcctgaaacagtccgtgtgcgatcaaggcttctataatggtcccgtttctaaattctgggcctacgcctttgttctttcaaaagcccctgagctgggagatacaatttttatcatcttaaggaaacagaagttatag

SEQ ID NO: 326468 - DNA, 798 bp, Artificial Sequence
  derived and/or modified sequence
atgaacatgagcgtgctgaccctgcaggagtacgagttcgagaagcagttcaacgagaacgaggccatccagtggatgcaggagaactggaagaagagcttcctgttcagcgccctgtacgccgccttcatcttcggcggcagacacctgatgaacaagagagccaagttcgagctgagaaagcccctggtgctgtggagcctgaccctggccgtgttcagcatcttcggcgccctgagaaccggcgcctacatggtgtacatcctgatgaccaagggcctgaagcagagcgtgtgcgaccagggcttctacaacggccccgtgagcaagttctgggcctacgccttcgtgctgagcaaggcccccgagctgggcgacaccatcttcatcatcctgagaaagcagaagctgatcttcctgcactggtaccaccacatcaccgtgctgctgtacagctggtacagctacaaggacatggtggccggcggcggctggttcatgaccatgaactacggcgtgcacgccgtgatgtacagctactacgccctgagagccgccggcttcagagtgagcagaaagttcgccatgttcatcaccctgagccagatcacccagatgctgatgggctgcgtggtgaactacctggtgttctgctggatgcagcacgaccagtgccacagccacttccagaacatcttctggagcagcctgatgtacctgagctacctggtgctgttctgccacttcttcttcgaggcctacatcggcaagatgagaaagaccaccaaggccgagtag

SEQ ID NO: 326469 - DNA, 327 bp, Artificial Sequence
  derived and/or modified sequence
atgaacatgagcgtgctgaccctgcaggagtacgagttcgagaagcagttcaacgagaacgaggccatccagtggatgcaggagaactggaagaagagcttcctgttcagcgccctgtacgccgccttcatcttcggcggcagacacctgatgaacaagagagccaagttcgagctgagaaagcccctggtgctgtggagcctgaccctggccgtgttcagcatcttcggcgccctgagaaccggcgcctacatggtgtacatcctgatgaccaagggcctgaagcagagcgtgtgcgaccagggcttctacaacggccccgtgtag

SEQ ID NO: 326470 - DNA, 414 bp, Artificial Sequence
  derived and/or modified sequence
atgaacatgagcgtgctgaccctgcaggagtacgagttcgagaagcagttcaacgagaacgaggccatccagtggatgcaggagaactggaagaagagcttcctgttcagcgccctgtacgccgccttcatcttcggcggcagacacctgatgaacaagagagccaagttcgagctgagaaagcccctggtgctgtggagcctgaccctggccgtgttcagcatcttcggcgccctgagaaccggcgcctacatggtgtacatcctgatgaccaagggcctgaagcagagcgtgtgcgaccagggcttctacaacggccccgtgagcaagttctgggcctacgccttcgtgctgagcaaggcccccgagctgggcgacaccatcttcatcatcctgagaaagcagaagctgtag

SEQ ID NO: 326471 - DNA, 3090 bp, Artificial Sequence
  derived and/or modified sequence
cacgagggggaggagatttccctgtagacgagtaaaaagggtgatggacaaacgtgcgggcactaagaccgcaaggcattcatttcctcctacggtggatgcggacgccgggaggaggagagccccagagagaggagctgggagcggaggcgcaggcaatgctcagccctggatgtagctgagaggctgggagaagagacgaccgctggagaccgagcggcgtggggaagacctaggggggtgggtgggggaagcagacaggagaacactcgaaatcaagcgctttacagattattttattttgtatagagaacacgtagcgactccgaagatcagccccaatgaacatgtcagtgttgactttacaagaatatgaattcgaaaagcagttcaacgagaatgaagccatccaatggatgcaggaaaactggaagaaatctttcctgttttctgctctgtatgctgcctttatattcggtggtcggcacctaatgaataaacgagcaaagtttgaactgaggaagccattagtgctctggtctctgacccttgcagtcttcagtatattcggtgctcttcgaactggtgcttatatggtgtacattttgatgaccaaaggcctgaagcagtcagtttgtgaccagggtttttacaatggacctgtcagcaaattctgggcttatgcatttgtgctaagcaaagcacccgaactaggagatacaatattcattattctgaggaagcagaagctgatcttcctgcactggtatcaccacatcactgtgctcctgtactcttggtactcctacaaagacatggttgccgggggaggttggttcatgactatgaactatggcgtgcacgccgtgatgtactcttactatgccttgcgggcggcaggtttccgagtctcccggaagtttgccatgttcatcaccttgtcccagatcactcagatgctgatgggctgtgtggttaactacctggtcttctgctggatgcagcatgaccagtgtcactctcactttcagaacatcttctggtcctcactcatgtacctcagctaccttgtgctcttctgccatttcttctttgaggcctacatcggcaaaatgaggaaaacaacgaaagctgaatagtgttggaactgaggaggaagccatagctcagggtcatcaagaaaaataatagacaaaagaaaatggcacaaggaatcacacgtggtgcagctaaaacaaaacaaaacatgagcaaacacaaaacccaaggcagcttagggataattaggttgatttaacccagtaagtttatgatccttttagggtgaggactcactgagtgcacctccatctccaagcactgctgctggaagaccccattccctctttatctatcaactctaggacaagggagaacaaaagcaagccagaagcagaggagactaatcaaaggcaaacaaaggctattaacacataggaaaaaatgtatttactaagtgtcacatttctctaagatgaaagatttttactctagaaactgtgcgagcacaacacacacaatcctttctaactttatggacactaaactggagccaatagaaaagacaaaaatgaaagagacacagggtgtatatctagaacgataatgcttttgcagaaactaaagcctttttaagaaatgccagctgctgtagaccccatgagaaaagatgtcttaatcatccttatgaaaacagatgtaaacaactatatttcaactaacttcatcttcactgcatagcctcaggctagtgagtttgccaaaaccaaagggggtgaatacttccccaagattcttcctgggaggatggaaacagtgcagcccaggtcccatgggggcagctccatcccagagcatttctgatagttgaactgtaatttctactcttaagtgagatatgaagcattatccttttgttcagttgccccgggcttttgaacagaagagtaaatacagaattgaaaaagataaacactcaaccaaacaatgtgaaaacgggttctgtagtatttgtaaaaaggcccggcccaggaccactgtgagctggaaaagggagaaaggcagtgggaaaagaggtgagccgaagatcaattcgacagacagatggtgtgtatgcccctccctgtttgacttcacacacactcataactttccaaatgaaaccccacagtatagcgcatattttcgatatttttgtgaattccaaaaggaaatcacagggctgttcgaaatattgggggaacactgtgtttctgcatcatctgcatttgctccccaagcaatgtagaggtgtttaaagggccctctgctggctgagtggcaatactacaacaaacttcaaggcaagtttggctgaaaacagttgacaacaaagggcccccatacacttatccctcaaattttaagtgatatgaaatacttgtcatgtctttggccaaatcagaagatattcatcctgcttcaagtcagcttcagaaatgttttaaaagggactttagctctggaactcaaaatcaatttattaagagccatattctttaaaaaaaaaaagctggataatattctctgtaatatttcagtcctttacaagccaaatacatgtgtcaatgtttctagtatttcaaagaagcaattatgtaaagttgttcaatgtgacataatagtattataattggttaagtagcttaatgattaggcaaactagatgaaaagattaggggcttccacactgcatagattacacgcacatagccacgcatacacacacagacacacagatgtggggtacactgaacttcaaagcccaaatgaatagaaacacattttctggctagcagaaaaaaacaaaacaaaactgttgtttctctttcttgctttgagagtgtacagtaaaagggattttttcgaattatttttatattattttagctttaattgtgctgtcgttcatgaaacagagctgctctgcttttctgtcagagatggcaagggctttttcagcatctcgtttatgtgtggaatttaaaaagaataaagttttattccattctg

SEQ ID NO: 326472 - DNA, 6454 bp, Artificial Sequence
  derived and/or modified sequence
gtagacgagtaaaaagggtgatggacaaacgtgcgggcactaagaccgcaaggcattcatttcctcctacggtggatgcggacgccgggaggaggagagccccagagagaggagctgggagcggaggcgcagagaacacgtagcgactccgaagatcagccccaatgaacatgtcagtgttgactttacaagaatatgaattcgaaaagcagttcaacgagaatgaagccatccaatggatgcaggaaaactggaagaaatctttcctgttttctgctctgtatgctgcctttatattcggtggtcggcacctaatgaataaacgagcaaagtttgaactgaggaagccattagtgctctggtctctgacccttgcagtcttcagtatattcggtgctcttcgaactggtgcttatatggtgtacattttgatgaccaaaggcctgaagcagtcagtttgtgaccagggtttttacaatggacctgtcagcaaattctgggcttatgcatttgtgctaagcaaagcacccgaactaggagatacaatattcattattctgaggaagcagaagctgatcttcctgcactggtatcaccacatcactgtgctcctgtactcttggtactcctacaaagacatggttgccgggggaggttggttcatgactatgaactatggcgtgcacgccgtgatgtactcttactatgccttgcgggcggcaggtttccgagtctcccggaagtttgccatgttcatcaccttgtcccagatcactcagatgctgatgggctgtgtggttaactacctggtcttctgctggatgcagcatgaccagtgtcactctcactttcagaacatcttctggtcctcactcatgtacctcagctaccttgtgctcttctgccatttcttctttgaggcctacatcggcaaaatgaggaaaacaacgaaagctgaatagtgttggaactgaggaggaagccatagctcagggtcatcaagaaaaataatagacaaaagaaaatggcacaaggaatcacacgtggtgcagctaaaacaaaacaaaacatgagcaaacacaaaacccaaggcagcttagggataattaggttgatttaacccagtaagtttatgatccttttagggtgaggactcactgagtgcacctccatctccaagcactgctgctggaagaccccattccctctttatctatcaactctaggacaagggagaacaaaagcaagccagaagcagaggagactaatcaaaggcaaacaaaggctattaacacataggaaaaaatgtatttactaagtgtcacatttctctaagatgaaagatttttactctagaaactgtgcgagcacaacacacacaatcctttctaactttatggacactaaactggagccaatagaaaagacaaaaatgaaagagacacagggtgtatatctagaacgataatgcttttgcagaaactaaagcctttttaagaaatgccagctgctgtagaccccatgagaaaagatgtcttaatcatccttatgaaaacagatgtaaacaactatatttcaactaacttcatcttcactgcatagcctcaggctagtgagtttgccaaaaccaaagggggtgaatacttccccaagattcttcctgggaggatggaaacagtgcagcccaggtcccatgggggcagctccatcccagagcatttctgatagttgaactgtaatttctactcttaagtgagatatgaagcattatccttttgttcagttgccccgggcttttgaacagaagagtaaatacagaattgaaaaagataaacactcaaccaaacaatgtgaaaacgggttctgtagtatttgtaaaaaggcccggcccaggaccactgtgagctggaaaagggagaaaggcagtgggaaaagaggtgagccgaagatcaattcgacagacagatggtgtgtatgcccctccctgtttgacttcacacacactcataactttccaaatgaaaccccacagtatagcgcatattttcgatatttttgtgaattccaaaaggaaatcacagggctgttcgaaatattgggggaacactgtgtttctgcatcatctgcatttgctccccaagcaatgtagaggtgtttaaagggccctctgctggctgagtggcaatactacaacaaacttcaaggcaagtttggctgaaaacagttgacaacaaagggcccccatacacttatccctcaaattttaagtgatatgaaatacttgtcatgtctttggccaaatcagaagatattcatcctgcttcaagtcagcttcagaaatgttttaaaagggactttagctctggaactcaaaatcaatttattaagagccatattctttaaaaaaaaaaagctggataatattctctgtaatatttcagtcctttacaagccaaatacatgtgtcaatgtttctagtatttcaaagaagcaattatgtaaagttgttcaatgtgacataatagtattataattggttaagtagcttaatgattaggcaaactagatgaaaagattaggggcttccacactgcatagattacacgcacatagccacgcatacacacacagacacacagatgtggggtacactgaacttcaaagcccaaatgaatagaaacacattttctggctagcagaaaaaaacaaaacaaaactgttgtttctctttcttgctttgagagtgtacagtaaaagggattttttcgaattatttttatattattttagctttaattgtgctgtcgttcatgaaacagagctgctctgcttttctgtcagagatggcaagggctttttcagcatctcgtttatgtgtggaatttaaaaagaataaagttttattccattctgtgtgaatggtttgagcagtgaacaaagaatccatgcaaaccaagtcatgactggaagaaatggggagtgggggacagtgcaggggaggaaagctgttacatctatgttaaatgattgtgagcagtctataatgtcttgatgttggttcataggtgagacacaactgatggaggaatgtattataaattatgcaaaatctgacatgagctgaaaagacaggtccttttataagagctaatagatgcttaggatgcaaatgttattttgagcttcgcaaatacatgataccgtgcaataagccttttttccttataacagaaaatgagaataattaaaatgaggagaaggccacataacagttgacttgaatttaattgaaggacccattggaggctcatctggttgatttaattatttaattgagtgatttattgcagatctcttaatgcaggttagaaacggaagtgagcataaaccttaaaaagactctaaatgatgcttccaaagcactttcattttggtattaggttcatgtttgtttgtctttacttgtaaaataatttggaatttttgtttacagggtgaatgtcttaatagttttaaaattagctaaatatatctaaaggcatttccaatgtttatcatgggaggaaaaaagccacattttttttaaaacaaaacaaaacaaaacaaaattttggtaatataggttcaatacactgtttttaacatctcagcttagccgctttaatcatatcaagatatgaggctggatcactggcccatgacaaatctgaaacctaccagagaattgactgctgcatagataatcctgctgccagttaacattccagaaaaacttgggcaggcaagtttttatagctgccccactatgctgcaatagagtatctttctattgaagattttccactgcatcccgatcctactatggtgaaagcattgttcttgggctaaaaaaaaatcctttatttcatacacacatgatttcatacactaggtctgagcatcaagccaagtccatgagtttgcaatgaagttctagtgagaaatgctctattcataaagcagggggtttacgtggaccttctagtgttgcttatgggaaaagagtaactaccatattacatctaacgcaaggccaaagtaccaaattaaaaccatggattgaggtggttattcgaagtcacttactcccatccttctaattatgctccactacaaaagtaaggggagaagagggaatactttacatgtacattgctagagggaaaagaaaggcttgattatatcccctcgcttctccacctctctgctcatgtaaagaaactgatgagaaaagagactaatatgtctagactgagttagaaacttcatatgagtgggttttgtagaattgatgggaaagacagtgggaacctagaagaacagaaagagacccacagaatgtctttctttttttttttttttttttttttgaggtggattcttgctgttgttgcccaggctggagtgcagtggcgcgatctagactcactgcaacctccgcctcccaggttccagcaattctcctgcctcagcctcccaaatagctgaggttacaggcgcccgccaccacacccagctaatttttgtatttttagtagagacagggtttcaccatgttggccaggctggtctcgagctcctgacctcaggggatccacccgccttggtctcccaaagtgctgggattataggcgtgagccaccgtgcctggcccagaatgtttttttaaatcagatgtagcatcttcataaggtaaagcctgtcacatcagagtaacaaagctcctggagtacagtgatgctagagtagaatgttccagaagtctggccatagccccagcttctgaattacctgggagagacaagatgctcaggttactattttttctttattctgatagtacagcctctactcagagaccacggtgtgtgtcacacaaccgaggcagctagggcatattctgagggcttttttttttttttggtttccttaatgattctttaacagagtaactggattggccaaggtctgattcaagaggctgtgaggagagtagagaacaaatagactttgcctctcagagttcagagctttaagttgtataagcatggtccatgtccacctcttgtagacacttattccttaaaagtttccatcatgaaaaataatatcatgtcaaaattttataagcacccagaatgtcccagtagtcaaatgtagtgtctttctccagtctctgttttcgataataaataccttgctctcaatttaggatgatcgtaaagcctatgttcatgctgtgagtcattgtctcccacagcttttgaaacatcgttctttgtcttttctatacaacacctgattctttgtgcctcagactcattgctatcaggaagagactttgccaagatccaccaccacatttggccagtagtgtatacacattaaagtgagagctgatgaaatcacaatgctctattttgttccgacaatcagtatgaaggggtaggtcccagtttgccaatgagcaacagcctctgtatgctggtgtccaagacttacacaaaacaagtgtcagtgcagtcacagcattttcttgaatgctgttgtgacagactccagttataaacatctgcgagccatatggcacaactcatagctaaagaggccggtacagggcacatgcacagagctttgaagaacatacacaaacctgttgaatcaagttactttcctcatcctcagagactttgacaattcagagctcacagatggcagggggaattctcaggcttcccttcctcctgattgacactttttaaaggaagtgatgtggaagttgttctagaagttagatggacagtgggagcacattcgtgagtggggcttgggagagctcaaaagtggcactttgattttaggctgggcaggcagaagtctcacagtaaaatatatttcactagacgtccaaaccaacactgcattgtagtaacctcttctgaagtaactggttaaattaataactggtcccataagtcagggtcaagccacatttataacccattcgggccggccatgaagggttctgactcgacattggtatttaaatgctgttactttcccaatgcttagtagcacttgagactttatttccatcgacaaaaactaagaaggccacagaagtagcctaacagtcctccctggtcatactcgtttcaaacaggtctgcctgtctagacatattcaggcaggaggttgcttgctgctatcttgaaaaccactggaagattcagcttcttggggacctcagagcccatattcatatggaagcccacccatataagcctcacagagcaaatcacagcaatgttgaagttgttattttcaagtgcttatttcacgacattaaaaaaaatattttttcctggtgtattaaaattaaaaataaaatcataacttttgatttaaaatcaaa

SEQ ID NO: 326473 - DNA, 458 bp, Artificial Sequence
  derived and/or modified sequence
ccacttccggctactagcctctctcgcctatccactatcctcacactcagcatcccctgtctgtacgagattaaggagctctgccgtccgcagggcctggagaacacgtagcgactccgaagatcagccccaatgaacatgtcagtgttgactttacaagaatatgaattcgaaaagcagttcaacgagaatgaagccatccaatggatgcaggaaaactggaagaaatctttcctgttttctgctctgtatgctgcctttatattcggtggtcggcacctaatgaataaacgagcaaagtttgaactgaggaagccattagtgctctggtctctgacccttgcagtcttcagtatattcggtgctcttcgaactggtgcttatatggtgtacattttgatgaccaaaggcctgaagcagtcagtttgtgaccagggtttttacaatggacctgtcag

SEQ ID NO: 326474 - DNA, 610 bp, Artificial Sequence
  derived and/or modified sequence
attcccttcactggtgatctcaacgtagatttgcccggagttctcttgcaagagagctggcaggttttactatttcccaatcgtttactcgccaagctctcgggtccacgcgccgcggggatgcgccctgcaagctgaaacttcattcaaagcaaggcggcccacgagagaacacgtagcgactccgaagatcagccccaatgaacatgtcagtgttgactttacaagaatatgaattcgaaaagcagttcaacgagaatgaagccatccaatggatgcaggaaaactggaagaaatctttcctgttttctgctctgtatgctgcctttatattcggtggtcggcacctaatgaataaacgagcaaagtttgaactgaggaagccattagtgctctggtctctgacccttgcagtcttcagtatattcggtgctcttcgaactggtgcttatatggtgtacattttgatgaccaaaggcctgaagcagtcagtttgtgaccagggtttttacaatggacctgtcagcaaattctgggcttatgcatttgtgctaagcaaagcacccgaactaggagatacaatattcattattctgaggaagcagaagct

SEQ ID NO: 326475 - DNA, 246 bp, Artificial Sequence
  derived and/or modified sequence
atgagctactacggcagctactatgggggtctcgggtatggatgtggcggcttcggcgggctgggatatggttacgggtgcggatgcggatcttttcgtcgcttaggtagtgggtgcggttatggggggtacgggtatggttcgggcttcggtgggtatggctacggatccggtttcggcgggtacggctacgggtgttatcgcccaagctattatggaggatatggatttagcgggttctactag

SEQ ID NO: 326476 - DNA, 507 bp, Artificial Sequence
  derived and/or modified sequence
atggcaccagggcagcaggctatgggctccggaacattacagtcaagccagccatcagagtgctctacaggcctgctcacgggcaaccctggctattcagattgggtccctccccagtcattttccaatctgggccctaatagatggcacaatgagcggatcaccctcagcactggaaagtcggtgtggttatttaatataaccgccgacccttatgagcgagtggacttaagcaatcggtaccccggcatcgtgaaaaagttgctgagaaggctgtctcaattcaataaaactgccgtgcccgtgcgctaccccccaaaagatcccaggagtaacccgcggctgaacgggggtgtgtggggaccgtggtataaagaggagacaaagaaaaaaaaaccgtccaagaatcaggcagagaagaagcaaaaaaagtcgaaaaaaaaaaagaagaagcagcagaaagccgttagtggttccacgtgccacagtggagtgacatgtggatag

SEQ ID NO: 326477 - DNA, 507 bp, Artificial Sequence
  derived and/or modified sequence
atggcccctggccagcaggccatgggcagcggcaccctgcagagcagccagcccagcgagtgcagcacaggcctgctgactggaaatcctggctacagcgactgggtgcccccccagagcttcagcaacctgggccccaaccgctggcacaatgaaagaatcaccctgagcacaggcaagtctgtgtggctgttcaacatcacagctgacccctatgaaagagtggacctgagcaaccgctacccaggcatcgtgaagaagctgctgcggcggctgagccagttcaacaagacagctgtgcctgtgcgctacccacccaaggaccccaggagcaacccccggctgaatggaggagtgtggggcccctggtacaaggaggagaccaagaagaagaagcccagcaagaaccaggccgagaagaagcagaagaagagcaagaagaagaagaagaagcagcagaaggctgtgtctggcagcacctgccacagcggcgtgacctgtggctag

SEQ ID NO: 326478 - DNA, 507 bp, Artificial Sequence
  derived and/or modified sequence
atggcccccggccagcaggccatgggcagcggcaccctgcagagctctcagccctctgagtgctcaacgggtttgttaacgggtaacccaggatactccgactgggtgcccccacaatctttcagcaatttgggcccaaaccgatggcataatgaacgtatcacgctgtcaactggaaaatctgtatggctctttaatataaccgctgatccttacgagcgcgtggatctatcaaaccggtatccaggaattgttaagaagctgctgcgacgtctcagtcagtttaacaaaacagctgttcctgtgcgctacccacccaaggatccccgcagcaatccacggctgaacggtggggtgtggggaccctggtacaaagaggagaccaagaagaagaaaccatccaaaaaccaagctgagaaaaaacaaaaaaagtccaaaaagaagaaaaaaaagcagcaaaaagcggtgtctggcagcacatgtcactctggagtgacttgcggttag

SEQ ID NO: 326479 - DNA, 507 bp, Artificial Sequence
  derived and/or modified sequence
atggcacccggacagcaagcaatgggtagtggtacactgcagtcctcccagccaagtgagtgttccactggtttactaacgggcaatcccggttattctgattgggtccctccacaaagttttagcaacctgggacctaataggtggcataacgaacggataacgctttccacagggaagtctgtttggctcttcaacatcacagccgatccttacgagcgggtcgatctcagcaatcgttacccgggtatcgtaaagaaactgctgagacgactgtctcagtttaacaagacagctgtgccggtcagatatccgcctaaagaccctcgcagtaacccgagactgaacggcggagtctggggcccttggtacaaggaggagactaaaaaaaaaaagccttctaagaaccaagccgaaaaaaaacagaagaaatcgaagaaaaagaaaaaaaaacaacagaaggccgtgtcagggtccacttgccattcgggagtaacctgcggctag

SEQ ID NO: 326480 - DNA, 507 bp, Artificial Sequence
  derived and/or modified sequence
atggctcctgggcagcaggctatgggatctggaacactgcaatccagtcagccatcagagtgcagcactggattgcttacaggaaatcctggctacagcgactgggtcccccctcagtctttcagcaacctgggaccgaaccggtggcacaatgaacggatcaccttgtcaactggcaaaagtgtatggcttttcaacatcacagccgacccatatgagagggtggacctatctaacaggtatccaggaatcgtgaagaagctcctacggaggctctcacagttcaacaaaactgcagtgccggtcaggtatccccccaaagaccccagaagtaaccctaggctcaatggaggggtctggggaccatggtataaagaggaaaccaagaaaaagaagccaagcaaaaatcaggctgagaaaaagcaaaagaaaagcaaaaaaaagaagaagaaacagcagaaagcagtctcaggttcaacttgccattcaggtgttacttgtggataa

SEQ ID NO: 326481 - DNA, 507 bp, Artificial Sequence
  derived and/or modified sequence
atggcccccggccagcaggccatgggcagcggcaccctgcagagcagccagcccagcgagtgcagcaccggcctgctgaccggcaaccccggctacagcgactgggtgcccccccagagcttcagcaacctgggccccaacagatggcacaacgagagaatcaccctgagcaccggcaagagcgtgtggctgttcaacatcaccgccgacccctacgagagagtggacctgagcaacagataccccggcatcgtgaagaagctgctgagaagactgagccagttcaacaagaccgccgtgcccgtgagatacccccccaaggaccccagaagcaaccccagactgaacggcggcgtgtggggcccctggtacaaggaggagaccaagaagaagaagcccagcaagaaccaggccgagaagaagcagaagaagagcaagaagaagaagaagaagcagcagaaggccgtgagcggcagcacctgccacagcggcgtgacctgcggctag

SEQ ID NO: 326482 - DNA, 384 bp, Artificial Sequence
  derived and/or modified sequence
atgagccggcccaagacccagaaccaggtgacccacacccaggtgaagaacaccaggaggaagcccatcaccgtgctgaagaggaagaagatgaggaccacctgccagagcaagatcctgatccgcatcagcattgagaagtggggcctggtgaccatgaagaagaagaaggctgtgggcaggaacaagagggtgaagcgggagacagagctgaggacagaggtggtggccgacctggagcggggcatggccatcatcgtcatcgtcatcaaccagaacaccaagcagatcttcatgaaggagaagggcgtgaagcgggagacagaggccgaggtgcagaggagccccaagatcaagaagaacctgagcattgatgaaagatag

SEQ ID NO: 326483 - DNA, 2416 bp, Artificial Sequence
  derived and/or modified sequence
ttgcagtgcttataactttattctgtgtaattcctatccacagtcacttctgttcatttttaatgaaaacctattgctgttattttctattatgagttaacggtgatgtgtgttttttaaattttgtatacttgctctcaccctaaaatataccttaagagacttttcccctgtttttctttctgctttccaagactccaggaaaaacagcttccatggcacattttgtacagggcacatctagaatgattgccgcagaaagttctacggagcataaagagtgtgctgaaccatcaacaagaaagaacttgatgaattctcttgaacaaaagataaggtgtttggaaaaacaaagaaaagagctcctggaagttaaccagcaatgggatcagcaatttagaagtatgaaagagttatatgaaagaaaggtagcagagctgaagacgaaactggacgccgcggaaagattcctcagcacgcgggagaaggatccgcatcagaggcagagaaaggacgacaggcagagagaggacgacaggcagcgcgacctgacccgggaccggctgcagcgggaggagaaggaaaaggaacgcctaaatgaagaattacatgaattgaaagaagagaataaacttttaaagggaaaaaatactcttgcgaacaaggaaaaggaacattacgaatgtgaaataaaacgcctcaataaggctcttcaggatgccttgaatatcaagtgttcattttccgaggactgtttgaggaagtctcgagtggaattctgccatgaggagatgagaacagaaatggaagttctgaagcagcaggtgcaaatatacgaagaagacttcaaaaaggaacgatcggatcgagagagacttaatcaagagaaagaggagctacagcaaattaatgaaacttcccaatcccagttgaacaggctgaattcccagataaaagcttgtcagatggagaaagaaaaactagaaaagcaattaaaacagatgtattgcccaccctgtaactgcggcttggttttccacctgcaagatccatgggtaccaacaggccctggagctgtgcagaagcaacgggagcacccaccagactatcagtggtatgctcttgaccagcttccgccagatgtacaacacaaggcaaatggtttatcctcagtaaagaaagtccatccgtagaagtacacactaacagagagagacaacaggcaacgagggagcgtggctgaggaccctcttctttgtttatactgaggcttgtttctgccacaaaggcacatcatctaccctgttatttgtgcctggtcatgttttcctttggtatgaatacaggaaaaggcttctgacagctaagatcctgatcaaattggaggagccagttattatacaaccaaatacaacttccagtttccttgaaatgagacttggcagatggatgatgcacgactccctgaaaatctcttcagcatattgctgttggatgcacaaaaatgattctatgatttaggcaactcagtgtttgctgcagggatattgtatgttgatttaaagtgcatatgtgtgtgtgtgtgtgtgtgtgtgtgtgtgtgtgtgtgtttcctggggtaaaaatttctgcagttgtaaacgtttaacattgctcccattcttcttccacagggccttagttctttagctatttgactacatattgttgacctcagtgatcctaaacgtagaattgaagaggtgtatatacctcattaaattaaataagtggttcaatctgaataagatggttaattggaagctattccttagacagatcatttctttaagatgatgagaaattgtgcgcctgcatcacaagacttgattatgaaagataaagtcttgggctgggtgcagtggctcatgcctataatcccagcactttgggaggctgaggcaggtggattgctttgaggccaggagttctagaccagcctggccagcatggtgaaaccccatctctactataaatacaaaaattagccaggctcgtggcacacacctataaacccagctactcaggaggcttgaggcgggaggatcacttgagcccagggaggcagaggttgctgtaagttgagatcgccactgcactccagcctgggaaatagagtgagcaagactcagtgccccctacccacccactccacaccaccaaaaaaaaaaaaaaaaaaaaaaggaagacaaagtcctgatgggatgatgatggctatatggctatgctgtgtccatatatacttacagaaatatttcagacatatggatttatagttaaatctgtgtttttccttcccttggatttgattaattttaatgaaaaacttaattctgacttctcaagccaattaaaatgaaaatggaatttattgaaa

SEQ ID NO: 326484 - DNA, 2429 bp, Artificial Sequence
  derived and/or modified sequence
attccatgtggatggctcatgaacaaaaatgagaaacacgacgataaactggtaatgttcaccaatcaatctgaagattctgaaagatgtgaaagcatggagctggacaaaaaaatccaggatctgattgagagaaatgcgtctcctcatccaaaacggttcaccccagaggccatgccaactcacagaaatctatgttctctgaagactccaggaaaaacagcttccatggcacattttgtacagggcacatctagaatgattgccgcagaaagttctacggagcataaagagtgtgctgaaccatcaacaagaaagaacttgatgaattctcttgaacaaaagataaggtgtttggaaaaacaaagaaaagagctcctggaagttaaccagcaatgggatcagcaatttagaagtatgaaagagttatatgaaagaaaggtagcagagctgaagacgaaactggacgccgcggaaagattcctcagcacgcgggagaaggatccgcatcagaggcagagaaaggacgacaggcagagagaggacgacaggcagcgcgacctgacccgggaccggctgcagcgggaggagaaggaaaaggaacgcctaaatgaagaattacatgaattgaaagaagagaataaacttttaaagggaaaaaatactcttgcgaacaaggaaaaggaacattacgaatgtgaaataaaacgcctcaataaggctcttcaggatgccttgaatatcaagtgttcattttccgaggactgtttgaggaagtctcgagtggaattctgccatgaggagatgagaacagaaatggaagttctgaagcagcaggtgcaaatatacgaagaagacttcaaaaaggaacgatcggatcgagagagacttaatcaagagaaagaggagctacagcaaattaatgaaacttcccaatcccagttgaacaggctgaattcccagataaaagcttgtcagatggagaaagaaaaactagaaaagcaattaaaacagatgtattgcccaccctgtaactgcggcttggttttccacctgcaagatccatgggtaccaacaggccctggagctgtgcagaagcaacgggagcacccaccagactatcagtggtatgctcttgaccagcttccgccagatgtacaacacaaggcaaatggtttatcctcagtaaagaaagtccatccgtagaagtacacactaacagagagagacaacaggcaacgagggagcgtggctgaggaccctcttctttgtttatactgaggcttgtttctgccacaaaggcacatcatctaccctgttatttgtgcctggtcatgttttcctttggtatgaatacaggaaaaggcttctgacagctaagatcctgatcaaattggaggagccagttattatacaaccaaatacaacttccagtttccttgaaatgagacttggcagatggatgatgcacgactccctgaaaatctcttcagcatattgctgttggatgcacaaaaatgattctatgatttaggcaactcagtgtttgctgcagggatattgtatgttgatttaaagtgcatatgtgtgtgtgtgtgtgtgtgtgtgtgtgtgtgtgtgtgtttcctggggtaaaaatttctgcagttgtaaacgtttaacattgctcccattcttcttccacagggccttagttctttagctatttgactacatattgttgacctcagtgatcctaaacgtagaattgaagaggtgtatatacctcattaaattaaataagtggttcaatctgaataagatggttaattggaagctattccttagacagatcatttctttaagatgatgagaaattgtgcgcctgcatcacaagacttgattatgaaagataaagtcttgggctgggtgcagtggctcatgcctataatcccagcactttgggaggctgaggcaggtggattgctttgaggccaggagttctagaccagcctggccagcatggtgaaaccccatctctactataaatacaaaaattagccaggctcgtggcacacacctataaacccagctactcaggaggcttgaggcgggaggatcacttgagcccagggaggcagaggttgctgtaagttgagatcgccactgcactccagcctgggaaatagagtgagcaagactcagtgccccctacccacccactccacaccaccaaaaaaaaaaaaaaaaaaaaaaggaagacaaagtcctgatgggatgatgatggctatatggctatgctgtgtccatatatacttacagaaatatttcagacatatggatttatagttaaatctgtgtttttccttcccttggatttgattaattttaatgaaaaacttaattctgacttctcaagccaattaaaatgaaaatggaatttattgaaa

SEQ ID NO: 326485 - protein, 17 aa, Artificial Sequence
  derived and/or modified sequence
MKRGRLPSSSEDSDDNG

SEQ ID NO: 326486 - protein, 1216 aa, Artificial Sequence
  derived and/or modified sequence
MPRRAGSGQLPLPRGWEEARDYDGKVFYIDHNTRRTSWIDPRDRLTKPLSFADCVGDELPWGWEAGFDPQIGVYYIDHINKTTQIEDPRKQWRGEQEKMLKDYLSVAQDALRTQKELYHVKEQRLALALDEYVRLNDAYKEKSSSHTSLFSGSSSSTKYDPDILKAEISTTRLRVKKLKRELSQMKQELLYKEQGFETLQQIDKKMSGGQSGYELSEAKAILTELKSIRKAISSGEKEKQDLMQSLAKLQERFHLDQNIGRSEPDLRCSPVNSHLCLSRQTLDAGSQTSISGDIGVRSRSNLAEKVRLSLQYEEAKRSMANLKIELSKLDSEAWPGALDIEKEKLMLINEKEELLKELQFVTPQKRTQDELERLEAERQRLEEELLSVRGTPSRALAERLRLEERRKELLQKLEETTKLTTYLHSQLKSLSASTLSMSSGSSLGSLASSRGSLNTSSRGSLNSLSSTELYYSSQSDQIDVDYQYKLDFLLQEKSGYIPSGPITTIHENEVVKSPSQPGQSGLCGVAAAATGHTPPLAEAPKSVASLSSRSSLSSLSPPGSPLVLEGTFPMSSSHDASLHQFTADFEDCELSSHFADISLIENQILLDSDSGGASQSLSEDKDLNECAREPLYEGTADVEKSLPKRRVIHLLGEKTTCVSAAVSDESVAGDSGVYEAFVKQPSEMEDVTYSEEDVAIVETAQVQIGLRYNAKSSSFMVIIAQLRNLHAFLIPHTSKVYFRVAVLPSSTDVSCLFRTKVHPPTESILFNDVFRVAISQTALQQKTLRVDLCSVSKHRREECLAGTQISLADLPFSSEVFTLWYNLLPSKQMPCKKNEENEDSVFQPNQPLVDSIDLDAVSALLARTSAELLAVEQELAQEEEEESGQEEPRGPDGDWLNTYFLCCWELKDDVFTRLTVKPLLTMLREASDEIVAEKEAEVKLPEDSSCTEDLSSCTSVPEMNEDGNRKESNCAKDLRSQPPTRIPTLVDKETNTDEAANDNMAVRPKERSSLSSRQHPFVRSSVIVRSQTFSPGERNQYICRLNRSDSDSSTLAKKSLFVRNSTERRSLRVKRTVCQSVLRRTTQECPVRTSLDLELDLQASLTRQSRLNDELQALRDLRQKLEELKAQGETDLPPGVLEDERFQRLLKQAEKQAEQSKEEQKQGLNAEKLMRQVSKDVCRLREQSQKVPRQVQSFREKIAYFTRAKISIPSLPADDV

SEQ ID NO: 326487 - DNA, 3651 bp, Artificial Sequence
  derived and/or modified sequence
atgcccagaagagccggcagcggccagctgcccctgcccagaggctgggaggaggccagagactacgacggcaaggtgttctacatcgaccacaacaccagaagaaccagctggatcgaccccagagacagactgaccaagcccctgagcttcgccgactgcgtgggcgacgagctgccctggggctgggaggccggcttcgacccccagatcggcgtgtactacatcgaccacatcaacaagaccacccagatcgaggaccccagaaagcagtggagaggcgagcaggagaagatgctgaaggactacctgagcgtggcccaggacgccctgagaacccagaaggagctgtaccacgtgaaggagcagagactggccctggccctggacgagtacgtgagactgaacgacgcctacaaggagaagagcagcagccacaccagcctgttcagcggcagcagcagcagcaccaagtacgaccccgacatcctgaaggccgagatcagcaccaccagactgagagtgaagaagctgaagagagagctgagccagatgaagcaggagctgctgtacaaggagcagggcttcgagaccctgcagcagatcgacaagaagatgagcggcggccagagcggctacgagctgagcgaggccaaggccatcctgaccgagctgaagagcatcagaaaggccatcagcagcggcgagaaggagaagcaggacctgatgcagagcctggccaagctgcaggagagattccacctggaccagaacatcggcagaagcgagcccgacctgagatgcagccccgtgaacagccacctgtgcctgagcagacagaccctggacgccggcagccagaccagcatcagcggcgacatcggcgtgagaagcagaagcaacctggccgagaaggtgagactgagcctgcagtacgaggaggccaagagaagcatggccaacctgaagatcgagctgagcaagctggacagcgaggcctggcccggcgccctggacatcgagaaggagaagctgatgctgatcaacgagaaggaggagctgctgaaggagctgcagttcgtgaccccccagaagagaacccaggacgagctggagagactggaggccgagagacagagactggaggaggagctgctgagcgtgagaggcacccccagcagagccctggccgagagactgagactggaggagagaagaaaggagctgctgcagaagctggaggagaccaccaagctgaccacctacctgcacagccagctgaagagcctgagcgccagcaccctgagcatgagcagcggcagcagcctgggcagcctggccagcagcagaggcagcctgaacaccagcagcagaggcagcctgaacagcctgagcagcaccgagctgtactacagcagccagagcgaccagatcgacgtggactaccagtacaagctggacttcctgctgcaggagaagagcggctacatccccagcggccccatcaccaccatccacgagaacgaggtggtgaagagccccagccagcccggccagagcggcctgtgcggcgtggccgccgccgccaccggccacaccccccccctggccgaggcccccaagagcgtggccagcctgagcagcagaagcagcctgagcagcctgagcccccccggcagccccctggtgctggagggcaccttccccatgagcagcagccacgacgccagcctgcaccagttcaccgccgacttcgaggactgcgagctgagcagccacttcgccgacatcagcctgatcgagaaccagatcctgctggacagcgacagcggcggcgccagccagagcctgagcgaggacaaggacctgaacgagtgcgccagagagcccctgtacgagggcaccgccgacgtggagaagagcctgcccaagagaagagtgatccacctgctgggcgagaagaccacctgcgtgagcgccgccgtgagcgacgagagcgtggccggcgacagcggcgtgtacgaggccttcgtgaagcagcccagcgagatggaggacgtgacctacagcgaggaggacgtggccatcgtggagaccgcccaggtgcagatcggcctgagatacaacgccaagagcagcagcttcatggtgatcatcgcccagctgagaaacctgcacgccttcctgatcccccacaccagcaaggtgtacttcagagtggccgtgctgcccagcagcaccgacgtgagctgcctgttcagaaccaaggtgcacccccccaccgagagcatcctgttcaacgacgtgttcagagtggccatcagccagaccgccctgcagcagaagaccctgagagtggacctgtgcagcgtgagcaagcacagaagagaggagtgcctggccggcacccagatcagcctggccgacctgcccttcagcagcgaggtgttcaccctgtggtacaacctgctgcccagcaagcagatgccctgcaagaagaacgaggagaacgaggacagcgtgttccagcccaaccagcccctggtggacagcatcgacctggacgccgtgagcgccctgctggccagaaccagcgccgagctgctggccgtggagcaggagctggcccaggaggaggaggaggagagcggccaggaggagcccagaggccccgacggcgactggctgaacacctacttcctgtgctgctgggagctgaaggacgacgtgttcaccagactgaccgtgaagcccctgctgaccatgctgagagaggccagcgacgagatcgtggccgagaaggaggccgaggtgaagctgcccgaggacagcagctgcaccgaggacctgagcagctgcaccagcgtgcccgagatgaacgaggacggcaacagaaaggagagcaactgcgccaaggacctgagaagccagccccccaccagaatccccaccctggtggacaaggagaccaacaccgacgaggccgccaacgacaacatggccgtgagacccaaggagagaagcagcctgagcagcagacagcaccccttcgtgagaagcagcgtgatcgtgagaagccagaccttcagccccggcgagagaaaccagtacatctgcagactgaacagaagcgacagcgacagcagcaccctggccaagaagagcctgttcgtgagaaacagcaccgagagaagaagcctgagagtgaagagaaccgtgtgccagagcgtgctgagaagaaccacccaggagtgccccgtgagaaccagcctggacctggagctggacctgcaggccagcctgaccagacagagcagactgaacgacgagctgcaggccctgagagacctgagacagaagctggaggagctgaaggcccagggcgagaccgacctgccccccggcgtgctggaggacgagagattccagagactgctgaagcaggccgagaagcaggccgagcagagcaaggaggagcagaagcagggcctgaacgccgagaagctgatgagacaggtgagcaaggacgtgtgcagactgagagagcagagccagaaggtgcccagacaggtgcagagcttcagagagaagatcgcctacttcaccagagccaagatcagcatccccagcctgcccgccgacgacgtgtag

SEQ ID NO: 326488 - DNA, 3651 bp, Artificial Sequence
  derived and/or modified sequence
atgcctagacgtgctggatccggtcagttgccactcccaaggggctgggaggaggcacgcgattacgacggaaaggtattctacatcgatcacaatactcggcgcacgagctggatcgacccaagagatcgactaactaaaccactctcattcgccgactgcgtgggagacgaactgccttggggttgggaggcgggattcgatccccagatcggcgtctattacattgatcacattaacaagactactcagattgaggatcctcgtaaacaatggaggggagagcaggaaaagatgcttaaggattacttgagcgttgctcaagatgcgctgcgaacccagaaggagttataccacgtcaaggaacagaggttggccttagcactggatgaatacgtgcggcttaacgatgcttataaagaaaagagtagctcccataccagcctattttccgggtcgtcttcatcaactaagtatgatcctgatattctcaaagctgagattagtacaactagactgagggttaaaaaattgaaaagggagctttcacagatgaaacaagagctgctgtataaggaacagggttttgaaactctccaacagattgataagaagatgagcggaggacagtctgggtacgagttatctgaagccaaggctattctgaccgagcttaaatctatcaggaaggcaattagcagtggagaaaaggagaagcaggatcttatgcagagcctggccaagctccaggaacgattccaccttgaccagaatattggtagatctgaacccgacctcaggtgttcacccgtcaactctcacttgtgcttatccaggcagacactcgacgcgggctctcagacttccataagtggggacatcggagttaggagccggagcaacctggcggaaaaggttaggctgtctctgcagtatgaggaggccaagcgctctatggccaacctgaaaattgaattgagcaaactggacagcgaggcctggccaggagctctggacatcgagaaggaaaagctaatgctgattaatgagaaagaggagctgctgaaagaactgcagttcgttactccccagaagaggactcaggacgaactggaacgtctggaggctgagaggcagagactggaagaggagctcctatccgttagagggaccccgtcgcgcgcacttgctgagaggctgagactggaggagcgcagaaaagaactgttacagaagctggaggaaactacgaagctgaccacttacctccatagccagctgaaatccctctccgctagtaccctcagcatgtccagcggctcaagtctggggagcctggcatcctcaagaggcagtttaaacacctctagtcgtggcagcttgaacagcctttcctcaactgaattatactattccagtcaaagcgatcaaatagacgtcgattatcagtacaagcttgatttcctcctccaggaaaaatccggttacatacctagcggaccaatcactactatccatgagaatgaggtcgtaaaaagcccttctcagccgggccaaagcggcctgtgtggcgtggcggcagcagccaccgggcatacccctcctctggcggaagcgcccaaaagtgttgcttcattgtcatccagatccagcctctccagcctttccccgcccggcagcccactagttctggaagggacattccccatgagtagttcacatgatgctagtctgcaccagttcacagccgattttgaggattgcgagctgagcagtcacttcgctgacattagcctaatcgaaaatcagattttgcttgattcagattcaggaggcgccagccagagcctcagtgaagacaaagacttgaatgagtgtgcgagagagcccctttacgagggtacggcagacgtcgaaaaatccctacccaagcggagggtcattcatctgctcggagaaaaaactacgtgcgtttcagctgcagtcagcgatgagtccgtcgccggcgactctggcgtttatgaggcatttgtcaaacaaccgtccgagatggaggacgttacctacagcgaagaagatgttgcgatcgtggagaccgctcaggttcagatcgggctgcgttacaacgccaaatcttcaagtttcatggtgattatcgcccaactcagaaacctccatgccttcctgattcctcatactagcaaggtctacttccgcgttgccgtcctccctagctcaacggatgtgtcttgcttattccgaactaaggttcacccccccaccgagagtatactctttaacgatgttttcagagtggcaatcagccagactgcactccagcaaaaaaccttacgggttgatttgtgctctgttagcaagcatagacgagaagagtgcctcgccggcacccaaatttcacttgctgatctaccgttctcatctgaggtgtttacgctgtggtataatctgcttcccagtaagcagatgccgtgtaagaaaaatgaggaaaacgaggactctgtctttcaacctaatcagcctctggtcgatagcatcgacctcgacgcggtgtcagcgctgcttgcccggacgtctgcagagttgttagccgtggagcaagaattggcccaagaggaagaggaagagtcaggacaggaagagccaagagggcccgacggggattggctgaatacctatttcctgtgttgctgggaactgaaagacgatgtgtttaccagactgacagtcaagcctctgctgactatgctccgggaggcaagcgacgagattgtcgctgagaaagaagccgaagtcaaactacctgaggattcctcatgtaccgaagatttgtcttcctgcacatcggttcctgaaatgaatgaggacgggaaccggaaagaatccaattgcgctaaagatctcaggtcccagcctcccaccaggattccaacacttgttgacaaggagactaacactgatgaggcagctaatgataacatggcagtgagacccaaagaaagaagctctctaagctctcgacaacacccattcgtgagatcgagtgtcatcgtgagaagccaaaccttctcgcctggcgagcggaaccagtacatttgtcgtcttaacagaagcgacagcgattcaagcacactggccaaaaaatcacttttcgtgcgaaattccacagagaggcgctccctgcgagtgaagaggacagtctgccagtctgtgcttaggcgaactacacaggaatgtccggttcgcacgagccttgacttagaactcgacctgcaagcttctctcacgcgacagtcacgtctgaacgacgaattgcaagcactgcgtgatctgaggcaaaagctcgaggagctgaaggcgcagggggagaccgacttgcctcccggcgtgttagaagatgagcgctttcagcgactgctgaagcaggcagaaaaacaggcagaacagagcaaagaagaacaaaaacagggcttgaacgccgagaaactgatgcgccaggtgtcaaaggacgtgtgccggctgcgagaacagtcccagaaggtcccccggcaggtacagagttttcgtgaaaaaatcgcctatttcactagagctaaaatttccatccccagcctccccgctgacgatgtgtag

SEQ ID NO: 326489 - DNA, 3651 bp, Artificial Sequence
  derived and/or modified sequence
atgcccaggagagctggcagcggccagctgcccctgccccggggctgggaggaggcccgggactatgatggcaaggtgttctacatcgaccacaacaccaggaggacctcctggattgacccccgggaccggctgaccaagcccctgagctttgctgactgtgtgggagatgagctgccctggggctgggaggccggctttgacccccagattggagtgtactacatcgaccacatcaacaagaccacccagatcgaggaccccaggaagcagtggagaggagagcaggagaagatgctgaaggactacctgtctgtggcccaggatgccctgcggacccagaaggagctgtaccacgtgaaggagcagaggctggccctggccctggatgaatatgtgcggctgaatgatgcctacaaggagaagagcagcagccacaccagcctcttcagcggcagcagcagcagcaccaagtatgaccctgacatcctgaaggccgagatcagcaccacccggctgcgggtgaagaagctgaagcgggagctgagccagatgaagcaggagctgctgtacaaggagcagggctttgagaccctgcagcagattgacaagaagatgtctgggggccagagcggctatgagctgtctgaggccaaggccatcctgacagagctgaagagcatcaggaaggccatcagcagcggggagaaggagaagcaggacctgatgcagagcctggccaagctgcaggagcgcttccacctggaccagaacatcggccgctctgagccagacctgcgctgcagccctgtgaacagccacctgtgcctgagccggcagaccctggatgctggcagccagaccagcatcagcggggacatcggcgtgcgcagccgcagcaacctggccgagaaggtgcggctgagcctgcagtatgaggaggccaagaggtccatggccaacctgaagattgagctgagcaagctggacagcgaggcctggccaggggccctggacatcgagaaggagaagctgatgctgatcaatgagaaggaggagctgctgaaggagctgcagtttgtgaccccccagaagaggacccaggatgagctggagcggctggaggccgagcggcagaggctggaggaggagctgctgtctgtgcggggcacccccagccgggccctggccgagcggctgcggctggaggagaggaggaaggagctgctgcagaagctggaggagaccaccaagctgaccacctacctgcacagccagctgaagagcctgagcgccagcaccctgtccatgagcagcggcagcagcctgggcagcctggccagcagccggggcagcctgaacaccagcagccggggcagcctgaacagcctgagcagcacagagctgtactacagcagccagagcgaccagattgatgtggactaccagtacaagctggacttcctgctgcaggagaagagcggctacatccccagcggccccatcaccaccatccatgaaaatgaggtggtgaagagccccagccagcccggccagagcggcctgtgtggggtggccgccgccgccaccggccacaccccacccctggccgaggcccccaagtctgtggccagcctgagcagccgcagcagcctgagcagcctgagccccccaggcagccccctggtgctggagggcaccttccccatgagcagcagccatgatgccagcctgcaccagttcaccgctgactttgaggactgtgagctgagcagccactttgctgacatcagcctgattgagaaccagatcctgctggacagcgacagcggcggggccagccagagcctgtctgaggacaaggacctgaatgaatgtgcccgggagcccctgtatgagggcacagcagatgtggagaagagcctgcccaagagaagagtcatccacctgctgggggagaagaccacctgtgtgtctgctgctgtgtctgatgagagcgtggccggggacagcggcgtgtatgaggcctttgtgaagcagcccagcgagatggaggatgtgacctacagcgaggaggatgtggccatcgtggagacagcccaggtgcagatcggcctgcgctacaatgccaagagcagcagcttcatggtgatcatcgcccagctgaggaacctgcacgccttcctgatcccccacaccagcaaggtgtacttccgggtggccgtgctgcccagcagcacagatgtgtcctgcctcttccgcaccaaggtgcaccccccaacagagagcatcctcttcaatgatgtgttccgggtggccatcagccagacagccctgcagcagaagaccctgcgggtggacctgtgcagcgtgtccaagcacagaagagaggagtgcctggccggcacccagatcagcctggccgacctgcccttcagcagcgaggtgttcaccctgtggtacaacctgctgcccagcaagcagatgccctgcaagaagaatgaggagaatgaagacagcgtcttccagcccaaccagcccctggtggacagcattgacctggatgctgtgtctgccctgctggcccggaccagcgctgagctgctggccgtggagcaggagctggcccaggaggaggaggaggagagcggccaggaggagccccggggcccagatggagactggctgaacacctacttcctgtgctgctgggagctgaaggatgatgtgttcacccggctgactgtgaagcccctgctgaccatgctgcgggaggccagtgatgagatcgtggccgagaaggaggccgaggtgaagctgcctgaggacagcagctgcacagaggacctgagcagctgcacctctgtgcctgagatgaatgaagatggcaacaggaaggagagcaactgtgccaaggacctgcggagccagccccccacccgcatccccaccctggtggacaaggagaccaacacagatgaagctgccaatgacaacatggctgtgcggcccaaggagaggagcagcctgagcagccggcagcacccctttgtgcgcagctctgtgattgtgcgcagccagaccttcagccctggagagaggaaccagtacatctgccgcctgaacagaagtgacagcgacagcagcaccctggccaagaagagcctgtttgtgaggaacagcacagagcggcgcagcctgcgggtgaagaggacagtgtgccagagcgtgctgcggaggaccacccaggagtgccctgtgaggaccagcctggacctggagctggacctgcaggccagcctgacccggcagagccggctgaatgatgagctgcaggccctgcgggacctgcggcagaagctggaggagctgaaggcccagggcgagacagacctgcccccaggagtgctggaggatgagcgcttccagaggctgctgaagcaggccgagaagcaggccgagcagagcaaggaggagcagaagcagggcctgaatgctgagaagctgatgaggcaggtgtccaaggatgtgtgccgcctgcgggagcagagccagaaggtgccccggcaggtgcagagcttccgggagaagatcgcctacttcacccgggccaagatcagcatccccagcctgcctgcagatgatgtgtag

SEQ ID NO: 326490 - DNA, 3651 bp, Artificial Sequence
  derived and/or modified sequence
atgccccggcgggccggcagcggccagctgcccctgccccggggctgggaggaagcgagggattacgacggcaaagtattctacatcgatcacaatacacgtcgcaccagctggattgacccacgcgatcgcctaactaagcctctgtctttcgccgactgtgtgggggatgagctgccttggggctgggaagcggggtttgatcctcagatcggcgtctactacatcgaccacataaataaaacgacccagatcgaggatcccagaaagcagtggcgcggggagcaggagaagatgctgaaagactacctcagcgtggcgcaggacgcgctcagaactcagaaagagctgtaccacgtcaaagagcagagattagctctggctttagatgagtatgtcagactgaatgatgcctacaaggaaaaatcttcaagtcacactagcctgtttagcggtagcagcagctccacgaagtacgacccagacatcttgaaagctgagatcagtactacaagacttcgagttaaaaagcttaagcgggagctttcacaaatgaagcaggagcttttgtataaggaacagggcttcgaaaccttgcagcaaatcgataaaaagatgagcggcggtcagagcggttatgaactgtccgaggctaaagctatcctgactgaactgaagagcatcagaaaggcgatcagctccggcgaaaaggagaagcaagatcttatgcagtccttggctaagctccaggagcggtttcatctggaccagaatataggccggtcagagcccgatctgagatgctccccagtgaattcccatctctgcttgagccgccagaccctggacgccggttcacagacgtctatcagcggcgacatcggggtgcggtctagaagcaacctggctgaaaaagtacggcttagcctccagtacgaggaggccaagcgttctatggctaacctaaaaatagaactaagcaagcttgattccgaggcatggcctggcgccttggacatcgaaaaggaaaagctcatgcttatcaacgaaaaggaggagctgttaaaggaactgcagtttgtgacgccacagaagagaacccaagacgagctcgagagacttgaggctgagagacagaggctcgaggaagagctccttagtgtgagggggacgccaagcagggctctggcggaacgacttagactcgaggaacgacggaaggagctgcttcagaagctggaggaaacaactaagctgactacctacttacactcgcagctcaagagccttagcgctagcactctcagtatgtcctccgggtcctcgctgggtagcttagcctccagccgcgggtctctgaatacctcatctagaggatcgctcaactctcttagctctacagagttgtattactcctcacaaagcgaccaaatcgacgttgactatcaatacaaactggactttctgctgcaggagaagtccggttacattccctctggccctatcacaaccattcatgaaaatgaggtagtgaagagcccgagccaaccaggccagagtggtctctgtggagtcgctgccgctgcgacgggacacactcctcccctggccgaggccccaaagtccgttgcctccttgagtagcagatcatcacttagttctctttcgcctcctggttcgcccctcgtactggaaggtacattcccaatgagctccagccacgacgcatccctgcaccagtttaccgcagatttcgaagattgtgagctgagctcccactttgctgacataagtttaatcgagaaccagatactacttgactcagattccggcggtgccagccaatccttgtctgaggataaagatctgaatgagtgcgcacgtgagcctctttatgaggggacagccgatgtggagaagtcactccctaaaagacgtgtgatccacctcttgggggagaaaactacatgcgtcagcgcagccgtgtccgatgagagcgtggctggcgacagcggtgtgtatgaggcattcgtgaagcaaccgagtgagatggaggacgtgacctactccgaggaagatgtggctatagttgaaactgctcaggtgcagatcggcctacgctataacgcaaaatcgtcaagttttatggtaattattgcccagctccgcaacttacacgcctttttgatcccacacacgagcaaggtctatttccgagtagccgtcttgccctctagcacggacgttagttgtctttttagaaccaaagtgcaccctccaaccgagtctatccttttcaatgacgtgttccgcgtggccatcagccagaccgcattacagcagaagacacttagggtggatttatgcagcgtgagcaagcaccgccgtgaagaatgtcttgccgggacacagattagcctggccgatttaccattcagttccgaggtatttacattatggtataacctgcttccttccaagcagatgccttgcaagaaaaatgaagagaacgaagacagcgtatttcagcccaaccaacctctagtggacagtattgatctggatgctgtatccgcgctgctcgccaggacaagtgcagaactgctcgcagtggaacaagaactagcccaggaggaggaagaggagtccgggcaggaggaacctcggggcccggatggggattggttgaacacttacttcctctgctgctgggagctcaaagacgacgtttttacccggctgacagtgaagccgctgctgacaatgctgagggaagcctcagacgaaattgtagccgaaaaggaagccgaagtgaaactgccagaagattcttcatgcaccgaggacctgagctcttgcactagtgttcctgaaatgaacgaagacggaaataggaaggagagtaactgcgcaaaggatttaagatcccagcctcctacccggatcccaacactcgtggacaaagagacaaatacagatgaggcagcaaacgataacatggccgtgaggcccaaagagcggagctctctctcgagccgccagcatccattcgtccgaagctccgtgattgttagaagtcagacttttagccccggggagcgcaatcagtacatttgtagactgaatagaagcgattccgattccagcacactggcaaagaagtctctgtttgtcaggaattccaccgaacggcgttctctgcgagtcaaaagaactgtttgccagtcggtgctaaggcgaaccacgcaagaatgccctgtgagaacaagtctggacttggaactggacttgcaagcctcactaacccgacagagccgacttaatgatgaactgcaggcgcttagagacttgagacagaagctggaagaacttaaagcgcaaggcgagactgatctgccgccaggcgtgcttgaagacgagcggttccagcggctgctgaaacaggcagagaagcaagcagaacaatctaaggaggaacagaagcaggggttaaatgccgagaaactcatgcgccaagttagtaaagacgtgtgtcgcctgcgcgagcaatctcaaaaggtgccccggcaggtccagtcatttcgggagaaaatcgcctacttcacacgcgcgaaaatatctattccttctttgccagcagatgacgtgtag

SEQ ID NO: 326491 - DNA, 3651 bp, Artificial Sequence
  derived and/or modified sequence
atgccacggagagccggatccggacagctgcccttgccccgaggttgggaggaggcgcgagactatgacggcaaggtgttttacatagaccacaatacgcgcagaaccagctggattgatccacgagacaggttgactaagccattaagtttcgctgactgtgtcggggacgagttgccgtgggggtgggaggccggtttcgatcctcagattggagtttattatatcgatcatatcaacaagaccacccagatcgaagaccctaggaagcagtggaggggggaacaggagaaaatgttaaaagattacctgtccgtggcacaagacgcccttagaacccaaaaagaactataccacgttaaagagcagcggcttgccctagccctggatgaatatgtgcgactcaacgatgcatacaaggagaaaagttctagccatacttcactcttctctggcagttcgagctcgaccaaatacgacccagacatcctgaaagcggagatttcaacaacaagactccgcgttaaaaagctgaaacgggaactgtctcagatgaaacaggagctcctgtacaaggaacagggttttgaaacattgcagcagatcgacaagaaaatgtccggtggacaaagtggatacgagctatccgaggccaaagcgatactgactgagctgaaaagcattaggaaagccattagctcaggagagaaggagaaacaggatcttatgcagagcttagcgaaactccaagaaaggtttcaccttgaccagaatatcggcaggtccgagccggatctccgttgcagtccagtcaacagccacctgtgcctgagcagacagaccctcgacgccggaagccagacttcaatctccggagatatcggcgtgcgtagcaggtcaaacttggctgaaaaggtgcgcctgagcctccagtatgaagaggccaagcgctcgatggctaatcttaagattgagctgtccaagctggactctgaggcttggcccggtgccctggacatcgagaaagaaaaactaatgctcattaacgaaaaagaagagttgttgaaggagctgcaattcgtgactccacagaaacggacgcaggacgagctcgaaagactggaggccgaaaggcagcgcctcgaagaggaactcctttctgtacgcggaacccctagcagagccctcgcggagaggttacggctcgaagagagacgcaaagagttgctccagaagctggaagaaaccactaagctgaccacctatttacattcacagttgaaaagcctctcagcatccacattgagcatgtcgtccggtagctccttaggctctctcgcttcctcaagggggtccctgaatacaagttcacggggttccctgaattccttatcctccacggaactgtattacagtagccagagcgatcagattgacgtggactaccaatataagttagatttcctgctccaagagaagtcgggttacattcccagcgggcctataacgacaatccatgaaaatgaagttgtgaagtctcccagtcagcccggtcaaagtggactgtgtggtgtggccgcagcagcgacaggtcacacacctcctctggcagaagctccaaaaagcgtcgcctcgttgagttcccgctccagtctttcatctctttctccgccagggagccccctagtccttgaggggacgttccccatgtcatccagtcacgacgctagcttacatcagttcactgcggacttcgaagactgtgagctgtcaagtcactttgcagatatcagtctgatcgagaaccaaatcctgctggacagtgactccggcggagcctcgcagagcctcagtgaagacaaagatctcaacgaatgcgcacgcgagccactctacgagggaacggctgacgtcgaaaaatcactgcccaaacgtagggttatccaccttctgggggaaaaaactacctgcgttagcgcggcagtatcggatgaatccgttgccggagactccggggtatacgaggccttcgtgaagcagccctctgagatggaagacgtaacctattccgaggaagacgtggctatcgtggaaacagctcaagtacaaataggcctccgttataatgctaaatcaagctctttcatggtgatcattgcccaactcaggaacttgcacgcatttttgatacctcacactagcaaagtatatttccgggtcgcagtattgcctagctccacggatgtaagctgcctgtttcggacaaaagtccacccaccaactgaatctatattgttcaatgatgtgtttcgtgtggccatttcccagacagcactacagcagaaaacgctgcgcgtcgacttgtgctctgtaagcaagcaccggagggaagaatgcttggctggaacacaaattagtctcgcagacctccctttcagctctgaggtgttcaccctgtggtataaccttctgccgagcaaacagatgccttgcaagaaaaatgaggaaaacgaagattctgtctttcaacctaaccagccactggttgattccatcgacctggatgccgtgtctgccttgctggccagaacctcagcggagctgctggccgttgagcaggagcttgcgcaggaggaagaggaggaaagcggccaggaagaacccaggggaccagacggcgactggctcaacacctattttctctgctgttgggagttgaaggatgatgtgttcacccggctcacagtaaaaccactgctaacaatgctgcgcgaggcgtccgacgagatcgtcgcggagaaagaagctgaagttaaactccccgaggattcatcatgtacagaggatctatcctcatgtacctccgtgccggagatgaatgaggacggcaaccgaaaagagtcaaactgcgctaaggacctgcggtcccaaccccctactagaattccaactctggtagataaggaaaccaatacggatgaagccgctaatgacaatatggccgtgagacccaaggagcggagctctctcagctcacggcaacatcctttcgtcaggtcttctgttatcgtgcggtcacagacgttcagtccaggcgagcgaaatcagtacatttgtcgcttgaatagaagtgactccgattcatccacgttagccaaaaaaagtctttttgtgcgtaacagcaccgagcgacgatccctgcgcgtaaagaggactgtgtgtcagagcgtacttcgacgaaccacccaggagtgccccgtgagaacaagcctggacctggaactcgatctgcaggcttcacttactcggcaaagcaggctcaatgatgaactacaggcactgagggatctgaggcagaagctggaggagctgaaggcccagggcgagaccgaccttcccccaggcgtgctcgaagatgaaaggtttcagagactgctcaaacaggccgagaagcaggccgagcagtccaaagaggagcagaagcaaggcctaaatgctgaaaaactgatgcgccaggtgtctaaggatgtttgcagactcagggaacagtcccagaaagtcccaaggcaagttcagtcatttagagagaagatcgcctattttactcgagctaagatatcaatcccgagcctccctgccgatgatgtgtag

SEQ ID NO: 326492 - DNA, 6356 bp, Artificial Sequence
  derived and/or modified sequence
atgcctaggagggccgggagcggtcagctgccgctgccccggggctgggaggaggccagggactacgacggcaaggtcttctacattgaccacaacaccaggaggaccagctggatcgacccccgggacaggttaacgaagcccttgtcatttgctgattgtgttggggatgagctgccgtggggatgggaagcagggtttgaccctcagattggtgtctactacatcgatcacatcaacaaaaccacgcagatagaagatccaagaaaacaatggaggggggaacaggagaagatgctcaaggactacctctctgtggcacaggatgccctccggacacagaaggaactgtaccatgtgaaggagcagaggctggcgctggccctggatgaatacgtgcgattaaatgatgcctataaggaaaagtcaagttctcacacaagcttattctcaggatcttcatccagtactaaatatgatcccgatattttaaaagctgagatctccactacaagattaagggttaaaaagctaaagagagagctctcacagatgaagcaggaactgctctataaagaacaaggctttgaaacattgcagcaaattgataaaaaaatgtctggaggccagagcgggtatgaactcagtgaagccaaagccattctaacagaactaaaatctatcagaaaggcaattagctcaggagaaaaagaaaaacaagatctgatgcagagtcttgctaagctgcaggagcggtttcatttggatcagaacattggcagatctgagccagatttgagatgtagtcctgtgaactctcatttatgtctctccagacagacccttgatgctgggtcacaaacaagcatttccggagatattggagtaagaagtagatcaaatttagctgaaaaggtcaggctaagcctacagtatgaagaagccaaaagaagtatggccaacttaaaaattgaactgtcaaaattggacagtgaggcctggcctggggcactggatattgagaaggaaaaactgatgctgattaatgaaaaagaagaacttttgaaagagcttcagttcgtcaccccacagaaacgtacccaagatgaattagaacgcctagaagctgaaaggcagcggctggaagaagagttgctgtctgtgaggggaacaccaagcagagctctggccgagagattgagattggaagagagaagaaaagagctgctacagaaacttgaagaaactactaaattaactacttatttgcattcacaacttaaaagcctctctgccagcaccctgtccatgtcatctgggagcagcctgggttccctggcatcgagtcggggctctctgaacacctccagcagagggtcactcaactccctcagttccaccgaactctattacagcagtcaaagtgatcagatagatgtggattatcagtataaactggacttccttctgcaagagaaaagcggttacattccttctggacccatcaccaccatccatgaaaacgaggtggtcaagtcccctagccagcctggccagagtggactctgtggagtggcagctgcagcaacaggccacactcctccactggctgaggccccgaagtctgtggcctccctgtcctcgaggtcctccctttcctccttgtctcctccaggctctcccttggttttggaaggcacgtttcccatgtcttcttctcatgatgcctctctccatcagttcactgctgactttgaagactgtgagttgagtagccattttgcagatatcagcctcatcgaaaatcagattttgctggattctgattcaggaggagcctcccagtctctttcagaggataaagaccttaatgaatgtgctagggagccattatatgaaggaactgcagatgtggaaaaatcattaccaaaaagaagagtgatccacttgcttggggagaaaaccacttgtgtgtcggctgctgtgtctgatgagtctgtggctggagacagtggggtctatgaagctttcgtgaaacaacctagtgaaatggaagatgtcacatacagtgaagaggatgtagccattgtagagaccgcccaggttcagataggactcagatacaatgcaaaaagttcaagtttcatggtgattatagcacagctccgaaaccttcatgccttcttgatacctcatacttcaaaagtatattttagggttgccgttcttccttcctcaactgatgtcagctgtctgtttcgcacaaaagttcatccgcccacagaatccattttattcaatgatgtgttcagagtcgccatttcccaaacagccttacaacagaagacactgagggtagacctttgctctgtcagtaaacaccgaagggaagaatgcctggctggaactcagatcagcctggcagatttaccattttccagtgaggttttcactctatggtataacttgcttccttccaagcaaatgccttgcaaaaagaatgaagaaaatgaggactctgtatttcaaccaaaccagccgttagtagattctatagacttggatgcagtgtcagccttacttgcaagaacatcagctgagttgttagctgtggaacaagaattagcacaagaagaagaagaagaatcaggacaagaagagccaaggggcccagatggagactggttaaacacttatttcctttgctgttgggagctcaaagatgatgtgtttacacggcttacagtgaaacctttgctaacaatgctaagagaggcctctgatgaaattgtggctgaaaaagaggctgaagttaaattgccagaggacagtagctgtacagaagatttaagttcatgcactagtgtgcctgagatgaatgaagacgggaacaggaaagaaagcaactgtgccaaagacctcagaagtcagccacctactagaataccaacactggttgacaaagagacaaacactgatgaagccgctaatgacaatatggcagttcgccccaaagagcgcagcagcctgagctctagacagcatccgtttgtgaggagcagtgtgatagtgcgctcacagaccttttctccaggagagcggaaccagtacatctgcaggttaaatcggagtgacagtgacagttcaaccctggctaaaaaatcactgtttgtgagaaactccaccgaacgccgcagtttgagggtcaaaaggacggtttgccagtcagtccttagaagaacaacacaggaatgcccagtgcggacatctctagacttagaactggaccttcaggcatctctgacccggcagagccgcctcaatgatgagctgcaggcgctgagggacttgcggcagaagctggaggaactgaaagctcagggagagactgaccttccaccaggcgtgctggaggatgagaggttccagaggcttctgaagcaagctgagaagcaggctgaacagtccaaagaagagcagaagcaaggtctgaatgcagagaagttgatgaggcaagtctccaaggacgtgtgtcggctccgggagcagagccagaaggtgcctcggcaggtgcagtccttcagggagaagattgcctacttcaccagagcaaagataagcatcccatccctgccagctgatgatgtgtgattacatgacttaagaaattattttttcatctgttcactttcttagggagggtaaaagactgaagatttgtgtttttgttttggtgtttggttttttttggtaacgtaactgtcaactcttgaagaacttttatttcacatcagattttcaacacattaatttgtaaagtaccttgagtgtaatttttatatgcttaaaaaagaaaaaatcatataagaaagatgggataacctggtacacaaatgttgcccagtatgtgcgcattgccagtggacttcattttgtaaaaatggaatagaggcagtaccccacatgtgtactgttgagccggctgttgagaaacaacttggttcagccggtggttttgcttctcctttgtgttcctgtgagtaggctgtgccgatggcagcagcgccacgtggtatctgtgcgctggcgaggagaggagcgctttccatttggaggcagtgtgagcacacgctggagtgcagcgttccaaagtccgcccgaaatggatgctgcgtccacggccatcacctgtgcgggaacacctggtttccttaagacaatttcctttttgtccttttatatttttctaaagaaaactaagatataaactaccaagtgctcttaagaataaaaataagaataagaatacaaaggagcactactcttggctacacgaaagatcttgggattcatgacactgagggcagggagaagaaagaacaccagccacgcagagatacaaataagctcatcaaatgagcagctggtttgtctcactcagcctgaatttgcattaagtgttcaaaagtgagtttctggcttgcactagtgttttgccctaaatctaaggatggtgcctagtggtggccctgtgttctgaggacagagagagctggaggggtggagggaaatgcatcggcactcatttggtgtaaccaagaagagggggaaagatgtcttgatagaatcaaagttgccaaaaacaaagaagagtttatcaagcagatttctaacatttagtagaaactacttcatagctctcatttttagggggttctatctataatttatggtaaatagttgggaggcaaagggaagaatgtgtgtggggggattattaatttgaagtataagctaaattgtttattaaaaagcctattttggatgaacaagtttagagagataaactgactaatgtgtcctccagtttagaatttcaccttacccgacccaggcacttcttaaaaacacagatcctcagtgcagctctgccagcatcaaggcttttaaaatatgtagtatttaggccatttaaaccatacttattactcaataacccaagaaacaattttgggttagccatctaatatagcaaataaaatagattttttaaagaaatccaaaattgtcttaaaggaatggaccccttgaagaaaaaaaaaaaaagttttgttcctcagttagaatgctcactagctcactagcaagaatttttattttcttgaaagcaattatatatattttggaaagttcatgttattggaattgaagttcaaattaagcaacttctgagcctagaactttaattactttttcctaaatgtcccaacacttacatacaaatttctttgaagacataactggacatggcagacactgctttgaacaaaaaccagcctagtgaattgactgagtacagtcctttaaggctgcccagttcattctattagatgactaaggaaaactagaaaaagaatacagttcacccttgtcaaggtcaaatgtgaaagacagaagtttatttaatgtagaggtaaatgaaggtgagctgttttcagcatcttagtttgaccatgaaaatgtctatagaattatgtgtagttgttccgtacgattttattttcttcatttatttatttacagtcttatttatgttctgtttaatatatagtttgattctggccattttaaatatttgacacagaagagactatattggaatatttacagctttataagtctttcatcagattagctgttgactttttgtaatacaaaaagtttcagacaagtattaaagaataaaatctgtctcaggctggtagttagcagttgtgaccaagatgcttttggttgttgtatttcacaaaatttcctcatttctaacatgagagatgaacttattttaatataatcctttttctacactttaaaagtcagcaatagtgttatgtatttataggcagcttttaataatcttgtcatatttgtactaacccaaatgattcacagtgacaaaacattttaataacttgatcacaaaaccatatggacaaatatgaattttaatattataaatactatttttaaaaggtagaatttattcgcacagggtaaaaagaatgtaatatttagttctcaagtttgaattatcagtatattattacaattttgtatatcagaatcttaagtgttacaggtacaaaaagaatattgctagccaaatgaacaaagtttagctaaatctctgtagcatgcaaatcaaataaattaaaattttttgctattgctttatctatattgtcttaaatatcaaaagctcaggactgaacttaatatttaatcaggttaaattctgaacatgtttctgttttaatttgtcttgtttgtaaacgtatgcaaatacatcacataga

SEQ ID NO: 326493 - protein, 90 aa, Artificial Sequence
  derived and/or modified sequence
AISCGQVSSALSPCISYARGNGAKPPAACCSGVKRLAGAAQSTADKQAACKCIKSAAGGLNAGKAAGIPSMCGVSVPYAISASVDCSKIR

SEQ ID NO: 326494 - protein, 2241 aa, Artificial Sequence
  derived and/or modified sequence
  misc_feature (1)..(1): Xaa can be any naturally occurring amino acid
XSEVSNFTMEDINNKKIRYSAVFETDGHLVTDSFYFSVSDMDHNHLDNQIFTIMITPAENPPPVIAFADLITVDEGGRAPLSFHHFFATDDDDNLQRDAIIKLSALPKYGCIENTGTGDRFGPETASDLEASFPIQDVLENYIYYFQSVHESIEPTHDIFSFYVSDGTSRSEIHSINITIERKNDEPPRMTLQPLRVQLSSGVVISNSSLSLQDLDTPDNELIFVLTKKPDHGHVLWRQTASEPLENGRVLVQGSTFTYQDILAGLVGYVPSVPGMVVDEFQFSLTDGLHVDTGRMKIYTELPASDTPHLAINQGLQLSAGSVARITEQHLKVTDIDSDDHQVMYIMKEDPGAGRLQMMKHGNLEQISIKGPIRSFTQADISQGHVEYSHGTGEPGGSFAFKFDVVDGEGNRLIDKSFSISILEDKSPPVITTNKGLVLDENSVKKITTLQLSATDQDSGPTELIYRITRQPQLGHLEHAASPGIQISSFTQADLTSRNVQYVHSSEAEKHSDAFSFTLSDGVSEVTQTFHITLHPVDDSLPVVQNLGMRVQEGMRKTITEFELKAVDADTEAESVTFTIVQPPRHGTIERTSNGQHFHLTSTFTMKDIYQNRVSYSHDGSNSLKDRFTFTVSDGTNPFFIIEEGGKEIMTAAPQPFRVDILPVDDGTPRIVTNLGLQWLEYMDGKATNLITKKELLTMDPDTEDAQLVYEITTGPKHGFVENKLQPGRAAATFTQEDVNLGLIRYVLHKEKIREMMDSFQFLVKDSKPNVVSDNVFHIQWSLISFKYTSYNVSEKAGSVSVTVQRTGNLNQYAIVLCRTEQGTASSSSRVSSQPGQQDYVEYAGQVQFDEREDTKSCTIVINDDDVFENVESFTVELSMPAYALLGEFTQAKVIINDTEDEPTLEFDKKIYWVNESAGFLFAPIERKGDASSIVSAICYTVPKSAMGSSLYALESGSDFKSRGMSAASRVIFGPGVTMSTCDVMLIDDSEYEEEEEFEIALADASDNARIGRVATAKVLISGPNDASTVSLGNTAFTVSEDAGTVKIPVIRHGTDLSTFASVWCATRPSDPASATPGVDYVPSSRKVEFGPGVIEQYCTLTILDDTQYPVIEGLETFVVFLSSAQGAELTKPFQAVIAINDTFQDVPSMQFAKDLLLVKEKEGVLHVPITRSGDLSYESSVRCYTQSHSAQVMEDFEERQNADSSRITFLKGDKVKNCTVYIHDDSMFEPEEQFRVYLGLPLGNHWSGARIGKNNMATITISNDEDAPTIEFEEAAYQVREPAGPDAIAILNIKVIRRGDQNRTSKVRCSTRDGSAQSGVDYYPKSRVLKFSPGVDHIFFKVEILSNEDREWHESFSLVLGPDDPVEAVLGDVTTATVTILDQEAAGSLILPAPPIVVTLADYDHVEEVTKEGVKKSPSPGYPLVCVTPCDPHFPRYAVMKERCSEAGINQTSVQFSWEVAAPTDGNGARSPFETITDNTPFTSVNHMVLDSIYFSRRFHVRCVAKAVDKVGHVGTPLRSNIVTIGTDSAICHTPVVAGTSRGFQAQSFIATLKYLDVKHKEHPNRIHISVQIPHQDGMLPLISTMPLHNLHFLLSESIYRHQHVCSNLVTTYDLRGISEAGFLDDVVYDSTALGPGYDRPFQFDPSVREPKTIQLYKHLNLKSCVWTFDAYYDMTELIDVCGGSVTADFQVRDSAQSFLTVHVPLYVSYIYVTAPRGWASLEHHTEMEFSFFYDTVLWRTGIQTDSVLSARLQIIRIYIREDGRLVIEFKTHAKFRGQFVMEHHTLPEVKSFVLTPDHLGGIEFDLQLLWSAQTFDSPHQLWRATSSYNRKDYSGEYTIYLIPCTVQPTQPWVDPGEKPLACTAHAPERFLIPIAFQQTNRPVPVVYSLNTEFQLCNNEKVFLMDPNTSDMSLAEMDYKGAFSKGQILYGRVLWNPEQNLNSAYKLQLEKVYLCTGKDGYVPFFDPTGTIYNEGPQYGCIQPNKHLKHRFLLLDRNQPEVTDKYFHDVPFEAHFASELPDFHVVSNMPGVDGFTLKVDALYKVEAGHQWYLQVIYIIGPDTISGPRVQRSLTAPLRRNRRDLVEPDGQLILDDSLIYDNEGDQVKNGTNMKSLNLEMQELAVAASLSQTGASIGSALAAIMLLLLVFLVACFINRKCQKQRKKKPAEDILEEYPLNTKVEVPKRHPDRVEKNVNRHYCTVRNVNILSEPEAAYTFKGAKVKRLNLEVRVHNNLQDGTEV

SEQ ID NO: 326495 - protein, 510 aa, Artificial Sequence
  derived and/or modified sequence
MASTTTCTRFTDEYQLFEELGKGAFSVVRRCMKIPTGQEYAAKIINTKKLSARDHQKLEREARICRLLKHPNIVRLHDSISEEGFHYLVFDLVTGGELFEDIVAREYYSEADASHCIQQILESVNHCHLNGIVHRDLKPENLLLASKSKGAAVKLADFGLAIEVQGDQQAWFGFAGTPGYLSPEVLRKDPYGKPVDMWACGVILYILLVGYPPFWDEDQHRLYQQIKAGAYDFPSPEWDTVTPEAKDLINKMLTINPAKRITASEALKHPWICQRSTVASMMHRQETVDCLKKFNARRKLKGAILTTMLATRNFSAAKSLLKKPDGVKKRKSSSSVQMMESTESSNTTIEDEDVKARKQEIIKVTEQLIEAINNGDFEAYTKICDPGLTAFEPEALGNLVEGMDFHRFYFENALSKSNKPIHTIILNPHVHLVGDDAACIAYIRLTQYMDGSGMPKTMQSEETRVWHRRDGKWQNVHFHRSGSPTVPIKPPCIPNGKENFSGGTSLWQNI

SEQ ID NO: 326496 - DNA, 1533 bp, Artificial Sequence
  derived and/or modified sequence
atggcctcgacaactacctgtaccagatttacagacgagtaccagctctttgaggagctgggtaagggcgcgttctcggtagtacgtaggtgtatgaagattcccaccggtcaggaatacgccgccaagatcattaatactaagaagctgtcagcaagagatcatcagaaactcgagcgggaagctcgcatctgccgactgttgaagcaccctaatatagtccgcctccatgattcgatcagtgaagaaggcttccattacttggtgttcgacctggtgaccggtggggaattgtttgaggatatcgtcgcacgcgaatactattccgaagctgacgcgtctcactgcatccagcaaattttggaaagcgtaaaccactgtcacctcaatggtattgtccatagggatctgaaacctgaaaacctattgctcgcctctaaatctaagggggcggccgttaagctggccgacttcggtctggcgatcgaagtccagggcgatcagcaggcttggttcgggttcgctggtactcccggatacttgagccccgaggtcctgcgtaaggatccctatgggaagcccgtggacatgtgggcgtgcggtgtgattttgtatattctgctcgttgggtatcctccattctgggatgaagatcagcatcgcctctatcaacagattaaagcgggagcctacgacttccctagccccgagtgggacacggtcactccggaagcgaaggacctgataaacaaaatgctgaccatcaatccggcaaaaaggatcactgccagtgaagcactgaagcacccttggatttgccagcgctccaccgtggcgtctatgatgcatcggcaggaaactgtggactgtcttaagaaatttaacgctaggaggaagctcaagggcgccattctcacaaccatgttggctacccgtaacttttcagcagccaagtccttgctgaagaaacctgatggagtgaaaaaaaggaaatcttccagctcagtccagatgatggaatccaccgagagtagtaatactactatagaagatgaagatgtcaaagcacgcaagcaggagatcattaaagtgaccgaacagcttattgaagccatcaataatggagatttcgaagcctataccaagatctgcgacccaggcttaaccgcctttgagccagaggccctgggcaatctcgtggagggcatggacttccatcgcttctactttgaaaacgcgctctccaagtccaacaaacctatccataccattattttaaaccctcacgtgcacctcgtgggggatgacgctgcctgtattgcgtacatccgactcacacaatatatggacgggtcgggtatgcctaaaactatgcagtccgaggaaacccgggtgtggcaccgacgtgatgggaagtggcagaacgtccacttccatcgctctggctcccccactgtgccgatcaagccaccttgcattccgaacgggaaagaaaattttagcggaggcacaagcttatggcagaacatatag

SEQ ID NO: 326497 - DNA, 1533 bp, Artificial Sequence
  derived and/or modified sequence
atggccagcaccaccacctgcacccgcttcacagatgagtaccagctgtttgaggagctgggcaagggggccttctctgtggtgcggcgctgcatgaagatccccaccggccaggagtatgctgccaagatcatcaacaccaagaagctgagcgcccgggaccaccagaagctggagcgggaggcccgcatctgccgcctgctgaagcaccccaacatcgtgcggctgcatgacagcatcagcgaggagggcttccactacctggtgtttgacctggtgactggaggagagctgtttgaggacatcgtggcccgggagtactacagcgaggctgatgccagccactgcatccagcagatcctggagagcgtgaaccactgccacctgaatggcatcgtgcaccgggacctgaagccagagaacctgctgctggccagcaagagcaaaggagctgctgtgaagctggccgactttggcctggccatcgaggtgcagggcgaccagcaggcctggtttggatttgctggcaccccaggctacctgagccctgaggtgctgaggaaggacccctacggcaagcctgtggacatgtgggcctgtggggtcatcctgtacatcctgctggtgggctacccacccttctgggatgaggaccagcaccggctgtaccagcagatcaaggccggggcctatgacttccccagccctgagtgggacacagtgaccccagaggccaaggacctgatcaacaagatgctgaccatcaacccagccaagaggatcacagccagcgaggccctgaagcacccctggatctgccagaggagcacagtggcctccatgatgcaccggcaggagaccgtggactgcctgaagaagttcaatgcccggaggaagctgaagggggccatcctgaccaccatgctggccaccaggaacttctctgctgccaagagcctgctgaagaagccagatggagtgaagaagaggaagagcagcagctctgtgcagatgatggagagcacagagagcagcaacaccaccattgaagatgaagatgtgaaggccaggaagcaggagatcatcaaggtgacagagcagctgattgaggccatcaacaacggggactttgaggcctacaccaagatctgtgaccccggcctgacagcctttgagcctgaggccctgggcaacctggtggagggcatggacttccaccgcttctactttgaaaatgccctgagcaagagcaacaagcccatccacaccatcatcctgaacccccacgtgcacctggtgggagatgatgctgcctgcatcgcctacatccggctgacccagtacatggatggcagcggcatgcccaagaccatgcagagcgaggagaccagggtgtggcacagaagagatggcaagtggcagaatgtgcacttccacaggagcggcagccccaccgtgcccatcaagccaccctgcatccccaacgggaaggagaacttcagcggcggcaccagcctgtggcagaacatctag

SEQ ID NO: 326498 - DNA, 1533 bp, Artificial Sequence
  derived and/or modified sequence
atggccagcaccaccacctgcacccggttcaccgacgagtaccagttgttcgaggaactcggaaaaggagcttttagtgtggttcgccgttgcatgaagatcccgacaggccaggagtatgctgctaaaatcattaatactaagaagttgtccgctagagaccatcagaaactagagcgggaagctagaatttgcagattgctgaagcatccaaacatcgtccgcctgcatgatagcatttcagaggagggcttccactacctggtgttcgatctcgttaccgggggcgagctgtttgaagatattgtggctcgcgaatactactctgaggctgacgcctcccactgcatacagcagatcctggagagcgtgaatcactgccaccttaatggaatcgtgcatagggaccttaaaccggagaatttgctgcttgcaagtaaatccaagggggcggctgtgaagctggccgatttcgggttggccatcgaagtccaaggtgatcaacaggcttggtttgggtttgctggcactcctgggtacttaagccccgaggtcctgcgcaaggacccatacggcaagcctgtggacatgtgggcctgcggcgtgatcctgtacatccttttagtgggttatccgccattttgggacgaagaccagcatagactctatcaacagattaaggccggagcgtatgatttcccgtcaccagaatgggacacggtgacgccggaggccaaagacctgataaacaagatgctgaccatcaatccagcgaaaagaataacagcaagcgaggccctaaaacacccttggatctgtcagcgaagcacggtggctagtatgatgcacaggcaggagaccgttgactgtctcaaaaaatttaatgctcgtcgtaaactgaagggcgcaatactgaccaccatgcttgcaaccagaaacttttctgcagctaaaagtcttttgaagaagcctgatggagtgaaaaaaagaaagagtagcagttctgtgcaaatgatggagtcaacggagtccagtaacaccacaatcgaagatgaggatgtcaaggcacggaagcaggaaatcatcaaggtcaccgaacagcttatcgaggctattaataacggggacttcgaagcatacactaagatttgtgaccctggccttacagcttttgaacccgaggccctgggcaatcttgtagagggcatggactttcaccgattttacttcgagaacgctctgagtaagtcaaataaacctatccatacgattattcttaatcctcacgttcacctggtgggggacgacgcagcctgtattgcatatattcgcctcacgcagtacatggatggcagtgggatgccgaagacaatgcaaagcgaagagacacgcgtatggcataggagggacggaaaatggcaaaacgtgcattttcaccgttccgggagtccaacggtaccaatcaagcctccatgcatccctaacggaaaggaaaactttagcggcggaacttcactatggcagaacatatag

SEQ ID NO: 326499 - DNA, 1533 bp, Artificial Sequence
  derived and/or modified sequence
atggcaagcaccacgacttgtactaggttcaccgacgaataccagctgttcgaggaactgggcaaaggtgcattttctgtggtacggaggtgtatgaaaatccctaccggccaagagtatgctgcgaagatcatcaacactaagaagctgtccgcacgcgatcaccaaaagctggagcgcgaggccaggatttgtcgactgctgaagcaccccaatatcgttaggctgcacgatagcatcagcgaagagggttttcactatctcgtatttgatttagtcaccggtggtgaattattcgaggatattgtggcccgtgaatattactctgaggcagacgcctcgcactgcatccagcagatcctcgaatcagtgaaccactgccatcttaatggaattgtgcacagggatctgaaacccgagaacttactcttggcatccaagtccaaaggagcagccgtcaaattagctgattttggacttgccatcgaggttcaaggagatcaacaggcttggttcggcttcgccggaaccccaggctatctgtcacctgaagtgctgaggaaagacccctatgggaagcccgtggatatgtgggcctgtggggtcatcctgtacattctcctagttggttacccgcctttctgggacgaggaccagcatagactgtaccaacagattaaggctggggcatacgactttccgagccccgaatgggacactgtgaccccagaggccaaagacctgattaataagatgttgaccatcaatccggcaaaaagaataactgccagtgaagccctgaagcacccctggatttgtcagcggtcaacagttgcttccatgatgcatagacaggaaaccgtcgattgtctgaagaaatttaacgcaagacgaaagttaaagggtgctattttaaccacaatgcttgctactcgaaattttagcgccgcaaagagcctcctgaagaagcctgacggagttaaaaaaaggaagagtagtagctctgtgcagatgatggaaagcaccgaatccagtaacacaactatcgaagacgaagatgttaaagcgcgtaaacaggaaattattaaggtgacagagcagttaatcgaggctataaataacggtgactttgaagcttataccaagatttgtgatcccggactaactgcctttgagccagaggccctgggaaatcttgtggaaggcatggacttccacagattctactttgagaacgcgctcagcaaaagtaacaagcctatccatactattatcctcaatccacacgtgcatctggtgggagatgacgcagcctgtattgcatacattagactcacacagtacatggacggatccggaatgccgaagactatgcagtctgaagaaacccgtgtttggcatcggagggacggaaagtggcagaatgtgcatttccaccgctcagggagccccaccgtgccaatcaagccgccatgtattcccaatggaaaagagaacttctccggcggaaccagtttgtggcaaaatatctag

SEQ ID NO: 326500 - DNA, 5905 bp, Artificial Sequence
  derived and/or modified sequence
aaaggagggagtgcgagagatccacgaagggacaggcttggagtcgctagagggaggtgtgggaccagcgaggagggggcttcgccagggagggggtgctggcaggcggagggagcggcgggaggaggcgccggaggaggagacggaggcctggggacggcagaagaggcttcgcctgagccgagcgctctttctctcgccgcgccgtcttgaagccgcgcgggctcgtgagcagcgcgaggccgccaaggtgcctcgcttcgccggagccgctgccgcccgccggagggaagccggcctcgggcgcgcacgctcgtcggagccccggcgcgccccgcgcctgagcctgctgacagcggccgctgggctcaggctgtccgctctgggctccgcggcctcggccccgctgcactccacctccgccccctcggactccctcccctctgcttctactcctcctgctccagtgcggatcgtttcgcaactgcttgccactcgtcccgtgcctggctgtttttccatttcccggccccctcttcttgagtactttaccccctgcatttggggacagggactggaaaaggggcgggtggagcgtccagtggagaagaaggaagcgaggcccgcaggaggaggaggatcggcggactgtggggaggagaccccacgccaccctttctggtcatctcccctcccgccccgcccctgcgcacactccctcgcgggcgagctactttcggaccaggaaagtaagagcggccctgggtgacagcgccgcggggccagtcccggggttagccgcgcgtctgctcgcttctggtccgtcgcgctcccagccagggcacagcccggaccgaggatggcttcgaccacaacctgcaccaggttcacggacgagtatcagcttttcgaggagcttggaaagggggcattctcagtggtgagaagatgtatgaaaattcctactggacaagaatatgctgccaaaattatcaacaccaaaaagctttctgctagggatcatcagaaactagaaagagaagctagaatctgccgtcttttgaagcaccctaatattgtgcgacttcatgatagcatatcagaagagggctttcactacttggtgtttgatttagttactggaggtgaactgtttgaagacatagtggcaagagaatactacagtgaagctgatgccagtcattgtatacagcagattctagaaagtgttaatcattgtcacctaaatggcatagttcacagggacctgaagcctgagaatttgcttttagctagcaaatccaagggagcagctgtgaaattggcagactttggcttagccatagaagttcaaggggaccagcaggcgtggtttggttttgctggcacacctggatatctttctccagaagttttacgtaaagatccttatggaaagccagtggatatgtgggcatgtggtgtcattctctatattctacttgtggggtatccacccttctgggatgaagaccaacacagactctatcagcagatcaaggctggagcttatgattttccatcaccagaatgggacacggtgactcctgaagccaaagacctcatcaataaaatgcttactatcaaccctgccaaacgcatcacagcctcagaggcactgaagcacccatggatctgtcaacgttctactgttgcttccatgatgcacagacaggagactgtagactgcttgaagaaatttaatgctagaagaaaactaaagggtgccatcttgacaactatgctggctacaaggaatttctcagcagccaagagtttgttgaagaaaccagatggagtaaagaaaaggaagtccagttcgagtgttcagatgatggagtcaactgagagttcaaatacaacaattgaggatgaagatgtgaaagcacgaaagcaagagattatcaaagtcactgaacaactgatcgaagctatcaacaatggggactttgaagcctacacaaaaatctgtgacccaggccttactgcttttgaacctgaagctttgggtaatttagtggaagggatggattttcaccgattctactttgaaaatgctttgtccaaaagcaataaaccaatccacactattattctaaaccctcatgtacatctggtaggggatgatgccgcctgcatagcatatattaggctcacacagtacatggatggcagtggaatgccaaagacaatgcagtcagaagagactcgtgtgtggcaccgccgggatggaaagtggcagaatgttcattttcatcgctcggggtcaccaacagtacccatcaagccaccctgtattccaaatgggaaagaaaacttctcaggaggcacctctttgtggcaaaacatctaaggcctgaaaaccattcacatatgggtcttctaaatttcaacagtgccacttctgcattctctgttctcaaggcacctggatggtgaccctgggccgtcctctcctcctcttcatgcatgtttctgagtgcatgaagttgtgaaggtcctacatgtaatgcatatgtgatgcatcatcttatcatatattccttcctatacattgtttacacttcaactacggggatgttccacacaaacttaaattactgttggcaaaacaatagggggagattagacaaaaaaaaaaatccacaatattccaagtacaactcttcatcaagtttctctgttaatgccaagatttaacagacttaagaactattgttctctgaatgacagttgtaagagaaatgtaaattttttagaactctttgctgttaatctgttttggtttgtttggtttttttttttttttttaaggtaaaaaaaaaatacaccttcagtttcctggtgtgatcctggttaaaatggatgatttttcattgaaagttttgctgattaacaattaaagtgggatgatatgtgggcaaaatcacttatgaaagtagaagcaagaatcagttggtttgctaccacataaagccatgctgtttttggtcaaactgtgtaaactggaaaaattcacatcatttctgagtttaatcactttaggatatattcacattgttttggtgaatttgctgaattgaattgtttttctttctcaaatctgtgatctcttttctttatcctgtttctttgttcctttcgtttgctttcttatttttcttttgttccattcttttcttacttttttcccttttccttttttggggaggctggctagtagtgtgtgagaaaagaatagaagtgaaatttgcataatgaatgtaaaagggaaataaaagtcttttgaaggtagctatactagcacttttgatcatcttcagggcccacaaaaatgttgtcaagattttaaaggtttataattctgcttaagctctagtttggacttaggtatcctaactatgttggaggtatttgcattgtttaaagttaggataaaagcaagttcctcctgtgactgcaacgtcttactgattgggacagttgccaggaggataccaacttgatagcagagggggttttatgcaaacgcactcacctccgccttggggaatgaaagggtcacttctgcatcatcactagctagttttctagtgttagagaggcttacaaatgtttgccattctcataagtgttttgaacttgatctttgtgacttgtgcttttttagcttctctcttgaatcagagtatcattgtcttcctccaaggagttagaatttcccagtttaaaacaaaaagggaaatgtcctaggttttctttgtgcttctcatttttcctttgttgattcaattcctgtgatttttgttctcttccctgaagtgctttacagtgcatggaatctccatcattgttattttaacgatagtaattcacagtcctcagaagcctatttttaaagcagaagcaaaaaagaaaaacaaaataacaaaaacaacccttcctcttttctctcatctcacctctctgtgttgattactaatcatcttagatattattgctagtggatgtatggtagatgggttgaagcttttctgataattattacacaatttaaaacaacatatatatttaaaataaatatatacagtaaatatattgagccatgttaacctgccaatgagatctgtgaaaaaataatggcctcatttttctctttttaatttcttttacccttttgtgaagcagctatacgtggcatacatgtatttaaagaaaaaaaaatagatgtagagtgttttttttacacttttaacttagcatgtggtgttgaagtattactgtagatcaagtttgtcttccgcactaagatgtgaggaaattgtgatttgttctctccaccacaaatgaattacacatttattatcttctatcattttgaaacactgcagtttaccatgggacactgtatatatttcttgccataatggtaaaggactgattgatatatttaagagttaataaatttgtgatttctgctgacagtgcgtccatctttatttcttcagaagaggtactgtatgtatgcctgcatagtgctggccagtgtcaagggcagtgtgtcctactctggtctcatttagtacataacaatttgcacttggtgagaatggcaagttaattgttctctgtgagcaaaacaatggtctcttctgggaaaatgttgctgagaacaatatagttaacaactaagactcctaaaagcttctctaaactgtaccctccaatccagccttcacatggctgctttttttttttttttttaatacgaacctgtccttgtaacactttgatgttatcatttctgggatacaggcaagcaccccagctcctgctactccccagcttgaacttgagcatacatggatgctcagcttcttttgatttgctaaaaacatcacacttgctcacatgcctgtttatgctgttcatgttgtttatgtttcttacctagaataaatagtctcttcccctacttcttttcccgacttcttactttttcctaagattcagtgtacagcatcatgctccacagcaaaccttcctaggccctattctgggcttgccttccctctcaaaacctacataatagattgtatttacctctcctgtcaaccacattgttttgaaaatatatttctatttgtgtctcctctactgcagtataatgtctccatgggcaagaactgtgtattcatcattgcattcctaaacccaaaccaaggccaggaatggagatatcattgataaatagttgttgaattgaggccaagcccttttgataacagaagcctcaaggggtacccagatagtccttgttttaatgatgggttctctcaccactgtcttgatgctctgagcaagttacctcttccctctgaccctcagtttccatatttgtaaaatgagaataaacataccaacttaataaagatattgtgaggattaatgggtacagagtgactagaatgatatttgatagaaattaaatggtagcagtataactattctgatcactgacattaatattcctattgttattattctttgctcacgagggtatacaactcttgttttgctgttgggctgccctctttatgtaggtttactgttaatgctgaggatatactcggactcaaatgtctcagcagaaggctgagagacaccaaatgaagtggtcatctagctgaatgtaggaaaaatgaaatgtagtagcaaatcagtatattctaaggaaattttcaaggaatattaatcttcacccaaattttgaatttttatgtaaaaaattataatttaagggtaaacatagatgacacagctttcgagtgatttcattgaataaaattctactgacttctatgaa

SEQ ID NO: 326501 - DNA, 1533 bp, Artificial Sequence
  derived and/or modified sequence
atggccagcaccaccacctgcaccagattcaccgacgagtaccagctgttcgaggagctgggcaagggcgccttcagcgtggtgagaagatgcatgaagatccccaccggccaggagtacgccgccaagatcatcaacaccaagaagctgagcgccagagaccaccagaagctggagagagaggccagaatctgcagactgctgaagcaccccaacatcgtgagactgcacgacagcatcagcgaggagggcttccactacctggtgttcgacctggtgaccggcggcgagctgttcgaggacatcgtggccagagagtactacagcgaggccgacgccagccactgcatccagcagatcctggagagcgtgaaccactgccacctgaacggcatcgtgcacagagacctgaagcccgagaacctgctgctggccagcaagagcaagggcgccgccgtgaagctggccgacttcggcctggccatcgaggtgcagggcgaccagcaggcctggttcggcttcgccggcacccccggctacctgagccccgaggtgctgagaaaggacccctacggcaagcccgtggacatgtgggcctgcggcgtgatcctgtacatcctgctggtgggctacccccccttctgggacgaggaccagcacagactgtaccagcagatcaaggccggcgcctacgacttccccagccccgagtgggacaccgtgacccccgaggccaaggacctgatcaacaagatgctgaccatcaaccccgccaagagaatcaccgccagcgaggccctgaagcacccctggatctgccagagaagcaccgtggccagcatgatgcacagacaggagaccgtggactgcctgaagaagttcaacgccagaagaaagctgaagggcgccatcctgaccaccatgctggccaccagaaacttcagcgccgccaagagcctgctgaagaagcccgacggcgtgaagaagagaaagagcagcagcagcgtgcagatgatggagagcaccgagagcagcaacaccaccatcgaggacgaggacgtgaaggccagaaagcaggagatcatcaaggtgaccgagcagctgatcgaggccatcaacaacggcgacttcgaggcctacaccaagatctgcgaccccggcctgaccgccttcgagcccgaggccctgggcaacctggtggagggcatggacttccacagattctacttcgagaacgccctgagcaagagcaacaagcccatccacaccatcatcctgaacccccacgtgcacctggtgggcgacgacgccgcctgcatcgcctacatcagactgacccagtacatggacggcagcggcatgcccaagaccatgcagagcgaggagaccagagtgtggcacagaagagacggcaagtggcagaacgtgcacttccacagaagcggcagccccaccgtgcccatcaagcccccctgcatccccaacggcaaggagaacttcagcggcggcaccagcctgtggcagaacatctag

SEQ ID NO: 326502 - protein, 229 aa, Artificial Sequence
  derived and/or modified sequence
MAEEMESSLEASFSSSGAVSGASGFLPPARSRIFKIIVIGDSNVGKTCLTYRFCAGRFPDRTEATIGVDFRERAVEIDGERIKIQLWDTAGQERFRKSMVQHYYRNVHAVVFVYDMTNMASFHSLPSWIEECKQHLLANDIPRILVGNKCDLRSAIQVPTDLAQKFADTHSMPLFETSAKNPNDNDHVEAIFMTLAHKLKSHKPLMLSQPPDNGIILKPEPKPAMTCWC

SEQ ID NO: 326503 - protein, 653 aa, Artificial Sequence
  derived and/or modified sequence
MTANHESYLLMASTQNDMEDWVKSIRRVIWGPFGGGIFGQKLEDTVRYEKRYGNRLAPMLVEQCVDFIRQRGLKEEGLFRLPGQANLVKELQDAFDCGEKPSFDSNTDVHTVASLLKLYLRELPEPVIPYAKYEDFLSCAKLLSKEEEAGVKELAKQVKSLPVVNYNLLKYICRFLDEVQSYSGVNKMSVQNLATVFGPNILRPKVEDPLTIMEGTVVVQQLMSVMISKHDCLFPKDAELQSKPQDGVSNNNEIQKKATMGQLQNKENNNTKDSPSRQCSWDKSESPQRSSMNNGSPTALSGSKTNSPKNSVHKLDVSRSPPLMVKKNPAFNKGSGIVTNGSFSSSNAEGLEKTQTTPNGSLQARRSSSLKVSGTKMGTHSVQNGTVRMGILNSDTLGNPTNVRNMSWLPNGYVTLRDNKQKEQAGELGQHNRLSTYDNVHQQFSMMNLDDKQSIDSATWSTSSCEISLPENSNSCRSSTTTCPEQDFFGGNFEDPVLDGPPQDDLSHPRDYESKSDHRSVGGRSSRATSSSDNSETFVGNSSSNHSALHSLVSSLKQEMTKQKIEYESRIKSLEQRNLTLETEMMSLHDELDQERKKFTMIEIKMRNAERAKEDAEKRNDMLQKEMEQFFSTFGELTVEPRRTERGNTIWIQ

SEQ ID NO: 326504 - protein, 82 aa, Artificial Sequence
  derived and/or modified sequence
MTANHESYLLMASTQNDMEDWVKSIRRVIWGPFGGGIFGQKLEDTVRYEKRYGNRLAPMLVEQCVDFIRQRGLKEEGLFRLP

SEQ ID NO: 326505 - DNA, 1962 bp, Artificial Sequence
  derived and/or modified sequence
atgacggccaaccacgaatcatacttgttgatggcgagtacacagaatgatatggaggactgggtcaagagtattcgccgcgttatttggggtccattcgggggcggcatcttcggccaaaagctggaggatactgttaggtatgagaaaagatatgggaatcgacttgccccgatgcttgttgagcagtgtgtggattttattagacaacgggggttgaaggaagaaggtcttttcaggctccctgggcaggctaatctggtgaaggagctgcaggacgcatttgactgtggcgagaaaccttcatttgactcaaacactgacgttcatacggtcgccagcttactcaagctctacttgcgcgaactgcccgagccggttattccatacgctaagtacgaggactttttaagctgcgccaagcttctttcgaaggaggaggaggcgggcgtgaaagagctcgctaagcaggtcaaaagcctaccggtggtcaattacaatctgctgaagtacatctgtcgcttcctggatgaagtgcagtcgtattctggggtcaataagatgagcgtacagaatctcgcgacggtgtttggtcccaatatcctgaggcccaaagttgaagaccccctaacaatcatggaaggtactgtcgtcgtacagcaattgatgtctgtgatgatatcaaagcacgactgcctcttcccgaaggatgctgagctgcagtccaagccccaggacggggtttcgaacaataacgagatccaaaagaaggccacaatgggccagctgcaaaacaaagagaacaacaatacgaaggacagcccatctagacagtgtagttgggacaaatctgaaagcccacagcgcagcagtatgaacaacgggtcgccgactgcactgtccgggtccaagacaaattcccctaagaacagcgtccataaactggatgtgtcccggagccctcctttgatggtaaaaaagaacccggcattcaacaaaggctcgggcattgtgactaatggctcattctctagctccaacgctgagggactggaaaagacacagacgacgccaaacgggtccctccaggcccggcggtcctcaagcctgaaagtaagtggcacaaaaatgggaacccactctgtgcagaatggcacagttcggatgggtatccttaactcagacaccttaggcaatcccaccaacgtacggaacatgtcttggctccccaatggctacgtgaccctgcgggataataaacagaaggagcaagcaggcgaactaggtcagcacaatcgcctgagtacctatgacaatgttcaccagcagttctcaatgatgaacttggacgacaagcagtctatagactctgctacttggagtacttcgtcttgcgagatttcgctacctgagaacagcaactcgtgtagatcctccaccactacttgtccagagcaggacttcttcggagggaactttgaagatcctgtgctggacggaccccctcaagacgatttgtcccaccccagagactacgaatcaaaatccgatcaccggagcgtggggggtaggtcatccagggccacctcatcttctgataatagcgagaccttcgtggggaatagtagtagtaatcactccgccctgcactccctcgtctcgagcctgaagcaggagatgacaaaacagaaaatcgaatacgagagccggattaagagtctggaacagaggaatctgacactcgagactgagatgatgagtttgcatgatgagctggatcaggaacgcaagaagtttacaatgattgagatcaagatgcgcaatgcagaacgtgcgaaagaggatgctgaaaaacggaatgatatgctccaaaaggagatggagcagtttttctccacgttcggcgaacttaccgttgaacctagacgcactgaaaggggcaatacgatctggatccagtag

SEQ ID NO: 326506 - DNA, 249 bp, Artificial Sequence
  derived and/or modified sequence
atgacagccaatcatgagtcctacttactcatggcctcaacacaaaacgacatggaggactgggtgaaatccatcagacgtgtcatttggggcccgtttggaggcggcatcttcggccagaagctggaggataccgtgcggtatgaaaagcggtatggtaacagactggcccctatgcttgtggaacagtgtgttgacttcatccggcagcgcgggctcaaagaggagggcttgtttcgcctcccatag

SEQ ID NO: 326507 - DNA, 1962 bp, Artificial Sequence
  derived and/or modified sequence
atgacagccaaccacgagagctacctgctgatggccagcacccagaatgacatggaggactgggtgaagagcatccggcgggtcatctggggcccctttggaggcggcatcttcggccagaagctggaggacacagtgcgctatgagaagagatatggcaaccggctggcccccatgctggtggagcagtgtgtggacttcatccggcagaggggcctgaaggaggagggcctcttccggctgcccggccaggccaacctggtgaaggagctgcaggatgcctttgactgtggggagaagcccagctttgacagcaacacagatgtgcacacagtggccagcctgctgaagctgtacctgcgggagctgcctgagcccgtcatcccctatgccaagtatgaggacttcctgagctgtgccaagctgctgagcaaggaggaggaggccggcgtgaaggagctggccaagcaggtgaagagcctgcctgtggtgaactacaacctgctgaagtacatctgccgcttcctggatgaggtgcagagctacagcggcgtgaacaagatgtctgtgcagaacctggccaccgtgtttggccccaacatcctgcggcccaaggtggaggaccccctgaccatcatggagggcaccgtggtggtgcagcagctgatgtctgtgatgatcagcaagcatgactgcctcttccccaaggatgctgagctgcagagcaagccccaggatggagtgagcaacaacaatgagatccagaagaaggccaccatgggccagctgcagaacaaggagaacaacaacaccaaggacagccccagccggcagtgctcctgggacaagtctgagagcccccagaggagctccatgaacaacggcagccccacagccctgagcggcagcaagaccaacagccccaagaacagcgtgcacaagctggatgtgagccgcagcccccccctgatggtgaagaagaacccagccttcaacaagggcagcggcatcgtgaccaacggcagcttcagcagcagcaatgctgagggcctggagaagacccagaccaccccaaatggcagcctgcaggcccggcgcagcagcagcctgaaggtgtctggcaccaagatgggcacccacagcgtgcagaatggcaccgtgaggatgggcatcctgaacagcgacaccctgggcaaccccaccaacgtgaggaacatgtcctggctgcccaacggctacgtgaccctgcgggacaacaagcagaaggagcaggccggggagctgggccagcacaaccggctgagcacctatgacaacgtgcaccagcagttctccatgatgaacctggatgacaagcagagcattgattctgccacctggagcaccagcagctgtgagatcagcctgcctgagaacagcaacagctgccgcagcagcaccaccacctgcccagagcaggacttctttggaggcaactttgaggaccctgtgctggatggccccccccaggatgacctgagccacccccgggactatgagagcaagagtgaccacaggtctgtgggcggccgcagcagccgggccaccagcagcagtgacaacagcgagacctttgtgggcaacagcagcagcaaccacagcgccctgcacagcctggtgagcagcctgaagcaggagatgaccaagcagaagattgaatatgagagccgcatcaagagcctggagcagaggaacctgaccctggagacagagatgatgagcctgcatgatgagctggaccaggagaggaagaagttcaccatgattgagatcaagatgagaaatgctgagcgggccaaggaggatgctgagaagagaaatgacatgctgcagaaggagatggagcagttcttcagcaccttcggggagctgactgtggagcccaggagaacagagcggggcaacaccatctggatccagtag

SEQ ID NO: 326508 - DNA, 249 bp, Artificial Sequence
  derived and/or modified sequence
atgacagccaaccacgagagctacctgctgatggccagcacccagaatgacatggaggactgggtgaagagcatccggcgggtcatctggggcccctttggaggcggcatcttcggccagaagctggaggacacagtgcgctatgagaagagatatggcaaccggctggcccccatgctggtggagcagtgtgtggacttcatccggcagaggggcctgaaggaggagggcctcttccggctgccctag

SEQ ID NO: 326509 - DNA, 1962 bp, Artificial Sequence
  derived and/or modified sequence
atgaccgccaaccacgagagctacctgctgatggccagcacccagaatgacatggaggactgggtgaaaagtatccgtcgagtgatttggggaccctttgggggcggaatttttggccaaaagcttgaagataccgtacgatatgagaagcggtatgggaaccggctcgctccaatgctggtggagcagtgtgtcgatttcattcgacaaagagggctgaaggaggagggcctttttcggttgccaggtcaggcgaacctcgtcaaagagctgcaagatgccttcgactgcggtgagaaaccaagcttcgattcaaatacagacgtccacacagtcgcatccctccttaaattgtatcttcgggagctgccagaacccgtcatcccatatgctaagtatgaagatttcctgtcatgcgctaagctcctgagcaaagaggaggaggccggcgttaaggaattagcaaagcaggtgaagagcctacccgtagttaactataatcttctcaaatacatatgtcgcttcctggacgaagtgcagtcatatagcggggttaataagatgagtgtgcagaacctggccactgtttttggccctaacattttgcggcccaaagtcgaggacccgcttactataatggaaggcacagttgttgtgcagcagctgatgtcagtcatgatttccaaacacgattgcctttttcccaaagacgcagaactgcagtctaaacctcaggacggggtgtctaacaacaacgagatccaaaagaaggccaccatggggcagttgcagaataaagagaataacaatacgaaggatagcccctcacgccagtgttcgtgggataaatccgagtcaccccaaagaagttcaatgaataacggttctcctaccgcgttaagtgggagtaaaaccaattcgccaaagaattccgttcataaactggacgtgtcccggagccctcccctgatggtgaagaagaaccctgctttcaataagggctccggcattgttaccaatggcagcttcagctctagtaacgccgagggcctggaaaaaactcagacgaccccaaatgggagcctgcaggccagacgcagctcatccctgaaagtgagcggcacaaaaatgggcacacacagtgtccaaaatgggacagtgcgaatgggtatcctgaatagtgatactttaggcaatcctaccaatgtgagaaacatgtcatggctgccaaacggatatgtgaccctccgagataacaagcagaaagagcaggccggcgagctcgggcagcataacagactcagcacttacgataacgtccaccaacagtttagcatgatgaaccttgacgacaagcagtctatagattccgcaacctggtccacatcctcttgcgaaattagcttgcccgaaaactccaacagctgtagatccagtaccaccacgtgcccagagcaggacttctttggcggtaatttcgaagaccctgtcctagacgggccgcctcaggatgatctgagccatccgagagactacgaaagcaagtcagaccatagaagcgtggggggccggtcctcacgggctacttcctcctccgataactctgagactttcgtgggcaatagctcgtctaaccattccgcattacactccctggtcagctctcttaagcaagaaatgactaagcagaaaattgaatacgagtctagaattaagagccttgaacaaagaaacctgaccctggaaacggaaatgatgagcctccatgacgaactggatcaagaaaggaagaagtttactatgatagagattaaaatgcggaacgccgaaagggcgaaggaagacgcagagaaacgaaacgatatgctacagaaagagatggaacagttcttttccacctttggggagctgaccgtagagcccagacgcactgaacgaggcaacacgatatggatccaatag

SEQ ID NO: 326510 - DNA, 249 bp, Artificial Sequence
  derived and/or modified sequence
atgaccgccaaccacgagagctacctgctgatggccagcacccagaatgatatggaggactgggtgaagagtatccgtagagtgatttgggggccatttggagggggcatttttggacaaaagctggaggatacagtacgatatgagaagaggtacggcaacagactggcaccgatgctggtggagcagtgtgtggacttcataagacagcgtggtcttaaagaagaaggccttttcagactgccttag

SEQ ID NO: 326511 - DNA, 1962 bp, Artificial Sequence
  derived and/or modified sequence
atgacggccaaccatgagtcctacttgctgatggccagtacgcagaatgacatggaggactgggtgaaaagtatcagaagagtcatctggggcccttttggcggagggatcttcggacagaagctggaggatacagtaaggtacgagaaacgttatggaaacagactcgcacccatgctggtcgaacaatgcgtcgatttcatacgccaacggggactcaaagaggagggactgttccgtctgcccggacaggccaatctagtcaaagaacttcaggacgccttcgactgtggggaaaagccatctttcgacagcaatactgacgttcatacagtcgccagcctgcttaagttatacttgcgggagcttcctgaacctgttatcccatacgcaaagtacgaggattttctctcctgtgccaaactactcagcaaggaagaggaagcaggtgtgaaagaactggccaagcaggtaaagtccctgccggtggtgaactataacttactgaaatatatttgtcgattcttggacgaggtgcagagctatagcggggtcaacaagatgtccgtgcagaatcttgctactgtgttcggtcccaacatcctgcgacctaaggtggaggatcccctaaccattatggagggaaccgtcgtggtgcagcagctgatgtcggtgatgatctcaaaacacgattgtctctttcctaaagatgccgagctgcagagcaaacctcaggacggtgtgtcgaataacaacgagatacaaaaaaaagccacaatggggcagttacaaaataaggagaacaacaatactaaggactcaccctcccggcagtgtagctgggacaagagcgaatccccccagcgaagttctatgaataatggtagtcccactgccctgagcgggtctaagacaaactcgcccaagaattctgtacacaaacttgacgtgagccggagtccccctctgatggtgaagaagaacccggcttttaacaaggggtctggtatcgtgactaatggttctttttcctcttcaaatgcagaagggctggagaagacccagactacccctaacggctccctacaggctagaagaagttccagtctcaaggtaagtgggaccaaaatgggaacacattccgtgcaaaatggcactgtgcgcatgggtattctcaattccgacactttaggcaatcctacaaatgtaagaaatatgagttggctcccaaacggttatgtgactctgcgggataacaaacaaaaagagcaggcgggtgagctcggccagcataacagattgagtacatacgataatgttcaccagcagttttctatgatgaatctggacgacaagcagagcatcgactcagctacatggagtactagtagctgcgaaatttcacttcccgagaactctaactcttgtcgctccagtaccaccacttgccccgaacaggatttcttcggcggaaatttcgaagatcccgtcctcgatggacccccacaagatgacctgtcccaccctagagattacgaaagcaaaagcgatcacagaagtgtcgggggacgttcttcacgcgcaactagtagttcagataattcggagacatttgtgggcaactcaagtagcaaccattctgcactgcactccctggttagcagtttgaagcaggagatgaccaagcaaaaaatagagtacgagagcagaataaagtccctcgaacagcgcaacctgacgttggaaaccgagatgatgtctctgcatgacgaactggatcaggagcgcaagaaatttacaatgatcgagatcaaaatgcgcaatgccgagcgagcaaaggaggacgccgaaaagcgcaacgacatgcttcaaaaggagatggaacagtttttcagcacatttggtgagcttactgtcgaacccaggaggactgagaggggaaacaccatctggattcagtag

SEQ ID NO: 326512 - DNA, 249 bp, Artificial Sequence
  derived and/or modified sequence
atgactgcaaaccacgaatcctacttacttatggcctccacacagaacgacatggaagactgggttaagagcatccgcagagtgatatggggcccatttggagggggaatttttgggcagaaactggaagacaccgtgcggtacgagaaacgctatggcaaccggctggcacctatgctggtagaacagtgcgtggactttattaggcagagaggactgaaggaggaggggctgtttcgcctaccctag

SEQ ID NO: 326513 - DNA, 1962 bp, Artificial Sequence
  derived and/or modified sequence
atgaccgccaaccacgagagctacctgctgatggccagcacccagaacgacatggaggactgggtgaagagcatcagaagagtgatctggggccccttcggcggcggcatcttcggccagaagctggaggacaccgtgagatacgagaagagatacggcaacagactggcccccatgctggtggagcagtgcgtggacttcatcagacagagaggcctgaaggaggagggcctgttcagactgcccggccaggccaacctggtgaaggagctgcaggacgccttcgactgcggcgagaagcccagcttcgacagcaacaccgacgtgcacaccgtggccagcctgctgaagctgtacctgagagagctgcccgagcccgtgatcccctacgccaagtacgaggacttcctgagctgcgccaagctgctgagcaaggaggaggaggccggcgtgaaggagctggccaagcaggtgaagagcctgcccgtggtgaactacaacctgctgaagtacatctgcagattcctggacgaggtgcagagctacagcggcgtgaacaagatgagcgtgcagaacctggccaccgtgttcggccccaacatcctgagacccaaggtggaggaccccctgaccatcatggagggcaccgtggtggtgcagcagctgatgagcgtgatgatcagcaagcacgactgcctgttccccaaggacgccgagctgcagagcaagccccaggacggcgtgagcaacaacaacgagatccagaagaaggccaccatgggccagctgcagaacaaggagaacaacaacaccaaggacagccccagcagacagtgcagctgggacaagagcgagagcccccagagaagcagcatgaacaacggcagccccaccgccctgagcggcagcaagaccaacagccccaagaacagcgtgcacaagctggacgtgagcagaagcccccccctgatggtgaagaagaaccccgccttcaacaagggcagcggcatcgtgaccaacggcagcttcagcagcagcaacgccgagggcctggagaagacccagaccacccccaacggcagcctgcaggccagaagaagcagcagcctgaaggtgagcggcaccaagatgggcacccacagcgtgcagaacggcaccgtgagaatgggcatcctgaacagcgacaccctgggcaaccccaccaacgtgagaaacatgagctggctgcccaacggctacgtgaccctgagagacaacaagcagaaggagcaggccggcgagctgggccagcacaacagactgagcacctacgacaacgtgcaccagcagttcagcatgatgaacctggacgacaagcagagcatcgacagcgccacctggagcaccagcagctgcgagatcagcctgcccgagaacagcaacagctgcagaagcagcaccaccacctgccccgagcaggacttcttcggcggcaacttcgaggaccccgtgctggacggccccccccaggacgacctgagccaccccagagactacgagagcaagagcgaccacagaagcgtgggcggcagaagcagcagagccaccagcagcagcgacaacagcgagaccttcgtgggcaacagcagcagcaaccacagcgccctgcacagcctggtgagcagcctgaagcaggagatgaccaagcagaagatcgagtacgagagcagaatcaagagcctggagcagagaaacctgaccctggagaccgagatgatgagcctgcacgacgagctggaccaggagagaaagaagttcaccatgatcgagatcaagatgagaaacgccgagagagccaaggaggacgccgagaagagaaacgacatgctgcagaaggagatggagcagttcttcagcaccttcggcgagctgaccgtggagcccagaagaaccgagagaggcaacaccatctggatccagtag

SEQ ID NO: 326514 - DNA, 249 bp, Artificial Sequence
  derived and/or modified sequence
atgaccgccaaccacgagagctacctgctgatggccagcacccagaacgacatggaggactgggtgaagagcatcagaagagtgatctggggccccttcggcggcggcatcttcggccagaagctggaggacaccgtgagatacgagaagagatacggcaacagactggcccccatgctggtggagcagtgcgtggacttcatcagacagagaggcctgaaggaggagggcctgttcagactgccctag

SEQ ID NO: 326515 - protein, 277 aa, Artificial Sequence
  derived and/or modified sequence
MENTENSVDSKSIKNLEPKIIHGSESMDSGISLDNSYKMDYPEMGLCIIINNKNFHKSTGMTSRSGTDVDAANLRETFRNLKYEVRNKNDLTREEIVELMRDVSKEDHSKRSSFVCVLLSHGEEGIIFGTNGPVDLKKITNFFRGDRCRSLTGKPKLFIIQACRGTELDCGIETDSGVDDDMACHKIPVEADFLYAYSTAPGYYSWRNSKDGSWFIQSLCAMLKQYADKLEFMHILTRVNRKVATEFESFSFDATFHAKKQIPCIVSMLTKELYFYH

SEQ ID NO: 326516 - protein, 156 aa, Artificial Sequence
  derived and/or modified sequence
MSDALIKVSMENTENSVDSKSIKNLEPKIIHGSESMDSGISLDNSYKMDYPEMGLCIIINNKNFHKSTGMTSRSGTDVDAANLRETFRNLKYEVRNKNDLTREEIVELMRDVSKEDHSKRSSFVCVLLSHGEEGIIFGTNGPVDLKNNKLFQRGSL

SEQ ID NO: 326517 - protein, 117 aa, Artificial Sequence
  derived and/or modified sequence
MENTENSVDSKSIKNLEPKIIHGSESMDSGISLDNSYKMDYPEMGLCIIINNKNFHKSTGMTSRSGTDVDAANLRETFRNLKYEVRNKNDLTREEIVELMRDVSKEDHSKRSSFVCV

SEQ ID NO: 326518 - protein, 290 aa, Artificial Sequence
  derived and/or modified sequence
MIETDSGVDDDMACHKIPVEADFLYAYSTAPGYYSWRNSKDGSWFIQSLCAMLKQYADKLEFMHILTRVNRKVATEFESFSFDATFHAKKQIPCIVSMLTKELYFYHDEVDGGSPMENTENSVDSKSIKNLEPKIIHGSESMDSGISLDNSYKMDYPEMGLCIIINNKNFHKSTGMTSRSGTDVDAANLRETFRNLKYEVRNKNDLTREEIVELMRDVSKEDHSKRSSFVCVLLSHGEEGIIFGTNGPVDLKKITNFFRGDRCRSLTGKPKLFIIQACRGTELDCGIETD

SEQ ID NO: 326519 - protein, 285 aa, Artificial Sequence
  derived and/or modified sequence
MIETDSGVDDDMACHKIPVEADFLYAYSTAPGYYSWRNSKDGSWFIQSLCAMLKQYADKLEFMHILTRVNRKVATEFESFSFDATFHAKKQIPCIVSMLTKELYFYHGSPMENTENSVASKSIKNLEPKIIHGSESMASGISLDNSYKMDYPEMGLCIIINNKNFHKSTGMTSRSGTDVDAANLRETFRNLKYEVRNKNDLTREEIVELMRDVSKEDHSKRSSFVCVLLSHGEEGIIFGTNGPVDLKKITNFFRGDRCRSLTGKPKLFIIQACRGTELDCGIETD

SEQ ID NO: 326520 - DNA, 870 bp, Artificial Sequence
  derived and/or modified sequence
atgatcgagaccgacagcggcgtggacgacgacatggcctgccacaagatccccgtggaggccgacttcctgtacgcctacagcaccgcccccggctactacagctggcgcaacagcaaggacggcagctggttcatccagagcctgtgcgccatgctgaagcagtacgccgacaagctggagttcatgcacatcctgacccgcgtgaaccgcaaggtggccaccgagttcgagagcttcagcttcgacgccaccttccacgccaagaagcagatcccctgcatcgtgagcatgctgaccaaggagctgtacttctaccacgacgaggtggacggcggcagccccatggagaacaccgagaacagcgtggacagcaagagcatcaagaacctggagcccaagatcatccacggcagcgagagcatggacagcggcatcagcctggacaacagctacaagatggactaccccgagatgggcctgtgcatcatcatcaacaacaagaacttccacaagagcaccggcatgaccagccgcagcggcaccgacgtggacgccgccaacctgcgcgagaccttccgcaacctgaagtacgaggtgcgcaacaagaacgacctgacccgcgaggagatcgtggagctgatgcgcgacgtgagcaaggaggaccacagcaagcgcagcagcttcgtgtgcgtgctgctgagccacggcgaggagggcatcatcttcggcaccaacggccccgtggacctgaagaagatcaccaacttcttccgcggcgaccgctgccgcagcctgaccggcaagcccaagctgttcatcatccaggcctgccgcggcaccgagctggactgcggcatcgagaccgac

SEQ ID NO: 326521 - DNA, 855 bp, Artificial Sequence
  derived and/or modified sequence
atgatcgagaccgacagcggcgtggacgacgacatggcctgccacaagatccccgtggaggccgacttcctgtacgcctacagcaccgcccccggctactacagctggcgcaacagcaaggacggcagctggttcatccagagcctgtgcgccatgctgaagcagtacgccgacaagctggagttcatgcacatcctgacccgcgtgaaccgcaaggtggccaccgagttcgagagcttcagcttcgacgccaccttccacgccaagaagcagatcccctgcatcgtgagcatgctgaccaaggagctgtacttctaccacggcagccccatggagaacaccgagaacagcgtggccagcaagagcatcaagaacctggagcccaagatcatccacggcagcgagagcatggccagcggcatcagcctggacaacagctacaagatggactaccccgagatgggcctgtgcatcatcatcaacaacaagaacttccacaagagcaccggcatgaccagccgcagcggcaccgacgtggacgccgccaacctgcgcgagaccttccgcaacctgaagtacgaggtgcgcaacaagaacgacctgacccgcgaggagatcgtggagctgatgcgcgacgtgagcaaggaggaccacagcaagcgcagcagcttcgtgtgcgtgctgctgagccacggcgaggagggcatcatcttcggcaccaacggccccgtggacctgaagaagatcaccaacttcttccgcggcgaccgctgccgcagcctgaccggcaagcccaagctgttcatcatccaggcctgccgcggcaccgagctggactgcggcatcgagaccgac

SEQ ID NO: 326522 - DNA, 834 bp, Artificial Sequence
  derived and/or modified sequence
atggagaacactgagaactccgtcgactccaagagcatcaagaatctggaacccaaaatcattcacgggagtgaatccatggactctggaatctctctggataattcctacaagatggattacccagagatggggctctgtattattatcaacaataagaacttccacaaaagtacgggaatgacaagtaggagtgggactgatgttgacgcagcaaatcttcgcgagacctttaggaatctgaagtacgaggttcgaaataaaaatgacttaaccagggaagaaatcgtcgaactcatgagagacgtctctaaggaggatcacagtaagcgatcctcttttgtttgcgttctgctcagtcacggagaagaaggcattatattcgggaccaacggtcctgtggacttaaaaaagatcacaaatttctttcgtggggatcggtgccggtcactgacagggaagccgaagcttttcattatacaggcctgccggggcaccgagcttgattgtggcattgagaccgattcaggagtggacgacgacatggcctgtcacaagatccccgtggaggccgactttctttatgcttattccaccgctcccggctactattcgtggcgcaactccaaggacggaagttggttcatccagtccctgtgcgctatgctaaagcagtatgcagacaagttagaatttatgcatatattgaccagggtgaataggaaggtggccacagagtttgaatcgttctccttcgatgctacatttcacgccaagaagcagattccatgtattgtgagcatgttgacaaaagagctctatttctaccactag

SEQ ID NO: 326523 - DNA, 471 bp, Artificial Sequence
  derived and/or modified sequence
atgagcgacgccttgataaaggtgagcatggaaaacaccgagaattctgtggattctaagagcattaagaatctggagccaaaaattatccacggatccgaatctatggattccgggatttccctggacaatagctacaaaatggactacccggagatggggttatgcattatcattaacaacaaaaattttcacaaatcgacgggcatgaccagccggagcggtacagatgttgatgcagcgaacttgcgggaaacattccgaaatctcaagtacgaggttcggaacaaaaatgatcttactagagaggagatcgtggagctgatgcgagacgtctcgaaggaagaccacagcaagcggtccagtttcgtgtgtgttctcctgtcccacggcgaggagggcattattttcggaacgaatggccctgttgatttgaagaacaacaagctgtttcagagaggaagtctttag

SEQ ID NO: 326524 - DNA, 354 bp, Artificial Sequence
  derived and/or modified sequence
atggagaacacggaaaatagcgtcgacagtaaatccatcaaaaatcttgaacctaagatcatccatgggtcagagtcaatggatagcggaatctccctcgacaattcatacaaaatggactatcccgaaatggggctctgcattattattaataataagaactttcacaaaagcacaggtatgaccagccggtccggcaccgacgtggacgccgccaacctgagagagacatttagaaatctgaagtatgaggttagaaacaagaatgacctcaccagggaggaaatcgtggaactcatgagggacgttagcaaggaagaccactctaagcggtccagcttcgtctgcgtgtag

SEQ ID NO: 326525 - DNA, 834 bp, Artificial Sequence
  derived and/or modified sequence
atggagaatacagagaattcggtcgatagcaagagtataaagaacctcgagccgaagattatccacgggagtgaaagcatggatagcggtatatctctggataacagctacaaaatggattaccccgagatggggctgtgcatcatcattaataataaaaactttcataaaagcactgggatgacgagcaggtctgggaccgacgtggacgcggcaaaccttagagagacctttaggaacctgaaatatgaggttcgcaacaaaaacgacctaacgagagaggagatagttgaattgatgagagatgtttcaaaagaggaccactccaagaggagtagctttgtgtgtgtgctgctgagtcacggggaagaagggataatatttgggactaatgggcctgtcgacctcaagaaaatcactaacttttttcgcggagaccggtgccggtcgttgaccgggaagcccaaactctttatcatacaggcatgccggggcacggagttggactgcgggatcgagaccgattccggcgtggatgacgacatggcctgccacaaaattccggtggaggcggactttctttacgcctactcgactgcgcctggctattattcttggaggaattcgaaggacggttcctggtttatacaatccctgtgcgccatgctcaaacagtacgccgacaaactggagtttatgcacatccttaccagggtcaacaggaaggtcgcaaccgaatttgagtctttctccttcgacgcaacgttccacgctaagaaacagatcccctgtattgtgtctatgcttaccaaggagctgtatttttatcactag

SEQ ID NO: 326526 - DNA, 834 bp, Artificial Sequence
  derived and/or modified sequence
atggagaacacagaaaattctgtggacagcaagagcatcaagaacctggagcccaagatcatccacggcagcgagagcatggattctggcatcagcctggacaacagctacaagatggactacccagagatgggcctgtgcatcatcatcaacaacaagaacttccacaagagcacaggcatgaccagccgctctggaacagatgtggatgctgccaacctgcgggagaccttcaggaacctgaagtatgaggtgaggaacaagaatgacctgacccgggaggagatcgtggagctgatgagagatgtgtccaaggaggaccacagcaagaggagcagctttgtgtgtgtgctgctgagccatggagaggagggcatcatcttcggcaccaatggacctgtggacctgaagaagatcaccaacttcttccggggggaccgctgccgcagcctgaccgggaagcccaagctgttcatcatccaggcctgccggggcacagagctggactgtggcatcgagacagacagcggcgtggatgatgacatggcctgccacaagatccctgtggaggccgacttcctgtatgcctacagcacagcccctggctactacagctggaggaacagcaaggatggctcctggttcatccagagcctgtgtgccatgctgaagcagtatgctgacaagctggagttcatgcacatcctgaccagggtgaacaggaaggtggccacagaatttgagagcttctcctttgatgccaccttccacgccaagaagcagatcccctgcatcgtgtccatgctgaccaaggagctgtacttctaccactag

SEQ ID NO: 326527 - DNA, 471 bp, Artificial Sequence
  derived and/or modified sequence
atgtctgatgccctgatcaaggtgtccatggagaacacagagaacagcgtggacagcaagagcatcaagaacctggagcccaagatcatccacggcagcgagagcatggacagcggcatcagcctggacaacagctacaagatggactacccagagatgggcctgtgcatcatcatcaacaacaagaacttccacaagagcacaggcatgaccagccgcagcggcacagatgtggatgctgccaacctgcgggagaccttcaggaacctgaagtatgaggtgaggaacaagaatgacctgacccgggaggagatcgtggagctgatgagagatgtgtccaaagaagaccacagcaagaggagcagctttgtgtgtgtgctgctgagccacggggaggagggcatcatcttcggcaccaacggccctgtggacctgaagaacaacaagctgttccagaggggcagcctgtag

SEQ ID NO: 326528 - DNA, 354 bp, Artificial Sequence
  derived and/or modified sequence
atggagaacacagaaaattctgtggacagcaagagcatcaagaacctggagcccaagatcatccacggcagcgagagcatggattctggcatcagcctggacaacagctacaagatggactacccagagatgggcctgtgcatcatcatcaacaacaagaacttccacaagagcacaggcatgaccagccgctctggaacagatgtggatgctgccaacctgcgggagaccttcaggaacctgaagtatgaggtgaggaacaagaatgacctgacccgggaggagatcgtggagctgatgagagatgtgtccaaggaggaccacagcaagaggagcagctttgtgtgtgtgtag

SEQ ID NO: 326529 - DNA, 834 bp, Artificial Sequence
  derived and/or modified sequence
atggagaacaccgagaacagcgtggacagcaagagcatcaagaacctggaaccaaaaattatccacggaagcgagagcatggatagcggcatttcgctggacaactcctacaagatggactaccccgagatgggtctgtgcatcatcattaataacaaaaattttcataaatctactgggatgaccagtcgatcaggcacagacgttgatgccgcaaaccttcgtgagacattccgcaacctaaaatatgaagtgcgcaacaagaacgatctgaccagagaggaaatagtggaactgatgcgcgatgtttccaaggaggatcatagcaaacgttcatccttcgtctgtgtcctcctgagtcacggagaagagggcatcatctttggtacaaacgggcctgttgatcttaagaagatcactaactttttccggggtgacagatgcagatctctcaccggcaaacctaagctttttatcatacaggcatgtcgaggcaccgaactggattgcgggatcgagactgactctggtgtagatgatgacatggcttgtcacaagatccccgttgaagccgacttcctgtatgcgtactcaactgccccgggctattactcttggcgcaattccaaggatggctcttggtttatccagtcgctttgtgctatgctcaaacagtatgccgacaaactggaattcatgcacatcctaacacgggtcaatcgaaaggtggcaacggaattcgagtcctttagctttgatgccacatttcacgcaaagaagcagattccctgtatcgtgtccatgttgaccaaagagctgtacttctaccactag

SEQ ID NO: 326530 - DNA, 471 bp, Artificial Sequence
  derived and/or modified sequence
atgagcgacgccctgatcaaggtgagcatggagaacaccgagaacagcgtcgacagtaagagtatcaaaaatctagaaccaaagatcatacatggctctgaaagtatggattcaggaatctctcttgataattcatacaaaatggattaccccgaaatgggactgtgcataatcatcaacaataaaaatttccacaagtctactggcatgacgtctaggtccggaacggatgtagatgccgccaaccttagggagacctttcggaatctaaaatatgaggtccggaacaagaacgacctgaccagagaggagattgtagagctcatgagggacgtctccaaggaagaccacagcaagcgcagtagctttgtgtgtgtcttgctgagtcacggagaagagggaatcatttttggtacaaacggccccgttgatttaaaaaataacaagctgtttcagcgcggaagcttgtag

SEQ ID NO: 326531 - DNA, 354 bp, Artificial Sequence
  derived and/or modified sequence
atggagaacaccgagaacagcgtggacagcaagagcatcaagaaccttgaacctaagattatccacggttcagagtcaatggatagcggtatctctcttgacaactcgtataaaatggattaccccgaaatggggctatgcattattattaacaacaaaaattttcataaaagtaccggaatgacatcaagatcagggaccgatgtagatgccgcgaatctgagggagacgttcagaaatctgaagtacgaggtacgtaataagaacgacctcacaagagaggaaatcgtggagctgatgcgcgacgtaagcaaggaggaccacagcaagcgctcttctttcgtgtgcgtttag

SEQ ID NO: 326532 - DNA, 834 bp, Artificial Sequence
  derived and/or modified sequence
atggagaacaccgagaacagcgtggacagcaagagcatcaagaacttggaaccaaagatcatacacggctctgagtcgatggatagtggtatctccctggataacagctataagatggattacccggagatgggcctgtgcatcataattaataacaagaatttccacaaatctaccggtatgacctcccggtctgggactgatgttgatgccgctaacctcagagagacctttaggaacttgaagtacgaagtcagaaacaagaatgacctgacaagagaggagatcgtggaactgatgagagatgtcagtaaagaagaccactccaagcgatcttccttcgtgtgtgtgctcttgagccacggagaggaaggcatcatattcggcacgaatggccccgttgacctcaagaagatcacgaactttttcaggggtgaccggtgcaggagtcttacagggaaacccaagttgtttattattcaggcctgccgcggcaccgagctcgactgtgggatagagaccgattctggcgtcgatgatgatatggcttgtcacaagattcctgtggaagcggactttctttatgcctatagtacagctcccggatactactcgtggcggaactccaaggatgggtcatggtttattcaatctttgtgtgccatgttaaaacaatacgccgataagttggaatttatgcacatccttactcgcgtcaatagaaaggtggcaaccgagttcgaatcattctccttcgacgcaactttccacgccaagaagcagattccctgtatcgtcagtatgctgaccaaggagctgtatttctaccactag

SEQ ID NO: 326533 - DNA, 834 bp, Artificial Sequence
  derived and/or modified sequence
atggagaatacggagaattctgtggacagcaagtcaatcaagaatctagaacctaaaatcatccacggatcagagagcatggattccgggatatctctggataattcatataaaatggattacccagagatgggcctttgtatcatcatcaacaacaaaaatttccataagtccactggtatgacgtcccgctccgggaccgatgttgatgcggctaacctgagggaaacatttcgcaatttaaagtacgaggtacgaaacaaaaacgacctgaccagagaggagatcgtggagttgatgagggacgtatcaaaagaggaccatagcaaaaggagctcattcgtttgcgttttattaagccatggcgaggagggtattatctttggcacgaatggtccagtggacctcaagaaaattactaacttctttcgcggtgacagatgtcgatcactgacaggtaagcctaaactctttatcatccaggcttgccgcggaaccgagttagactgcggaatcgaaacagattccggagttgacgatgatatggcctgtcacaagataccagtggaagcggattttttgtatgcatattcaactgctccagggtattactcttggcgaaacagtaaggacggcagctggtttattcagtctctttgtgcaatgcttaaacagtatgcagacaagctggagtttatgcacatactgacccgcgtgaaccggaaagttgctaccgagttcgagagtttctcattcgacgctacttttcacgctaagaagcaaataccctgcatagtgtccatgttaaccaaagagctatatttttaccactag

SEQ ID NO: 326534 - DNA, 471 bp, Artificial Sequence
  derived and/or modified sequence
atgagtgacgcattgatcaaagtttctatggagaacaccgagaattctgtggactccaagtccatcaagaatctcgagccaaagattatacacggctctgagtctatggactcaggaattagtctggataatagttacaagatggactaccccgaaatgggtctctgtatcattatcaacaataagaacttccataagagcactggcatgacttcgcgatcaggaaccgacgtggatgccgcaaacctgagagaaacatttcgcaacctaaaatacgaggtccgtaacaaaaatgacctgacaagagaggagattgtcgaactgatgagagacgtaagcaaggaagatcacagtaagcggtctagttttgtgtgcgtgctcttaagccatggggaagagggaatcattttcgggaccaacggcccagtagacctcaagaataataaactatttcaacgcggatctttatag

SEQ ID NO: 326535 - DNA, 354 bp, Artificial Sequence
  derived and/or modified sequence
atggaaaacactgagaactccgtcgactcaaaaagtattaagaacctagaaccaaagatcatccatggatctgaaagcatggattctggcatcagcctcgataacagctacaaaatggattacccagagatgggtctctgcatcatcattaacaataaaaattttcataagtcgacaggaatgacaagcagaagcggaactgatgttgacgccgcaaatctgcgtgaaacattcaggaacttgaagtatgaagttaggaacaagaacgatctgaccagggaggagatcgtagagctgatgagggacgtcagtaaggaagatcactccaaaaggtcatcctttgtgtgcgtttag

SEQ ID NO: 326536 - DNA, 834 bp, Artificial Sequence
  derived and/or modified sequence
atggagaataccgagaactctgttgactctaagagcattaagaatttggaacccaagattattcacggctcggagagcatggatagcggaatcagtctcgacaactcctataaaatggattacccagagatggggctgtgcataatcatcaacaacaagaattttcataagtctacaggaatgacatcacggtccgggaccgatgtagacgctgccaatctcagagaaacatttagaaatctgaagtatgaggtgaggaataaaaacgacctgacacgggaggagattgtcgagctgatgagagatgtttccaaggaagaccatagcaaacgtagctcctttgtgtgcgtgctgctgtctcatggcgaggaggggataattttcggaacaaacggtcccgtcgatttgaaaaagatcactaacttttttagaggtgaccgttgccggtccctgacaggcaagccaaaactgttcatcatccaggcttgccgcggaaccgagcttgactgtggtatcgaaacagactctggagtggacgatgatatggcctgccataaaatccctgttgaggccgacttcttatatgcttattccaccgcgccaggttattactcttggcgaaacagcaaagatggcagctggttcatccaatccctgtgtgccatgctcaaacagtatgcggataaactggaattcatgcacatcctgacgcgggtcaatagaaaagtggctaccgagtttgagtcattctcctttgacgctacttttcacgccaagaagcaaattccctgcatcgtctccatgctgaccaaagagctctatttctaccattag

SEQ ID NO: 326537 - DNA, 870 bp, Artificial Sequence
  derived and/or modified sequence
atgatcgaaactgacagcggggtggacgatgatatggcctgccataagatcccggtcgaggccgacttcctctacgcatactcgaccgcaccaggttactatagctggcgtaatagcaaggatggatcatggtttatccaatcactctgtgccatgctcaagcagtacgcggataagctggagtttatgcatatcctgacccgtgtgaacaggaaggtggcaactgaatttgagtcattctcctttgatgcaaccttccatgcaaaaaagcaaattccctgtatcgtctccatgttgactaaggaactgtacttctaccatgacgaggtggacggtggaagccctatggaaaataccgaaaatagcgtggatagcaagtcgatcaagaacttggagcccaagataatccatggttcggaatcgatggactccgggatctcgttggataactcctacaagatggattatccagaaatggggctctgtattatcattaacaacaagaatttccacaaatccactgggatgaccagccggtcgggcactgatgtggatgcggccaatctgagagaaacctttagaaaccttaagtacgaagtgcgcaacaagaatgatcttactagggaagaaattgttgaactcatgcgggatgtgagcaaggaagatcactccaagagatcctccttcgtgtgtgtgcttctgtcgcatggagaagaaggaatcatttttggtactaatggtcctgttgaccttaagaaaatcactaatttctttagaggtgatcgctgcaggtcccttactggtaaaccaaaacttttcattatccaggcgtgtcgcgggaccgagctggattgtggaattgaaaccgat

SEQ ID NO: 326538 - DNA, 870 bp, Artificial Sequence
  derived and/or modified sequence
atgatcgagactgactccggagtggacgacgatatggcatgccacaagatcccggtggaagcagatttcctttacgcttacagcacggcaccggggtactactcgtggcggaattcgaaagacgggagctggttcatacagagcctgtgcgccatgctcaagcaatacgcagacaaattggagttcatgcatatcctgactcgcgtgaacaggaaggtggcgacggagttcgagtcattcagtttcgatgccactttccacgccaaaaagcagatcccctgtattgtgtcaatgctcactaaggaactgtacttttatcacgacgaagtggatggaggatctcctatggagaacaccgaaaattctgtggactcgaagtcaatcaagaatctggagccgaagatcatccacggatcggaatccatggactcaggcatcagcctggataactcctacaaaatggactacccggagatgggactctgcattatcatcaataacaagaactttcacaagtcgaccgggatgactagcaggtcgggcactgacgtcgatgcagctaatttgagagaaactttcagaaatcttaagtacgaagtgcgcaataagaacgaccttacccgagaggaaatcgtggaactgatgcgagatgtctccaaggaagatcactctaaacgcagctcctttgtgtgcgttcttctgtcccatggagaggaaggcattatctttggcactaatggaccagtcgatctcaagaagatcaccaatttcttcaggggcgaccggtgtcggagcctgacgggaaagccgaaactgttcatcatccaggcatgccggggaaccgaactggactgcgggattgaaactgac

SEQ ID NO: 326539 - DNA, 870 bp, Artificial Sequence
  derived and/or modified sequence
atgatagagacagactccggggtggatgatgatatggcctgccacaagataccagtggaagctgatttcctgtacgcctacagtactgctcctggatattacagttggagaaattcgaaggatgggtcttggtttatccagtccttgtgcgcaatgttaaaacaatatgcagacaaactggagtttatgcacatccttactcgcgtgaataggaaggtggccacagagtttgagagctttagctttgatgcaacattccatgccaagaaacaaatcccatgtatcgtgtcaatgctcacgaaagagttgtacttttatcacgatgaagtggacggcggcagcccaatggagaatacagagaattccgtagactctaagagcataaaaaacttggagcctaaaataatccacgggtcagagtcaatggacagtggcattagcctggataatagttacaaaatggactaccctgaaatgggcctatgtatcatcattaataacaaaaatttccacaaatccacgggcatgaccagcagatccggaacagacgttgacgccgccaacctgagggagacctttaggaacctgaagtatgaagtgcgcaacaaaaatgacctcacccgggaggagatcgtggagctgatgcgtgacgtttctaaagaagatcacagcaagcgcagtagttttgtttgtgtactattatcgcacggggaggaaggcattatttttggcactaacggccctgtggatctgaaaaaaataaccaacttcttccgtggggacaggtgccgatctctgacaggcaaacccaagttgttcattattcaggcttgtcgcggcacggagttagattgtggtattgagactgac

SEQ ID NO: 326540 - DNA, 870 bp, Artificial Sequence
  derived and/or modified sequence
atgatagagaccgattcaggtgtcgacgacgacatggcttgccacaaaattcctgtcgaggcggattttctgtatgcatactctactgctcctggttattactcttggaggaattccaaagacggcagttggtttatccagtctctgtgcgctatgctgaagcagtacgccgacaagctggagttcatgcacattctgacaagagtaaaccgcaaagtggctaccgaatttgagtccttctcttttgatgcaacattccacgcgaaaaaacagatcccttgcatcgtgtccatgctgacgaaggaactgtacttctaccatgacgaggtggacggcggttctcccatggagaatacagagaacagcgtggactctaagtccatcaaaaacctcgaacccaaaattattcatggttctgaatctatggattctggaatttctcttgacaacagctataaaatggactacccagagatgggtctctgcattataatcaacaacaagaactttcacaagtctactggaatgacctctcgctccggcaccgacgtggatgccgccaacttgcgcgagacatttaggaacttgaaatacgaggtaaggaataaaaacgacctgaccagggaagaaatcgtggaacttatgagagacgtgagtaaggaggatcattccaagaggtcatccttcgtctgcgttctcctctcacacggagaagaaggcataatttttggcacaaacggacccgtggatttgaagaagatcactaactttttcaggggcgataggtgtcgctcactgacgggaaagcctaagttgttcattatacaagcatgtaggggtacagaactggattgtggaatcgagaccgac

SEQ ID NO: 326541 - DNA, 870 bp, Artificial Sequence
  derived and/or modified sequence
atgatcgaaacggacagcggtgtcgacgacgacatggcttgtcataagatcccggtggaagccgacttcctgtatgcgtatagcaccgcccctggatactactcctggcggaattcgaaggacggctcctggttcatccaatccctctgtgcgatgcttaaacagtacgctgacaaactggagttcatgcacattctgactcgcgtaaacaggaaggtggctactgagttcgaatcgtttagtttcgatgcaacctttcacgccaagaagcagatcccatgcatcgtgtccatgctgactaaggaactgtacttttaccatgatgaggtggatggaggatcaccgatggagaacaccgaaaattcggtcgactcgaaatcaataaagaacctggaacccaaaatcatacatggctcggaatcaatggattctggtatctcactcgacaactcatacaagatggattacccggagatgggactctgcatcatcatcaacaacaaaaacttccacaagtccactggtatgacctctaggtccgggaccgatgtggacgcagcaaatttgagggaaacgttccgtaatctcaaatacgaagtgaggaataagaacgacctgactcgcgaggagatcgtcgagctgatgcgggacgtgtctaaggaggatcacagcaaacggtcgtcgttcgtttgcgtgctcctgtctcacggagaagaagggattatctttggaaccaacgggccagtcgacttgaagaagatcaccaacttcttccgcggagatcggtgccgcagcctgactggtaagcctaaacttttcatcattcaggcctgccgaggcactgagttggattgcggcatagaaaccgac

SEQ ID NO: 326542 - DNA, 870 bp, Artificial Sequence
  derived and/or modified sequence
atgatcgaaactgacagcggagtcgatgatgatatggcttgccacaaaatccctgtcgaagcggacttcttgtacgcctactccaccgcacccggatactactcctggagaaatagcaaagatggttcctggtttatccagtcgctctgcgctatgctgaaacagtacgccgataagctggagtttatgcacatcctgacccgcgtcaaccgcaaagtggctaccgagtttgagtcgttctccttcgatgcaactttccatgcgaaaaagcaaatcccgtgcatcgtgtcaatgttgaccaaagaactgtacttttaccacgacgaagtcgacggaggctccccgatggagaatactgagaactcggtcgattcaaagtcgattaagaatctcgagccgaaaatcatccacggatcggagagcatggactcaggaattagcctcgataactcgtacaagatggattatcctgagatgggtctgtgtatcatcatcaacaataagaatttccataagtcaactggtatgacttccagatcgggaaccgatgtggacgcagccaacctcagagagactttcaggaacctcaagtacgaagtgcgcaacaagaatgaccttactcgggaggaaatcgtcgagttgatgcgcgatgtgtccaaggaggaccactcgaagcggtcctcgtttgtgtgtgtgctgctgtcacacggtgaagaaggaatcatctttggaactaatggaccggtcgatctcaagaaaatcactaacttcttcagaggtgatcgatgcagatcgcttaccggaaagccgaagctgttcatcatccaggcatgcagaggcacggaactggactgcggcattgaaaccgac

SEQ ID NO: 326543 - DNA, 870 bp, Artificial Sequence
  derived and/or modified sequence
atgatcgaaacagactctggagtggacgatgacatggcttgtcacaagatccccgtcgaggcggatttcctttatgcctatagtactgcacccggctactattcctggcgtaattctaaggacggcagctggtttatccagtcgctatgcgctatgctgaagcagtacgcagacaagctggaatttatgcatatcttgactagagtgaaccggaaggtggctacggagtttgagtcattttcttttgatgcgacttttcacgcaaagaagcagataccttgcatagtgtccatgctgacaaaagaactctatttttatcacgacgaagtcgacggtggatctccaatggagaacaccgaaaattcagtggattcaaagtcaatcaagaacctcgagcctaaaattatccatggatcggaatccatggactccggaatttcactggataattcttacaaaatggactatccagaaatgggactttgcatcattatcaacaataagaattttcacaaatctaccgggatgacgagcagaagcgggacagacgtcgatgccgcaaacctgagggagacttttcggaatttaaaatacgaagtccggaacaagaatgatctcacccgcgaggaaatcgtggagctaatgagggatgtgagtaaggaggaccacagcaagaggagctctttcgtttgtgtgctgctgtcccacggcgaagaaggaataatatttggaacgaatggacccgtggatcttaagaagatcaccaatttctttcgtggagaccggtgtcgctcccttacaggcaagccgaagctcttcatcatccaggcatgcagaggcaccgagctcgattgcggcatagagactgat

SEQ ID NO: 326544 - DNA, 870 bp, Artificial Sequence
  derived and/or modified sequence
atgatcgaaaccgacagcggagtggatgatgacatggcttgccacaaaatcccggtggaagcagatttcctttatgcatatagtaccgcgccgggctactacagctggcggaattcgaaggatggatcgtggttcatccaatcgctgtgcgccatgctcaagcagtacgcggacaaactcgagttcatgcacatccttacccgagtcaaccgcaaggtcgcaaccgagttcgaatcgttctcgttcgacgccactttccatgctaaaaagcagatcccatgtatcgtgagcatgctgactaaagagctctacttctatcatgacgaagttgacggaggctcaccgatggaaaacaccgaaaattcagtggattccaagtccattaagaacctggaacccaagataatccacggttccgaaagcatggactcaggcatctccctggacaattcctacaagatggactaccctgagatggggctgtgcatcatcattaacaacaagaatttccacaaatcaaccggcatgacttcacgctccggaaccgacgtggacgccgcaaatctgagagagacttttcgcaacctcaagtacgaagtccgtaacaagaacgatctcacccgcgaggaaatcgtggaactgatgcgcgacgtctccaaggaggatcattcgaaacggtcgtcttttgtctgcgtgctgctttcacacggagaggaaggcataatctttgggaccaacggaccagtcgatctgaagaaaatcactaacttctttcggggcgatcgctgtagatcattgactggaaagccgaagctcttcataatccaagcgtgcaggggaaccgagctggattgcggcattgaaaccgac

SEQ ID NO: 326545 - DNA, 870 bp, Artificial Sequence
  derived and/or modified sequence
atgatcgaaaccgattccggagtcgatgacgatatggcgtgtcacaagattcctgtggaagcggacttcctttacgcatacagcacggcaccaggatactacagctggcggaatagcaaggatggttcgtggtttattcaatcactttgtgctatgctcaaacagtacgcagataaactggaattcatgcatatcttgaccagggtgaaccggaaggtggccactgaatttgaatccttttcgttcgatgcaactttccacgctaagaagcagattccatgtattgtgtccatgcttactaaggaactctacttctaccatgacgaagtcgatggaggatcacccatggaaaacaccgagaacagcgtggattcaaagtcgattaagaatcttgagccgaaaatcatccacggctcggagagcatggattctggtatttcactggataattcatacaaaatggattacccagagatggggctgtgtattatcatcaataacaaaaactttcacaaaagcactggcatgacttcccggagcgggacggatgtcgatgcagcaaaccttagagaaaccttcaggaatcttaagtacgaagtgaggaacaagaatgatctgactcgagaagagattgtcgaactgatgagagatgtgtcgaaggaggaccactcaaaacggtcgtcatttgtgtgtgtgcttcttagccacggagaagaggggatcatttttggaactaatgggcctgtcgatctcaagaagataactaactttttccgcggagatagatgccgttcactgaccggcaagccaaaacttttcattatacaggcatgcaggggtactgaacttgactgcggcatagaaaccgac

SEQ ID NO: 326546 - DNA, 870 bp, Artificial Sequence
  derived and/or modified sequence
atgattgaaacggactctggtgttgatgacgatatggcttgtcacaaaataccagtcgaggccgacttcctgtatgcctattcaacagctccgggatattattcatggagaaactcgaaagacggatcgtggttcattcaatctctgtgtgctatgttaaaacagtacgctgataagctagagttcatgcatatcttgacacgtgtaaaccgtaaagtggctacagagttcgaaagtttctccttcgacgcaacatttcatgctaaaaaacaaattccgtgtatagtctccatgctaacaaaagaactctatttctaccatgatgaagttgatggaggatcccctatggaaaatactgagaattcggtggacagtaagtctattaaaaatttggaacccaagattattcatggaagtgaatcaatggattcaggtatctcacttgataattcttataaaatggattatcctgaaatgggactttgtatcattataaacaacaagaattttcacaaatctacaggaatgacttctagatccggcactgatgtagatgctgctaatttgcgtgaaacatttagaaatcttaagtacgaagtgagaaacaaaaatgatttgacccgagaagagatagtagaacttatgcgagatgtgagtaaggaagatcacagtaagcgttcatcttttgtttgcgtacttctgtcgcatggagaggaaggaatcatctttggaactaacgggccagtcgatctaaagaagattacaaattttttccgcggagatcgatgccgatctcttaccggaaaacccaaactcttcataattcaagcatgtcggggtactgaacttgactgtggaatagaaaccgac

SEQ ID NO: 326547 - DNA, 870 bp, Artificial Sequence
  derived and/or modified sequence
atgatcgagaccgacagcggagtcgatgatgacatggcctgtcataagatcccagtggaggccgacttcctgtatgcctactcaactgcgccaggatattattcatggcgtaattccaaggacggatcctggttcatccagtctctgtgtgccatgcttaagcagtatgctgataagctggaattcatgcacatcttaacaagagttaataggaaagtagcaacggagtttgaatctttctcatttgacgcgacatttcatgcaaagaaacagatcccttgtatcgtctccatgctgacaaaggagttgtatttttaccatgacgaggtagatggaggttccccaatggaaaacacagaaaatagcgtggattccaagtctataaaaaacctggagcccaaaatcatccacggatccgaatctatggacagcggaatttctctcgataactcttacaaaatggactatccagagatgggcctgtgcataatcataaataataagaacttccataagagtaccggaatgacaagtcgaagcggtacagacgttgatgcggccaacctgcgggagacttttcgtaatcttaagtacgaagtgcggaacaagaacgaccttactcgggaagagatcgtcgagctcatgcgcgatgtctccaaagaggaccactcgaaaagatcatcgttcgtgtgtgtgttactctctcatggggaggaaggtataatcttcgggactaacggccctgtggacctgaaaaaaatcaccaacttttttcggggggacagatgtaggtctctgacaggcaaaccgaaactgtttataattcaggcatgccggggcacggagttggattgtggcattgaaaccgat

SEQ ID NO: 326548 - DNA, 870 bp, Artificial Sequence
  derived and/or modified sequence
atgattgaaacggatagcggggtagatgacgacatggcctgccacaagatcccagtggaggccgatttcctctacgcctattctactgcgccgggctactattcctggcgtaattccaaggacggtagttggtttatccagtcgttgtgtgcaatgctcaagcagtacgccgacaaactggaattcatgcatattctcacacgcgtgaacaggaaggtggctactgagtttgagtccttctcctttgacgctactttccatgccaagaagcagatcccttgtatagtatccatgcttaccaaggagctatacttctaccatgatgaggtcgatggaggatcaccgatggaaaacacggaaaattctgtggactccaagtccattaaaaacctcgaaccgaagataatacacgggagcgaatctatggacagtgggattagcttggataatagttacaaaatggactaccccgagatggggctgtgtatcatcatcaacaacaaaaactttcataagagcaccggcatgacaagccgctcaggtaccgacgtcgatgccgccaatctgcgggagactttccggaatcttaaatacgaggtgagaaacaaaaacgacctgacacgggaggaaattgtggaactcatgcgggacgtgtccaaagaggaccactcaaagcggtcctcctttgtatgcgtgctgctctctcacggcgaggaaggtatcattttcgggaccaatggaccggtcgatctgaaaaagattacgaacttcttccgcggcgaccgttgtagatcccttacaggcaagccaaaactgtttatcattcaggcttgcagaggcacagagctagactgcggcatcgagaccgac

SEQ ID NO: 326549 - DNA, 870 bp, Artificial Sequence
  derived and/or modified sequence
atgatcgaaactgacagtggggtggatgacgacatggcatgtcataaaatacccgtcgaggctgattttctgtatgcatatagcactgctcccggctattactcttggcgaaatagcaaggacggaagctggttcatccaatcgttatgcgcgatgctcaagcagtatgcggataagctggaattcatgcacatcctgacacgcgtcaatcggaaagtggcaaccgaatttgagagcttcagtttcgacgccacattccatgccaaaaaacagatcccctgcatcgtttctatgctgaccaaagaactgtatttttatcacgatgaggtcgatggtggctcacccatggagaacactgaaaattcagtggattccaagtccatcaagaacttggagcccaaaatcatccatggttctgagtccatggactctggcatcagtctggacaactcctacaaaatggactaccctgagatgggcctctgcatcatcatcaacaacaaaaattttcacaaatctaccggaatgacatcgcggtccggcactgacgtagatgccgccaacctacgcgagacttttcgcaacctgaagtacgaagtgcggaataaaaacgatttgacccgagaggagattgtagagctgatgcgcgacgtgagcaaggaggatcactccaagagaagtagctttgtctgtgtgctgctgagccacggcgaagaaggaataatttttggcacgaacggccccgtggatctcaagaaaataacgaacttctttaggggtgatagatgcagatccctaaccggcaaacccaagctgttcattattcaggcatgtcggggtaccgaactggactgcgggatcgagacggat

SEQ ID NO: 326550 - DNA, 870 bp, Artificial Sequence
  derived and/or modified sequence
atgatagagaccgatagtggcgtggatgacgatatggcctgccataagatacctgtggaggcagacttcttgtacgcatattctacagcaccaggttattattcttggcgaaatagcaaggacggctcctggtttattcagtcactgtgcgccatgctgaagcagtatgcagataagctggagtttatgcacatcttgacaagagtgaacaggaaagtggccactgagttcgagagtttctcctttgacgcgaccttccacgctaagaaacagattccctgtattgtgtcaatgctgactaaggaactgtacttctatcacgatgaagtggacggaggcagcccgatggagaacaccgagaattctgtggactccaagagcataaaaaacctggagccgaagatcatccacggttcagagtctatggactccggcatttccctggacaattcctacaaaatggactatccagaaatggggctatgtatcataatcaataacaagaactttcacaagtcaaccggcatgacttctaggagtggcacagacgtggatgcagctaacctacgagaaacattcaggaatttgaagtacgaagtgaggaataaaaatgacctcacacgtgaagaaatcgtggaactgatgagagatgtatctaaagaggatcactcgaaacgttctagctttgtttgcgtgctgctatcccacggggaagaaggaattatctttggaaccaatggtccagtggacctgaagaaaatcactaactttttccgtggtgaccgatgccgcagcctgaccggcaagcccaaactattcattatccaggcatgcaggggaaccgaactggactgtgggatagagaccgac

SEQ ID NO: 326551 - DNA, 870 bp, Artificial Sequence
  derived and/or modified sequence
atgatcgagaccgatagcggtgtggatgatgacatggcttgtcacaagatacccgtggaagcagactttctttacgcctattctaccgcacctggctactactcttggcgcaactctaaggacggatcgtggttcattcaaagtctttgtgccatgctcaagcagtacgcagacaagcttgagtttatgcacattttgacacgagtcaatagaaaggtagccacagagttcgaatccttcagcttcgacgcaactttccacgcgaaaaaacagattccatgtatcgtgagcatgttaaccaaagaattatatttctatcatgatgaagtcgacgggggatcgccaatggaaaatacagaaaacagcgtagatagtaagtcaataaagaatctggagccaaagattatccatggttccgagagtatggatagcggcatcagcttggataactcctataagatggattatcctgaaatgggcctctgtatcattattaataataaaaatttccacaaatctaccggcatgacctccaggagtggcacagacgtagacgctgccaatttgcgggagaccttcagaaaccttaagtatgaggtcaggaacaaaaacgatctgactagagaggagattgtcgagctgatgcgggacgtgtctaaggaggatcatagcaagcgatcatcctttgtttgcgtcctgttgtctcatggagaagagggcatcattttcggcacgaacggacctgtcgatctgaagaaaataaccaatttctttaggggggacagatgcaggagcctgaccgggaagccgaagcttttcatcatccaggcttgcaggggaactgaactcgactgcggcatagaaacggat

SEQ ID NO: 326552 - DNA, 870 bp, Artificial Sequence
  derived and/or modified sequence
atgatcgagaccgatagtggagtagatgacgacatggcatgccacaagattcccgtggaagccgatttcctctatgcctacagcacagccccagggtactattcatggcggaatagcaaagacggatcctggtttattcagagtctctgcgctatgcttaagcagtatgccgacaaactggaattcatgcacatcctcactagggtgaaccgaaaggtagcaactgaatttgaaagcttctctttcgacgcaaccttccacgcaaaaaagcaaattccatgcatagtgtccatgctgacgaaagagctttacttttatcatgacgaggtggatggaggatcacccatggaaaatacagagaattccgtagacagtaagagcatcaagaacctggaacccaaaattatccatggaagcgagtcaatggattctggcatttcactggataatagctataaaatggattatccagagatgggactgtgtattatcattaacaacaaaaactttcacaagtcgacgggtatgactagtcgatccggaacggatgtggacgccgcaaatctgcgcgagacttttcgcaatctcaaatacgaggtgcgtaacaagaatgatctaactcgggaggaaatcgtggagttgatgagagacgtatccaaggaggaccattccaagaggtcttcctttgtctgcgtcctactgtcgcatggcgaggagggaataatcttcggtacaaacggccctgtcgatctgaaaaagatcactaatttcttccggggggatagatgcaggagcctcacggggaagccaaaattgttcattatacaggcctgccggggaacggagctggattgcggcatagaaacggat

SEQ ID NO: 326553 - DNA, 870 bp, Artificial Sequence
  derived and/or modified sequence
atgattgaaacggatagtggtgtcgatgatgatatggcttgccataagatcccggttgaggctgacttcttgtatgcatatagtaccgcacctggttattactcgtggcgtaatagcaaggatggtagttggtttatccagagcctttgtgcaatgttaaaacaatatgcggacaagcttgagtttatgcatattttaacacgagttaaccgtaaggtcgcaactgagttcgaatcttttagcttcgatgctacgtttcatgctaagaaacaaataccatgcatagttagcatgctaacaaaagaattgtacttctaccatgatgaagttgacggtggttccccaatggagaacacagagaattccgtcgactctaagtcgatcaaaaacttagaacccaagatcatccacggaagtgaaagtatggacagtggtatctctttagacaactcctacaagatggattacccagagatgggcttgtgcatcatcatcaataataaaaatttccacaagtcaactggcatgacttctagatccgggactgatgttgatgcagcaaatttacgcgagacttttagaaacttaaaatatgaggttaggaataaaaatgatctcacaagggaggaaattgttgagctaatgagggatgtgtccaaagaggatcactcaaagaggagttcttttgtttgtgttctgcttagtcatggtgaggaagggatcatctttggtacgaacggcccggtagatctgaaaaagataacaaatttttttaggggagacagatgccgatctttgactgggaagcctaagttgttcatcatacaagcgtgtaggggtacagagttggattgtggcattgagacggat

SEQ ID NO: 326554 - DNA, 870 bp, Artificial Sequence
  derived and/or modified sequence
atgatagagaccgatagtggtgtggatgatgatatggcctgccataaaattcccgtggaggcagatttcctatacgcctactccaccgcgcctgggtattactcctggcggaattccaaggatggcagctggttcattcagtccttatgtgccatgctgaaacaatacgctgacaaactggaatttatgcacattctgactcgggttaacaggaaggtggcaaccgagttcgagtctttctcctttgatgctacatttcatgcaaaaaaacagattccttgcatcgtgagcatgctgactaaagaactgtatttctaccacgacgaggtggatggcggcagtcctatggaaaatacagaaaactcggtggattcaaaatctataaagaatctggaaccaaaaattatccacggttcagagagcatggacagtggaatttcactggacaatagctacaagatggattaccctgaaatgggactgtgtattattatcaacaacaagaactttcataagtccacagggatgactagccggtccggcacggacgtcgacgcggccaacctgcgcgaaacttttcgcaatctgaagtatgaagtcagaaataagaatgacctgacccgcgaggaaattgttgagctgatgagagatgtcagcaaagaggaccattcaaaacggagttcattcgtgtgtgtgctcctgtcccatggagaggaaggtatcatcttcggcaccaatggacctgttgacctcaaaaaaataaccaatttttttcggggggaccggtgcaggtcccttacaggtaaaccaaaactgttcatcatacaagcctgtcgtggcacagagctggattgcggcatagaaaccgat

SEQ ID NO: 326555 - DNA, 870 bp, Artificial Sequence
  derived and/or modified sequence
atgatcgagaccgatagcggcgtggatgacgatatggcttgccacaaaatccctgttgaggccgatttcctgtatgcctacagcacggcacccggctactactcgtggagaaactccaaggacggatcctggttcatccagtccctttgcgcgatgctcaaacagtacgccgacaagctcgaattcatgcacatcctaacccgtgtaaacagaaaagtggcgacggaatttgaatcattctcatttgacgccacctttcatgctaagaaacagatcccctgtatcgtgtcgatgctgactaaggagctctacttctaccatgatgaagtggacggaggttctccaatggaaaacactgagaactccgtggactcaaaatcaatcaagaacctggagcctaagatcatccacggcagtgaatctatggactctggcatcagtctggacaatagctacaaaatggattatccagaaatgggactgtgcattatcattaataataagaacttccacaaatctacaggaatgaccagccgcagtggtaccgacgttgatgctgccaatttgagggagaccttcagaaacctgaagtacgaggtccggaataagaacgatctgactcgtgaagagatagtggagctgatgcgggacgtgagcaaggaagaccatagcaagaggagttcatttgtatgcgtccttttgtcgcacggtgaagagggaataatcttcggcacgaatgggcccgtcgatctgaagaagatcacgaattttttccggggcgataggtgtaggtccttgaccggtaagcccaagctgttcattattcaggcctgccggggaacagaactcgattgtggtatcgaaacagat

SEQ ID NO: 326556 - DNA, 870 bp, Artificial Sequence
  derived and/or modified sequence
atgatcgaaactgattcaggtgttgacgatgatatggcatgccataagatccctgtcgaggcagactttttatatgcatattctacagccccaggctattacagttggagaaattctaaagatggatcgtggtttattcagtccctttgtgcaatgctgaaacaatacgcagataaactagaatttatgcatatcctcacgcgagtgaaccgcaaagtagctacggaatttgagtcgttttctttcgacgcaacattccatgccaagaagcaaattccatgtattgtctccatgttgacaaaagaactgtacttctatcacgatgaagtagatggcggatctccgatggagaacacggaaaattctgtagattctaagtctattaagaacctggaaccgaaaattatacacggaagcgaatctatggatagtgggataagtcttgacaacagctacaagatggattaccccgaaatgggtctatgcatcataattaataataagaatttccacaaatcgactggcatgacgtcacgttccggaacagacgtcgacgctgctaacttgcgcgaaacgtttcgtaatcttaaatatgaagttcgaaataaaaatgacttgacgcgcgaagaaatagtagaactgatgagggacgtgtctaaagaagaccattcaaagcgctcgtcatttgtgtgcgtgctccttagccatggagaggaaggcatcatatttggaaccaatggaccggtcgatcttaaaaagattacgaacttttttcggggcgatagatgccgttcattgacaggcaaaccgaagttgttcattattcaagcttgcagaggtacggaactggattgtggcattgaaaccgat

SEQ ID NO: 326557 - DNA, 870 bp, Artificial Sequence
  derived and/or modified sequence
atgattgaaactgacagtggtgtcgacgacgacatggcctgtcataagatccccgttgaggccgacttcctttacgcctactccactgctcccggatattactcctggcgaaactcaaaggatggaagttggttcatccaatcgctctgcgccatgttaaagcagtacgcagacaagcttgagttcatgcacatcctcaccagggtgaataggaaagtggccaccgagttcgagagtttcagtttcgacgcaacattccacgcaaagaaacaaataccgtgcatcgtgtccatgctcactaaggaactgtacttttatcatgacgaggtggatggcggttcaccaatggaaaacactgaaaactccgtggactccaaatccatcaaaaatctagagcccaagataatacacgggtccgaatctatggattctggaatcagcctggataacagctataaaatggattatcctgagatgggcttgtgcattatcatcaataataagaattttcataagtctaccggcatgacaagcagaagtggcaccgatgtggacgcagctaatctgagggaaacattcagaaaccttaagtacgaagttaggaataagaacgacctgacacgcgaggagattgtggaactgatgagagacgtaagcaaggaagaccattccaagaggagctcatttgtgtgcgtccttttgagtcatggcgaggaggggattattttcggaacgaatggacctgtggatcttaagaagatcactaacttttttcgaggcgatcgctgccgatctcttacagggaagcctaaactgtttatcatccaagcctgtaggggaaccgagctcgattgcggtatcgaaaccgac

SEQ ID NO: 326558 - DNA, 870 bp, Artificial Sequence
  derived and/or modified sequence
atgatcgagactgactctggagtcgatgacgacatggcatgccacaaaataccggtggaagccgacttcctgtacgcctactccaccgcgccgggttactactcatggcggaactcaaaggacggatcatggtttatccagagcctctgcgcaatgctcaagcagtacgctgataaactcgaattcatgcacattctcactcgggttaataggaaagtggccactgaattcgagagcttcagctttgacgcgacctttcacgcaaagaagcaaatcccctgcatcgtgtcaatgcttaccaaggagctgtacttttaccatgatgaagtggatgggggttcgcctatggagaacaccgagaatagcgtggacagcaaatcaatcaagaatcttgaacctaagatcatccacggcagcgaatcgatggactccgggatctcgcttgacaactcctacaagatggactatcctgaaatgggactgtgtatcattatcaacaacaagaacttccataagagcaccggaatgacttccagatccggaaccgacgtggacgctgcgaatcttagagaaaccttccggaacctgaagtacgaagtgcggaacaaaaatgaccttactcgggaagaaatcgtcgagctgatgcgggacgtgtccaaggaggaccattccaagcgctcttcatttgtgtgcgtgctcctctcacatggagaggagggaattatcttcggcaccaatggacctgtcgatctgaagaagatcaccaacttcttccgcggagacaggtgtcgcagcctgaccgggaaaccgaagctgttcattattcaagcctgtcgcggaaccgaattggactgcggaatcgaaaccgac

SEQ ID NO: 326559 - DNA, 870 bp, Artificial Sequence
  derived and/or modified sequence
atgattgagaccgatagtggggtggatgacgacatggcctgccataaaattcccgtcgaggccgacttcctctacgcctactccaccgctcccgggtactattcctggcgcaattctaaggatggtagctggttcattcaatctctatgtgctatgctgaaacagtatgctgataaactcgagtttatgcacatcttaactagagtcaacaggaaagtggccaccgaattcgaaagcttttcgttcgatgcgacattccacgccaagaagcagataccatgcatagttagcatgctgacaaaggaattgtacttttatcatgacgaggtggatgggggatctcctatggaaaatacggaaaattcagtggactctaaatcaattaaaaatctggagcctaaaataatacacggatctgaatccatggattcaggaatctccctggataattcctacaaaatggactatccggagatggggttgtgcatcatcattaataataagaacttccacaagtcaacagggatgacctcccgcagcggcacagacgtcgacgccgccaatttgcgcgagactttcaggaacctcaaatacgaggtgcgaaacaaaaatgacctaactcgggaggaaatcgtcgaattaatgcgtgatgtatcgaaggaggatcattcgaagcgcagcagtttcgtatgtgttctattgtcccacggtgaggaaggcataatattcgggaccaatggcccagtggacttaaagaagatcaccaacttcttccgcggtgatcgttgcagatctttaactggcaagccaaagttgttcatcatacaagcgtgccggggcactgaacttgactgcggcatagaaaccgac

SEQ ID NO: 326560 - DNA, 870 bp, Artificial Sequence
  derived and/or modified sequence
atgattgaaaccgacagcggagtggatgacgacatggcctgccataagatcccggtcgaagccgattttttgtatgcctacagtacagcgccaggctattacagttggagaaactccaaggatggctcctggttcattcagagtctgtgcgcaatgttgaagcagtacgcggataagttggagttcatgcatatcttgacccgggtgaaccgaaaggttgccaccgagtttgaaagcttcagtttcgacgcgaccttccacgccaagaaacagataccatgcatcgtttcgatgctcacgaaggagctttacttctaccacgacgaggtcgacggtggcagtcctatggagaacactgagaactcggtggactccaaatcgataaaaaatcttgagcccaagatcatccatggatcggagtcgatggatagcggcatatccctggataatagctacaaaatggactatccggagatgggcctatgcataatcatcaacaacaaaaattttcacaagagcaccggaatgacctctagaagtgggacggatgtcgacgcagcaaaccttcgggaaacttttcgcaatctaaaatacgaggtgcgaaacaagaatgatctgacccgtgaggagattgtcgaattgatgcgtgatgtttcgaaggaggatcactcgaagcgaagctcatttgtttgcgtccttctgtcccacggcgaggaaggcatcattttcggcaccaatggacctgttgacctcaagaagatcaccaatttcttccgcggcgaccggtgccgctcgttgactggaaagccaaagctattcataatccaagcctgccggggtaccgaacttgactgcggcattgagaccgat

SEQ ID NO: 326561 - DNA, 870 bp, Artificial Sequence
  derived and/or modified sequence
atgattgagactgattcgggtgtggacgacgacatggcctgtcataagatcccagtcgaagctgattttctctacgcttactcgacggctcccggatactattcatggaggaatagcaaggacggaagctggttcatccaatctctctgcgcgatgctgaaacagtacgccgataagctggaattcatgcatattctcactcgggtgaaccgcaaagtcgccaccgaattcgagagcttcagcttcgacgcgaccttccacgctaagaaacagatcccgtgcatagtctccatgctcaccaaggaactgtacttctaccatgacgaagtcgatggcggctcgcctatggagaacactgagaattcggtggactcgaagtctatcaagaatctggagcctaaaatcatccacggctcggagagcatggactccggaatctccctggacaactcctacaagatggactacccggaaatgggtctgtgtatcattatcaacaataagaatttccacaagtcgactggtatgacttcacggtcaggaacggatgtcgacgcagccaatctgcgggaaacttttagaaatttgaagtacgaggtgcgcaacaagaacgatctgactagagaggaaatcgtggaactgatgagggacgtgtcgaaagaggaccactccaaacgctcgtcattcgtgtgcgtccttctctcccacggagaagagggaatcattttcggcactaacggtccggtggatctcaagaagatcactaatttcttccgcggagatcggtgccgctcactgaccggaaagccgaagctcttcatcatccaggcctgccggggaactgaactggactgcggaattgaaacggac

SEQ ID NO: 326562 - DNA, 870 bp, Artificial Sequence
  derived and/or modified sequence
atgatcgagacggactcgggcgtggacgacgatatggcctgtcacaaaataccagtcgaggctgatttcctgtacgcatactcgaccgcgccgggttactacagctggaggaattccaaagacggatcgtggttcatccagagcctgtgcgccatgctgaagcaatacgcggacaagctggagtttatgcacatcctcaccagggtgaacagaaaagtggcaactgaattcgaatccttctcattcgatgccacgttccacgcgaaaaagcagatcccttgtatcgtgtccatgctcacgaaggaactgtacttctaccatgatgaagtggacggaggctccccgatggagaacacggaaaactccgtggattccaagtccattaagaatttggaaccaaagatcatccacggaagcgagtcgatggactcaggaatctcgttggataactcctacaagatggactatccggaaatggggctgtgtatcattatcaataacaagaattttcataagtccaccgggatgacctcacgtagcggaactgatgtagatgcggctaacctgagggaaacctttcggaacctgaagtacgaagtcagaaacaaaaacgacctgacccgcgaagagatcgttgaactgatgcgagatgtttcgaaggaggaccattcgaagcgaagcagctttgtctgcgttcttctctcacacggtgaggaaggaatcatcttcggaactaacggtccggtggaccttaagaaaatcaccaacttcttccgcggtgaccggtgcagatcactgactggcaagcctaaactgttcatcattcaagcctgtcgcggcaccgaactcgactgcggtatcgagactgac

SEQ ID NO: 326563 - DNA, 870 bp, Artificial Sequence
  derived and/or modified sequence
atgattgaaacggattccggtgtggatgatgacatggcatgccacaaaattccggtcgaagcagacttcctgtacgcttactccaccgctcccggatactactcgtggcgcaattcgaaggatggttcatggttcattcaatcgctctgtgcaatgctgaaacagtacgcagataagctcgagtttatgcatatcttgactcgcgtcaaccgcaaggtggcaaccgaatttgaatccttttcgtttgacgccacttttcatgccaagaagcaaataccttgcattgtcagtatgctgaccaaggagctttacttttaccacgatgaggtggacgggggttccccaatggaaaacactgaaaattcggtggattccaagtcaattaagaatcttgagccaaaaatcatacacggctccgaatctatggacagcggtatatccctggataacagctacaagatggattaccctgaaatgggactgtgtattatcatcaacaataagaattttcataagagtacgggcatgacttctcggtctgggaccgacgtggatgcagccaatcttcgagaaactttccgaaatcttaagtacgaagtgagaaacaagaacgacctgacgcgcgaagagatcgtagaactcatgcgtgacgtgtcaaaggaagatcattcgaagcgctcatccttcgtctgtgtgcttctgtcgcatggagaggaaggaattatcttcggaaccaatggcccagtggatctgaaaaagatcaccaacttctttagaggcgatcggtgtagatcgctgaccggcaagcctaaactcttcattatccaggcttgtaggggtactgagctggattgtggaattgaaaccgac

SEQ ID NO: 326564 - DNA, 870 bp, Artificial Sequence
  derived and/or modified sequence
atgattgaaaccgattccggggtggacgacgatatggcctgtcacaaaataccggtggaagctgactttctgtatgcctacagcacagcccctggctactattcatggcgcaatagtaaagatgggtcatggtttattcagagcctttgcgccatgttaaaacagtatgctgataaactggagttcatgcacattctcacccgtgtgaacagaaaagttgctaccgagtttgagagcttttcttttgatgcgactttccacgcaaagaagcagatcccatgtattgtatctatgctgacgaaagagctgtacttttaccacgacgaggttgacgggggctctcccatggagaacacggaaaactccgtggattcaaaatccatcaagaatctcgaacccaagattattcacggcagtgagagtatggactcaggaatcagcctcgacaattcctacaaaatggattatccagagatggggttgtgcatcattataaacaacaaaaactttcataagtccaccgggatgacaagccgatctggcaccgatgtggatgcagcaaacctgagggaaacttttaggaacttaaaatatgaggtccggaacaaaaacgatctgactagggaggagattgtggaactaatgagggatgtgagcaaagaggatcattcaaagcgcagttcctttgtctgtgtcctgctcagccacggggaggagggcatcatcttcggtacgaacggtcccgtggatctgaagaaaattaccaattttttcagaggtgataggtgcaggagtctgaccgggaagcccaaattgtttatcatacaggcatgccgcggaacggaactcgactgtggcattgaaaccgat

SEQ ID NO: 326565 - DNA, 870 bp, Artificial Sequence
  derived and/or modified sequence
atgatcgaaacggattcgggagtggacgacgacatggcgtgtcataagattccggtggaggcagattttctgtatgcctactcgaccgctccaggttactacagttggcggaatagcaaggatggtagctggtttatacagagcctgtgcgccatgcttaaacagtacgcagacaagctggagtttatgcatatcctcactagagtgaacaggaaggtcgccactgagttcgaatcattttccttcgacgccacctttcacgcaaagaaacagatcccgtgtattgtatcgatgcttacgaaagaactttacttctatcacgatgaggtggacggaggaagccctatggaaaacaccgagaatagcgtggactcaaagtcaattaagaacctggaaccaaagatcattcatggttcagaatccatggactcgggtatttcgttggataactcttacaaaatggactaccccgagatgggcctgtgcattatcattaacaataagaacttccataagtcaaccggaatgacctctaggagcggaaccgatgtcgatgccgcaaacctgagggaaacttttagaaacctcaagtacgaggtcagaaacaagaatgacttgaccagggaagagatcgtggaactgatgagagacgtgagcaaggaagatcactccaagcggtcctcatttgtgtgtgttcttctgtcccatggagaagagggaataatctttgggaccaacgggcctgtcgatcttaagaaaatcaccaacttcttccgaggtgatagatgcaggtccctcacgggaaaaccaaagctctttatcattcaagcgtgtagaggaaccgaactcgattgtggaatcgaaactgac

SEQ ID NO: 326566 - DNA, 870 bp, Artificial Sequence
  derived and/or modified sequence
atgattgagaccgactctggtgtggatgacgatatggcctgtcacaaaataccggtcgaggcggacttcctgtacgcctacagtactgcaccaggctactactcctggaggaattccaaagatggctcttggttcatccaatcactgtgcgcgatgctgaaacagtacgccgacaagctggaattcatgcacatcctgactcgggtaaaccgcaaggtagctacagaattcgagtccttcagtttcgacgccacatttcacgcaaaaaagcagatcccgtgcatcgtctcgatgctgacaaaagagctctacttctatcacgacgaggtcgacggaggctccccaatggagaacacagagaatagcgttgacagcaagagcataaagaatctggagccaaagatcatccatggctccgagtccatggacagcggcataagcctggacaactcgtacaagatggattaccccgagatgggcctttgtatcattataaacaacaaaaacttccacaaaagtacaggaatgacctctaggtcagggactgacgttgacgccgctaacctccgtgagacattccggaatctaaagtacgaggtccggaacaagaacgacctgactcgcgaagaaattgtggagctgatgcgggacgtctccaaagaggatcactccaaacgctcctccttcgtctgtgtgctgctcagccatggcgaagagggcatcatatttggcacaaatggcccagtcgacctgaaaaaaatcaccaatttttttcggggtgacaggtgtcgttcactcacaggtaagcctaagctgttcatcatccaagcctgccgaggtaccgagctggattgtggaatcgagacagac

SEQ ID NO: 326567 - DNA, 870 bp, Artificial Sequence
  derived and/or modified sequence
atgattgaaactgattccggagtggacgatgacatggcatgtcataagattcccgtcgaagcagattttctgtatgcgtactccactgcacctggatattactcctggcggaactccaaggacggttcctggtttatccagagcctttgtgcaatgctgaagcaatacgccgacaaacttgaattcatgcatatcctgacgagagtcaatagaaaggttgcaaccgaatttgaatcctttagctttgatgccacttttcatgcgaagaagcagataccttgtatcgtgtccatgttgaccaaggaactgtatttctatcatgatgaggtcgatgggggttcgcctatggagaacaccgaaaactccgtggattcaaaatcgattaagaatctcgagcctaagatcattcacggttcggagagcatggatagcggaatttcacttgacaactcatacaagatggattaccccgaaatgggactttgtattatcattaacaacaagaatttccataagagcactggaatgacttcacggagcggaactgatgtggatgccgcaaatctgcgggaaaccttcaggaatctgaagtacgaagtgagaaacaagaacgacctgacccgagaggaaattgtcgagctcatgcgagatgtatcgaaggaagatcattcgaaaagatccagcttcgtgtgtgtgctgctctcgcatggggaagaaggcatcatctttggtacgaacggaccagtcgaccttaagaaaatcaccaatttctttagaggtgacaggtgtagaagcctgacgggcaagcctaaactctttatcattcaggcttgtagggggactgagctcgactgcgggattgaaaccgac

SEQ ID NO: 326568 - DNA, 870 bp, Artificial Sequence
  derived and/or modified sequence
atgattgaaacagacagcggcgttgacgatgatatggcctgtcacaagattccagtagaggccgactttctctatgcttattccaccgctcccggttactattcctggcgcaacagcaaggatggtagttggttcattcagtccctgtgcgcgatgctgaaacagtatgcagacaaactcgagtttatgcacatcttgaccagagtgaatcgaaaggtggcaaccgagttcgagtcattctcctttgacgctacgtttcatgcaaaaaaacagataccttgtatcgtaagtatgttgactaaagagctctatttctaccacgacgaggttgatggcggcagtcccatggagaacactgagaacagtgtagattcaaagagtatcaaaaatttggaacctaaaatcatacacgggtcggagagcatggattctggtatttccctggataatagctataaaatggactatccagaaatgggcctttgcattataatcaacaataaaaactttcataaaagtacaggcatgaccagcaggtcagggaccgacgtggatgccgctaatctgcgggagacgtttcgaaatctgaagtatgaagtacggaacaagaatgatctgacgagggaagagattgtcgaactgatgagggacgttagcaaagaagatcattccaagaggagtagcttcgtatgcgtgttattgagtcacggtgaggaaggcatcatctttggtacgaacggacccgtcgatctgaagaagatcaccaacttctttcggggggataggtgccgatctcttaccggaaaaccgaagctgtttatcatccaggcgtgccgcgggacagagctggattgcgggatcgagaccgac

SEQ ID NO: 326569 - DNA, 870 bp, Artificial Sequence
  derived and/or modified sequence
atgatcgagactgattcaggagtggacgacgatatggcgtgtcacaaaatcccagtggaagcagattttctctatgcctatagtaccgcgcctggatactactcatggcgcaattctaaggatggcagctggttcatccagtccctctgcgccatgttaaaacagtacgctgataagctcgagtttatgcatattctcacccgagtgaataggaaggtcgccacagagtttgaaagctttagttttgacgctacttttcacgcaaagaagcagatcccctgcatagtgagcatgctgaccaaggagttatatttttaccatgacgaggtagatgggggctcccccatggagaatacagagaacagtgttgatagcaaatccatcaaaaacctggagcccaagattatacacgggtccgagagcatggacagcggaatctccctggacaactcgtataaaatggactatccagaaatgggattgtgtattatcattaacaacaagaatttccacaagtccactggtatgacctcccgctccggaaccgatgtcgacgctgccaacctgcgtgagacctttagaaatttaaaatacgaagtcaggaataaaaacgatctgacaagggaggagatcgtcgagctgatgcgagatgtttcaaaggaggaccactcgaagcggagcagtttcgtgtgcgtcctcctctcccatggtgaagaggggataatattcggcactaatggccccgtggacttaaagaagatcaccaattttttcaggggcgacaggtgcagatcccttactggaaaaccgaagctgttcataatccaggcctgtcgcggcacagaacttgactgcggcatcgaaaccgac

SEQ ID NO: 326570 - DNA, 870 bp, Artificial Sequence
  derived and/or modified sequence
atgatcgagactgacagcggagtggacgacgacatggcttgtcacaaaatcccggtggaggcagacttcctctacgcgtactcaaccgccccgggctactactcgtggagaaactcgaaggacggttcttggttcatccagtcattgtgcgccatgctcaagcagtacgctgacaagctcgagtttatgcacatcctgaccagagtcaaccgcaaagtggcaactgagttcgaatcgttctccttcgatgccaccttccacgcgaagaagcaaattccatgtatcgtgagcatgctgaccaaggaactgtacttctaccacgacgaagtcgacggaggatcccctatggagaacaccgagaacagcgtggattcaaagtccattaagaatttggaaccaaagattatccatggatccgagtccatggattcgggaatctcgctggataattcgtacaaaatggactaccctgagatggggctctgcatcatcatcaacaataagaatttccataagtcgaccggaatgacttcccggagcggcaccgacgtggacgcggcgaacctgagagaaaccttcagaaatctcaaatacgaggtgcgcaacaagaacgacctgactcgggaggagatcgtggagctcatgagagacgtgtcgaaagaagatcattcgaagcggtcgtccttcgtgtgcgtccttctgtcgcacggagaagaaggaattatctttggcaccaatggcccggtggacctcaagaagatcaccaacttcttccggggagacaggtgcaggtcactgaccggaaagccaaaactgtttatcatccaagcgtgccgtggcaccgaactggattgcggaattgaaaccgat

SEQ ID NO: 326571 - DNA, 870 bp, Artificial Sequence
  derived and/or modified sequence
atgattgagaccgactctggcgtcgatgacgacatggcctgccataagattcctgttgaagccgacttcctgtatgcgtattcaacggccccaggttattattcttggcgtaattcaaaagacggatcttggttcattcaatccttgtgtgccatgcttaagcagtatgctgataaactggagtttatgcacattttgactagagtgaaccgcaaagtggccacggagttcgaaagtttcagcttcgatgctacatttcatgctaaaaaacaaatcccatgtatcgtaagcatgcttaccaaggaactgtacttctaccatgacgaagttgatgggggaagccccatggaaaacactgagaatagcgttgattcaaaatccatcaagaacctagagcccaaaatcattcatgggtctgaaagcatggacagcggcatcagcttggataacagttacaagatggattatcctgaaatggggctgtgcatcatcataaacaataagaattttcacaaaagcacagggatgaccagtcgaagcggcactgatgttgatgctgccaatctgcgagagactttccggaatctgaagtacgaggtgaggaacaagaatgatcttaccagagaggagatagtcgaattgatgcgggatgtctccaaagaggaccactctaagaggtcatctttcgtgtgcgtgctgctgtcccacggagaggaaggaattatctttggcactaacggccccgtggacttgaaaaagattaccaatttcttcagaggagacagatgccggtcactgacgggcaagcccaagctgtttattattcaggcatgcagagggaccgaattggactgcggaatcgagacggat

SEQ ID NO: 326572 - DNA, 870 bp, Artificial Sequence
  derived and/or modified sequence
atgatagagacggactccggggtggatgacgatatggcttgtcataagattccagtcgaggcagatttcctgtacgcatacagcacggcgccaggctactacagctggaggaactccaaagacggttcgtggtttattcaatccctttgcgcaatgcttaagcagtacgctgataaactggaattcatgcatattcttaccagggtgaaccgcaaggtcgcaactgagttcgaatccttcagctttgatgccacgtttcacgccaaaaagcaaataccttgcattgtgtccatgctcactaaggagctctacttctaccatgatgaagtggacggtggatcgccaatggaaaatactgagaacagcgtggactctaaatcgattaagaatctcgagcctaagattattcacggctccgaatcaatggattccggcatctccctggacaactcatacaagatggattaccccgagatgggtctgtgtatcatcatcaacaacaagaatttccacaagtccactggtatgaccagccggtcgggaactgatgtggatgctgccaaccttagagaaaccttcagaaacctgaaatacgaagtgagaaacaagaatgatctcactagagaggaaattgtggaattgatgagagatgtgtccaaagaagatcattcgaagagatcgtcgtttgtgtgtgtccttctctcacatggtgaagaaggcattatctttggcactaacggcccagtggatctcaagaagattaccaactttttccgcggcgatagatgtcggagccttaccggaaaaccaaaactgtttatcatccaagcatgcaggggaactgaactcgactgtggaatcgaaacggat

SEQ ID NO: 326573 - DNA, 870 bp, Artificial Sequence
  derived and/or modified sequence
atgattgagaccgattcaggtgtggatgatgacatggcttgccataagatacctgtggaggcggatttcctgtatgcgtattccacggcgccaggttactattcttggcgcaattctaaagacggatcttggttcattcagtctctgtgcgccatgctcaaacagtatgcggacaagctcgaattcatgcatatcctgacacgagtaaatcgcaaggtagctactgagtttgagagcttctctttcgacgcgacatttcatgctaaaaagcaaattccgtgtatcgtgtccatgctgactaaggagctgtatttctatcacgacgaagtcgacggcggctcccctatggagaatactgaaaatagcgtcgattctaagagtatcaagaacctggagccaaagatcatacatggatcagagtcaatggattccgggatatcactggacaactcctacaagatggactatcctgagatgggcctttgcatcatcataaataacaaaaatttccataaatctaccgggatgacctctagatcagggacggacgtggacgccgccaatctgcgggaaacgtttcgcaatctgaaatacgaggtcaggaataaaaacgatttgacccgagaggagatagtagagctcatgagggatgtgagcaaagaggatcacagcaaacgctcatcttttgtgtgcgtgttgttatctcacggagaggaaggaataatcttcggcacaaacgggcctgtcgaccttaaaaagataaccaatttctttaggggagatcgatgccggtctctgactgggaaacctaagctcttcatcattcaagcctgcaggggtaccgaactggattgtggcattgagaccgat

SEQ ID NO: 326574 - DNA, 870 bp, Artificial Sequence
  derived and/or modified sequence
atgatcgaaactgactcgggagttgacgacgacatggcgtgccataagatcccggtcgaagcagattttctgtacgcctactcgaccgctccaggctactactcgtggcgcaacagcaaggatggctcatggtttatccagtcgctttgcgcaatgttgaagcagtacgccgataagctggaattcatgcatatcctcactcgggtcaatagaaaggtggctacggagttcgaatcattctcattcgacgctaccttccatgccaagaagcagataccgtgcatcgtctcgatgctgactaaagaactgtatttctaccacgacgaggtggatgggggctcccccatggagaacactgagaattcagtggattccaagtcaattaagaatttggagcctaaaatcatccatggttcggagtccatggatagcgggatctcgctggacaactcgtacaaaatggattacccggagatgggactctgcatcatcatcaacaacaagaatttccacaagtccactgggatgacttccagaagcggaacggatgtggacgctgcaaacctgagagaaaccttccgcaatctcaagtacgaagtgaggaacaagaacgacctgactcgcgaggagatcgtggaactgatgagagacgttagcaaggaggaccactcgaagcggtcatcgttcgtgtgtgtgttgctgtcccacggcgaggaaggaatcatctttggaaccaatggtcctgtcgatcttaagaaaatcaccaacttttttcggggggatcggtgccgctcgcttacgggaaagcccaaactgtttatcatccaggcttgccgcggaacggagctggattgtggaatcgaaactgat

SEQ ID NO: 326575 - DNA, 870 bp, Artificial Sequence
  derived and/or modified sequence
atgatcgagacggacagtggagttgatgatgatatggcctgtcataagattcctgtggaagcggacttcctatatgcttattccactgctccgggctattacagctggaggaatagcaaagacggatcctggttcattcagtcactgtgcgccatgctcaagcagtacgcagataaattggaatttatgcacatactcacaagggtcaacaggaaggtcgccaccgagttcgagagcttctctttcgatgccaccttccatgctaaaaagcaaatcccctgcatcgtgagcatgctgactaaggagctgtacttttaccacgacgaggtggatggtggatctccaatggagaacaccgagaacagtgtggactccaagagtatcaaaaacttggaaccgaagataattcatggtagcgagagcatggacagcggcatcagcttagacaacagctacaagatggattatcctgagatgggtctgtgcatcatcatcaacaacaagaacttccacaaaagtacaggaatgacttcccgctctggcaccgatgttgatgctgcgaatcttagagagacgtttaggaatctgaaatatgaggttcgcaacaagaatgacttaacccgagaagagatcgtggaactgatgcgcgatgttagtaaggaagaccactcaaagcgatccagcttcgtttgcgtactactctcccatggcgaagagggcattatattcgggactaacggcccggtagatctgaagaaaataacaaacttcttcagaggggaccggtgcaggtccttgacggggaagccgaaactgttcattatacaagcttgtagaggcaccgagttagactgtgggatcgagacggat

SEQ ID NO: 326576 - DNA, 870 bp, Artificial Sequence
  derived and/or modified sequence
atgatcgaaactgattctggagtggatgatgatatggcctgtcataagattcctgtagaagccgatttcctttacgcttactcaacagcccctgggtattatagttggcgcaattcgaaagacggatcttggttcatacagtccctctgtgctatgttgaagcagtatgctgataaactggaatttatgcatattctaactagggtgaaccgaaaagtggctactgaatttgagtcattctccttcgatgcaactttccacgcaaaaaagcagattccctgcatcgtttcaatgttaactaaggagctctacttctatcatgatgaggtggatggaggatcccccatggaaaatacagaaaattcagtcgactctaaatcaataaaaaacctggaaccaaaaattatacacgggagtgagtccatggattccggaatatcattggataattcttataaaatggattatcccgaaatgggactgtgtataatcattaacaataaaaactttcacaaaagtacaggaatgacatctagaagtgggacagatgttgatgcagccaatctcagagaaacattcaggaacttgaaatatgaagtgaggaataagaatgaccttacacgggaagaaatcgtcgagcttatgagagatgtcagtaaagaggatcactctaaaagatcatctttcgtgtgtgtgcttctctcccatggggaggaaggaattattttcggaacaaacggaccagtcgatctgaagaaaataactaattttttccggggggatcggtgccgaagtttaacaggaaaaccaaaactatttattatccaggcctgccgggggacagaactcgattgtggaatcgaaactgat

SEQ ID NO: 326577 - DNA, 870 bp, Artificial Sequence
  derived and/or modified sequence
atgatcgaaaccgattcgggagtcgatgacgacatggcatgtcacaaaatccctgtggaagccgatttcctctacgcatacagcaccgcacccgggtactatagctggagaaattctaaggacggttcctggttcatccaatcattatgtgctatgcttaagcagtacgcagacaagctggaatttatgcacatcctcacaagggtaaacaggaaggtggccaccgaatttgagtcctttagctttgacgccacgtttcatgccaagaagcagataccatgcattgtgagtatgcttactaaagagttatacttctatcatgacgaggtggatggtggaagtccaatggaaaataccgaaaattctgtagattccaagtcgatcaagaacctggaaccaaagatcatccatggctctgaatcgatggattccggaattagcctggacaatagttataagatggactacccagagatgggcttatgtatcatcatcaacaataagaacttccataagagcaccggaatgacttctagaagtggcactgacgttgacgccgccaacctcagggagacctttcgaaacctgaagtacgaagtcagaaataagaacgacctcactagggaagaaattgtagaactcatgagggacgttagtaaggaggaccattccaagcgcagctcctttgtctgcgtgttgctatctcacggggaggagggtatcatatttgggacgaatggacccgtcgatttgaaaaagattacaaacttctttcggggcgacaggtgcaggtctctaactggtaagccgaaactgtttatcattcaggcttgccgcggaactgaactcgactgtgggatcgagactgat

SEQ ID NO: 326578 - DNA, 870 bp, Artificial Sequence
  derived and/or modified sequence
atgatcgaaactgacagcggggtggatgacgacatggcttgtcacaagatccctgttgaggcagactttctgtacgcctatagtacggcacccggctattacagttggagaaacagcaaagatggctcctggttcattcagtcgctgtgcgccatgctgaagcagtatgccgataaactggagttcatgcacatactcacccgcgttaatcggaaggtagccacagaatttgaatccttttctttcgatgccactttccacgccaagaagcagatcccgtgcattgttagtatgttaacaaaggaactgtacttttatcacgatgaagttgatggtggcagtcccatggagaatacggagaactccgtggatagcaagtccattaagaatttggagccaaaaattattcacggatctgaatcaatggatagtggtataagcctagacaactcttacaagatggattatcctgagatgggattgtgcatcatcattaacaacaaaaatttccataagtcaaccggtatgacctctcggagcgggacagatgtagacgccgcaaacctgcgcgaaacttttagaaacctgaaatacgaagtgagaaacaaaaatgacctcactcgtgaggagatcgtggaactgatgcgagacgtgtccaaagaggaccatagcaagagatcgagtttcgtgtgtgtcctccttagtcatggggaagaaggtataatattcggcacgaacggacccgtagacctgaaaaagatcaccaattttttcaggggcgataggtgtaggtctctgaccggaaaacccaagctatttataatccaggcctgccgcggaacagaactcgattgcggcatcgaaacagac

SEQ ID NO: 326579 - DNA, 870 bp, Artificial Sequence
  derived and/or modified sequence
atgatcgaaaccgattcgggtgtcgatgatgacatggcgtgccataagataccagtggaagcagattttctgtacgcctactcaactgcaccgggatattactcatggcgcaatagcaaggacggaagctggtttatccagtccctctgtgcaatgctcaagcaatacgcagacaagctcgaattcatgcatatactcactagagtgaatagaaaagtggccacggagtttgagagcttttcttttgatgcaacgtttcatgcgaaaaaacagattccgtgcatcgtctctatgctcacgaaagaactttacttttaccatgatgaggtggatggaggtagccctatggagaacaccgaaaatagcgtcgactcgaagagcatcaagaacctggaacccaagattattcatggctcagaatcgatggactcaggtatcagcctggataactcctacaaaatggactaccctgagatgggtctgtgtattatcattaacaacaagaatttccataagagcaccggaatgacttccagaagcggtaccgacgtggatgctgccaacctgcgcgaaacttttcgaaacctgaagtacgaggtcagaaacaagaacgatctcactcgcgaagaaattgtggagcttatgcgcgacgtttcaaaggaagatcatagcaagcggtcatcgtttgtgtgtgtgcttctctcgcacggtgaggaaggtatcattttcggcacgaacggtccagtggatcttaagaagataaccaacttcttcaggggagatagatgccgatcacttaccggaaaacccaagctgttcatcatacaagcctgtcgaggaaccgaactggattgtggaatcgagactgac

SEQ ID NO: 326580 - DNA, 870 bp, Artificial Sequence
  derived and/or modified sequence
atgatcgagactgacagcggggtggatgatgacatggcttgtcataagattccggtggaagcggatttcctttacgcctatagcactgccccggggtactacagctggcgtaacagcaaagatggttcatggtttatccagtcactttgtgctatgctcaaacagtacgcagacaaacttgagttcatgcacattcttacccgggtcaacaggaaggtggcaactgagtttgagtcgtttagctttgacgccactttccacgcaaaaaagcaaatcccttgcatagtgtccatgctgaccaaggaactctacttttaccacgacgaagtggatggaggctccccaatggagaacacggaaaattccgtggattcaaaaagcattaagaacctggaaccaaagattatccacggatcagaatcgatggactccggaatctccctcgataactcctacaagatggattaccctgagatgggtctgtgcatcatcataaacaacaaaaactttcataaatctactggaatgacttctcgctcgggtaccgatgtggacgcagcaaatcttagggaaacgttccggaatctgaagtacgaagtgagaaacaagaatgacctgacgagggaagaaattgtggagctgatgcgtgatgtgagcaaggaagatcactctaagagatcctcgtttgtttgtgtcctgttgtcgcatggcgaagaaggcattatcttcggtaccaatggccctgttgatctgaagaaaatcaccaacttctttagaggggaccggtgtagatcccttaccggaaagccaaagctgttcatcatacaagcatgcagaggcactgaactggattgtggtattgaaaccgat

SEQ ID NO: 326581 - DNA, 870 bp, Artificial Sequence
  derived and/or modified sequence
atgattgaaaccgattcgggggtggatgatgatatggcatgtcataagattcctgtggaagcagattttctttacgcatactccacggcaccagggtactactcatggcggaattcaaaggatggttcctggtttattcaatcgctgtgtgcaatgcttaaacaatacgcagacaaacttgagtttatgcatattctcacccgtgtgaaccgcaaggtggcgactgagttcgagagcttctcgtttgatgcaacttttcatgcaaagaaacaaatcccatgtatcgtgtccatgcttactaaggaattgtacttctaccatgatgaagtcgatggtggatcacccatggagaataccgaaaattccgtggacagcaagtccatcaagaatttggagcccaagattattcatggctcagaatcgatggactcgggtatttctcttgacaacagctacaaaatggattaccctgaaatgggactttgcatcatcattaacaataagaactttcacaaatcaaccgggatgacttctcgttcgggtactgacgtcgatgcagccaaccttcgggaaaccttcagaaacctcaagtacgaagtgaggaataagaatgacctgacccgagaggaaattgttgaactgatgcgggacgtgtcaaaggaagatcatagcaagcggagcagctttgtgtgcgtgctgctgtcgcacggtgaggaagggattatctttggtaccaacgggccagtggatctgaaaaagataacgaactttttccgtggggatcgttgtagatcccttacgggtaaacctaaactcttcattatccaagcgtgtcgcggaaccgagctggattgcggaattgagactgat

SEQ ID NO: 326582 - DNA, 870 bp, Artificial Sequence
  derived and/or modified sequence
atgatcgaaaccgactccggggtggacgatgacatggcttgccataagatccctgtagaggcagatttcctgtacgcgtatagcaccgcgccagggtactactcatggagaaattcgaaggacggatcatggttcattcaatccctttgcgcgatgctgaagcaatacgcagataagctggagttcatgcatatcctgactcgggtgaaccggaaggtggctaccgaatttgaatcgtttagctttgatgcgacctttcatgcaaagaagcaaattccttgcatcgtgtcgatgctgaccaaagagctttacttttaccacgatgaggttgatggaggttccccaatggagaatactgagaattccgtggattcgaagtcgattaagaacctcgagcccaagattattcacggttcagaaagcatggattctggaattagcctggataactcttacaagatggattacccagaaatgggcctttgtattatcattaacaacaagaattttcataaatccactggaatgaccagcagatcgggcactgatgtcgatgctgcaaaccttcgcgaaacttttcggaatcttaagtacgaagtgagaaacaaaaacgatctgactagagaagagatagtggagcttatgcgcgacgtctccaaggaggatcatagcaagcggtcgtcttttgtgtgtgtcctgttgtcacatggtgaggaagggatcattttcggtactaacggtcctgtcgatctgaagaaaatcaccaatttcttcaggggtgatagatgccgttccctgactggtaaacctaaacttttcataattcaggcatgtcgagggaccgaactcgactgcggaatagagactgac

SEQ ID NO: 326583 - DNA, 870 bp, Artificial Sequence
  derived and/or modified sequence
atgatcgagacggactctggcgtagacgacgacatggcctgtcataagattcccgtggaggctgattttctgtatgcttattcgaccgccccaggatattactcgtggcgcaacagcaaggatggttcgtggttcattcagtctctgtgtgcgatgctcaaacagtacgctgataaattggagttcatgcacatcttaaccagggtcaatcggaaagtcgctaccgagttcgagagcttctccttcgatgctacctttcacgccaagaagcaaatcccgtgcatcgtgagcatgcttaccaaggagctgtatttctaccacgacgaggtggatggaggcagcccaatggagaacactgagaattcggtcgacagcaaatccatcaagaacctggagcctaagattattcacggttcggagtcgatggacagcgggatctccctggacaatagctacaagatggactatcccgaaatgggtctttgcatcatcattaacaacaagaacttccacaagtcgactggcatgacctcccgttcgggcaccgacgtcgacgccgctaacctccgcgagaccttcaggaacttgaagtatgaggtcagaaataagaacgatctcacccgcgaggagatcgttgagcttatgcgtgacgtgtctaaagaggatcacagtaaacgcagttcgttcgtctgcgtgcttctcagtcatggcgaggaaggcatcatctttggcaccaacggtcctgtggatctgaagaagatcaccaatttctttaggggcgacaggtgccgctcactgacgggtaagcccaagttgttcatcatccaggcgtgtcggggtacggagctcgactgtggcatcgagacagat

SEQ ID NO: 326584 - DNA, 870 bp, Artificial Sequence
  derived and/or modified sequence
atgatcgagaccgattctggtgtggatgacgatatggcgtgccacaaaatcccagtggaagctgacttcctgtatgcatacagcaccgctcccgggtattatagctggaggaactctaaagacggctcctggttcatccagtcgctgtgtgccatgttgaagcaatatgcagataaactggaatttatgcacatcctgacgcgggtgaatcgcaaggtggcgaccgaattcgagtcatttagcttcgacgcgaccttccatgcgaaaaagcagattccttgcattgtttcaatgcttacgaaagaactgtatttttaccacgatgaggtcgatggcggttccccgatggagaacaccgaaaattccgtggattctaaaagcatcaagaatctggaaccgaaaatcattcatggcagcgagtctatggatagcggaatctcactcgataactcttacaagatggactatccggagatgggtctgtgcattataatcaacaacaaaaattttcataaaagcaccggtatgacctctcgaagcgggaccgacgtcgatgctgccaacctgcgcgagactttccgcaatctaaaatacgaggttaggaataaaaacgaccttacccgcgaagagatagtggagctgatgcgagacgttagcaaggaggaccacagcaagcgcagctctttcgtctgcgtcctgcttagccacggagaggaaggcatcattttcggcaccaatggaccagtcgacctgaagaaaattactaatttttttcgtggtgaccgctgcagatccctgacgggcaaaccaaagctttttataattcaagcttgtcgtggcaccgagttggattgtggtatcgagacagac

SEQ ID NO: 326585 - DNA, 870 bp, Artificial Sequence
  derived and/or modified sequence
atgatcgaaactgactcgggggtggacgacgacatggcctgtcacaaaattcccgtggaagcagactttctgtacgcatactccactgcccctggttactactcatggagaaactcgaaggatggatcctggtttatccaatcattgtgtgcaatgctcaagcaatacgcagacaaactcgaattcatgcatatccttacccgcgtgaatagaaaggtggctacggaattcgaatcattctcgtttgatgcaaccttccatgccaagaaacaaattccatgtatagtttcaatgctgaccaaggaactctatttctaccatgatgaagtggacggaggttcgcctatggagaataccgagaactccgtggattcaaaatcgatcaaaaacctcgaaccaaagattatacatgggtcggagtcgatggatagcgggatctcactggataattcgtacaaaatggattacccggagatgggactttgtattatcatcaacaacaagaactttcacaagtcaaccgggatgacttcgaggagcggcaccgatgtggatgcagcaaatcttcgggaaactttccgcaatctcaagtacgaagtcagaaacaagaatgatcttacgcgggaggagattgtcgagcttatgagggatgtctccaaggaagatcatagcaaaagaagctcatttgtgtgcgtgcttctttcccacggcgaagaaggtatcattttcggcactaacggaccagtggacttgaagaagattaccaacttttttcgcggcgatcgttgtagaagcctcactggaaaacctaaacttttcatcattcaagcatgtcgcggtactgaattggactgtggcatagaaactgac

SEQ ID NO: 326586 - DNA, 870 bp, Artificial Sequence
  derived and/or modified sequence
atgatcgaaaccgactcgggtgtggacgacgacatggcctgtcataagatcccagtagaagcggatttcctctacgcgtactcaactgctccagggtactactcatggcggaactcgaaggatggatcgtggtttattcaatccctgtgtgccatgctgaagcagtacgcagataagctggagtttatgcacatcctcacgcgggtgaatagaaaggtggcaactgaattcgagagcttctctttcgacgctaccttccatgctaagaaacagattccctgcatcgtgtcaatgctgaccaaggagctgtacttctaccacgacgaagtcgatgggggatccccaatggagaacaccgagaactcggtcgactcgaagtcgatcaaaaaccttgagccgaaaatcattcacggttcagagtcaatggactccgggatcagcctggacaattcgtacaagatggattaccctgaaatgggcctgtgcatcatcatcaacaataagaacttccataagtcgaccggcatgacttcacgctcgggtactgacgtggatgcagcaaatctccgtgaaaccttccgcaatctgaagtacgaggtccggaataagaatgatctcacgcgcgaggaaatcgtggaactgatgcgggacgtctcgaaagaggatcactcaaagcggtcctctttcgtgtgcgttttgttgagccacggcgaagagggaattatcttcggcaccaacggcccggtggacctgaagaaaatcaccaatttcttccggggtgaccgatgcaggtccttgaccggaaaaccgaagctcttcattatccaggcgtgtcgggggactgagctcgactgtggaatcgaaactgat

SEQ ID NO: 326587 - DNA, 870 bp, Artificial Sequence
  derived and/or modified sequence
atgatcgagactgactctggggtggacgacgacatggcctgccacaagattcccgttgaggccgacttcctgtatgcgtacagcactgctccgggatactatagttggcgaaactctaaggacggaagctggttcatccagagcctttgcgcaatgcttaaacagtacgccgacaagttggagtttatgcacatccttactcgggtcaatcgaaaggtagctacggaatttgagtctttttccttcgatgcaacgtttcatgctaagaagcagatcccatgcattgtgagcatgctgaccaaagagctgtacttctatcacgacgaggtggatggaggtagcccaatggaaaacacggaaaatagcgtggatagcaagtctattaagaatctggagcctaagatcatccacgggtctgagagtatggacagtgggatctccctggacaattcttataaaatggattacccagagatgggtctgtgcatcataattaacaataagaacttccacaaatctactgggatgacgtctcgctctggcactgacgttgatgctgctaacctgagagagactttcaggaatctgaaatacgaggtgagaaataagaacgacttgaccagggaagaaatagttgagcttatgcgggacgttagcaaggaagatcactctaaaagatccagcttcgtctgtgtacttctttcccacggcgaggaagggatcattttcggaacaaatggccccgtagacctgaagaaaatcaccaatttctttagaggtgatcgctgtcgaagtttgactgggaagcctaagctcttcataattcaggcctgtagaggaacagaactggattgtgggatagagacagat

SEQ ID NO: 326588 - DNA, 870 bp, Artificial Sequence
  derived and/or modified sequence
atgatcgaaactgatagtggggtggatgatgatatggcatgccataaaatacctgtggaagcagatttcttgtacgcatattctacagcccctgggtactattcttggaggaattccaaagatgggagttggttcatccagtccttatgtgccatgctcaagcagtacgccgataaactcgaattcatgcacatccttacaagggtcaacaggaaggtcgccactgaatttgaatcattctctttcgatgccacttttcatgccaaaaagcagataccatgtatagtttctatgctcacaaaagaactctatttctatcatgatgaggtagacgggggatcacccatggaaaatacagagaactcggtcgattctaaaagtatcaaaaatctggaaccaaagataattcacggatcagaatcaatggacagtgggatctcccttgataatagttataaaatggattatcctgaaatggggctctgtataataatcaataataagaatttccacaaatccacagggatgacttctagatctggaacagatgttgatgcagcaaaccttagggaaacatttcgaaaccttaaatatgaggtgcggaacaagaatgatctgactagagaagagatagtggaattaatgcgcgatgtttccaaagaagatcatagtaaaaggtcctcgtttgtttgtgttcttttgtcacacggagaagaagggataatattcgggactaatggaccagtagacttaaaaaagataacaaacttctttcgaggggatagatgtcgaagtctgacaggaaaaccaaagctgttcataatccaggcttgtagagggactgagctggattgcgggattgaaacagat

SEQ ID NO: 326589 - DNA, 870 bp, Artificial Sequence
  derived and/or modified sequence
atgattgaaaccgattccggtgttgacgatgatatggcgtgtcacaagatccctgttgaggccgacttcctttacgcatatagcactgccccagggtactattcgtggagaaattccaaggacggatcctggttcatacaatcgctgtgtgccatgcttaagcaatacgccgataagctggagttcatgcacattctcaccagggtgaatcgtaaggtggctaccgaatttgagagctttagctttgacgcaacctttcatgctaagaagcaaattccttgtatcgtgagcatgctgaccaaagagctctacttctaccatgatgaagtggacggtggtagccccatggagaataccgaaaacagcgtcgattccaaatccatcaaaaacctcgaaccaaagattattcacggttcggagagcatggatagcggaattagtcttgataattcatacaaaatggattacccagagatgggactgtgcatcattatcaataacaaaaactttcataagtcaaccggaatgacttcccggtcaggtactgatgtggatgcagcaaatctccgggagacttttagaaatcttaagtacgaagtgaggaacaagaacgacttgactagagaagaaattgtcgaacttatgagagacgtgtcgaaagaggatcattctaagagatcgagctttgtgtgcgtccttcttagccatggtgaggaggggattatctttggaaccaatggcccagtcgatctcaagaagattaccaatttcttccgtggagacagatgtcggtcactcactggtaaacctaagctcttcattatccaggcgtgtcgaggaactgaacttgattgtggcatcgagactgat

SEQ ID NO: 326590 - DNA, 870 bp, Artificial Sequence
  derived and/or modified sequence
atgatagaaactgactctggagtggacgatgacatggcatgccacaaaattcccgtggaggccgactttctatatgcttattcaacagctcctggttactattcgtggaggaacagcaaggatggctcctggttcatccagagtctttgtgctatgttgaagcaatacgctgataagctggagtttatgcatatcttgaccagggtgaaccggaaggttgccactgaatttgagagcttcagctttgacgctacatttcacgccaagaagcagataccttgcatcgtgtccatgctcacaaaggaattgtacttctatcacgacgaggtcgatggaggaagcccaatggagaatacagagaacagcgtagattcgaaaagtatcaaaaatctagagccgaagatcatacatggcagcgaatctatggattcaggcatttctctggataattcttataagatggactaccccgagatgggcctatgtataattattaacaacaagaatttccacaagagtactggaatgacttccaggtctgggacagatgtcgacgctgctaatttgagggagacgtttcgtaatctcaagtatgaggtccgcaataagaacgacctaaccagagaagaaatcgtcgagctcatgcgtgatgtgtccaaggaggaccactccaagcgctccagcttcgtatgcgtgcttctgtcccatggggaggaaggcattatcttcgggactaacggacctgtcgatctgaaaaagattacaaactttttcaggggagacagatgtagatcccttacaggaaagccgaagctctttattattcaagcttgtcgaggaacagagctagactgtggtatagaaacggac

SEQ ID NO: 326591 - DNA, 870 bp, Artificial Sequence
  derived and/or modified sequence
atgatcgagactgattcgggagtggacgacgatatggcttgccataagatcccggtcgaagcagacttcctctacgcctacagtaccgcccccggatactacagctggcgtaacagcaaggatggttcgtggtttattcagagcctctgcgcgatgctgaagcagtacgccgataagttggagtttatgcatattctcacccgggtcaatcggaaagtggcgaccgaattcgaatcgtttagcttcgatgctaccttccacgccaaaaaacaaattccctgcatcgtgtcgatgctcaccaaagagctctacttctaccacgatgaggtggacggcgggtcgcctatggagaatactgagaacagcgtcgactcgaaaagcatcaaaaacctggaaccgaagatcatccatggaagcgaatctatggactctggtatctcgcttgacaactcctacaaaatggattatccagaaatgggactgtgcatcatcattaacaacaagaattttcataagtcgacgggaatgactagccgctcgggtaccgacgtggacgcagcgaacctgcgggaaacttttagaaatttgaagtacgaggtgcgcaacaagaatgatctcacccgtgaagaaatcgtggagctcatgagagacgtgtccaaggaggaccactcaaagcgctcctccttcgtctgcgttctgttgtcgcacggagaggaaggcatcatattcggaaccaacggcccggtcgaccttaagaagattaccaacttcttccggggggataggtgcagaagtctcactgggaagcctaagctgttcatcatccaagcctgtcgcggcactgagctcgactgtggaatcgaaacggac

SEQ ID NO: 326592 - DNA, 870 bp, Artificial Sequence
  derived and/or modified sequence
atgatcgaaaccgactcgggggtcgacgatgacatggcatgccacaaaatacccgtggaggctgacttcctctacgcctactcaaccgcacctggttactactcctggcggaactccaaggatggctcctggtttattcaatcactctgtgcaatgcttaagcagtatgcagacaagctcgaattcatgcatatactgactcgagtgaatcggaaagtcgcaacggaatttgaatccttctcgtttgatgcaactttccatgcaaagaagcagataccctgtattgtgtcgatgctcaccaaggaactgtacttttaccatgacgaggtcgacggaggttcgccaatggagaatacggagaactcggtggattctaaatccatcaagaatctcgaaccaaagattatccatggatccgagtcgatggattccggcatatcccttgataactcgtacaagatggattaccctgaaatgggcctgtgtatcatcattaacaacaaaaactttcataagagcaccggcatgacctcgcgatcaggcactgatgttgatgcagcaaatctgagagaaacctttcggaatctcaaatatgaagtgagaaacaaaaacgatctgactcgtgaggagatcgtggaacttatgagagatgtgtcgaaagaggaccatagcaaacggtcgtcattcgtgtgtgtcttgctttcgcacggagaggagggcatcatatttggtactaatggaccggtggatttgaaaaagatcaccaactttttcagaggagataggtgtcgaagcctgactgggaaacctaagctcttcatcatccaagcatgccgtggaactgaacttgactgcggaatagaaaccgat

SEQ ID NO: 326593 - DNA, 870 bp, Artificial Sequence
  derived and/or modified sequence
atgattgaaactgattccggcgtggatgatgacatggcctgtcataagatacctgtggaagcggattttctgtacgcttacagcaccgcacccggatactactcatggcggaactcaaaggacggatcatggttcattcaatcgctctgtgcaatgcttaaacaatacgcagataaacttgaattcatgcatatcctgactcgcgtcaaccggaaggtggccaccgaattcgaatcgttttcattcgacgccacctttcatgccaagaagcagatcccttgtatcgtctcaatgcttaccaaggagctgtatttctatcacgacgaagtggacgggggttcgccaatggaaaataccgaaaactcagttgatagcaagagcataaagaaccttgaacctaagattatacatggatctgaatcaatggactcgggtatttcgctcgataattcctacaagatggattatcctgagatgggactgtgcatcatcatcaataacaaaaactttcataagtcgaccggcatgactagccgttccgggaccgacgtggacgcagcgaacctgcgagaaacctttcgtaatttgaagtacgaagtgcgtaacaaaaacgatttgaccagggaggaaattgtggaactgatgagggatgtctcgaaggaggatcactcgaagagatcctcgtttgtgtgtgtcctcctgtcccatggagaagagggaattatcttcggaacgaatggaccagtggatctgaagaagataaccaacttttttcggggagatagatgtaggagccttactggtaagccaaagctcttcatcattcaggcatgtcgtggaaccgaacttgactgtggaatcgaaactgac

SEQ ID NO: 326594 - DNA, 870 bp, Artificial Sequence
  derived and/or modified sequence
atgatcgagaccgactccggagtggatgatgatatggcctgtcacaagattccagtggaagccgactttctgtacgcttattcaacagccccaggctattactcctggcggaattcaaaggatggcagctggttcattcagagcctgtgcgccatgctgaaacaatacgccgacaagctagagttcatgcacatcctgacaagggtcaatcggaaggttgccaccgagttcgaatctttttcatttgacgcaaccttccatgctaagaagcaaataccctgtattgtgtccatgctgacaaaggagctttacttctatcatgacgaggttgatggtggcagtccaatggaaaataccgagaattctgtggatagtaagagcatcaaaaacttggagccaaagattatccatggctcagagagcatggacagcggcatctctctggataactcttataagatggattatccagaaatggggctatgcattatcatcaacaacaagaacttccacaagagtaccggaatgacttccagatctgggaccgatgtggatgccgcaaatctaagggaaacctttcgcaacctgaagtacgaagttcgcaataagaacgatctgacaagggaggagatcgtggagttaatgagagacgtgtccaaggaagaccactccaagcgcagctctttcgtgtgcgtgctgctgagtcacggcgaagagggtattatatttggaaccaacggcccagttgatctgaagaagataaccaacttttttaggggcgaccgctgcaggagcctgactggcaaacctaagctgttcataatacaggcctgtagaggcactgaattagattgtggcatcgaaaccgac

SEQ ID NO: 326595 - DNA, 870 bp, Artificial Sequence
  derived and/or modified sequence
atgatcgaaaccgattcgggcgtggatgacgacatggcatgtcacaagatcccggtcgaagctgacttcctgtacgcctactcgaccgccccagggtactactcttggaggaactcgaaggatggatcgtggttcattcagagcctgtgcgccatgttgaagcagtatgccgataaactcgaattcatgcacatcctgacccgcgtgaataggaaggtggccaccgagttcgaatccttctccttcgacgctacgtttcacgccaaaaagcaaattccgtgcattgtgtccatgctgaccaaggaattgtacttttaccacgacgaggtcgacggaggaagcccgatggagaataccgaaaactcagtggacagcaaatccatcaagaacctcgagccgaagatcattcatggctccgagtcaatggattcagggatctccctggataactcctacaagatggactaccctgaaatgggactttgcatcatcatcaacaataagaattttcacaagagcactggcatgacctcgagatcaggaaccgacgtggacgcggccaatctcagggagactttcagaaacctgaagtatgaagtgcgcaacaaaaatgatctgacgcgcgaagaaattgtggagcttatgcgcgatgtctcgaaagaggaccactccaagcgcagctccttcgtctgcgtgctgctgagccacggcgaagaggggatcattttcggaactaacggcccggtggacctcaagaagatcaccaacttcttccggggtgaccgctgccgttcactgactgggaagccgaaacttttcatcatccaggcgtgccgcggaacggaacttgattgcggcattgaaaccgac

SEQ ID NO: 326596 - DNA, 870 bp, Artificial Sequence
  derived and/or modified sequence
atgattgaaactgactcaggcgtggatgatgatatggcctgtcataagattccggtggaagcagattttctttacgcgtactcaacggcccctggatactactcttggagaaattccaaggacggatcttggtttattcaatccctctgtgcaatgctcaagcagtacgcagacaaacttgaattcatgcacatccttactagggtgaatagaaaggtagcaacggaattcgagtcattttcgtttgatgcaaccttccatgctaagaaacagattccctgcattgttagcatgttgactaaggaattgtacttctatcatgacgaggtggatggcggcagcccaatggagaacaccgagaactcggtggacagcaaatcgattaagaatttggagcctaagattatccacgggtctgagagcatggatagtggaattagcctggataactcgtataagatggattaccctgaaatgggactgtgtattatcatcaataacaaaaactttcataagtcaactggaatgacctctcgctcgggcactgacgtcgatgcggccaacctgagagaaacctttcgaaatctcaagtacgaagtgcgaaacaagaatgacctcactcgcgaggaaatcgtggagttgatgcgcgacgttagcaaagaggatcactccaaacggtcatcctttgtgtgcgtgctgctgtcacatggagaagaagggatcatttttgggactaacggtccagtcgacctgaagaagattactaacttctttagaggggacaggtgtcgtagccttaccggaaagcccaaacttttcattatccaagcatgtagagggaccgaacttgattgcggaattgaaactgat

SEQ ID NO: 326597 - DNA, 870 bp, Artificial Sequence
  derived and/or modified sequence
atgatcgagaccgattcaggagttgacgacgacatggcatgtcataaaattcccgtggaagctgactttctgtatgcttatagtacggcccctggatactactcatggcggaacagcaaggatgggtcatggttcatccagagcttgtgtgcaatgctgaagcagtatgcagataaactggaatttatgcacattcttacccgggttaatagaaaggtagctacagagttcgagagtttcagcttcgatgcaacttttcacgccaagaaacagattccctgtatcgtttcgatgttgactaaggagctttatttttaccacgacgaggtcgatgggggctctcctatggagaacaccgagaacagcgtcgactctaaatctattaaaaatcttgaacctaagatcattcacggcagcgagagtatggacagcgggatttcccttgacaattcttataagatggactaccccgagatgggcctgtgcataattattaacaacaagaattttcacaagagtacgggtatgactagccgctccggcaccgacgtagatgcagccaatttgcgagaaacctttcggaacttaaagtatgaggtccgaaacaagaacgatctgaccagggaagaaatcgttgagctgatgcgcgatgttagcaaagaggatcacagtaagcgtagcagctttgtgtgtgtgctcctcagtcacggcgaagaaggaattatattcggaacaaacgggcctgtcgacttaaagaagatcacgaattttttcagaggcgatcgttgcagaagcctgacaggaaagcccaaacttttcatcatacaggcttgtagaggaaccgagctggactgtggaatcgaaacagac

SEQ ID NO: 326598 - DNA, 870 bp, Artificial Sequence
  derived and/or modified sequence
atgatcgaaaccgattctggcgtagatgacgacatggcctgccataagatccctgttgaagcagattttttgtacgcgtattccacagccccagggtattattcctggagaaacagcaaagacggatcttggtttattcagtctctctgtgctatgctgaagcagtacgccgacaaactggaatttatgcacattctcaccagagttaaccgaaaggtggccaccgagtttgaaagtttttcgttcgacgccactttccacgcgaaaaagcagattccttgcattgtgagcatgctgacgaaagaattgtatttctatcacgacgaggtggatggcggctctcctatggagaacacggaaaactctgtcgattcgaagtcaataaagaatctggaaccaaagataatccatgggtccgaatccatggacagcggcatttctctcgacaactcttacaaaatggactaccccgagatgggcctttgtatcatcatcaacaacaaaaattttcataagtctacgggcatgacctcgcggagtggtacagacgttgacgcagccaatttgcgcgagacctttcggaatcttaagtacgaggtaagaaataaaaatgacttgaccagggaagaaattgtggaattgatgagggacgtctctaaggaggaccatagcaagcggtcatccttcgtgtgtgttctgctctcacacggagaggagggcatcattttcggaacaaacggaccagtggatctaaaaaaaataacaaacttcttccgaggggatcgatgcagatccttaacaggtaagcctaagctgtttatcatacaggcttgtaggggaacagagctcgactgtggaattgaaactgac

SEQ ID NO: 326599 - DNA, 870 bp, Artificial Sequence
  derived and/or modified sequence
atgatcgaaacggactctggggtcgacgatgatatggcctgtcataagatccccgtcgaggctgactttctgtatgcctactccacggctccgggatactactcttggcgcaattcaaaggacgggtcctggtttattcagtcgctctgtgccatgttaaagcagtacgctgacaagctggaattcatgcatatactgacccgggtgaaccgcaaggtcgcgacagagtttgagagcttcagttttgacgctactttccatgcaaagaagcaaattccatgtatcgtgtctatgttgactaaggagctttacttctaccacgacgaggtggacggcgggagtccaatggagaataccgagaattccgtggattccaaaagcattaagaatctcgaacctaaaatcatccacggaagcgagagcatggacagtggcatctcacttgataacagctataaaatggattacccagagatgggtctctgtattatcattaataacaaaaatttccacaagagcactgggatgacaagcagaagtggaacagatgtggatgcagctaatttgagagagacctttaggaaccttaagtatgaggtacgcaataaaaatgatctgactagggaagagatcgtggaactcatgcgagatgttagcaaggaggaccactcgaagcgctcttcttttgtgtgtgtgctgctgagccacggggaggaaggaattatctttgggacgaacggcccagtggacttgaagaagatcacgaatttctttcgtggcgatagatgtagatccttgacaggtaagcctaaactgttcataatccaagcgtgtcgaggaactgagttggactgtggaatcgaaactgac

SEQ ID NO: 326600 - DNA, 870 bp, Artificial Sequence
  derived and/or modified sequence
atgatcgagacagattcaggggtggatgatgatatggcttgccacaagataccagtcgaggcagactttctttacgcctactcaaccgcaccaggatactattcttggcggaactccaaggatgggtcctggtttatacagtctctctgcgcaatgctcaaacaatacgcagacaagctggagtttatgcacatcctcactagggtgaatagaaaggttgcgaccgagtttgagagtttctcattcgacgcaaccttccacgctaaaaagcagatcccatgtatcgtgtccatgctcactaaggagctgtatttctaccacgatgaagtggacgggggatcccccatggaaaacacagaaaattctgtcgactctaaaagtataaaaaacctcgagcccaaaattatccatgggagtgagtccatggatagcggtatatctctcgataactcttacaaaatggattatcccgaaatgggattgtgtatcattataaacaataaaaatttccataagtctacaggcatgacttcaagaagtggaaccgatgtggacgcagccaacctgcgggaaacatttcggaatttaaagtatgaggtaaggaacaagaacgatctgaccagagaggagatagtggaactcatgagggatgtgagcaaggaggaccacagcaagcgaagttcatttgtatgtgttctactgagccatggtgaggaggggataattttcgggaccaacggtccggtggatttaaaaaagataaccaactttttccggggggatcggtgccgatccctgaccggaaaaccaaagctgtttatcattcaagcatgccgaggtactgagctcgactgtggtatcgagactgat

SEQ ID NO: 326601 - DNA, 870 bp, Artificial Sequence
  derived and/or modified sequence
atgattgagacagatagtggggtggacgatgacatggcctgtcataagatccctgtggaggcagatttcctgtacgcctatagcacggccccagggtattactcctggcggaattccaaggatgggtcttggttcatacagagcctgtgtgcgatgctcaagcagtacgctgacaaactggagttcatgcatatcctgacacgggtcaataggaaagtcgcaacagagttcgaatcttttagcttcgacgccacctttcacgctaaaaaacagataccttgtatcgtttctatgctgactaaggagctgtatttctatcatgacgaagtggatggggggtctcccatggagaatactgaaaattccgttgactccaagagcattaaaaacctggagccaaaaatcatccatggctcagagtccatggattcagggatatcactggacaactcttacaaaatggactacccagagatgggactgtgcataattataaataataagaacttccataaatcgaccggaatgacgtccaggtccggcacagacgtcgacgccgctaatctcagagaaacctttaggaacttgaagtacgaggtacgaaacaaaaatgatctgacaagagaggaaatagtggagttgatgagggacgtgtctaaggaagaccactccaaaagatcctcattcgtctgtgttctgctgagtcatggagaggagggcattatatttggtacaaacgggccagtagaccttaagaagatcactaactttttccggggtgacaggtgccgctcattaaccggcaaacccaagctctttataatccaggcttgccggggaacagaactggactgcggaatagaaaccgac

SEQ ID NO: 326602 - DNA, 870 bp, Artificial Sequence
  derived and/or modified sequence
atgatagaaactgattcaggagtggacgatgacatggcctgccataaaattcccgtggaagcagactttttatatgcttattctacagcacctggatattattcttggcgcaactccaaagacgggtcatggttcatccagagcttgtgcgcgatgctcaaacagtacgccgataaactcgagtttatgcatattctcaccagagttaatcggaaagtggccaccgagtttgagtcgttctccttcgacgccacatttcacgctaagaaacaaattccttgtatagtgtcaatgttgacaaaggaattatatttttatcacgacgaggtcgacggaggatcacctatggagaatacagaaaatagcgtggactctaaatcaattaagaacctggagcctaaaataatccatgggtcggaatccatggacagcggcatatccctggataattcgtacaagatggactaccccgagatgggactgtgcatcatcattaacaataaaaactttcataagtctacaggcatgacttcccgatcgggcactgacgtcgacgccgcgaatttacgggagacatttagaaacctgaagtacgaggtcaggaacaaaaacgacctcacacgtgaggaaatcgtggagctgatgcgtgacgtttctaaggaagatcatagtaagaggagttcttttgtatgcgtgctgttgtcgcacggcgaagaggggatcattttcgggacaaacggtcctgtggaccttaagaaaataactaacttctttagaggagataggtgtagaagtctgaccggcaaacccaaactgttcattattcaggcgtgtagaggaacggagctggattgcggaatcgagaccgat

SEQ ID NO: 326603 - DNA, 870 bp, Artificial Sequence
  derived and/or modified sequence
atgatagaaacggattcaggcgttgacgacgatatggcatgccacaaaatcccagtcgaggccgactttctgtacgcatactccacagcacctggatactattcctggagaaattcaaaggatggcagctggttcatacagtccctctgcgcaatgttgaagcaatacgccgacaaattggaattcatgcatattctgacaagggtgaatcggaaagttgccacagagtttgagtcattctccttcgacgcaacatttcatgctaaaaaacagatcccctgcattgtctccatgctgacaaaagaactgtacttctatcacgatgaggtggacgggggctcccccatggagaatactgagaacagcgtagattctaaaagtatcaaaaacctggaacctaaaataattcacggtagcgaaagtatggactccggaatctccctggacaactcctataaaatggattatccggaaatgggcctgtgcattattattaacaacaaaaatttccacaaaagcacaggaatgacctcaaggtcagggactgatgtggacgccgctaatctgagagagactttcagaaacctgaaatatgaggttaggaataagaatgatctgacaagggaggagatagtggaactgatgagagacgtatccaaggaggatcattcaaagagatcctcctttgtctgtgtgctgctcagccacggagaggagggtatcattttcggaaccaacggacctgtggacctcaagaaaattacaaattttttccgaggtgacaggtgtcggtcccttaccgggaagcctaaactgttcatcattcaggcctgccgaggaacagagctggattgcgggatcgagacagac

SEQ ID NO: 326604 - DNA, 870 bp, Artificial Sequence
  derived and/or modified sequence
atgatcgagactgacagcggagtagacgatgacatggcatgtcacaaaataccagtcgaggccgatttcctatatgcctacagtaccgccccgggatactactcctggaggaactccaaggacggctcctggttcattcagtcactctgtgctatgctgaaacagtatgcggacaagttagaatttatgcacatattgacaagagtcaatcgcaaggttgctaccgaatttgagagcttcagtttcgatgccacctttcacgcaaagaagcagatcccgtgtatagtttccatgctaaccaaggagctctatttttatcatgatgaggtcgacggcgggagcccaatggagaataccgagaatagcgtggacagtaaaagcataaaaaatctcgagccaaaaatcatacatggaagcgaatctatggacagcgggatatctctcgacaatagctacaagatggactatcctgaaatgggactgtgcatcattattaataataagaatttccataagagcacgggtatgacaagcagaagcgggacggacgtggatgccgccaacctcagggagacctttagaaatctgaagtatgaagtcaggaataagaatgatctgaccagggaggaaattgtcgaattgatgagagatgtgtctaaagaggaccacagtaaaaggtccagttttgtttgcgtgctgttgtcccacggagaagaggggattatcttcggtacaaacggccccgtggatctgaagaagatcacaaactttttccgcggggacagatgtcggtctctaacagggaagccaaagctattcataatacaagcatgtcgagggactgagctggattgtggaattgaaacggat

SEQ ID NO: 326605 - DNA, 870 bp, Artificial Sequence
  derived and/or modified sequence
atgatcgagactgattccggcgtggacgatgacatggcctgccataagattcccgtggaggccgacttcctttacgcctatagcacggctccaggctactactcgtggcgcaattcgaaggatggcagctggttcatccaatcgctgtgcgcgatgcttaagcagtacgcagataagctggagtttatgcatatcctgactcgcgtgaaccgcaaggtggccactgaattcgaatcgttctcattcgacgccaccttccacgccaagaagcaaattccttgtatcgtgagcatgctgactaaggagctctacttctaccacgatgaagtggacgggggatcaccgatggaaaatacggagaattcggtggacagcaagtcaatcaagaatctggagcctaaaatcatccatggatccgaaagcatggacagcggcatctcccttgataattcctataagatggattaccctgaaatgggcctttgtatcatcatcaacaataagaatttccacaagtccaccgggatgacctcaagatcggggactgatgttgatgcagcgaacctgcgcgaaaccttccggaacctcaaatacgaggtcagaaataagaacgatctcacccgcgaagagatcgtggaactgatgcgcgatgtgtcgaaagaggaccattctaagcggtcatctttcgtttgcgtgctcctgtcccacggcgaagagggaatcattttcggaaccaacggtccggtggaccttaagaaaatcaccaatttcttccggggcgaccggtgccgctccctgaccggaaagccaaaactgttcatcatccaggcatgtaggggcactgagctcgattgcggaatcgaaaccgat

SEQ ID NO: 326606 - DNA, 870 bp, Artificial Sequence
  derived and/or modified sequence
atgattgaaaccgactccggtgtcgacgacgatatggcttgccataagattcctgtggaagctgacttcctctacgcctatagcacggcgccgggatattactcttggaggaactcgaaggatggaagctggtttattcagtccctgtgtgccatgctgaagcagtacgctgataagttggaattcatgcatattctgacgagagtgaacaggaaggttgccaccgaattcgaatctttcagcttcgacgcgactttccacgccaagaagcaaattccatgcatcgtgtcgatgctgaccaaggagctgtacttctaccacgacgaggtcgacggaggatcaccgatggagaacaccgaaaactccgtggacagtaagagtatcaagaacctcgaaccgaagatcatccacggttccgaaagcatggactcgggcatctccctggataattcgtacaaaatggactacccagaaatggggctttgcataatcatcaataacaagaatttccataagagcactggaatgacgtcccggagcggcaccgatgtggacgcagcaaacttgagggaaacctttcggaatctgaagtacgaagtgcgaaacaagaacgatctcactcgcgaagagatcgttgagttgatgcgcgatgtctccaaggaggaccattccaaacgttcgtcatttgtgtgcgtgcttctgtcacacggcgaagaaggaatcatattcggaacgaacggacctgtggatctgaagaaaatcaccaatttcttccgaggggatcgctgcagatccctcactggaaagcccaaactgtttatcatccaggcgtgtcgcggaacggaattggactgcgggatcgagactgac

SEQ ID NO: 326607 - DNA, 870 bp, Artificial Sequence
  derived and/or modified sequence
atgattgagaccgattccggagtggacgacgatatggcttgccacaaaatcccagttgaagcagacttcctgtacgcttactcaacagctccaggctactacagctggagaaacagcaaggatggaagttggttcatccaatcactgtgcgccatgctgaaacaatatgcagataagttagagtttatgcatatcctgacccgtgtcaacagaaaggtcgctaccgagttcgaaagctttagctttgatgcaacatttcacgccaagaagcagatcccatgcatagttagtatgctgaccaaagaactgtatttttaccacgacgaagtcgatggcggctcccctatggagaacaccgagaactccgttgactccaagtcaatcaaaaacctggagccaaaaattatccatggcagcgagagtatggacagtggaataagccttgacaacagttataaaatggattatcctgagatgggcttgtgcattatcatcaacaacaaaaacttccacaagtctactggaatgaccagccgcagcggaaccgacgtggacgcggcaaacctgcgggagaccttccgaaacctcaagtacgaggtgcgtaataagaacgatcttacgagagaagagatagtcgagctcatgcgcgatgtgagcaaagaagaccatagtaaacgctcttcgtttgtttgcgtgctgctgtcacatggagaggagggaatcatctttggcacgaacggacccgtggatctgaaaaaaattacaaatttcttccggggggatcgatgcagatcattgacggggaagccgaaactgtttataatccaggcttgcaggggtactgaactggattgcggcatagagacagat

SEQ ID NO: 326608 - DNA, 870 bp, Artificial Sequence
  derived and/or modified sequence
atgatagagactgattcgggggtggacgatgacatggcctgtcataagatcccggtggaagcagactttctctacgcctactcgaccgcgccgggatactacagttggagaaacagtaaagatgggtcatggttcatccagtcactgtgcgcgatgctcaagcagtacgccgacaaactggagtttatgcatatcttgacccgcgtgaaccgcaaagtagcaacggaattcgagtccttctcattcgacgctacgttccacgccaagaagcaaatcccatgcatcgtatctatgctgactaaagaactgtacttttatcacgacgaggtcgatggcggttcccctatggaaaacacggaaaattccgtggattcgaaaagcattaagaacttggagcctaagatcattcacggatccgagagcatggacagcggtatctcactggacaatagctacaagatggactacccggaaatggggctctgcatcatcatcaacaacaagaacttccataagtctaccggtatgactagccgcagcggaaccgatgtcgacgctgcgaacctgcgggaaactttcagaaatcttaagtacgaggtgcgcaataagaatgacctgactcgcgaggaaatcgtcgagcttatgcgagatgtgtccaaggaggatcactcgaaaagatcatcctttgtctgcgtgctgctttcgcacggtgaagagggcatcattttcggaaccaacggacccgtggatctcaagaagatcaccaacttcttccgtggagatcggtgtagatctctcactggcaagccaaagttgttcattatccaagcctgccggggaaccgaactggactgcggcatcgaaaccgac

SEQ ID NO: 326609 - DNA, 870 bp, Artificial Sequence
  derived and/or modified sequence
atgattgaaaccgattcaggcgtggacgacgacatggcttgtcacaagattcccgttgaggcggattttctctacgcatactctactgcacctgggtactactcgtggagaaactcaaaagatgggtcgtggtttatccaatcactttgcgcgatgcttaaacagtacgcagacaaattggagttcatgcatattcttactagagtgaatcgtaaggtcgctactgaatttgaatccttttcgttcgacgccacctttcatgcgaagaagcagatcccgtgtattgtgagcatgctgaccaaggagctgtacttttaccatgatgaggttgatggaggatcgcctatggaaaatacggagaattccgtagacagcaaatccataaagaatcttgaaccaaagataattcatggctcggaaagcatggatagtggaatctcgctcgataactcgtacaaaatggactaccctgaaatgggtctttgcatcataatcaacaacaaaaactttcataagtcgaccggtatgactagccgttcgggtactgacgtcgacgcagcgaatctgcgggaaacttttaggaatctgaagtatgaagtgagaaacaaaaacgacttgaccagggaggaaattgtggaactgatgcgcgatgtgtcaaaggaggatcactccaaaaggtcatccttcgtctgcgtgctcctttcacacggagaagaagggatcatttttggaaccaacggccccgtagatcttaagaagataaccaacttcttcagaggggaccgctgtaggtccctgactggaaaaccaaagctctttatcattcaagcatgtcgaggcaccgaattggattgtgggatcgagactgat

SEQ ID NO: 326610 - DNA, 870 bp, Artificial Sequence
  derived and/or modified sequence
atgattgagacagactccggggtcgacgatgacatggcttgtcacaagatcccagtggaagccgactttttgtacgcctattctaccgctcccgggtactattcgtggaggaattctaaagatggcagctggttcatacagagcctttgtgccatgttgaagcaatacgctgataaactcgagttcatgcacatcctgactagggtcaaccgaaaggtggcgacggagttcgagagtttcagtttcgatgccacttttcatgccaaaaaacagatcccctgtattgtatcaatgttgactaaagaactgtatttctatcatgatgaagttgatggagggagtcctatggaaaacactgaaaattctgttgactcgaaatctattaaaaacttggagccaaaaataatccacgggtccgaaagcatggattccggtatctcactcgataactcttacaaaatggattacccggagatgggtctgtgcattattatcaataacaagaacttccacaagtcaactggaatgacatccaggagcggcactgacgtggatgccgctaacctccgcgagacatttcgcaaccttaagtatgaagttcgaaataagaatgatttaaccagagaggagatagtagagcttatgcgggacgtatctaaggaagaccattccaaacggtcgtctttcgtctgtgtattactgtctcatggagaagaggggataattttcggcacgaatggaccggtcgatttaaagaaaattactaatttcttcaggggcgaccgatgtagatccctgacgggcaagcccaagctttttatcatccaagcttgccgagggaccgagttggattgtggcattgaaaccgat

SEQ ID NO: 326611 - DNA, 870 bp, Artificial Sequence
  derived and/or modified sequence
atgatagaaaccgattcaggcgtcgacgatgatatggcctgtcataaaatccccgtggaagccgacttcctctacgcgtactccaccgcccccggctactattcctggcggaatagcaaggatggctcttggttcatccagtcattatgtgcgatgctcaaacaatatgcagacaagctagaatttatgcatattctgacaagggtcaaccggaaggtcgccactgagtttgaatcctttagttttgacgctaccttccacgccaaaaaacagattccatgcatcgtaagcatgcttactaaggagctgtacttctaccacgacgaggttgacggagggtcccctatggagaacacggagaacagtgtggactcaaagtccattaaaaacctcgaaccgaagataatccacggcagcgagtccatggactctgggatctcactcgataacagctacaagatggattaccctgaaatggggctatgtatcatcataaacaataaaaacttccacaagagcaccggaatgaccagccgatcggggaccgacgttgatgcagctaaccttcgagagacatttagaaatttgaaatacgaggtacgcaacaaaaatgatttaactcgtgaagaaatcgtggagctcatgcgtgatgtgtctaaagaggaccactcaaaaaggtcttctttcgtgtgcgtgctgctgtcgcatggcgaggagggtattatatttgggactaatgggcctgtggatcttaagaaaatcaccaatttcttcaggggagacagatgcaggtctttgacagggaaaccaaaactattcataatccaggcctgcagggggacggagctggattgtggaatcgagacagac

SEQ ID NO: 326612 - DNA, 870 bp, Artificial Sequence
  derived and/or modified sequence
atgatcgaaaccgactcaggagtggacgacgacatggcttgccacaaaatcccagtcgaggccgatttcttgtacgcctactcaaccgctccgggctactactcctggcggaactccaaggacgggtcctggttcatccagagcctctgtgccatgctgaagcaatatgctgataagctggagtttatgcatatcctcactcgggtcaatagaaaagtggcaactgagtttgagtctttctcattcgatgccacgttccatgctaagaagcagatcccatgcattgtgtcgatgctgaccaaagaactgtacttctaccacgatgaggtggacggcggatcaccgatggaaaatactgaaaactccgtggactcaaagagcatcaagaatctggagccaaagatcatccacggtagcgaatcgatggattccggcatttcgctggacaactcgtacaaaatggactacccggaaatggggctctgtattatcatcaataacaagaattttcataagtcaactggaatgacgagccgctcgggaaccgatgtcgacgccgccaatctgcgcgaaaccttccgcaacctcaagtacgaggtgagaaacaagaatgatttgacgagagaagaaattgttgaactcatgagagacgtgtcaaaggaggatcactcgaagagatcgtcgtttgtgtgcgtgctgctgtcccacggtgaagagggaatcatcttcggaaccaacggcccggtcgacttgaaaaagatcaccaacttcttccggggcgacaggtgccggtcgctgactggaaagcctaaacttttcataatccaggcttgcagaggaacggagttggattgtggaatcgagactgac

SEQ ID NO: 326613 - DNA, 870 bp, Artificial Sequence
  derived and/or modified sequence
atgatagaaacggattcgggtgtagatgatgatatggcgtgtcataaaataccggtagaagcggattttttatatgcgtattcgacggcgccgggttattattcgtggcgtaattcgaaagatggttcgtggtttatacaatcgttatgtgcgatgttaaaacaatatgcggataaactagaatttatgcatatactaacgcgagttaatcgtaaagtagcgacggaatttgaatcgttttcgtttgatgcgacgtttcatgcgaaaaaacaaataccgtgtatagtatcgatgctaacgaaagaactatatttttatcatgatgaagttgatggtggttcgccgatggaaaatacggaaaattcggttgattcgaaatcgataaaaaatctagaaccgaaaataatacatggttcggaatcgatggattcgggtatatcgttagataattcgtataaaatggattatccggaaatgggtttatgtataataataaataataaaaattttcataaatcgacgggtatgacgtcgcgatcgggtacggatgtagatgcggcgaatttacgtgaaacgtttcgaaatttaaaatatgaagtacgaaataaaaatgatttaacgcgtgaagaaatagtagaactaatgcgagatgtatcgaaagaagatcattcgaaacgttcgtcgtttgtttgtgttctactatcgcatggtgaagaaggtataatatttggtacgaatggtccggtagatttaaaaaaaataacgaatttttttcgtggtgatcgttgtcgttcgttaacgggtaaaccgaaattatttataatacaagcgtgtcgtggtacggaactagattgtggtatagaaacggat

SEQ ID NO: 326614 - DNA, 870 bp, Artificial Sequence
  derived and/or modified sequence
atgatcgagacggacagcggggttgacgacgatatggcctgtcacaaaattcctgttgaagctgatttcctttacgcctattccactgctcctggttactactcctggaggaattcaaaggatggaagctggttcattcagtcactgtgcgccatgttgaaacagtacgcagataagctcgaattcatgcacatactgaccagggtgaaccggaaggtggctactgagtttgaaagtttcagttttgacgccacctttcatgctaagaagcagattccttgcatcgtgagtatgttgaccaaagaactgtatttctaccacgacgaggttgacggcggcagccccatggagaatacagagaattccgtcgatagtaagagtattaaaaatctcgagcccaagatcattcacggctcagaaagcatggacagcggcatctccctggataattcctataaaatggactatcctgagatgggactgtgcattattatcaataataagaatttccataagagcacaggaatgacttcaagatctggcactgatgtcgacgcagcgaacctccgagagacgtttagaaacctcaagtatgaggtcaggaataaaaacgacctcacccgggaggagattgtcgagttgatgcgcgacgtgagcaaagaggaccatagcaaacggtcatccttcgtgtgcgtgctcctgtcccatggtgaagaagggatcatatttggcaccaatggaccggtagacctgaagaagataaccaacttcttcagaggggatcggtgtaggtccttgaccggcaaacccaagcttttcattatacaagcctgccgcggaacagagctcgattgcggcatcgagacagac

SEQ ID NO: 326615 - DNA, 870 bp, Artificial Sequence
  derived and/or modified sequence
atgattgaaaccgactccggggtggacgatgatatggcgtgtcacaaaattcctgtggaggcagactttctgtacgcgtactctaccgcacctggctactactcctggagaaattccaaggatggatcatggttcattcagtccctgtgcgccatgcttaagcaatacgcggataaactcgagttcatgcatattcttactcgagtgaacagaaaggtggccactgaattcgaatctttctcttttgacgcaacctttcacgcaaagaagcagattccttgcattgtgtctatgctcactaaggaactttacttttaccatgatgaagtggacggaggatccccaatggaaaataccgaaaattcggtggattccaagtccattaagaatctggaaccaaagatcatccatggttccgaatcaatggattcgggcatttcgttggataactcctataagatggattaccccgagatggggctgtgcattatcattaacaataagaactttcataagtcgactggcatgacctcacgctcaggtaccgatgtcgatgcagcaaacctgcgggagactttccggaatcttaagtacgaggtccgaaacaaaaacgatttgactagagaggaaatcgtggaactcatgagggacgtcagcaaggaggatcatagcaaacgaagctcctttgtgtgtgtcctgcttagccatggtgaggaaggaattatcttcggaactaacggaccagtcgacctcaagaagataactaatttctttcggggtgatcggtgtagatcattgaccggcaagccaaaacttttcattatccaagcatgcagaggtaccgaactcgattgtgggattgagactgat

SEQ ID NO: 326616 - DNA, 870 bp, Artificial Sequence
  derived and/or modified sequence
atgatcgaaactgatagcggagtggatgacgacatggcgtgccataagatcccagtcgaagcggactttttgtacgcctactccaccgcccctggctactattcctggcgcaacagcaaggatggatcatggttcatccagtcactttgtgcgatgttgaagcagtacgccgacaaactggaattcatgcatatcctgacccgcgtgaacaggaaagtcgccactgagttcgaatcgttcagcttcgatgctacctttcatgcaaaaaagcagatcccttgcatcgtatcaatgctgaccaaagaactgtacttttaccacgacgaggtggacgggggatcgccaatggagaacactgaaaattcggtggactcaaagtcaatcaagaatctcgagccgaagatcatacatggttcggagtcaatggactctggtatctcgctggataatagctacaagatggattaccccgagatgggcctgtgtatcattatcaacaataagaattttcataaaagcaccggcatgacttcgcgctcgggaaccgacgtggatgcagccaacctgagagagactttccggaatctcaagtacgaggtgcgcaacaagaacgatctgacccgcgaagaaatcgtggaactgatgcgcgacgtctccaaggaggatcactctaagcgctcgtcattcgtgtgtgtgttgttgtcccacggagaagaaggaatcatcttcggcactaatggcccggtggatcttaagaagattaccaacttcttccgcggggatcggtgccggagcctgaccggtaaaccaaagctcttcatcatccaggcctgcagaggaaccgagctcgactgcggaatcgaaactgac

SEQ ID NO: 326617 - DNA, 870 bp, Artificial Sequence
  derived and/or modified sequence
atgattgagacagactccggagtggacgacgatatggcatgtcataagatcccagtcgaggcagatttcttatatgcatacagtaccgccccgggatactattcgtggcgcaactcaaaggacgggtcttggtttattcagagcctgtgcgccatgctgaagcagtatgccgataaattggagttcatgcacatcctcacaagagtgaataggaaagttgccacagagtttgaaagtttctcattcgatgccaccttccacgccaagaagcagattccctgtatcgtttccatgttgactaaggaactgtatttctaccacgacgaggtggacggcggtagtcccatggagaacaccgagaactctgtagattcaaagtccatcaagaatctcgagccaaaaatcattcatggttcagagtcgatggactctggtatcagccttgacaactcatataaaatggactaccccgagatgggcctgtgtataattatcaacaacaaaaatttccacaaaagtaccggcatgacatctcgctccggtactgacgtggacgccgcaaaccttcgggaaacattcagaaacctgaagtacgaggtgaggaataagaatgatctgacgcgagaggagatcgtggaactcatgagagacgtctctaaagaggatcacagtaagaggtcttcttttgtgtgtgtgttgctgagtcatggcgaagaggggataattttcggtacgaatggacccgtagacttgaaaaagatcaccaacttctttaggggcgacaggtgcaggtcgctgaccggaaaacctaagctctttatcatccaggcgtgtaggggcactgaactggattgtggcattgagaccgac

SEQ ID NO: 326618 - DNA, 870 bp, Artificial Sequence
  derived and/or modified sequence
atgatcgaaacggattcaggagtcgacgacgacatggcatgtcacaagatcccggtggaagcggacttcctgtacgcctatagcacggccccggggtactactcctggcggaattccaaggacggatcgtggtttatccaatcgctctgtgcgatgctcaagcagtacgccgataagctcgaattcatgcacatcctgactcgggtgaacagaaaggtggcaactgaatttgagtccttcagcttcgacgctactttccacgccaagaagcagatcccgtgcattgtgtcaatgctcaccaaagagctgtacttctaccacgacgaagtggatggcggaagtccaatggaaaacaccgaaaattccgttgactcgaaaagcatcaagaacttggaacctaaaattatccacggaagcgagagcatggatagtgggatctcgctcgacaactcatacaaaatggactaccccgaaatggggctgtgcatcatcattaacaataagaattttcataagtcgaccggcatgacctcgcgatccggcactgacgtggacgcggccaacctgcgggaaaccttccgcaacctgaaatacgaggtgaggaataagaacgacctcactcgcgaggagattgtggagctgatgcgggatgtgtccaaggaggaccattcaaagcgctccagcttcgtctgcgtcttgctgtctcatggagaggaaggtatcatattcggaaccaatggaccagtcgatcttaaaaagatcaccaactttttccgcggagatagatgcagatcgctgactggcaaacctaagctgttcatcatccaggcttgcaggggaaccgaacttgattgcggtatcgagactgat

SEQ ID NO: 326619 - DNA, 870 bp, Artificial Sequence
  derived and/or modified sequence
atgatcgagaccgattctggcgtcgacgacgatatggcctgccataagattcctgtagaggccgatttcttgtatgcttatagcaccgcacccggctactactcttggcgtaactcaaaggatggctcctggttcatccagtctttgtgcgcaatgctcaagcagtacgcagacaagctcgagtttatgcacattttgactagggtaaaccgtaaagtggcaacagagtttgagagcttcagtttcgacgctacattccatgcaaagaaacagattccttgtatcgtctctatgttgactaaagagctctatttttatcacgacgaagtcgacggcggtagtcccatggagaacactgaaaattccgtcgactccaagtctatcaaaaacttggagcctaagattatccacggtagcgaatccatggatagcggtatctctcttgacaactcctacaagatggactacccagagatgggtctgtgcatcatcataaacaataagaattttcacaaatctaccggcatgacttctcgcagcggtactgatgttgatgctgctaaccttcgcgagactttcaggaacctgaaatacgaagtgcgcaataagaatgatttgactcgtgaagagatcgtcgagcttatgagggatgtttccaaggaagaccactccaagagatctagtttcgtgtgcgtattgttgtctcacggtgaggaaggtatcatttttggaaccaacggaccagtggacctcaagaagatcaccaatttttttcgcggagataggtgtaggagtctgaccggcaagcctaagctgttcatcatccaggcatgccgcggaactgaacttgactgcggcatcgagacagac

SEQ ID NO: 326620 - DNA, 870 bp, Artificial Sequence
  derived and/or modified sequence
atgattgaaactgattcaggagttgacgatgatatggcttgtcataaaattcctgttgaggcagattttctttatgcatattcaacagctcctggatattatagttggagaaattcaaaagatggatcatggtttattcaatcattgtgtgctatgcttaaacaatacgctgataaacttgaatttatgcacatacttacaagagttaatcgtaaagttgctacagaatttgaatctttttcatttgatgcaacatttcatgctaaaaaacaaattccatgtattgttagtatgttaacaaaagaattatacttttatcatgatgaagtagatggaggtagtccaatggaaaatactgaaaattcagtcgatagtaaaagtattaaaaatcttgaaccaaaaattatccatggatcagaatcaatggattcaggaatttctttagataatagttataaaatggattatccagaaatggggctttgtattattataaataataaaaattttcataaatctactggtatgacttctagatcaggaacagatgttgatgccgcaaatttaagagaaacatttagaaatttaaaatatgaagttagaaacaagaacgatttgacaagagaagaaattgtggaattaatgcgtgatgtttctaaagaagaccacagtaaaagaagttcatttgtatgtgtacttcttagtcatggagaagaaggtattatttttggaactaatggtccagttgatttaaagaaaattacaaatttcttcagaggagatagatgcagatcattgactggaaaaccaaaattatttattattcaagcttgtagagggacagaacttgattgcggtatagaaactgac

SEQ ID NO: 326621 - DNA, 870 bp, Artificial Sequence
  derived and/or modified sequence
atgatcgaaacagattcaggtgtggacgacgacatggcctgtcacaagatcccagtggaggcagattttctgtacgcatatagcacagcccccggctattatagttggaggaatagtaaagacggctcatggtttatccagagcctttgcgccatgctgaagcagtacgctgacaagttagaatttatgcatatattgacccgggtgaatcgcaaggtggctaccgagttcgagtccttctcctttgacgctaccttccacgccaaaaagcaaatcccttgcatagtgagtatgctcactaaagaactgtatttctatcacgacgaggtggatggaggatcaccgatggagaacacagagaattctgtcgactctaagagcattaaaaatctcgagcccaaaatcatccacggctctgaaagcatggacagtggaatatccctcgacaattcatacaagatggactaccctgagatgggtctctgcattatcattaataataagaacttccacaagagcacaggcatgactagtaggtctggcactgatgtcgacgcggccaaccttcgcgagactttcaggaatctcaagtacgaggtgaggaacaagaatgatctaactcgtgaagagatcgtggaactgatgcgggatgtttctaaggaggaccattcgaagcggagttctttcgtgtgtgtgctgttaagccacggcgaggaggggatcatctttggcaccaatggcccagtggatctgaagaagatcaccaacttttttaggggagatcggtgtcgcagcctgacaggcaaaccgaaactcttcataatacaagcttgccgcgggacagagcttgattgtggaatcgagacagac

SEQ ID NO: 326622 - DNA, 870 bp, Artificial Sequence
  derived and/or modified sequence
atgatcgagactgattctggcgtggatgacgacatggcctgccacaaaatccccgtggaggcagatttcctgtatgcatactcgactgctccaggatactactcctggcgtaactcgaaggatggatcctggtttatccaatcgctgtgtgcaatgctcaagcagtacgcagacaaactcgaattcatgcacatcctcactcgcgtgaatcggaaggtcgccaccgaattcgaatctttctccttcgatgctactttccacgccaagaagcagattccgtgcatcgtgagtatgctcaccaaagagctgtacttttaccatgatgaggtggatggcggatccccaatggaaaacaccgagaattccgtggactccaagtcgatcaagaatctggagccgaagataatccacggaagcgaatcgatggactccggaatttcgctggacaacagctacaaaatggactaccctgagatgggactttgcattatcatcaataacaagaacttccacaaatcaacggggatgacctctcgctcgggaaccgatgtggacgctgcgaatctcagggaaactttcagaaacctgaagtatgaggtccggaataagaacgacctcacccgtgaagaaatagtggaactgatgcgggacgtgtccaaggaggatcattcaaaacggtcatcgtttgtttgcgtccttctgtcccatggcgaggagggtatcatttttgggaccaatggtccagtcgacctgaagaagatcaccaacttctttcgaggcgacaggtgtcgcagccttactggcaagccgaaattgttcatcatccaggcatgccgcggtaccgaactggattgcggtatcgaaactgat

SEQ ID NO: 326623 - DNA, 855 bp, Artificial Sequence
  derived and/or modified sequence
atgatcgagaccgacagtggggtcgatgacgatatggcttgccacaaaatccctgtggaagccgactttctttacgcttatagtaccgccccaggatattatagctggcgcaacagtaaggacggatcatggttcatacaaagtctttgcgccatgttgaaacagtatgctgacaagctggaattcatgcacatcctcactcgggtgaaccggaaagtggcaaccgaattcgaaagtttttcttttgatgcgacttttcacgctaagaagcagatcccctgcatcgtgagcatgttgactaaagagctgtacttctatcacggatccccaatggaaaataccgaaaactccgtggccagtaagtccattaagaacctggaacctaagatcattcatggctcggagtctatggcctccggtattagcctggacaactcgtataaaatggattaccccgagatggggctctgcattatcatcaataacaaaaatttccataagtccacgggcatgaccagccgcagtggcaccgacgtcgatgccgctaacctgagggagacatttcgcaacctcaagtatgaggtaaggaataagaacgatctgacgcgggaggagatcgtggaattaatgagagatgtttcaaaagaggatcatagtaaacgatctagtttcgtgtgcgtactgctcagccacggcgaggagggaatcattttcggcaccaatgggcctgtggatctgaaaaaaatcaccaattttttccgaggtgaccgttgtcggtccctcaccggcaaaccgaaactcttcatcattcaagcttgccgcggcacagagttggattgtggaatcgagaccgat

SEQ ID NO: 326624 - DNA, 855 bp, Artificial Sequence
  derived and/or modified sequence
atgattgagaccgattccggtgttgatgacgacatggcctgccataagatccccgtcgaagcagatttcctttacgcctatagcaccgcccccggttactactcctggcggaactcaaaggacggaagttggttcattcagtcactgtgcgcaatgttgaagcaatacgccgataaactcgagttcatgcacattttaactcgtgttaaccggaaggtcgcaaccgaattcgagagtttctccttcgacgccaccttccacgcaaaaaaacagattccttgcatcgtttcgatgctgaccaaggagctgtacttctaccatggatcccccatggaaaacactgaaaattccgtggcatctaaaagcattaaaaatctcgagcctaagatcatacatggaagtgagtccatggcaagtggcatctccctcgacaacagctataaaatggattacccggaaatggggctgtgcattatcattaataacaagaattttcacaaatcaacaggcatgaccagcaggtctggaactgacgttgacgctgccaatcttcgtgaaacattccggaatctcaaatacgaagtcagaaataaaaacgacttaactagagaggaaatcgtcgagctgatgcgtgacgtgtccaaggaggatcacagtaaacgttcctctttcgtgtgtgtgttattgtcacacggagaggagggtattatttttggcaccaacgggccagtggacttgaagaaaattacgaatttcttcaggggtgaccggtgtcggtctctgactggcaaacctaaattgttcatcatacaagcatgcagaggcaccgagctagattgtggcatcgaaactgac

SEQ ID NO: 326625 - DNA, 855 bp, Artificial Sequence
  derived and/or modified sequence
atgatagaaacggattcgggtgtagatgatgatatggcgtgtcataaaataccggtagaagcggattttttatatgcgtattcgacggcgccgggttattattcgtggcgtaattcgaaagatggttcgtggtttatacaatcgctatgtgcgatgttaaaacaatatgcggataaattagaatttatgcatatattaacgcgtgttaatcgaaaagtagcgacggaatttgaatcgttttcgtttgatgcgacgtttcatgcgaaaaaacaaataccgtgtatagtttcgatgctaacgaaagaactatatttttatcatggttcgccgatggaaaatacggaaaattcggtagcgtcgaaatcgataaaaaatttagaaccgaaaataatacatggttcggaatcgatggcgtcgggtatatcgttagataattcgtataaaatggattatccggaaatgggtctatgtataataataaataataaaaattttcataaatcgacgggtatgacgtcgcgatcgggtacggatgtagatgcggcgaatctacgagaaacgtttcgaaatttaaaatatgaagttcgtaataaaaatgatctaacgcgagaagaaatagttgaactaatgcgtgatgtatcgaaagaagatcattcgaaacgatcgtcgtttgtttgtgtactactatcgcatggtgaagaaggtataatatttggtacgaatggtccggttgatttaaaaaaaataacgaatttttttcgtggtgatcgttgtcgttcgttaacgggtaaaccgaaattatttataatacaagcgtgtcgaggtacggaattagattgtggtatagaaacggat

SEQ ID NO: 326626 - DNA, 855 bp, Artificial Sequence
  derived and/or modified sequence
atgattgagacggatagcggggtggatgatgatatggcttgccataagattcccgtggaagcagattttctctacgcatacagcactgctcccggatactactcatggcgaaacagcaaagacggatcgtggttcattcagtccctttgcgccatgctgaaacaatacgcagataagctggaattcatgcatattctgacccgcgtgaaccggaaggtggcaaccgagttcgagagcttctcgtttgacgccacgtttcatgcaaaaaagcaaatcccatgtattgtgtccatgctcaccaaggaactgtacttttaccacggttcccctatggagaatactgagaatagcgtcgccagtaagtccattaagaatctggaacctaagataatccatggctcggaatcaatggcatccggaatttcacttgataattcgtacaaaatggattaccctgaaatgggactgtgtataatcatcaataacaagaactttcataaatcgaccggcatgacctcccggagcggtaccgatgtggatgcagcaaacttgcgcgaaacctttcggaatctcaagtacgaagtgaggaataagaacgatctcactcgggaggagatcgtggaactcatgagggatgtctcaaaggaggaccattccaagcggtcgagctttgtttgcgtgcttctgtcacacggggaggaaggaattatcttcggcactaacggacctgtcgatctgaagaaaatcactaatttctttcggggagatcgttgtagatcgctcaccggaaagccaaaattgtttatcatccaggcatgtcgcggaaccgagcttgattgtggtatcgaaaccgat

SEQ ID NO: 326627 - DNA, 855 bp, Artificial Sequence
  derived and/or modified sequence
atgattgagactgactcaggagtcgacgatgacatggcttgccataagattccagtggaagcagacttcttgtacgcgtactctaccgcgcctggatactactcatggcggaattcgaaggacgggtcttggttcatccagagcctgtgtgctatgctcaaacaatacgccgacaagctggaattcatgcatatcttgactagagtcaaccgcaaggtggccaccgaatttgagtcgttctcattcgatgcgaccttccacgccaagaagcaaatcccttgcatcgtgtcaatgttgaccaaggaactctacttctaccacgggtcgccaatggagaatactgaaaattcggttgcctcgaagagcatcaagaatctggagccgaaaatcatccatggatcagaaagcatggcgtcaggcatttcactggataactcatacaaaatggactatccggaaatgggactgtgcatcatcatcaacaacaaaaacttccacaagtccacggggatgactagccgatccggaactgacgtggacgccgctaatctccgcgaaacgttcaggaatctcaaatacgaggtccgtaacaagaacgacctgaccagggaagaaatcgtggaactgatgcgggatgtctcgaaggaagatcactccaagaggtcgtcttttgtatgcgttctgctgtcccacggtgaagaggggatcatttttggcaccaacggaccggtggatttgaagaagatcactaacttttttcgaggtgaccggtgccggtcccttaccggcaaaccgaagctgtttatcatccaggcgtgccggggtaccgagctggattgcggaatcgaaaccgat

SEQ ID NO: 326628 - DNA, 855 bp, Artificial Sequence
  derived and/or modified sequence
atgatcgaaaccgactcaggcgttgatgatgacatggcctgtcacaaaatccctgtggaggcagacttcctctacgcctacagcactgcgccgggatactactcgtggcggaattcaaaagacgggagctggttcatccagtccctgtgtgcaatgctcaagcaatacgccgataaactggagttcatgcacatcctgaccagagtcaaccgtaaggtggctaccgaatttgagagcttctccttcgatgccaccttccacgccaagaaacagatcccttgcatcgtctcgatgctgactaaagagctctacttctaccacggatccccaatggaaaataccgaaaattcagtggccagcaaatccatcaaaaacctggagcccaagatcattcacggatcagagtccatggcatcaggcatctcgctggacaactcgtacaaaatggactaccctgaaatgggcctgtgtatcatcataaacaataagaacttccataagtctacgggaatgacgtcgaggtccggaactgatgtggatgcggctaacctcagggaaacctttcggaatctgaagtatgaagtgcgcaacaaaaacgacctgacccgcgaggaaatcgtggagctgatgcgcgacgtgtctaaggaggaccattccaagcgatcgtcgtttgtctgcgtcctcctctcacacggagaagaagggatcatcttcgggactaatgggccagtcgatttgaagaagattactaacttttttcgcggggaccgctgccgctcccttacgggaaagccgaaattgttcataatccaagcctgtagaggcacggagcttgattgtggtattgaaaccgac

SEQ ID NO: 326629 - DNA, 855 bp, Artificial Sequence
  derived and/or modified sequence
atgattgagactgacagtggcgtggacgacgatatggcttgtcataagattccggtagaagccgactttctgtacgcctatagcacagcccccggctattacagttggagaaattccaaggacggatcatggttcatccagtctctgtgtgccatgttgaaacaatatgccgacaagctcgaattcatgcatatcctcactagggtgaaccgtaaggtggcaacagaatttgagtcatttagctttgacgccacgttccacgctaaaaagcaaataccctgtatcgttagtatgctgacaaaagaactctacttctaccacggctccccaatggagaatacagagaattcagtggcgtctaagagtataaagaatctggaaccgaagatcattcatggatccgagtccatggcgtccggcatcagtctggataacagttataaaatggactacccagaaatgggactgtgcatcatcataaataacaagaacttccacaaatccaccggtatgacttcacgcagcggcacggacgtggacgcagccaatttgcgagagacgtttaggaacttaaaatacgaggttagaaataaaaacgatctgacaagagaggagattgtggaactaatgcgagacgtctccaaagaggaccacagcaaaagaagttcctttgtttgtgtgctactctctcacggggaggaaggcataatcttcggcacaaacgggcctgtggatctgaaaaaaatcacaaacttttttcgtggggaccgatgccggtccctcacaggcaaaccaaagctattcataatccaggcttgccggggcaccgagctagactgtggcatcgagacggat

SEQ ID NO: 326630 - DNA, 855 bp, Artificial Sequence
  derived and/or modified sequence
atgatcgaaactgacagcggtgttgatgacgacatggcatgtcacaaaatccctgtcgaagctgactttctgtacgcttacagcacagctccaggatactactcatggaggaactctaaggacggcagttggtttatccagtcattgtgtgcgatgctcaaacagtacgctgacaagctggaatttatgcatatccttactagagttaacaggaaggttgccaccgagttcgagtctttcagtttcgacgctacctttcacgctaaaaaacaaatcccctgtatagtctctatgctcacgaaagaactttacttttaccacggtagtccgatggagaacacagagaattccgttgcctctaagagtatcaagaatctggaaccaaagatcatacacggctccgaatccatggcctccggtatttccttggacaatagctacaagatggactaccccgagatgggtctctgcataatcataaataacaagaatttccacaagtcaacaggaatgactagccgctcaggaacagatgtggacgctgcgaatctgagagagacttttcgcaacttgaagtatgaagttaggaacaagaacgatcttacccgcgaagaaattgtcgagctgatgagagacgtgtcaaaagaagatcactctaagagatcaagttttgtgtgtgtgcttttgtcccacggagaggagggcattatcttcggtaccaacggccctgttgatttgaagaaaatcactaacttctttcgcggagatcgctgcaggagtctgacgggaaagccaaagctctttatcatccaggcctgtaggggtaccgagctggattgtggtatcgagacagat

SEQ ID NO: 326631 - DNA, 855 bp, Artificial Sequence
  derived and/or modified sequence
atgatcgagacagattcaggcgttgatgacgatatggcttgtcacaagattcctgtggaggcggacttcctatacgcttactcaaccgccccaggatattacagctggaggaactcgaaggatgggtcgtggttcattcagagcctgtgtgctatgcttaagcaatatgctgataagctcgagttcatgcatatactcacaagggtgaatcgaaaggtagccaccgagtttgagagcttcagcttcgacgctactttccacgcgaagaaacagataccttgcatcgtttcaatgctgacaaaagagctgtatttctatcatgggtcacctatggagaataccgaaaattctgtcgcttccaaatccataaaaaatttagagcccaagatcatacacggctccgagagtatggcctcaggaatatctctggataactcatacaaaatggactatccagagatgggactgtgtattatcataaacaataaaaattttcacaagagtacaggcatgacttcgcggtctgggaccgatgtcgacgccgctaacctgcgggaaacgtttaggaacttgaaatacgaagtcagaaacaagaacgatcttacgcgggaagagatcgtcgagctaatgagggatgtctcgaaggaggaccactccaagcgctcttcctttgtctgtgttctgctgagccacggagaggagggaattattttcggtacgaacggaccggtcgatttaaagaaaattactaatttcttccggggagatcgctgtcgctcgttaaccggaaagcccaaactattcattatccaggcatgcagaggtaccgagctggactgtggcatcgagaccgat

SEQ ID NO: 326632 - DNA, 855 bp, Artificial Sequence
  derived and/or modified sequence
atgatcgaaaccgactcgggagtggatgatgatatggcctgccataagatacccgtggaagcagatttcttgtacgcatactcaactgcgcccggatattacagctggagaaacagcaaggacggatcgtggtttatccaatctctctgcgctatgttgaaacagtacgcagacaagctcgagttcatgcacattcttacgagagtcaatagaaaagtcgctactgaattcgagtccttttcgttcgatgcaaccttccatgcaaagaagcagattccttgtattgtgtccatgcttaccaaggaactttacttctaccatggatccccgatggagaacactgaaaattcggtggcgagcaagtccattaagaatctggagcctaagataatccacggtagcgagagcatggcatcaggaatttcgctggataattcgtacaagatggactacccagaaatgggtctttgtatcatcattaacaacaagaactttcataaatcaaccggaatgaccagccggtctggaacggacgttgatgccgctaacctgcgggaaaccttcagaaacctgaaatacgaggtgcggaacaagaacgacctgactcgagaggaaatcgtcgagctgatgagggatgtgtcgaaggaagatcactcgaagagatcctcgtttgtgtgtgtcctgcttagccatggagaggagggcatcatttttggaaccaacggaccagtcgatctgaagaagattactaacttttttcgtggtgacagatgtcgctcgctgaccggaaagccgaaacttttcattatccaagcatgccgcgggactgaactggactgtggcatagaaactgac

SEQ ID NO: 326633 - DNA, 855 bp, Artificial Sequence
  derived and/or modified sequence
atgatagagacagactctggcgttgatgacgacatggcgtgtcacaagatccccgtggaggccgacttcctatacgcctattctactgctcctggctactacagttggcggaattcaaaggacggatcatggtttatccagtctctgtgtgccatgctcaagcaatatgcagataaactggaatttatgcacatccttacacgcgtgaataggaaggtcgcaactgaatttgagagcttttctttcgatgctacatttcatgcgaaaaagcagattccctgcattgtgtccatgcttaccaaagaactttacttctatcacgggagtcccatggagaatactgagaatagcgtggcatccaaatcaattaagaatctggaaccaaagattattcatgggtccgagtctatggcatcgggtatcagtctggataatagttacaagatggactacccagaaatggggctgtgtataattattaacaacaagaacttccacaagagtactggaatgactagccggtccgggaccgatgtagacgctgctaatctgcgcgagaccttccgcaaccttaaatacgaagtacggaataaaaacgacctgacgcgggaggaaatcgtagagctaatgcgggacgtctcgaaagaggaccactctaagaggagcagttttgtatgtgtgcttctgagccacggggaagagggcataatctttgggaccaatggccccgtggatctcaaaaagattacaaacttctttcgcggcgatcgatgtcgcagcctcacgggaaagcctaagctgttcatcattcaggcctgtagaggaacagaattggattgcgggatagaaaccgat

SEQ ID NO: 326634 - DNA, 855 bp, Artificial Sequence
  derived and/or modified sequence
atgatcgagactgactcaggtgtggacgacgacatggcatgccataagataccagtggaggccgatttcttgtacgcatattctacagctcccggatattattcttggcgcaactccaaggatggctcatggttcatccaaagtctgtgtgccatgctcaagcagtatgccgataagctggaattcatgcatatcctgacaagagtgaacagaaaggtggccacagagttcgaatccttttcctttgacgctacctttcatgccaagaaacagatcccttgcatcgtctccatgctgaccaaagagctttatttttaccacggttcccctatggaaaacaccgaaaacagtgtggcttctaaaagcatcaagaacctggagcccaagatcatccacggctctgagagcatggcctccggcatatctttggataactcatacaaaatggactatcccgaaatgggtctctgcattatcatcaataacaagaacttccataaaagtactggaatgacctctagatccggtaccgatgttgatgcagctaacctgcgcgagacatttaggaacctgaagtatgaggtgcgtaataagaacgacctcacacgtgaagaaattgtcgagctgatgcgcgatgtctccaaggaagatcattctaaaaggtcctcctttgtttgcgtccttctgtcccacggtgaggagggtataatcttcggcaccaatggtccagtggacctgaagaagattaccaacttcttccgtggagatcgctgccgctcccttacaggtaaacctaagctgttcatcatccaggcctgtcgtggaacagagctggactgcggtatcgaaaccgat

SEQ ID NO: 326635 - DNA, 855 bp, Artificial Sequence
  derived and/or modified sequence
atgatagaaacagactccggtgttgacgacgatatggcctgccacaaaattcccgtagaggccgatttcctctatgcgtactccacagctccgggctattactcctggcgcaattcaaaggacgggtcttggttcattcagtccctatgtgcaatgctcaagcaatacgctgataaacttgagttcatgcatatattaacccgggtgaaccgcaaagtagcaacagaattcgagtccttttcatttgacgctactttccacgccaaaaaacagatcccttgcatagtcagtatgctgacaaaagaactctatttctatcacgggtctcctatggaaaatactgagaattccgtcgcttcaaagtctattaagaaccttgagcctaagattattcacggatctgaaagtatggctagcggcatcagccttgataactcatataaaatggactatccagagatggggctgtgtataattattaacaataaaaactttcacaagtcaaccggaatgaccagccggtccggcaccgacgtcgacgccgccaatcttagggagacatttcgcaacttgaaatatgaggttagaaacaagaacgatttgacccgcgaagagatcgtggagctgatgcgggatgtgtcaaaggaggaccattccaagcggagtagcttcgtatgtgtgcttctatcccacggagaagagggcatcattttcggtaccaacgggccagtagacctaaagaagatcaccaatttcttccggggagatcggtgcagaagtttgaccgggaagccaaaactgttcatcattcaggcgtgccgcggaaccgaactcgattgtggcatagagactgat

SEQ ID NO: 326636 - DNA, 855 bp, Artificial Sequence
  derived and/or modified sequence
atgatcgagactgactccggcgtggatgatgatatggcctgccataagatcccggtcgaagcagattttctttacgcctactcgaccgcccccggctactactcctggcggaatagtaaggacggcagctggtttatccaaagcctgtgcgcaatgctcaagcagtacgcggacaaactcgaattcatgcatatcctgactcgtgtgaaccgaaaagtggcaaccgagtttgagtcctttagctttgatgcgacctttcacgcgaaaaagcaaatcccctgtattgtctcgatgctgactaaggagctgtacttttaccatggttcacctatggaaaataccgaaaattcagtggcttcgaagagcataaagaatcttgaacccaagataattcatggttcggagtcgatggcctcggggatctcgctcgataactcctacaagatggactaccctgaaatgggattgtgtattatcatcaacaataagaactttcataagagcactggaatgacgagccgctccggtactgatgtcgacgccgcaaacctgagagaaacctttcgcaacctgaagtacgaggtccgaaataagaacgatctcaccagggaagagattgtggagttgatgcgggacgtcagcaaggaggatcattccaagagaagctcctttgtatgtgtcctgctttctcacggagaagaaggtataatctttggaaccaatggaccagtggatctgaagaagattacgaacttctttagaggtgaccggtgccggtcactcaccggcaagcccaaactgttcattatccaggcttgccgcggaaccgaactcgattgtggaattgaaaccgat

SEQ ID NO: 326637 - DNA, 855 bp, Artificial Sequence
  derived and/or modified sequence
atgattgaaacagattctggtgttgatgatgatatggcatgtcataaaattccagttgaagctgatttcttatatgcatactcaacagccccaggttattattcatggagaaattcaaaagacggttcttggtttattcaaagtttatgtgctatgcttaagcaatatgcagataaacttgaatttatgcatatattaactcgtgttaatcgaaaagtcgctactgaatttgagtcattttctttcgatgcaacattccatgctaaaaaacaaattccatgtatagtatcaatgcttacaaaagaattgtatttctatcatggatcgccaatggaaaatacagaaaattcagtggcaagtaaaagtataaaaaaccttgaaccaaaaattattcatggaagtgaatctatggcttcaggtattagtcttgataactcatataaaatggattatccagaaatgggtttatgtattataattaacaataagaattttcataaatcaactggtatgactagtagatcaggaactgatgttgatgctgcaaatctaagagagactttcagaaatttaaaatatgaagttagaaacaaaaacgatttaacaagagaagaaattgttgaattaatgagagacgtttcaaaagaagatcattcaaaacgttcatcatttgtttgtgtccttttatctcatggtgaagaaggaattatttttggaacgaatggaccagttgatcttaaaaaaattactaatttctttagaggagatagatgtagaagtttaacaggaaaaccaaaactcttcataattcaagcatgtagaggaacagaattagactgtggaattgaaacagat

SEQ ID NO: 326638 - DNA, 855 bp, Artificial Sequence
  derived and/or modified sequence
atgattgaaaccgatagcggcgtggatgacgatatggcctgccataagattcctgtggaagccgattttctctacgcctactcgacggcgcccggatactactcgtggagaaattccaaggacggctcctggtttatccaatcactttgcgcaatgttgaaacaatacgcagataagctcgaattcatgcacattttgacccgggtgaataggaaggtggcaaccgaattcgaatctttttcttttgatgcaactttccatgccaagaagcagatcccatgtatcgtctccatgctcacgaaagagctctacttctaccacggatcgcccatggaaaacaccgagaatagtgtggcgtcgaaatccatcaagaaccttgaaccaaagattattcatggaagcgagtccatggcgtcgggcatttctctcgataactcatacaaaatggattaccctgagatgggactgtgtatcatcataaacaacaaaaacttccataagagcaccggaatgacttcgcgctccgggacggacgtcgatgccgcaaatcttcgagaaacttttcgcaaccttaagtacgaagtcaggaacaaaaacgatctcactagggaagagattgtggaactcatgagagacgtctcgaaggaagatcattcgaaacgttcatcgtttgtctgcgtgcttctgtcacatggtgaagagggtataatctttggcactaacggaccggtcgatctgaagaagattactaacttttttcgtggggatcggtgtcgcagccttactggtaaaccaaagctcttcatcatacaggcatgtcgtggtactgaactggattgtggtattgagactgac

SEQ ID NO: 326639 - DNA, 855 bp, Artificial Sequence
  derived and/or modified sequence
atgatcgagaccgatagcggtgtggacgacgacatggcatgccataagatccctgttgaggcagatttcttgtatgcctattccaccgctcccggctactactcatggcgaaatagtaaggacggatcttggttcatccagtccctgtgtgccatgttaaagcagtacgccgataaactcgaattcatgcatatcctcactagggtgaatcgtaaagtggcaactgagtttgaatccttttctttcgatgctacatttcacgctaagaaacagatcccgtgcatcgtttccatgctgacaaaggaactttacttctaccacgggtcacccatggaaaatactgagaattctgtggctagtaaatctatcaagaacttagaaccaaagatcatacacggctccgagtcaatggcctccggcatcagtctcgataatagctataaaatggactatcccgagatgggactgtgcataattatcaacaataagaactttcataaatccacaggcatgacatctcgatccggaacagacgtggatgcggctaatctgcgagaaaccttcagaaaccttaagtacgaggtgagaaacaaaaacgacctgactcgcgaggaaattgtcgaacttatgagggatgtcagcaaggaggaccatagtaagcgctcttcgttcgtatgcgtcctattgagtcatggcgaggagggaattattttcgggaccaacggcccggttgacctgaagaagattaccaacttctttaggggagacagatgtcggtctttgaccggtaaaccaaagctattcattattcaagcctgcagagggactgagctcgactgcggcattgagactgat

SEQ ID NO: 326640 - DNA, 855 bp, Artificial Sequence
  derived and/or modified sequence
atgatcgaaaccgacagcggcgttgacgatgacatggcctgccacaaaatcccggtggaggcagacttcctgtacgcgtactctacggccccggggtactactcatggagaaactccaaggatgggtcatggttcatccaatctctgtgcgccatgctcaaacagtacgcggataagctggagttcatgcatatcctgactagggtgaaccggaaggtcgccaccgagttcgagtcattctcatttgatgcaacttttcacgccaaaaaacaaatcccgtgcattgtctcgatgctcacgaaggagttgtacttctaccacggatcaccgatggaaaatactgaaaattccgtggcgagcaaaagcatcaagaatctggagccaaagatcattcatgggtccgagtccatggcgtcgggaatatcgttggacaattcatacaagatggattatcccgaaatgggcctgtgcatcatcatcaataacaaaaactttcacaagtcaacggggatgacctcgcgcagcgggactgacgtggatgccgcaaacctgcgcgaaacttttaggaacctgaagtacgaagtccggaataagaacgacctcactcgggaggaaatcgtggaactgatgagggacgtgtcaaaggaggaccactctaaacggtcatccttcgtctgcgtcctcctgtcccatggggaagaaggcatcatcttcggaactaacgggcccgtggatcttaagaagattactaacttcttccgcggcgatcgctgtcggtcgttgacgggcaagccgaaactgttcattatccaggcttgtcgcggaactgagctggactgcggaatcgaaactgac

SEQ ID NO: 326641 - DNA, 855 bp, Artificial Sequence
  derived and/or modified sequence
atgattgaaaccgattcgggagtcgatgatgatatggcgtgtcataagattcctgtcgaagcggatttcctgtacgcatactcaaccgcgccaggctactactcttggagaaattcaaaggatggatcctggtttatccaaagtctgtgcgcaatgttgaagcagtacgcagataaactggagtttatgcacatccttactcgagtcaatcgaaaagtcgcgaccgaatttgaatcgttctcctttgatgcaacttttcatgctaagaagcagatcccatgtatagtgtcgatgcttaccaaggaactttacttttaccatgggtcaccgatggaaaatactgaaaactcggtggcctccaagtcgataaagaaccttgaaccaaagattatccacggatcagaatctatggcatcgggaattagccttgataattcgtacaagatggactaccctgagatgggactctgcatcattatcaacaacaagaattttcacaaaagcacgggaatgacctcaaggtcgggtaccgacgttgatgcggcaaatcttagagaaacttttcggaacctgaaatacgaagtgcggaacaagaacgatctcacccgcgaagaaattgtggagcttatgcgcgatgtctccaaggaagatcattctaaacggagcagctttgtgtgtgtgctgctttcgcacggtgaagaagggattatctttggcactaacggtccagtggatctgaagaaaatcactaacttttttcgaggtgacagatgccgtagcctgactgggaagcctaaactctttatcatacaagcatgcagaggtaccgaacttgactgtggaattgagactgat

SEQ ID NO: 326642 - DNA, 855 bp, Artificial Sequence
  derived and/or modified sequence
atgatcgagaccgattccggcgttgacgatgacatggcctgccacaagatccccgtggaggctgacttcctttatgcttactctaccgcacccggctactattcttggaggaactccaaggacggctcatggttcatccagagcctttgtgctatgttgaagcagtatgccgacaaactcgagttcatgcacatcctgaccagagtgaatcggaaggtcgctaccgagttcgagtctttttcttttgatgccaccttccacgcaaagaagcagatcccatgcatcgtgagtatgcttaccaaagaactgtatttttatcacggcagtcctatggaaaacactgagaactctgtcgccagcaagagcattaagaacctggaacccaagatcattcatgggtcagagagcatggcctctgggatctcccttgacaactcttataagatggattaccccgagatggggctgtgtatcattattaacaataaaaacttccacaagagcacaggcatgactagccggagtgggaccgatgtggacgctgcgaatttgcgagaaactttcaggaaccttaagtacgaggtgcgaaacaagaatgatttgactcgcgaggagatcgtagagttgatgcgggacgtttcaaaagaggaccactccaaacgctccagtttcgtatgtgtcctcttgagccacggagaggaaggcatcatattcgggactaatggccctgtcgacctgaaaaagatcactaacttctttagaggcgaccgctgtagatccctgactgggaaacccaagctgttcatcattcaggcatgtcggggaacagagctcgactgtggcattgagacagat

SEQ ID NO: 326643 - DNA, 855 bp, Artificial Sequence
  derived and/or modified sequence
atgatcgagactgacagcggtgtcgacgacgacatggcgtgccacaagatcccggtcgaggcagatttcctgtacgcgtactccacggcgccagggtactactcctggcgcaattccaaggacggttcctggtttatccagtcgctgtgcgctatgctgaagcagtacgctgataaactcgagttcatgcacatcctcactcgggtcaatcggaaggtcgccaccgagttcgagtcgttcagcttcgatgcaacctttcacgcaaagaaacaaatcccgtgcatcgtcagcatgttgacgaaagaattgtatttctaccacggatcgccaatggaaaatactgaaaattctgtggccagcaagtccatcaaaaacctggaaccaaagatcatacatggatcagagtcgatggcctccggaatttcactggacaacagctacaaaatggattacccggagatgggactgtgcattatcatcaacaacaagaactttcataagtccactgggatgacctcgaggagcggaacggacgtcgatgctgctaacctgcgcgaaaccttccggaacttgaagtatgaagtgcggaacaaaaacgacctcaccagagaggaaatcgtggagctgatgagggacgtcagcaaagaagatcactccaagcggtcctccttcgtgtgtgtgctgttgagccacggagaggaaggcatcatcttcggcaccaatggaccagtggatctgaagaagattaccaactttttcagaggcgaccgctgcagatcgctcactggcaagccaaagctctttatcatccaagcgtgtcgcggcactgaactggactgcggaatcgaaaccgac

SEQ ID NO: 326644 - DNA, 855 bp, Artificial Sequence
  derived and/or modified sequence
atgatagaaaccgattcgggggtggatgacgatatggcatgtcataagattccagtggaagctgactttctttatgcatacagcactgcacctggatactactcctggcggaacagcaaggatggatcctggtttatccaatccctgtgcgcaatgcttaaacagtacgcggataagctggaattcatgcatattctgacgagagtcaataggaaggtcgcaaccgagtttgaatccttttcattcgacgccacgttccatgcaaaaaagcaaatcccctgtattgtgtcaatgcttactaaggaactgtacttttaccacggatcgccaatggagaacaccgaaaattcggtggccagcaaatccattaagaacttggaaccaaagataattcatggcagcgagtccatggcatcggggattagcctggataattcgtacaaaatggactacccagagatgggtctttgtatcataatcaataacaagaatttccacaagagcaccggaatgacgtctcggtccggcaccgacgtagacgctgcaaatctcagagaaacctttcggaacctcaaatacgaagtgagaaacaaaaatgatttgacccgggaggaaatcgtggaacttatgcgggatgtgtcgaaagaagatcactccaagaggtcatcattcgtgtgtgttctgctttcgcatggagaggaaggtatcattttcggtaccaacggtccagtcgatctgaagaagatcaccaactttttccggggtgatcgttgccggtcgcttaccggcaaacccaagctgtttatcatccaggcctgtcgaggtaccgaattggactgtggcatcgagactgat

SEQ ID NO: 326645 - DNA, 855 bp, Artificial Sequence
  derived and/or modified sequence
atgatagaaactgactccggagttgatgacgatatggcttgtcataagatacctgtggaagctgatttcctttatgcctattctacagctcctgggtactattcctggcggaacagtaaggatgggagttggtttatccagtccctgtgtgccatgctgaaacagtatgcagataagctcgaattcatgcacatcctaacacgcgttaacaggaaagtagctactgagttcgaaagtttctccttcgatgctacttttcacgccaaaaaacagatcccatgtatcgtctcaatgttaactaaagaactgtatttctatcacgggtctccaatggagaacacagaaaattccgttgctagtaaaagtatcaagaatctagaacctaaaataatccacggatcggaatctatggcttcagggatctccctcgataactcttacaaaatggattacccagaaatgggattgtgcatcatcatcaacaataaaaacttccacaaatctacaggaatgacaagtcggagtgggactgacgtcgatgcagcaaatcttcgggagacattccgaaatttgaagtatgaagtgcgcaacaaaaacgatctcacacgcgaggaaatagtcgaactaatgagagacgtctctaaagaggatcactctaaaaggtcttcttttgtgtgcgtgctactatcacacggggaagaggggataatctttgggactaacgggcccgtagacctaaaaaaaatcactaatttctttagaggggatagatgtcggtccctaacagggaaaccaaaattatttataatacaggcctgtagggggacagaactagactgtggaatcgaaactgac

SEQ ID NO: 326646 - DNA, 855 bp, Artificial Sequence
  derived and/or modified sequence
atgatcgaaacggactccggtgtggatgacgacatggcctgtcataagattccagttgaggccgactttctgtacgcctactctaccgccccgggttactattcatggcggaattccaaggacggatcttggttcatccagagcctctgcgccatgctgaagcagtatgctgataagctcgaattcatgcacatattgactagggtgaacagaaaagtggcaacagaattcgagagctttagtttcgacgccacatttcatgctaaaaagcagatcccctgcattgtgtccatgctgacaaaggaactctatttttatcatggttcacccatggaaaacacggaaaatagcgtagcgagcaaatctattaagaaccttgagcctaagatcatccatggctcagagagtatggccagcggaataagcttggataactcctataagatggattatccagaaatgggcctgtgtataatcattaataataaaaacttccacaagagtactggaatgacctcacgctctgggacggatgtggatgccgccaatcttcgggagactttccggaaccttaaatacgaggtgcgaaacaaaaatgacctgactcgcgaggagattgtcgaactgatgcgcgacgtttccaaagaggaccactccaagcggtccagtttcgtgtgcgtgcttcttagtcatggggaagagggtatcatattcggaaccaatgggccggtggatctcaaaaaaatcaccaacttcttccgaggcgacaggtgtcgcagtcttactgggaagcctaaactttttatcattcaggcgtgcaggggcacagaactcgactgtggcattgaaactgat

SEQ ID NO: 326647 - DNA, 855 bp, Artificial Sequence
  derived and/or modified sequence
atgatcgagacagactctggggtcgatgatgatatggcttgtcacaaaattcctgtagaagccgacttcctttatgcttatagtaccgcccctggctattatagttggcgcaacagcaaagacggcagctggtttatccagtcactgtgcgccatgctgaagcagtatgctgataaacttgaatttatgcacattcttactagggttaatagaaaggtagcaacggaattcgagtcattttccttcgatgctacattccatgccaagaagcagattccgtgtattgtctctatgctgaccaaggaactgtatttctatcatggatcccctatggaaaacacagagaacagcgtagcttccaagagtatcaaaaacctggaaccaaagatcatccacggcagcgagagcatggcctccggcatttcactggacaatagctacaaaatggactacccagagatgggactctgtataatcatcaacaacaagaacttccataagagcacaggcatgacttctagatccggaacagacgtggatgccgctaacctgcgcgaaacctttagaaacctgaaatacgaagtgaggaacaagaacgatctcacccgcgaggagattgtggagctgatgcgggacgttagtaaagaagaccatagcaaacgatcctccttcgtttgcgtcctgctcagtcacggcgaagagggcatcattttcgggacaaacggcccagtggatttgaagaagattaccaatttctttcggggggataggtgtagatcccttaccggtaagcccaaactgtttataatccaggcctgtcgcggcactgagctggactgcggtattgaaacagat

SEQ ID NO: 326648 - DNA, 855 bp, Artificial Sequence
  derived and/or modified sequence
atgatcgaaaccgactccggtgtggacgacgatatggcctgtcataagatacctgtggaagcagactttctttacgcgtactcgactgcacccgggtactactcgtggcgaaattcaaaggacgggtcatggtttattcaaagcctgtgtgccatgcttaagcaatacgctgataaactggagtttatgcatattctgacgcgagtgaacaggaaggtggccactgagtttgaatccttttcgttcgatgctacttttcatgcgaaaaagcaaattccatgtatcgtctctatgcttaccaaagaactgtacttctaccatggatccccaatggagaacactgaaaattcggtggcatcgaagtccatcaaaaaccttgagcctaagataattcatggttccgagtccatggcatcgggtatctcactggataattcatacaagatggattaccccgaaatgggtctgtgcatcataatcaacaacaagaatttccacaagtcaactggaatgacttcacgatccggaaccgacgtggacgccgcaaaccttagagagacttttagaaacttgaagtatgaagtcagaaataagaatgatcttacccgggaagagatagtcgagctgatgagggacgtctcaaaggaggaccactccaagcgcagttccttcgtgtgtgttcttttgtcccacggagaagaaggtatcatttttggaactaacggacccgtggatctcaagaagataactaacttcttccggggtgatcggtgtcgttcacttaccggaaagcctaagctgttcatcattcaggcctgtcgtggaaccgagctggactgtggcattgagactgac

SEQ ID NO: 326649 - DNA, 855 bp, Artificial Sequence
  derived and/or modified sequence
atgatcgagactgattcgggggtcgatgacgacatggcttgccacaagatccctgtggaagcagactttctctacgcgtactccaccgcgcctggatactactcatggcggaacagcaaggacgggtcgtggttcattcaatccctttgtgcgatgcttaaacaatacgcagacaaacttgagtttatgcatatcctgacccgagtgaatagaaaggtggccactgaatttgaatccttctcctttgatgccacgttccacgcaaagaagcagattccatgtattgtctcaatgctgaccaaggaactttacttttaccatgggtcgcccatggagaacactgagaactctgtcgcctcaaagtcgatcaagaaccttgagccaaagattattcacggaagcgagagcatggcttcaggaatatctctcgataattcctataagatggattaccctgagatgggcctttgcatcatcattaacaacaagaattttcacaagtcaactggtatgacttcgagatccggtaccgatgtcgatgcagcaaacctgagggaaacgtttaggaatctgaagtacgaagtccgcaataagaatgacctgacgcgagaggaaattgtggaactcatgagagacgtgtcgaaggaagatcattcaaagagatcctcgtttgtgtgcgttctcttgtctcacggagaagaaggaattatcttcgggactaatggtcccgtggatctgaagaagattaccaatttcttccggggggatcgctgtagaagccttaccggaaagcccaaactgtttatcatacaggcttgtcgcggcaccgaactggattgtggtatcgagacggat

SEQ ID NO: 326650 - DNA, 855 bp, Artificial Sequence
  derived and/or modified sequence
atgattgaaactgactcaggtgtcgatgatgacatggcctgtcataaaatcccggtggaggccgatttcctctacgcctactctacggccccaggctactactcgtggcgaaatagcaaagatggaagttggttcattcaaagtttatgtgccatgctcaaacagtatgctgataaactagagttcatgcatatcctgacaagggtcaatcggaaagtggctacagaattcgagtcgttcagctttgatgccactttccacgccaaaaaacagattccatgtatcgtgtcgatgttaaccaaggaactgtatttttatcatggttcaccgatggagaatactgaaaatagcgttgctagcaagagcattaagaacctcgagccaaagattatccacggctccgaatcgatggccagcgggatctcactggacaacagctataaaatggattaccctgagatgggactgtgcatcataatcaacaataaaaatttccataagagcaccggcatgaccagccgctctggaaccgatgtggacgcggccaacctgagagagaccttcaggaatctgaaatatgaggtcagaaacaagaatgatctgacaagagaggaaatcgtggaacttatgagggatgtgtctaaggaggaccacagcaagagatcttcattcgtgtgtgtgctgctgtcccacggagaggaggggatcatattcggcaccaacggaccggtagacttaaaaaagattacgaatttctttagaggagatcgatgtaggtcccttaccgggaagccgaagctcttcattatccaggcctgccgcgggacggaactggattgcggtatcgaaactgat

SEQ ID NO: 326651 - DNA, 855 bp, Artificial Sequence
  derived and/or modified sequence
atgatagagaccgactcaggagtcgatgacgacatggcctgtcacaaaattccggtcgaggctgactttctctacgcttactctactgcaccaggatactattcttggcggaattcgaaggatggcagctggtttatacaatctctgtgcgcaatgttgaaacagtacgctgacaaacttgagtttatgcatatcctaacacgggtcaacaggaaagtggccactgagttcgaaagttttagtttcgatgccacattccatgccaagaagcagattccttgcatcgtgagcatgctcacaaaggagctgtacttttatcacggaagccctatggaaaataccgagaactcagttgcatcaaaatccattaaaaacttggagccgaagatcattcatgggtccgaatcaatggcaagtggtattagtttagacaattcatataagatggattatcccgaaatgggactctgtataataataaataacaagaactttcataaatccaccggtatgaccagtcgatctgggaccgacgttgacgccgcaaatctgcgggaaacatttcggaatctcaagtatgaggtgcgcaacaagaacgacctaactcgcgaagaaattgttgagctgatgcgggacgttagcaaggaggaccactctaagaggagctcatttgtttgtgttcttctgagtcacggcgaggagggcatcattttcggcaccaatggacctgtagacctgaaaaaaatcactaactttttccggggggatcgctgccgaagcctaactgggaagcctaagctgtttataatccaggcgtgtcgcggtaccgagcttgactgtggcatcgagactgat

SEQ ID NO: 326652 - DNA, 855 bp, Artificial Sequence
  derived and/or modified sequence
atgatcgaaaccgatagcggagtggacgacgacatggcatgtcataagatccctgtggaagctgactttctgtatgcgtactccaccgcaccaggttattatagctggcgcaattctaaagatggctcctggttcatccagagcctgtgtgctatgctgaaacagtacgctgataagctggaatttatgcatattttgacacgagtgaatagaaaggtggcgactgaatttgaatccttctcttttgacgcaaccttccacgccaaaaaacaaatcccctgcatcgtgtcaatgttgacaaaagagctgtatttctaccacggcagccctatggaaaacactgaaaatagtgttgcttctaagtccattaaaaaccttgagcctaagattattcacgggtctgagtcaatggcatccgggattagtctggataactcctacaagatggattatcccgagatggggctctgtattatcattaacaataagaatttccacaaatctaccgggatgacatcaagaagtggaaccgacgtggatgctgcaaacttgcgtgaaacctttcgcaacttgaagtacgaggtgcgcaacaaaaacgacctaactagagaggagatcgtcgagttaatgcgggatgtgagcaaggaagatcattcaaagcgcagttccttcgtgtgcgtgctccttagccatggagaagagggaatcattttcggtaccaatggaccagtggacttgaaaaagataacaaacttctttcgtggcgaccgttgcagatctttgacgggaaagcccaagctgtttattatccaagcttgtcgcggaacagagcttgactgcggcattgagaccgat

SEQ ID NO: 326653 - DNA, 855 bp, Artificial Sequence
  derived and/or modified sequence
atgattgagactgatagcggagttgacgatgacatggcctgtcataagattccggtcgaggcggacttcctgtacgcttactcaactgcacccggctattattcttggcgcaattcgaaagatgggtcatggttcattcagagtctatgtgctatgcttaagcagtatgcagacaaactggaatttatgcacattttgaccagagtaaatcgcaaggtggccactgaattcgaatcgttcagtttcgatgcgacctttcacgcaaagaaacagattccctgcatcgtgagcatgttgaccaaggagctctacttttatcatggcagtcccatggaaaacaccgagaattcagtcgcctcaaagtctattaaaaaccttgaacctaaaattatacatgggtccgagagtatggcaagtgggattagtttagataattcgtacaaaatggattacccagaaatgggcctgtgcatcatcattaataataagaacttccacaagtccaccggtatgacctctcgatccggaacggacgtggatgctgctaatctgcgcgagacctttcggaacctgaaatacgaagttcggaataagaatgacctgacgcgagaggaaatcgtggaactcatgagggatgtaagtaaagaagaccatagtaagcggagttcttttgtgtgtgtgctgctgtctcatggcgaggagggaattattttcggaacaaacggcccagtagatctcaaaaagatcaccaatttctttcgcggagataggtgccggtctctgaccgggaagccaaagttattcatcattcaggcgtgcaggggtaccgaactcgattgcggcatcgagactgat

SEQ ID NO: 326654 - DNA, 855 bp, Artificial Sequence
  derived and/or modified sequence
atgattgaaaccgactcaggagtggacgatgacatggcctgtcacaaaatccccgtcgaggcagactttctgtatgcatactcaaccgccccgggctactatagctggaggaatagcaaagacggtagctggtttattcagagcctttgcgccatgttgaaacagtacgctgacaaactggaattcatgcacatccttacaagggtgaaccggaaggtggctacagaatttgagtctttttcattcgacgctacattccacgccaaaaaacagatcccttgcattgtaagcatgttgacgaaggagctatacttttaccacggtagtcccatggagaacaccgagaatagtgttgcatccaagtccattaagaatcttgagcctaagattattcatggctctgagagtatggccagcggcataagcctggataatagctataagatggattatccggagatggggctgtgcatcataatcaacaacaaaaattttcataaatctaccggaatgacctcacggtcagggaccgatgttgatgctgccaacctgcgagaaacatttagaaatctgaaatatgaggtacggaataaaaacgatctgacaagagaagaaattgtcgagctgatgcgagatgtttctaaggaagaccattcgaaaagatcatccttcgtgtgtgtgctcctttcccatggagaagagggcatcatatttggaaccaacggacccgtggacttgaagaagatcactaattttttccgtggtgataggtgcagatccctgaccgggaagccaaaactgtttataattcaggcttgccgggggacagaacttgattgcggcattgaaacggat

SEQ ID NO: 326655 - DNA, 855 bp, Artificial Sequence
  derived and/or modified sequence
atgatcgaaacagattcgggtgtggatgatgacatggcctgtcataagattcctgttgaagcagactttctctatgcttactccacagcccccgggtactattcctggcggaacagcaaagacggcagttggttcatccaatctctgtgtgccatgctaaagcagtacgccgacaaattagagtttatgcacatactgacccgggttaatcggaaggtggccacagagttcgaaagcttcagttttgatgccaccttccacgccaaaaaacagattccatgcatcgtctcaatgctaacaaaggagctgtacttctatcacgggagccctatggagaatacagaaaattctgtggcaagtaaaagtattaaaaatctggaacccaagattatacatggatccgaaagcatggcatccggaatcagcttagataattcttataagatggactacccagaaatggggctctgcattataattaataacaaaaattttcacaaatcaacagggatgaccagtaggtctggcaccgatgtcgatgccgctaatctcagagaaaccttcaggaacttgaagtatgaggtgcgcaataaaaatgatctaaccagagaggagattgtggagcttatgagagatgtgagcaaggaggatcatagcaaaagatcctcatttgtctgcgtcttactgtcccacggagaagaaggcatcatttttggaaccaacggtcctgtagacctcaaaaagataaccaacttctttaggggcgataggtgccgatccctcacggggaagcccaaactttttattattcaagcctgcaggggcacagagctcgactgcgggattgagactgac

SEQ ID NO: 326656 - DNA, 855 bp, Artificial Sequence
  derived and/or modified sequence
atgatcgagactgactcgggggtggatgacgacatggcttgccacaagatcccagtggaagccgatttcctgtacgcctactccacggccccgggatactattcctggcgcaactccaaggacggaagctggtttatccagtctctctgtgcgatgctgaagcaatacgccgataaacttgagttcatgcatattctgacccgcgtcaatcgaaaagtggcaaccgaattcgagagcttttccttcgacgcgacgttccacgcgaaaaagcagatcccgtgcattgtgagcatgcttacgaaggaactgtacttttaccatggcagcccaatggagaatactgagaactccgtggcatcgaagtcgatcaagaatctggaaccgaagatcatccacggatcagagtctatggccagcggtatctcgttggataactcatacaaaatggattaccctgaaatgggtttgtgtatcatcatcaacaacaagaacttccataaatcgactggtatgacgtcccggtcagggactgatgtggacgcggccaatctgagggaaaccttccggaacctgaagtacgaagtgcgcaataagaacgatttgactcgggaagaaattgtcgagctgatgagggacgtctccaaagaggaccattctaaacgcagctcgttcgtgtgcgtgctcctgagtcatggagaagaaggcatcatttttggaaccaacggcccagtggatctgaagaagattaccaacttcttccgcggtgaccgctgccggagtctgactggaaagcccaagttgtttatcatccaggcttgtaggggtaccgaactggattgcggcattgagactgat

SEQ ID NO: 326657 - DNA, 855 bp, Artificial Sequence
  derived and/or modified sequence
atgattgaaactgattcaggggtggacgatgatatggcgtgtcataagatccccgtggaggctgattttctctatgcctactcaaccgccccggggtactatagctggcgcaattctaaagatggatcctggttcatccagtccctgtgcgccatgctgaaacagtacgcggataagctagagtttatgcacatcctcaccagggtaaacaggaaggtggccaccgaattcgagagcttctcgttcgatgccaccttccacgcaaaaaaacagatcccatgtatcgtgagcatgctgacaaaagagctgtatttttatcatggcagtccaatggagaacaccgaaaattcagttgcgagcaagtccatcaaaaatctagagccgaagatcattcatggcagcgaaagcatggcaagtggaatcagcctggacaattcttataagatggattaccctgagatggggctatgcatcatcataaataacaagaattttcataagagtacgggtatgaccagtcgatccggcacagacgtcgacgcggcaaatttacgagaaacatttaggaatctaaaatatgaggtccggaataagaacgatttgaccagggaggaaatcgtagagctgatgcgggacgtgagtaaagaagaccactccaagagatcctccttcgtgtgcgtgctcctgagccatggtgaggaaggcattattttcgggactaacggtcccgtagatttgaagaagatcaccaacttcttcaggggagatagatgtagatcgctgaccggaaagcccaaactgtttatcattcaggcctgtcgagggacggagctggactgtgggattgagacagat

SEQ ID NO: 326658 - DNA, 855 bp, Artificial Sequence
  derived and/or modified sequence
atgatcgagaccgactcaggtgtggacgacgatatggcttgccacaaaatccccgtggaggcagattttctgtacgcctacagtacagcacctggttattactcttggaggaatagtaaggatggcagttggtttatacagtccctttgcgccatgttgaaacagtacgctgacaaactggaattcatgcacatcctcactcgagtcaatcgaaaggttgccaccgaatttgagtccttctctttcgacgccacgttccacgctaagaaacagatcccgtgcattgtgtctatgttaaccaaagagctttacttttatcatggctcccctatggagaacacagagaatagcgtggcgtctaaatcaatcaagaatctcgagcccaaaattatccacgggagtgagagcatggcctccgggatttcacttgataatagctataagatggactaccctgaaatgggcctgtgcatcattatcaataacaagaacttccataaatctactgggatgaccagtcgctccgggaccgacgtcgacgcagcaaacctgagggaaacgtttagaaatcttaagtatgaggtacgaaataagaacgaccttactcgcgaggagatcgtggagctcatgagggacgtgagcaaggaggaccatagtaaaagaagttctttcgtatgcgtgcttctgtcccatggggaagaaggcattatctttgggacaaacggacccgtggatctcaaaaagataacaaacttcttcagaggagacaggtgccggagcctgacaggtaagccaaaattgttcatcattcaggcctgtcgggggaccgaacttgactgcggaattgaaaccgat

SEQ ID NO: 326659 - DNA, 855 bp, Artificial Sequence
  derived and/or modified sequence
atgatcgagaccgattctggcgttgacgatgatatggcttgccacaaaatcccagtggaggcggactttctgtacgcctattccactgcgccaggttactatagctggcgcaattccaaggatggatcatggtttatccagtccctgtgcgccatgctcaaacagtacgccgacaagctggagtttatgcacattttgaccagagtcaacaggaaagtggctaccgaatttgaaagcttttcctttgacgccaccttccacgccaaaaagcagatcccctgtatcgtctccatgctaaccaaagaactttatttttaccacggttctccaatggaaaacaccgagaattctgttgcctctaaatctattaagaaccttgaacccaaaatcatacatggctcggaaagcatggcatctgggatcagcctcgataattcctacaaaatggattaccccgaaatgggcttgtgtatcatcatcaataacaaaaatttccacaaaagcacagggatgacttctcggtcaggtactgacgtggacgctgccaatctccgcgagacgttcagaaacctcaagtacgaagtgaggaataagaatgacctgacaagggaagaaatagtggaactgatgcgggatgtgagcaaggaagatcattccaaacggtctagcttcgtttgcgtgctcttgtcacatggggaggaaggcattatctttggaaccaatgggccggtggacctgaagaaaattactaacttttttcgcggtgaccgatgtaggagcctcaccggcaagccaaaactcttcattattcaggcctgccggggcaccgagctggattgcgggatcgaaactgat

SEQ ID NO: 326660 - DNA, 855 bp, Artificial Sequence
  derived and/or modified sequence
atgatcgagaccgattcgggagtcgacgacgacatggcgtgccacaaaataccggtcgaagcagactttctgtacgcctactccactgcgccaggttactattcttggcgcaattccaaggacggttcttggtttattcagtccctgtgcgccatgctgaaacagtatgccgacaagctggagttcatgcatattctgacccgtgttaacagaaaggtcgcaactgagtttgagtcattttcctttgacgccaccttccacgcgaaaaagcagatcccctgtatcgtgtcaatgcttacgaaggaactgtacttctaccacgggtctccgatggaaaacactgagaactccgtggcgagcaaaagcattaagaatcttgaacccaaaattattcacggctctgaatccatggcgtcaggaatttcattggataattcttacaagatggactatcccgaaatgggcctgtgtattataatcaataataaaaacttccacaagagtacggggatgacttcaaggtcaggcacagacgtggacgcggctaacctgcgcgagacgtttagaaatcttaagtatgaggtgcgcaacaaaaatgacctgacgcgcgaggaaatcgtggagctgatgagagatgtgagtaaagaggatcatagcaagcgtagtagcttcgtgtgcgtcctgctgtctcatggcgaagagggaataatcttcgggacaaatgggcccgttgacctgaagaagataaccaattttttccggggggaccgttgccggagcttgaccggaaagccgaagctgtttatcatacaggcatgccgtggaactgaacttgattgtggaatcgagaccgac

SEQ ID NO: 326661 - DNA, 855 bp, Artificial Sequence
  derived and/or modified sequence
atgatcgaaaccgattccggagttgatgacgatatggcatgtcacaagattcccgtggaagcagactttctttacgcctactccactgcaccgggttactacagctggcgcaattcgaaagatggttcgtggtttatccaatcactgtgcgcaatgcttaaacaatacgccgataagctcgaattcatgcacatcctgaccagagtgaaccgaaaagtggcaaccgaattcgaatcgttttcctttgatgcaacttttcatgccaaaaagcaaatcccatgtatcgtgtccatgcttaccaaagaactgtacttctatcatggctctcctatggagaatacggaaaattcagtggcatccaaatccattaagaatcttgagccaaagattatacatgggtcagagagcatggcgtccggaataagcctggacaatagctacaaaatggactaccctgaaatgggactgtgcatcataatcaacaacaagaacttccataagtcaaccggtatgacgtcgaggtccgggaccgatgtcgacgcagcgaatctgagagagactttccgaaacctcaagtacgaagtcagaaacaaaaatgacctgactcgggaggagatagtggagctcatgagagacgtgtcaaaagaagatcactccaagagatcgtcattcgtctgcgtgttgttgtcgcatggtgaagaaggcatcatttttggtactaacgggccagtggaccttaagaagattacgaacttttttcgtggggaccgctgtcggtccctgactggtaaacccaaacttttcatcatccaggcgtgtagaggaaccgagctggattgtgggattgaaactgac

SEQ ID NO: 326662 - DNA, 855 bp, Artificial Sequence
  derived and/or modified sequence
atgattgagactgattctggcgtcgacgacgacatggcatgtcataaaattccggttgaagccgactttctgtatgcgtatagcacggcccccggctactattcctggcgaaacagtaaggacgggtcatggttcattcagtcactttgtgctatgcttaaacagtacgccgataaactggagtttatgcatatcctgacccgtgttaacagaaaggtggccaccgaatttgagagcttctcttttgacgccacctttcacgcaaaaaaacagataccatgcattgtgtcaatgctaacgaaagaactttacttttaccatggcagccctatggagaacactgagaattccgtggcttccaagagtattaagaacctggaacctaagatcatccatggttccgaatctatggcctcaggcatttcccttgataattcttataaaatggattaccccgagatgggcctgtgtataatcatcaacaataaaaactttcacaaatccaccggcatgacgagccgaagtggaacagatgtggacgcggccaacctccgtgaaaccttcagaaacttgaagtatgaagtaaggaataaaaatgatctcacaagggaggagattgtcgagcttatgagagacgtaagcaaggaggatcatagtaagaggtccagtttcgtgtgcgtgttgctatctcacggggaagaaggcatcatctttgggaccaacggtccggtggacctgaagaaaatcacgaattttttcagaggggataggtgcagatctctgactggaaaacctaaactgtttattattcaggcatgccgcggcaccgaactcgattgtggcatcgagaccgat

SEQ ID NO: 326663 - DNA, 855 bp, Artificial Sequence
  derived and/or modified sequence
atgatcgagactgatagcggggtggatgacgatatggcgtgccataagatccctgtggaagccgattttctgtacgcatactcgactgcacctggttactacagctggcgcaactcgaaggatgggtcatggtttatccaatcattgtgtgcaatgcttaagcagtacgccgacaagctcgaattcatgcatatcctcaccagggtgaacagaaaggtggcgaccgaattcgagagcttctcgttcgacgctacctttcatgcaaagaagcaaataccttgtattgtgagcatgctgaccaaggaactctacttttaccatggttcaccgatggagaacaccgaaaactccgtcgcatccaaaagcattaagaatttggaacccaagattatacatggcagcgaaagcatggcatccggtatttcccttgacaactcctataagatggactacccagagatgggtctgtgtatcatcattaacaacaagaacttccataagtcaaccgggatgacctcgcgttcagggactgatgtcgatgctgcaaaccttcgcgagacttttagaaaccttaagtacgaggtgagaaataagaatgatcttacccgggaagagattgtggaacttatgagagatgtgtctaaagaagatcactccaagcgtagcagctttgtgtgcgtgctgctgtcacatggagaggaaggaatcatttttggcactaacggccccgtcgatctcaagaagattaccaatttctttcgaggtgataggtgccgctccctgactgggaagcccaaactgtttatcattcaggcatgtagaggcactgaactggattgcggaattgaaactgat

SEQ ID NO: 326664 - DNA, 855 bp, Artificial Sequence
  derived and/or modified sequence
atgattgagaccgacagtggcgtcgacgatgacatggcctgccataagatacctgttgaagccgactttctctacgcctactccactgccccaggctattacagttggcggaatagtaaggacggttcttggtttatccagtccctctgcgctatgttaaaacaatatgctgacaaattagagtttatgcatatactgacacgggtgaatcggaaggtcgctaccgaattcgagtccttctcattcgacgccacttttcacgccaaaaagcagatcccttgcatcgttagcatgcttacgaaagagctctacttttatcatggcagtccaatggagaacactgaaaatagtgttgcaagtaaatccatcaagaatctggagcctaagatcatacacgggagcgagagcatggcgtccgggatatccctggacaactcctataagatggactacccagaaatgggactgtgtatcatcatcaataataaaaacttccacaaaagcactggaatgacctcacggtctggcaccgacgttgacgccgcaaacctgagggagacctttcgaaaccttaaatatgaggttcgaaacaaaaacgatttaacccgggaagaaattgtggagctgatgcgggacgtgagtaaagaagatcacagtaaaaggagcagctttgtttgcgtgctgctctcgcacggcgaggaaggaatcatctttggtacaaacggacctgtggacctcaagaagataactaatttctttagaggggacagatgccgcagcctgacaggcaaacctaagctctttatcatccaggcttgccgggggactgaactggattgtgggatagaaacagat

SEQ ID NO: 326665 - DNA, 855 bp, Artificial Sequence
  derived and/or modified sequence
atgatcgaaactgactcaggtgtggatgatgatatggcgtgtcacaagatcccagtagaggcggacttcctgtacgcctactccactgcacctggatactattcatggagaaatagcaaggacggctcatggtttatacagtcgttgtgcgcgatgctgaaacagtacgcagacaagctggagttcatgcatattctgacccgggtgaatcgcaaggtggcaactgaattcgaatcttttagcttcgacgccaccttccacgccaagaagcaaatcccttgcatagtgtcaatgctgaccaaagaactgtacttttaccacggctcgccgatggagaacacggaaaattcagtcgcctcgaaatccattaagaatttggaacctaagatcattcatggttccgaaagcatggccagcgggatcagcctcgacaattcctacaagatggattacccggaaatgggactgtgcatcattatcaacaataagaacttccacaagtcgactggaatgacctcacggtccggcaccgacgttgacgctgctaacctccgggaaactttccggaacctcaagtacgaggtgcggaacaaaaacgacctgacccgagaagagattgtggagctcatgagagatgtctcgaaagaagatcattcgaagaggtcgtcatttgtgtgtgtccttttgtcccatggtgaagagggtatcatcttcggaacgaacggcccggtggatctcaagaagatcactaatttctttcgcggagatcgctgcaggagcctgaccggaaaaccgaagctcttcataatccaagcatgccgcggaaccgagcttgactgcgggatcgaaacggac

SEQ ID NO: 326666 - DNA, 855 bp, Artificial Sequence
  derived and/or modified sequence
atgatcgaaaccgactccggagtagacgacgatatggcctgccacaagataccggtcgaagcggattttctgtacgcctactcgactgcacccggttattacagctggcgcaacagtaaggacggctcctggttcatccagtctctttgcgccatgttgaaacaatacgctgacaagctggaattcatgcacatcctgaccagagtgaaccggaaggttgcgaccgagttcgaatcgttctcatttgacgccaccttccacgcgaaaaagcaaattccttgtatcgtgagtatgcttacgaaggaattgtatttctaccacggatccccaatggaaaataccgagaattcagtggcctcgaaatcaatcaaaaacctcgagccgaaaatcatccatggatccgagagtatggcaagcggaatctcgctcgacaactcgtacaaaatggattacccggagatggggctctgcatcattatcaacaataagaactttcataagtccaccgggatgacttcgcggagcgggactgatgtcgacgcagctaacctgcgtgaaaccttcagaaacctgaaatacgaggtgagaaacaagaacgacctcactcgcgaagagatcgtggagcttatgcgcgatgtgtccaaggaagatcactcaaagagatcctccttcgtgtgtgtgcttctcagccatggtgaagagggaattatcttcggaacgaatggaccggtcgacctgaaaaagatcactaatttctttcgcggcgatcggtgccggtcactcaccggtaagccaaagctgttcatcatccaggcgtgccgcggaactgaactggattgtggtatcgagactgac

SEQ ID NO: 326667 - DNA, 855 bp, Artificial Sequence
  derived and/or modified sequence
atgatcgaaaccgacagcggggtggacgacgatatggcctgccacaagatccctgtggaggctgacttcctctacgcttattcaactgctcctggttattatagctggcggaactctaaggatggctcctggtttattcagtccctctgcgctatgctaaaacaatacgccgataagttggagttcatgcacatcctcacaagagtgaatcgtaaggtggctaccgaattcgagtctttctcgtttgacgccacatttcatgccaaaaagcagatcccatgtatagtatccatgttgaccaaggaattatacttttaccacggctctcctatggagaatacagagaatagtgtggcctccaaaagcatcaaaaatctggagccgaaaataattcatggcagtgagagcatggcttcaggtatttccctggataactcttataagatggattatcctgagatgggattatgcattattattaataacaaaaattttcataagtcaaccgggatgaccagcaggagcggcacagacgtcgatgcagctaacctgagagagacctttcggaacttgaagtatgaggtgaggaacaagaacgaccttacaagggaagagattgtcgaactaatgagggatgttagcaaggaggaccattctaaacggagttcttttgtgtgtgtcctgttgtcgcacggtgaagagggcataatcttcggaaccaacgggcccgtggacctgaagaagatcactaacttttttagaggcgacagatgcagaagcttgacaggaaagccaaaactgtttatcatccaagcttgtaggggcaccgagctggactgcggcattgagacggac

SEQ ID NO: 326668 - DNA, 855 bp, Artificial Sequence
  derived and/or modified sequence
atgattgaaacagattcaggggttgacgatgatatggcttgtcataaaatccccgttgaggcagatttcctttatgcttactctacagctcctggttactattcctggagaaacagtaaagatgggagttggtttatccagtcattatgcgccatgcttaaacagtacgccgataagttggagtttatgcacatattaaccagagtcaatcgtaaagtagccacagaattcgaaagcttctcgttcgacgccacctttcatgccaagaaacagattccatgtattgtgtctatgcttaccaaagaactatatttttatcacggctcgcctatggaaaatacagaaaacagcgtcgcatctaaatcaattaagaatcttgagccaaagattatacatgggtcagagtcaatggcttccggtatcagtctggacaattcctataaaatggattatcctgaaatggggctctgtatcatcatcaacaataagaactttcataagtctacaggtatgacgagtaggtcagggaccgatgttgatgctgcaaacctcagggaaacttttaggaatcttaagtatgaagtccgcaacaagaacgaccttactcgcgaagaaattgttgaactaatgagagacgttagcaaggaggatcattccaagcgtagtagcttcgtttgtgttctcttgagccatggtgaagaaggcattattttcggtaccaacggtccagttgatttgaagaagattaccaattttttcagaggcgacaggtgccgctcccttactggcaagcccaagttattcatcattcaggcttgcagaggcacagaattagattgcggtatcgagactgat

SEQ ID NO: 326669 - DNA, 855 bp, Artificial Sequence
  derived and/or modified sequence
atgatcgagaccgattctggagtcgacgatgacatggcctgtcacaaaatacctgtcgaagccgattttctgtacgcctattccacagcccccggttattacagctggcgaaattccaaggatggcagctggttcatccagtctctgtgcgcaatgctgaagcagtacgctgataaactggaatttatgcatattctgacccgcgttaaccggaaggtggcgacagaattcgagagcttttcttttgacgcgacctttcatgcaaaaaagcagatcccgtgcatcgttagcatgttgacaaaggagctatatttctaccacggcagcccaatggaaaataccgaaaatagtgtagcgtctaaaagcatcaaaaacctggaaccgaagattattcacggtagcgagagcatggcatcgggtatcagcctggacaatagctataagatggattacccagagatggggctgtgtattatcatcaacaataagaacttccataagtccaccggcatgaccagcagatcaggcaccgacgtcgacgcagcaaacctgagagagaccttcaggaacttaaaatatgaagtgcgcaataagaatgaccttacacgggaggagattgtggaattgatgcgcgacgttagcaaagaggatcacagcaaacgtagcagcttcgtgtgcgtattgctaagccatggggaagagggcatcatattcggtaccaacggtccagtcgacctcaaaaagataactaacttcttccgaggtgatcgctgtcgttctctgaccggtaaaccaaagttgtttataattcaagcgtgtcgtggcaccgagctggattgtggcattgaaactgac

SEQ ID NO: 326670 - DNA, 855 bp, Artificial Sequence
  derived and/or modified sequence
atgattgaaactgactcaggagtggatgatgacatggcctgccataagatcccagtcgaggcagactttctgtacgcctactccactgcgcccggatactacagttggcgcaattcgaaggacggctcctggttcattcagagcctctgcgcaatgttgaagcaatacgcagacaaactggagttcatgcacattctgactcgggtgaatcgcaaggtggctactgaattcgagtcgttctccttcgatgcaacctttcatgccaagaagcagatcccgtgcatcgtgtccatgctcaccaaggagctgtacttctaccatgggagcccgatggagaacactgaaaactctgtcgcctccaagtcaatcaagaatcttgagcccaaaatcattcacggttcagagtctatggcctcaggaatctcactggacaactcttacaaaatggattacccggaaatggggttgtgcatcatcatcaataacaaaaacttccacaagtcgaccgggatgacctccagaagcggaactgacgtggatgccgcgaatcttcgcgaaacctttagaaacttgaagtacgaagtgaggaacaaaaacgatctgacccgggaagaaattgtggaactgatgcgcgatgtgagcaaagaggatcattcaaagagatcctcctttgtgtgtgtgctgctgtcccatggagaggaaggaatcatcttcggaaccaacggtccggtggatctgaagaagatcacgaactttttccgcggagatcgctgtcgctcgcttacgggaaagccgaagctctttatcattcaagcatgcagggggactgaattggattgcggcatcgaaactgac

SEQ ID NO: 326671 - DNA, 855 bp, Artificial Sequence
  derived and/or modified sequence
atgatcgagacggatagcggggttgatgacgatatggcctgtcacaagatcccggtcgaggcggatttcttgtacgcctactccaccgcgcccggatactacagctggcgtaattcgaaagatggttcctggttcattcagtcgctatgcgcaatgctgaagcagtatgccgacaagcttgagttcatgcacatcctgactcgcgtcaaccggaaagttgcaacggaattcgagtcgttcagcttcgacgcaacattccatgccaagaagcagataccctgcatcgtcagcatgcttaccaaggagctttatttctatcacgggtcgccgatggaaaatactgaaaacagcgttgcttcgaagagcatcaaaaatctggagccgaagattatccacggttccgagtccatggccagcggaatctccttggataacagctacaagatggattatcctgaaatgggcctctgcatcatcatcaacaacaagaactttcataagtcaaccggaatgacctctcgctcaggcacggacgttgacgcagctaacttgcgagagacattccgcaacctgaagtatgaagttcggaacaagaatgaccttacccgcgaagagatcgtcgagctaatgcgtgacgtgagcaaggaggatcactcaaagaggtcctcgttcgtgtgcgtactgctatctcacggagaggagggcattatattcgggaccaacggtccagtggacttgaaaaagattaccaactttttccgtggagaccgctgtcgctctcttactggaaagcctaagctgtttatcatccaggcctgcagaggtaccgagctcgactgtggcattgaaacagac

SEQ ID NO: 326672 - DNA, 855 bp, Artificial Sequence
  derived and/or modified sequence
atgattgaaactgattccggagttgatgatgacatggcatgtcacaagatccctgtggaggcagatttcctgtacgcatacagcaccgcgccgggctactactcatggcgcaatagcaaggatggtagctggtttattcagagcctctgtgcaatgcttaagcagtacgcagacaagctggaattcatgcatattctgacccgggtgaaccgcaaagtcgcaactgaatttgagtcgtttagctttgacgcgaccttccatgcaaagaagcaaattccttgcattgtgtccatgctgactaaggaattgtacttctaccacggctcccctatggaaaataccgaaaattccgttgcctcgaagtccattaagaaccttgaacctaagatcattcatggatcggaatcaatggcatcgggtatttcgctcgacaattcgtacaagatggactacccagaaatgggtctttgtatcattatcaacaacaagaatttccacaagtcgactgggatgacctcccgttcaggtaccgatgtcgacgcagcgaacctgcgcgaaacctttagaaacctgaaatatgaagtgcgcaacaagaatgaccttacccgcgaggaaattgtggagttgatgcgagatgtgtccaaggaagatcattcaaagcggtcgtcgtttgtgtgtgttcttctgtctcatggagaggaaggcatcatattcggcaccaacgggccagtcgatctgaagaagattaccaactttttcagaggcgatagatgtaggtcgctgactggaaagcccaaacttttcatcatccaggcatgcaggggaactgagctcgattgtggaattgaaaccgac

SEQ ID NO: 326673 - DNA, 855 bp, Artificial Sequence
  derived and/or modified sequence
atgatcgagaccgacagtggagtcgatgacgacatggcttgccacaagataccagtggaggccgattttctatatgcctattccaccgcaccgggctattacagctggagaaatagcaaggatggtagctggttcatccagtcattgtgcgcgatgcttaagcagtatgccgataagctggaatttatgcacattctcacccgtgtgaaccgcaaggttgcgacggagtttgaaagtttcagtttcgatgcaacctttcatgctaagaaacagatcccatgtattgtaagtatgttgacgaaggaactgtatttctaccatggaagccccatggaaaatacagagaacagcgtggcctccaagtcaattaagaatttggagccaaagattatccatggcagcgagagcatggctagcggcattagcctggacaattcctacaagatggactaccccgagatgggcctgtgtatcatcattaacaataagaattttcataagtcaaccggtatgacatccaggagcggtactgatgtcgatgccgcaaacctgcgtgagacattcaggaacctcaagtacgaggtgcgcaataaaaacgacctcaccagggaagaaatagtcgagcttatgcgtgatgtgtccaaggaggaccattccaaacggagcagctttgtctgcgtcttgttgagtcatggagaggagggtatcatttttggaacaaatggcccagttgatctgaagaagattaccaatttctttcgaggcgatcgttgtagatcgttgaccggaaagcccaagttgtttatcatccaggcttgtcgcggcactgagctcgactgcggaatagagaccgac

SEQ ID NO: 326674 - DNA, 855 bp, Artificial Sequence
  derived and/or modified sequence
atgattgagactgattcgggagtggatgacgacatggcatgccacaaaatccccgttgaagcagattttctttacgcttactcaaccgcacccggttactactcgtggcgtaacagcaaggatggatcgtggtttattcagagcctgtgcgcaatgcttaaacagtatgccgacaagctcgagttcatgcacatcttgactcgggtgaacagaaaggtcgctaccgaatttgagtcgtttagcttcgacgcgacctttcatgcaaagaagcaaatcccttgtatcgtgtcaatgcttaccaaggaactttacttctaccatgggtcacctatggaaaatactgaaaattccgtcgcgtccaaatcgattaagaacctggaaccaaagatcattcatggcagcgagtcaatggcgtcaggaatttccctggataattcgtataagatggattaccctgagatgggactgtgtatcatcattaacaataagaattttcacaagagcactggcatgacgtccagatccggaaccgacgtggatgcagcaaacctccgcgaaacctttcgcaatctgaaatacgaggtccgcaataagaacgacctgactagagaagaaattgtggaactgatgagagacgtctccaaagaagatcatagcaaacgctcctcgtttgtgtgtgtcctgcttagccatggtgaagaaggtatcatttttggaactaacggacccgtggatttgaagaagattaccaacttttttcgaggagatcgttgccgtagccttactggaaagccgaaactgttcataattcaagcctgtaggggtaccgaactggattgtggtatcgaaaccgat

SEQ ID NO: 326675 - DNA, 855 bp, Artificial Sequence
  derived and/or modified sequence
atgattgaaacggattctggcgttgacgatgatatggcctgccataaaataccagtggaggcggatttcctttacgcctacagcaccgcccccgggtattactcctggcgcaactccaaggacggctcttggtttattcagtctctctgcgccatgctcaagcagtatgccgacaaacttgagttcatgcacatcctgacgagagtgaataggaaagttgcaactgagttcgagtctttctcgtttgacgcgacatttcacgcaaagaaacagatcccttgcatcgtttctatgctgacgaaggaactctacttctaccacgggtctcctatggaaaacaccgagaatagcgtggcgtccaagtccattaagaatctggagcctaaaatcatccacggaagcgaatctatggcgagcggcatctccctcgacaatagctacaagatggattatccagaaatgggtttgtgcattattattaataacaaaaacttccacaagtcgacgggtatgactagccgctccggaaccgatgtggacgctgccaacctacgggagactttccgcaaccttaagtatgaggtccgtaataagaatgatctgactagggaggagatcgtagagctgatgcgggacgtgtccaaggaagaccactcaaaacggagtagcttcgtgtgcgtgctcctcagccacggtgaggaggggatcatcttcgggacaaatggccccgtggacctgaagaagattacaaatttttttcgcggcgataggtgcagaagcctcaccggtaaacccaagctattcattatacaggcctgcaggggcaccgagctggactgtggtatcgagaccgac

SEQ ID NO: 326676 - DNA, 855 bp, Artificial Sequence
  derived and/or modified sequence
atgatcgaaactgattctggagttgatgatgacatggcttgccacaaaatacctgtggaagctgattttttatacgcttatagtacagcgccaggatactattcatggcgcaattccaaagatgggtcttggttcatccagtcactttgtgcaatgttaaaacagtatgccgataaactagaattcatgcacatactcactcgcgtgaataggaaggtggccactgaatttgaatctttctcttttgacgccacttttcacgctaaaaaacagataccctgtatagtgtccatgttaactaaagaactctatttctatcatggaagtcctatggagaacactgagaactcggtggcctcaaaatcgataaaaaacctagaacccaaaatcattcatgggtctgaatctatggcttctggaatcagtcttgataattcatacaaaatggactaccccgagatggggctctgcatcatcattaataataagaacttccacaagtctacagggatgacaagtcggtccgggactgatgtagacgcagcaaacctgagagaaacttttaggaatctgaagtatgaagtccgcaataaaaatgaccttactcgggaagaaattgttgagctcatgcgcgatgtgtcgaaggaagaccacagtaagaggtcttctttcgtgtgcgtcctcctctcccacggagaggaaggaattatcttcggaactaatgggcctgtggatctgaaaaaaattacaaatttctttaggggggatcgctgccgatccctgactgggaaaccaaagctgttcattatccaggcttgccgcggaacagaactggattgtggaattgaaactgat

SEQ ID NO: 326677 - DNA, 855 bp, Artificial Sequence
  derived and/or modified sequence
atgattgagactgacagcggagttgacgatgatatggcatgccacaagattcctgtggaagcagatttcctgtacgcatattctactgcaccgggctactacagctggagaaacagtaaagatggatcttggttcatccaaagcctgtgtgccatgctgaagcagtacgccgacaaacttgagtttatgcatatacttactagagtcaatcggaaagtcgctaccgaattcgaatcattttcatttgatgcgaccttccacgccaagaaacaaatcccttgcatagtctcaatgctcactaaagaactgtacttctatcatggcagccccatggagaacaccgaaaattccgtggcatcaaagtcgataaagaatctggaaccaaagattatccacggatccgaatcgatggcaagtgggatttccttggataacagctacaagatggattatcctgagatgggcctttgtatcattatcaataacaagaacttccataagtccactggcatgacgtcacgttcgggaacggatgtggacgccgcgaatctcagagaaacgtttcgtaaccttaagtatgaggtgcgcaacaagaacgatctgactagagaagaaatcgtggaactgatgcgggacgtgagcaaggaggatcattccaagcgctcctcgtttgtgtgtgtacttctctcacatggcgaagaaggaattatctttggaacgaacgggccggtggacctgaaaaagattaccaactttttccggggggatcggtgtcggtcgcttactggaaagcctaaactgtttatcatccaggcgtgtcgaggtaccgagctggactgcggtattgaaactgac

SEQ ID NO: 326678 - DNA, 855 bp, Artificial Sequence
  derived and/or modified sequence
atgatcgaaaccgattcaggagtggatgatgacatggcctgccacaagatcccggtggaagcagacttcctgtatgcgtacagcactgcaccgggatactactcttggaggaactcgaaagatggatcatggttcatccagtcattgtgcgccatgcttaagcagtacgcggacaaactggaattcatgcatattctgacgagagtgaacagaaaggtggcgactgaatttgagtccttctcgttcgatgcgactttccacgccaagaaacagatcccctgtatcgttagtatgctcactaaggagctctacttctaccacggctcccctatggaaaacaccgagaactctgtggcgagcaagagtatcaagaatctcgaaccgaaaatcatccatggctcagagtccatggcttccggaataagcctggacaactcgtacaaaatggactaccccgagatgggtttgtgtatcatcattaacaacaagaacttccacaagtctactggaatgacttcccggtcgggcaccgatgtggatgcagccaacctgagagagactttccgcaatctgaaatacgaagtccgcaacaagaacgatcttacccgcgaggaaatcgtggaactgatgcgcgacgtgagcaaggaagatcactcgaagcgctcatcgttcgtgtgcgtcctgctgtcccatggagaagaaggaattatcttcggcaccaacgggccggtggatctgaaaaagattaccaactttttcagaggagatcgctgccggtccctgaccgggaaaccaaagctgttcatcatccaggcctgccgcggaaccgagctggactgcggaattgagactgac

SEQ ID NO: 326679 - DNA, 855 bp, Artificial Sequence
  derived and/or modified sequence
atgatagaaacagactcaggagttgatgacgatatggcttgtcacaagattccagtcgaggctgactttttgtatgcttacagcactgccccaggctattacagttggcgtaactccaaggacggatcttggttcatacagagtctgtgcgctatgctgaagcagtacgccgataaactggagttcatgcacatattaacacgcgttaataggaaggtagcaaccgagtttgagtccttctcatttgacgccacctttcacgccaagaagcagattccctgtattgtgtccatgctgactaaggagctttacttctatcacggaagccccatggagaacacagagaattccgtggcatccaagtctattaagaatttggaacccaagataatacacggtagcgaatcaatggcctccgggatctccctggataactcttacaagatggactatcctgagatgggcctgtgcataatcatcaataacaagaatttccacaaaagtaccggaatgacatctcgatcaggtaccgacgtagatgccgccaacctgcgggagacctttcggaacttaaaatacgaggtgcggaacaagaacgacttgaccagggaggagatcgtcgaactgatgagagacgtctccaaagaggatcattccaaacgcagtagctttgtgtgcgtgctgctgtcccatggagaggagggcataattttcggcactaacggcccggtcgacctgaaaaagataaccaatttcttccggggtgaccgctgtcgctcactgacagggaaacctaaactgttcattatccaagcctgccgaggcacagagctagattgcggaatagagacagac

SEQ ID NO: 326680 - DNA, 855 bp, Artificial Sequence
  derived and/or modified sequence
atgatagaaaccgacagcggagtcgacgacgacatggcctgccacaagattcctgtggaagccgacttcctgtacgcatattccacggccccgggatactactcatggcgcaactcaaaagacggatcgtggttcatccagtcgctctgcgcgatgctgaagcagtacgccgataagttggagtttatgcatatcctcactcgcgtgaacagaaaggtggcgaccgagtttgagtcattcagcttcgatgcaaccttccacgcaaagaagcagatcccctgcattgtctcgatgttgaccaaagaactgtacttctaccatggctcgccgatggaaaataccgaaaattcagtcgcatccaagagcatcaaaaatctggaacccaagatcatccacggatcagagtccatggcatcgggaatctccctggacaattcatacaagatggactacccggagatgggcctttgcatcatcatcaacaacaaaaactttcacaaatctactggcatgacttcgagatccggaaccgacgtcgacgccgctaacttgcgggaaactttccgcaatctcaagtacgaggtgcgtaacaagaacgacctgaccagagaggagatcgtggaactcatgagggatgtgtcgaaggaggatcattccaagcggtcctcgttcgtgtgcgtgctgctctcgcatggcgaggaaggcatcatcttcggcaccaacggtccggtggacctgaagaagatcactaacttcttcaggggggatcgctgccgctcccttaccggaaagccaaaactgttcatcattcaagcctgtcgcggaacggaacttgactgtgggatcgaaaccgac

SEQ ID NO: 326681 - DNA, 855 bp, Artificial Sequence
  derived and/or modified sequence
atgattgagaccgactctggggtggatgacgatatggcctgtcacaaaatccctgtcgaggccgatttcctgtacgcatactccacagctccgggctactatagctggcggaattcgaaagatgggagctggttcatacagagcctttgtgccatgctgaagcagtacgcggataagctggagttcatgcacatattgacacgggtgaatcgcaaagtggctactgaattcgaatccttctctttcgatgcaacgtttcatgcgaaaaagcagatcccctgtatcgtgtccatgttgacaaaggagctctatttctaccatgggtctccgatggagaacacagaaaactccgtcgcttcgaaaagcatcaaaaacctggaacccaaaatcatccacggttctgaaagtatggccagcgggatctccttggataactcatacaagatggattatcctgaaatgggcctctgtatcattatcaacaacaagaatttccataagagcacaggcatgaccagtcggtcaggaaccgacgtggacgccgccaacctgcgggagaccttcagaaacctgaaatacgaggtgcgcaataagaatgatctgaccagagaagaaatcgttgagctgatgcgagacgtgtctaaagaggatcacagcaagcggtccagctttgtgtgtgtcctactatctcatggcgaagaaggtatcatattcggaactaacggccccgtggacctcaaaaaaattaccaatttcttccgcggcgatcgttgccgatctctgaccggcaagccaaagctcttcataattcaggcctgcaggggcacagagctcgattgtggtatcgagacagat

SEQ ID NO: 326682 - DNA, 855 bp, Artificial Sequence
  derived and/or modified sequence
atgatcgaaacggacagcggggtggatgacgacatggcctgccacaaaattcccgtagaagccgattttctgtacgcatattcgactgcccctggctactactcctggcgaaattccaaagacgggtcttggtttatccagtcgttgtgtgccatgctgaagcaatatgccgataagctggagtttatgcatattctgaccagagtgaataggaaagtggctacagagtttgagagcttctccttcgatgcgacctttcatgcaaaaaaacagatcccctgtattgtctccatgctgacaaaggagctgtacttctaccatggctctcccatggaaaacaccgaaaacagcgtggccagcaagtcgattaagaaccttgagcccaaaatcatacacggatctgagagtatggctagcggcatatccctagacaattcctacaagatggactatcctgagatgggcctctgcattataattaacaataagaatttccataagagtactggtatgacctcacgctccggcaccgatgttgacgccgccaacctccgagaaacgttcaggaatctaaaatacgaggtgcgaaataagaatgacctgacaagggaggaaattgttgagcttatgcgcgatgtgagcaaggaggaccatagcaaacggagttcgtttgtgtgtgtgctgctcagtcacggagaggagggcatcattttcgggactaacggccctgttgacctcaaaaagatcactaacttttttcggggtgaccgttgtcggagcctgaccgggaagccaaagctctttataattcaggcatgtagaggtacggaactggactgtgggattgagaccgac

SEQ ID NO: 326683 - DNA, 855 bp, Artificial Sequence
  derived and/or modified sequence
atgatagaaaccgattcaggtgtcgatgatgatatggcgtgtcataagattccagtggaagccgatttcttgtacgcatactcgaccgcaccaggttactacagctggcggaacagcaaggatgggtcgtggtttattcaaagcctttgcgccatgctgaagcaatacgcagataagctggagtttatgcatattcttacccgcgtcaatagaaaggtcgcaaccgaatttgaatcgttttcattcgatgccaccttccacgcgaaaaagcagataccttgtattgttagcatgctgacgaaggaactttacttctaccatggttcgccaatggaaaacaccgaaaactcggtggcctccaaatctatcaaaaaccttgaacctaagattatccacggatcggaatcgatggcatcaggcatttcgcttgataactcttacaaaatggattaccctgaaatgggactctgtataatcattaacaataagaattttcataagtcaaccggaatgacttccaggtcaggtaccgatgtcgatgcagccaacctgcgggaaaccttcaggaatctgaagtacgaggttaggaacaagaatgacctcactagagaagaaatcgtggagctgatgcgggatgtgtcaaaggaggaccattcgaaaaggtcctccttcgtgtgtgtgttgctctcgcatggggaagaagggattatctttggtactaatggtcccgtggacctcaagaaaatcactaactttttccggggagatcgttgtcgcagccttaccgggaagccaaagctgttcatcatacaagcatgcagaggaaccgagttggactgcggaatagaaactgat

SEQ ID NO: 326684 - DNA, 855 bp, Artificial Sequence
  derived and/or modified sequence
atgatagaaaccgacagcggcgttgatgatgatatggcttgtcataagatcccagtggaagcggactttctgtacgcatattccaccgcccccggatactactcgtggcgtaatagcaaagatggaagctggtttatccagtcactttgtgccatgctcaagcaatacgcagataagctcgagttcatgcatattctcactcgtgtcaataggaaagtggcaactgaatttgagagcttctcctttgacgctacctttcatgccaagaaacagataccatgtatcgtctcgatgcttaccaaagagttgtacttttaccacggatctccgatggagaatacggaaaacagcgttgcctcaaaatccatcaagaatttggaaccgaagataattcatggttcagaatcgatggcttcgggaatctctctggacaactcctacaagatggattacccagaaatggggctttgcatcatcataaacaacaagaattttcataagagcaccggcatgacttcgcgctccggcactgatgtggatgcagccaacctgcgcgaaacctttagaaatcttaagtacgaggtgagaaacaaaaacgaccttactcgcgaagagatcgtggagcttatgcgtgacgtgtcaaaggaggatcactccaagcgctcgagcttcgtctgcgtgctgctctcgcacggtgaggaggggataatcttcggtactaacggcccagtcgatctgaagaagattactaacttctttcggggtgatagatgcaggtcgctgaccggtaagcctaaactgttcatcattcaagcgtgtcggggaacggaacttgattgtggcattgaaaccgac

SEQ ID NO: 326685 - DNA, 855 bp, Artificial Sequence
  derived and/or modified sequence
atgattgagactgactctggggtggatgacgatatggcctgtcataaaatcccagtggaagctgacttcctatatgcatatagtaccgctccggggtattacagttggagaaactcgaaggacggcagctggttcatccagtccctctgtgctatgcttaagcaatacgctgataagcttgaattcatgcacattttaactcgagtaaaccgcaaggttgccacagaatttgagagtttttcttttgacgcaacctttcatgctaagaagcagatcccatgcatcgtctccatgttgaccaaagaactatacttttatcatgggtccccgatggagaacacggaaaactctgttgcctcaaagtcaatcaagaatctagagccgaagatcatccacggctcagagtcgatggcttcagggatctcactggacaactcctataagatggattatcctgagatgggcctctgcattattataaacaataaaaactttcacaagtctacgggtatgactagtcgctctggaactgacgtcgatgccgccaacttgcgtgaaacctttaggaatttgaaatacgaagtgcgcaacaagaatgatctgactcgggaggagattgtcgagctcatgagggacgtttctaaggaagaccactccaagcgtagctcgttcgtctgcgttctcctctcacatggagaggagggtataatattcgggaccaacggccccgtcgatctgaaaaaaattaccaactttttccgaggcgatcggtgtcgttctctgaccggtaagcccaagctgtttataatccaagcatgccgcggcacggaactcgactgcggtatcgagacagat

SEQ ID NO: 326686 - DNA, 855 bp, Artificial Sequence
  derived and/or modified sequence
atgattgagactgactcaggagtggacgatgatatggcctgccacaagatccctgtggaggccgattttctctacgcttacagcaccgccccgggctactactcgtggcggaatagtaaggatgggtcttggttcatccagtcactgtgtgctatgttgaagcagtacgcagataagctggagttcatgcatatccttaccagagtgaatcgcaaggtcgccaccgaattcgaatccttttccttcgacgcgactttccacgcgaaaaagcagatcccttgcatcgtcagcatgcttaccaaggaactgtacttttaccacggatcaccaatggagaacacggaaaattccgtggcctcgaagtcgatcaagaacttggaaccgaaaatcattcatggatcagagtcgatggcaagcggaatctccctggacaactcgtacaaaatggactatccggagatggggctgtgtatcatcatcaacaacaagaacttccacaaatccaccggaatgacttccagaagcggaaccgacgtggatgccgcgaacctgcgcgaaaccttccggaacctgaaatacgaggtgaggaataagaatgacctcactcgcgaagaaatcgtggaactcatgcgggatgtttccaaggaggaccactcaaaaaggtcgagcttcgtctgcgtgctcctgtcgcatggtgaggaagggattatctttggcacgaacggtcccgtcgatctgaaaaagataaccaatttcttccgaggcgacagatgccgcagcctcactggaaagccaaagctcttcatcattcaagcatgccggggcactgaactggactgcggaatcgaaactgac

SEQ ID NO: 326687 - DNA, 855 bp, Artificial Sequence
  derived and/or modified sequence
atgatcgaaacagattctggagttgatgacgacatggcgtgccataaaattcccgtggaggcagattttctttatgcatattcaacagcgccgggttattattcttggcgtaatagcaaggatgggagttggtttattcaatctttgtgcgcaatgttaaaacaatatgcggataagcttgagttcatgcacattttaaccagagtgaatcgcaaagtggccaccgagtttgagtcattcagttttgacgccacctttcatgcgaagaaacaaattccatgcatagtgtcaatgctgacgaaggagttgtatttctatcatggctcacctatggaaaacacggagaacagtgtagcgtccaaatcaataaaaaacctagaacctaaaatcatacacggatctgagtccatggcctccggaatttcccttgataactcctataaaatggattatccggaaatggggttatgcatcatcattaataataagaattttcataagtcgacaggtatgacatcaagatctggtactgatgtcgatgcagccaatcttcgagagactttccggaacttaaaatatgaagttcggaataaaaacgatttgacacgggaggagatcgtcgagctgatgagggacgtaagcaaagaggatcatagtaaacgtagttcttttgtgtgcgtactgttaagccatggtgaagaaggaatcatcttcggcacgaatggaccggtcgatttgaaaaaaattacgaatttttttcgtggcgatcgttgcagatctcttacggggaagcctaaattgtttatcattcaggcatgcagaggcacggaattggattgtggtatagagaccgac

SEQ ID NO: 326688 - DNA, 855 bp, Artificial Sequence
  derived and/or modified sequence
atgatcgagactgactcaggagtggacgacgacatggcatgccacaaaattccggtcgaggccgactttctttatgcttattcgacggcccccgggtattactcgtggaggaactcaaaggatggatcttggttcatccagagcctgtgtgccatgcttaaacagtacgcagataagctggaattcatgcacatcctcaccagagtgaacagaaaagtggcgactgaattcgaatcattcagcttcgacgcaactttccatgccaaaaagcaaatcccatgtatcgtttccatgcttaccaaggaactgtacttctaccacggatccccaatggagaataccgagaactccgtcgcgtcaaagtcaatcaaaaacctggaacctaaaatcatccacggatccgaatcgatggcctcgggtatctcactggacaactcgtacaaaatggactacccggaaatgggactctgcatcattatcaacaataagaacttccacaaatccactggaatgacttcgcggtccggaactgacgtggatgcggccaaccttcgggagacgtttcgcaacctgaagtacgaggtgaggaataagaacgacctgacccgcgaagagattgtcgagcttatgagagacgtgagcaaagaggaccatagtaagaggtcgtcgtttgtgtgtgtgctcctgtcacacggtgaagaggggatcatcttcgggactaatggacctgtggacctcaagaaaatcaccaatttctttcgcggggatcgctgccgatcactgactggcaagccgaagctgttcatcatccaagcgtgccgcggtactgagctggactgcgggatcgaaaccgat

SEQ ID NO: 326689 - DNA, 855 bp, Artificial Sequence
  derived and/or modified sequence
atgatcgaaactgattctggtgttgacgacgacatggcttgtcataaaatcccagtggaggccgattttctctacgcttacagcactgcacctggatactactcatggagaaattccaaggatgggtcgtggttcattcaaagtctctgtgcgatgttgaaacagtatgcagataaattggaatttatgcatatactcactcgtgttaatagaaaggtagcaacggagttcgaatcattctcgtttgacgcaacttttcatgcaaagaagcagattccatgtatcgtcagtatgctcacgaaagaattgtatttctaccatggcagtccaatggagaacacagagaattcagttgcatccaagtctatcaagaatttggaaccaaaaattatccatggaagtgaatcaatggccagtggaatttctctcgataattcatataagatggattatccagagatgggactttgcatcatcatcaataataaaaatttccacaagtctactggaatgacctcccgctcagggacagatgttgatgcagcgaatttaagagaaacctttcgtaatttgaagtacgaagtgaggaataaaaatgatttgactcgagaagaaattgttgaactgatgagagacgtctcaaaagaagatcattcgaagaggtcatcttttgtttgtgtacttctttcacatggtgaagaaggaattattttcggtactaatggaccggttgatctgaaaaaaatcacgaattttttcagaggagatagatgccgaagcttgacgggcaaaccgaagctctttatcatacaagcttgtcgaggaactgagttggattgtggaattgagactgac

SEQ ID NO: 326690 - DNA, 855 bp, Artificial Sequence
  derived and/or modified sequence
atgatcgagactgatagcggcgtggacgatgacatggcctgccacaagataccagtggaggccgacttcctctatgcctactcgaccgctccggggtactattcctggaggaacagtaaggacggatcctggttcattcaaagtctgtgtgctatgctcaagcagtatgccgacaaacttgaattcatgcacatcctgacacgtgttaatcggaaggtagccacagagtttgagagtttttcattcgatgcaacattccacgcaaaaaagcaaattccatgtatagtttcaatgctgaccaaagagctctacttttaccatggtagtcccatggagaatactgagaatagcgtcgcatcaaaatccataaaaaacttggaaccgaaaatcatccacggatccgaaagtatggcctccgggatatctttggacaattcgtataaaatggactatccggaaatgggtctatgtattatcatcaacaataaaaatttccataagagcaccggtatgactagccgcagcggcacggatgtggacgccgctaacttgagggagacattccgaaatttgaaatacgaggttcggaataagaatgatctgacccgggaggagatcgttgaactgatgcgagatgtgagtaaggaggaccactcgaagcgcagcagcttcgtgtgcgttcttttgagccatggggaggaaggcattatattcggaacgaatggacctgtggatttgaaaaaaattactaatttctttcggggggacagatgtaggtccctgaccggcaagcccaagctgttcatcatacaagcctgcagaggcacagagctggattgtggaattgaaacagac

SEQ ID NO: 326691 - DNA, 855 bp, Artificial Sequence
  derived and/or modified sequence
atgatcgaaactgactccggagtggatgacgacatggcctgccataagatacccgtggaagctgattttctttatgcttattcgactgcgccaggatactacagttggcggaattccaaggacggaagttggttcattcaatccctgtgtgctatgcttaagcagtatgcggacaaattggaattcatgcatatcctcacccgcgtgaatcgtaaagtcgccacagaattcgagtccttctcttttgatgcaaccttccatgcaaaaaaacaaatcccctgcatagtcagcatgctcactaaggagttgtacttctaccacggatccccgatggaaaataccgaaaacagcgtggccagcaagtcgatcaagaatctggaacctaagattatccatggatctgaatcaatggctagcggcatcagcctggacaactcctacaagatggactaccctgagatgggtctgtgcataataattaataataagaattttcataagtcgaccggaatgactagtcgctccgggacagacgttgatgcggcgaacctcagagagactttccgtaacttgaagtacgaagtgcgcaacaagaacgacctcaccagggaagagattgtggaactgatgcgggatgttagtaaggaggatcactcaaagcggtcttctttcgtgtgcgtcttactctcccacggagaggaggggatcattttcggcactaacggccctgtcgacttaaagaagataacgaattttttcaggggggaccgttgcagatccttgactgggaagcctaagttgtttataatacaggcatgcaggggcaccgagctggactgcgggattgagaccgat

SEQ ID NO: 326692 - DNA, 855 bp, Artificial Sequence
  derived and/or modified sequence
atgatcgagacagatagcggagttgacgacgatatggcctgccacaaaatcccagtcgaggcagactttttatatgcatacagcaccgccccagggtactatagctggaggaattcaaaggacggctcctggtttatccagagtctttgtgcgatgctgaagcagtacgcagacaagctggagtttatgcacatcttgactcgagtcaataggaaggtggccaccgagtttgagtcgttcagcttcgatgctacatttcatgccaagaaacagatcccctgcatcgttagcatgctaacaaaggaactctacttttatcacgggtctcccatggaaaacaccgaaaattccgttgcctccaagtcgattaaaaacctggagccaaaaataattcacggctctgagagcatggcttcaggtatcagccttgacaattcctacaagatggactacccggaaatgggcttgtgtattatcatcaataacaagaacttccacaagagtaccgggatgacgagcaggagcggcactgatgtcgatgcagcaaacctgcgagagaccttccggaatctgaaatacgaagttaggaacaaaaacgatctgacccgcgaggaaattgttgagttgatgcgcgatgtctccaaggaggatcattccaagcggtcctcattcgtgtgtgtgttgctgagccatggcgaagaaggtattatttttggaactaatggccctgtagaccttaagaaaatcacaaatttctttagaggtgatcggtgccggtcccttaccggcaagcccaagctgttcatcattcaagcgtgtagaggaaccgaactcgactgcggtattgaaacggac

SEQ ID NO: 326693 - DNA, 855 bp, Artificial Sequence
  derived and/or modified sequence
atgatcgagactgactcaggagtggacgacgatatggcctgtcacaaaattccggtcgaggcagactttctttacgcttactcgaccgctccaggatactatagctggaggaacagcaaggacggatcgtggtttatccagtccctgtgtgccatgcttaaacagtacgccgacaaacttgaattcatgcatatcctcacccgggtcaatcggaaagtggctactgaattcgaatcattttcatttgacgcaactttccacgctaagaagcagattccctgcatcgtgagcatgttgacgaaggaactgtacttctaccacgggtcgccgatggagaacaccgaaaattccgtggcatccaagtcaattaagaacctggaaccaaagatcatccacgggtcagagtccatggctagcggaatctcgcttgataattcatacaaaatggactacccagagatgggcctgtgcattatcatcaacaacaaaaacttccataagtccacgggaatgacttccaggagcggcaccgacgtggatgcggccaatcttcgcgaaactttccggaacctgaagtatgaggtgcggaataagaacgacctgaccagggaagagatcgtggagctgatgcgggatgtcagcaaggaagatcatagcaagcgctcctcgttcgtttgcgtgctcctgtcccacggcgaagaggggatcatctttggaacgaacggaccggtggatctcaagaaaatcactaatttctttcggggagacagatgcaggtcgctgacgggcaaacctaaactctttatcatccaggcctgccggggaaccgagctggactgtggaatcgaaactgat

SEQ ID NO: 326694 - DNA, 855 bp, Artificial Sequence
  derived and/or modified sequence
atgattgagacagatagcggggtagatgatgacatggcttgtcacaagatcccagtggaagctgatttcttgtatgcctactccacagcacctgggtactatagctggcggaactccaaagacggctcttggttcattcagtctctgtgcgcaatgctgaaacagtatgccgataagcttgagttcatgcatatcctcacccgagtaaaccggaaagtggctacagaatttgagagtttcagtttcgacgctacattccacgcaaagaagcagatcccttgtatcgtctctatgctgacaaaggaactttacttttaccatggctcaccaatggaaaatacagagaatagtgtggcttccaagagcattaaaaacctggaacctaaaattatacacggatccgaatccatggcctctgggattagtttagataatagttataagatggattatcctgaaatgggcctgtgtatcatcatcaataacaagaactttcataagtcaactgggatgacctccaggtctggcacagatgtagatgccgccaatctccgtgaaacgtttagaaatttaaaatacgaagtacggaacaagaacgacctaacccgggaagaaatagtagagctgatgcgagacgtctccaaagaggatcattctaagagatccagttttgtgtgtgtactcctgagccatggcgaggaaggaattatttttggcaccaacggcccggtggatctgaagaagatcaccaactttttcaggggcgatcggtgtcgctccctgaccgggaaaccaaagcttttcattatccaggcctgtcgaggtacagagctggactgtggaattgagactgat

SEQ ID NO: 326695 - DNA, 855 bp, Artificial Sequence
  derived and/or modified sequence
atgatcgagacagacagtggagtggacgatgacatggcttgccataagattccagtggaagccgacttcttgtatgcttatagcactgcgcccggttattacagttggagaaattcaaaggacgggagttggtttatacagtccctgtgtgctatgcttaagcagtacgctgacaaattagagtttatgcacattctcaccagggtgaaccgcaaggtggctactgagttcgaatcattctcatttgacgctacattccacgccaaaaagcagattccttgtatagtatccatgctgactaaggagctgtatttctatcatggttctccaatggagaacaccgagaacagtgtggcctccaaaagcataaaaaacctggaaccaaagatcattcatggcagtgaatccatggcctcaggcatcagcttggataattcttacaaaatggattacccagaaatgggtctgtgcatcatcattaataataaaaatttccacaagagtactgggatgacctctcgaagcggcacggacgtggacgccgcaaacctgcgagaaacctttaggaatctaaagtacgaggtgaggaataagaatgacctcacacgcgaagagatcgtggagctgatgagggacgtctccaaggaggatcactctaagaggtcgtccttcgtctgcgtgcttttgtctcatggagaggaggggatcatattcggcaccaatggtccagttgacctcaaaaagatcacaaacttcttcaggggcgatcgttgcagaagtctaaccggaaagccgaagctcttcatcatccaggcctgtcgaggaacagaactggactgtggaatcgagaccgat

SEQ ID NO: 326696 - DNA, 855 bp, Artificial Sequence
  derived and/or modified sequence
atgatcgaaaccgactccggcgtggatgacgacatggcgtgccacaagattccggtggaggcggactttctctacgcctactcaactgcgccagggtattactcgtggaggaatagcaaggacggatcctggtttatccagtcgctgtgcgccatgctcaagcagtacgccgataaacttgagttcatgcacattcttactagagtgaatcggaaggtcgctaccgagtttgaatcgttctcattcgatgcgaccttccacgccaagaagcagatcccatgcattgtctccatgttgacgaaggagctctacttctatcacggctccccaatggagaacaccgaaaactccgtggcatcaaaatcgataaagaatctggaaccgaaaatcatccatggatcggagagcatggcctcagggatctcactggacaatagctacaagatggattacccagagatgggactgtgcataatcatcaacaacaagaacttccataagtccaccggaatgacttcgcggtcgggaaccgacgtcgatgccgctaacctgagggaaaccttccggaatctcaaatacgaggtccgcaacaagaatgacctcaccagggaggagatcgtcgagctgatgcgagatgttagcaaggaagatcactcgaaacggagctctttcgtctgcgtccttttgtctcacggggaggaaggaatcattttcggcaccaacggacctgtggacctgaaaaagatcacgaacttctttcgcggagatcgctgcagatcgctcactgggaaacccaaactgttcatcattcaggcctgccgcggaaccgaactggattgtgggatcgagactgac

SEQ ID NO: 326697 - DNA, 855 bp, Artificial Sequence
  derived and/or modified sequence
atgatcgaaactgacagcggggtcgacgacgacatggcctgccacaagatcccggtcgaagctgacttcctgtacgcctactcgactgcaccggggtactactcatggcggaactcgaaggacggctcctggttcatccaatccctgtgcgctatgctcaagcagtacgcagacaaactcgagttcatgcatattctgacgcgcgtgaatcgcaaggtcgcgactgagttcgagagcttctcgttcgatgcaactttccacgcgaagaagcagatcccatgcattgtgagcatgcttacgaaggagctgtacttctaccacggaagcccgatggagaacacggagaactcggttgcgtcgaagtctattaagaatctggaacctaagataatccacggatccgagagcatggcctcgggcatcagccttgataacagctataagatggactacccggagatggggctgtgtatcatcatcaataacaaaaacttccataagtccaccgggatgacctcaagatcaggcactgatgtggacgcggcaaatttgcgggaaacctttcggaatctgaagtacgaggtgaggaataagaacgacctgacgagagaagagattgtggagctcatgcgcgacgtctcgaaggaggaccactcaaagcggtcgagctttgtgtgtgtgctgctgtcacacggagaagaaggaatcattttcggaaccaacggaccggtcgacctcaaaaagatcaccaacttctttcggggtgaccgttgccgctccctgaccggaaagccaaaactgtttatcatccaggcttgccgcgggaccgaacttgactgcggcatcgaaaccgat

SEQ ID NO: 326698 - DNA, 855 bp, Artificial Sequence
  derived and/or modified sequence
atgattgagactgattcgggtgtggacgatgatatggcatgccacaagattcccgtggaagctgattttctttacgcatattccactgccccaggatactattcatggcgtaattccaaggacggctcgtggtttatccaatcattgtgtgcaatgctgaagcaatacgcagataaacttgaattcatgcatattctcactcgggtgaataggaaggtcgccacggaatttgaatcgttcagctttgacgcaacgtttcatgcaaagaagcaaatcccttgcatcgtctctatgcttactaaagagctgtacttttaccatggttcaccaatggagaataccgaaaattcagtggcatccaagtccattaagaatctcgaaccgaagattattcatggctcagagtcgatggcaagcggcatatccctggataactcctacaagatggactaccctgaaatgggactttgcattatcattaacaataagaacttccataaaagcacggggatgacgtcaaggtccggcactgatgtggatgcagccaacctgcgcgaaacctttagaaacttgaagtacgaagtgagaaacaaaaatgaccttaccagagaagaaatcgttgagctgatgagagacgtcagcaaggaagatcacagcaaacgcagctcattcgtgtgtgtgctgctgtcacacggggaggaaggtatcatctttggcaccaacggccctgttgatctcaagaagatcactaatttctttcgcggagacagatgccggagccttaccggaaagccaaagctgttcataattcaagcgtgccgcggaactgaactggactgtggaattgaaacggat

SEQ ID NO: 326699 - DNA, 855 bp, Artificial Sequence
  derived and/or modified sequence
atgatcgaaactgactcaggagtggatgacgatatggcttgtcacaagattccagtggaagccgatttcctctatgcttattcaaccgccccagggtactactcctggcgaaattccaaagacggaagttggttcatccagagtctgtgtgcaatgctgaagcagtacgctgacaaactcgagttcatgcacattctgacccgggtaaataggaaggttgctacggagtttgaaagcttcagcttcgatgccacttttcacgcaaagaagcagatcccatgtatagtatcaatgctgacaaaggagctgtacttttaccacggatccccgatggagaacacggaaaactccgtcgccagtaagtccatcaagaatttggagcccaagatcatccatggttctgagtcaatggcttctggcatcagcttggacaattcgtataaaatggactatcctgagatgggactttgcattataatcaataacaagaactttcataaatcaaccggcatgacatcaaggagcggaactgacgtcgacgccgctaacctccgcgagacctttcggaacctcaagtatgaagtgagaaataaaaatgatttgacacgtgaggagatagtggagttgatgagagacgtgtcaaaggaggaccattctaagcgcagttccttcgtgtgcgtgctcctctcccacggggaagaaggaataatttttggaacaaacggaccggtggacctgaagaaaatcaccaacttcttccgcggcgataggtgcagatcccttaccggcaagcctaagctgttcatcatacaggcttgccgcggcacagagctcgactgcggtattgagaccgat

SEQ ID NO: 326700 - DNA, 855 bp, Artificial Sequence
  derived and/or modified sequence
atgatcgagactgacagtggcgtggatgatgacatggcttgccataagatccctgttgaggcagactttctttacgcctatagcaccgcccccggatactactcctggcggaatagtaaagatggatcgtggtttattcaaagtctgtgcgctatgctaaagcaatatgccgataaacttgagttcatgcatattctcacacgagttaaccggaaagttgccaccgaatttgaaagcttttcgtttgacgccacgtttcacgctaaaaagcagatcccatgtattgttagcatgctgacgaaagagctgtatttctaccacggctctccaatggagaatacagagaactcagtcgcgtcaaagtctattaaaaacctcgagccaaagatcattcacgggtctgagtccatggcctccgggatctctttggacaacagctataagatggactatccagagatgggactgtgcattattatcaacaataagaattttcataagtcgactggaatgacaagcaggagcggaacggacgtggatgcagccaatcttcgggagacctttcggaacctgaagtacgaggtaaggaacaagaatgacctgactagggaagaaatcgtagaacttatgagagacgttagcaaggaggatcactctaagcgaagcagctttgtatgcgtcctactctcacacggagaggaggggataatattcgggaccaacgggcccgtcgatctgaagaagatcactaatttctttagaggcgataggtgcaggagcctgacgggcaagccaaaactttttataattcaggcatgtcggggtacggagcttgattgtggtatagagactgac

SEQ ID NO: 326701 - DNA, 855 bp, Artificial Sequence
  derived and/or modified sequence
atgatcgagacggattccggcgtcgatgatgacatggcctgccacaagatcccggtggaggctgactttctgtacgcttactcgactgctccggggtactactcctggcgcaattctaaggacggatcatggttcatccagtcgctgtgcgctatgctgaagcagtacgctgacaaacttgagtttatgcacattctcacgcgagtgaaccggaaagtggccactgaattcgagagcttctcatttgacgcgactttccatgcgaagaagcagattccgtgcatcgtgtccatgctgaccaaggagctctacttttaccacgggtcgccgatggaaaataccgaaaattcagttgcgtcaaaatccatcaagaacctggagcctaagatcatccacgggtcagaatccatggccagcgggatcagccttgataactcatacaagatggactacccggagatgggtctgtgcatcatcatcaacaacaagaactttcacaagtccaccggaatgacgtctcgctcgggcactgacgtggacgccgccaacctgcgggagactttcagaaatctgaaatacgaggtgcggaacaagaatgacttgactagagaagaaatcgtggagctgatgcgcgacgtgagcaaggaggaccactccaagcggtcatcgttcgtctgtgtgctgctgtcacatggggaagaaggtatcattttcgggaccaacggtcccgtggatcttaagaaaatcaccaacttcttccgaggagacagatgtcgctcgctgaccggaaaaccaaagctcttcattatccaggcgtgcaggggaacggagctggattgcggcatcgaaaccgac

SEQ ID NO: 326702 - DNA, 855 bp, Artificial Sequence
  derived and/or modified sequence
atgattgagacagattctggcgttgatgacgatatggcatgtcataagattcccgtggaggccgactttctgtacgcatattcaactgcaccagggtattattcttggcgcaatagcaaggatggttcctggtttatacagtcactgtgtgcgatgttgaagcagtacgccgacaagctggaatttatgcacatcctgaccagagtgaacagaaaggtggcgacagagtttgagagtttttccttcgacgccacttttcacgctaaaaaacagatcccatgcatcgtatctatgctcactaaggagctttacttttaccatggaagccctatggagaacaccgagaattcagtcgcgagcaagtccattaaaaaccttgagcccaagatcatccatggttccgaatctatggcctccggaatttctctcgataacagctacaaaatggattacccggaaatgggactttgtatcattatcaataacaaaaacttccacaagtcaactgggatgactagtcgcagcggcaccgatgtggacgctgccaatctgagagaaacgtttcggaatttaaagtatgaagtccgtaataaaaatgatttgaccagggaggagatcgtggagctaatgcgtgacgtgtcgaaggaggatcactccaaacggtcatccttcgtgtgcgttctgctctctcacggtgaggagggaatcatctttgggaccaatggtcccgtcgacctcaagaaaataacaaatttttttcggggagatagatgccgctcgctgactggtaaacccaaattgtttattatccaggcttgcaggggaactgaactggactgtgggatcgagacagac

SEQ ID NO: 326703 - DNA, 855 bp, Artificial Sequence
  derived and/or modified sequence
atgatcgaaaccgactcgggagtggatgacgacatggcatgccacaagatcccggttgaggcagattttctctacgcgtactcgacggcgccagggtactacagctggcggaactccaaggatggaagctggttcattcaatctctgtgtgctatgctcaagcaatacgccgacaagctggaattcatgcatatcctcactagggtgaatagaaaggtcgcaactgaatttgaatcgttctccttcgatgccaccttccacgctaaaaagcagatcccgtgcattgtgtccatgctgactaaggaattgtacttctatcatggatctccgatggagaacaccgaaaattcggtggcctccaaaagcatcaaaaatctggaaccaaagattattcacggctcggaaagcatggcctcagggatctcgctcgataactcctacaaaatggattacccggagatgggactgtgtattatcatcaataacaagaacttccacaagtcgaccggaatgacctcgcggtccggaactgatgtggatgccgcaaatcttcgcgaaactttccgcaacctgaagtacgaggtgcgcaataagaacgacctgacgcgagaagaaatcgtggagctgatgagagacgtgtcgaaggaggaccacagcaagagaagcagcttcgtttgcgtgctgctgtcacacggagaagagggaatcattttcgggaccaacggcccggtcgacctgaagaaaatcacgaatttcttccgcggagatcgctgccggtcgctgaccggaaagccgaaactgttcatcatccaggcctgcagggggactgagctggattgcggaatcgaaaccgat

SEQ ID NO: 326704 - DNA, 855 bp, Artificial Sequence
  derived and/or modified sequence
atgatcgaaactgactcgggagtcgacgatgatatggcctgtcataagatccctgtcgaagcagattttctgtacgcctactccaccgcaccgggttactactcctggagaaactcaaaagacgggagctggtttatccaatcgctgtgtgcaatgctcaaacagtacgccgacaagctcgaattcatgcacatacttactagagtcaatcgcaaggtcgctaccgaatttgaatccttttcatttgacgcgactttccatgcaaagaaacaaattccgtgcatagtgtcgatgctgacgaaggagctttacttctatcacggttcgcctatggaaaacactgaaaactcggtggcatccaaaagcattaagaatctggagcctaagattatccacggatctgaaagcatggcgtcaggcatttcacttgataacagctacaaaatggactatccggaaatgggtttgtgcattatcattaacaataagaacttccataagtcaacggggatgactagcaggtctggcaccgacgtcgatgcggcgaaccttcgggaaacctttaggaatctgaagtacgaggtgaggaacaaaaacgatcttacccgagaggaaattgtggaactgatgagagatgtgtctaaagaggatcattcaaagagatcatccttcgtgtgcgtgctcctctcgcatggtgaggaggggattatctttggtaccaacggaccggtggatctgaagaagattaccaactttttccgtggggaccggtgtaggagcctgactggcaaaccaaagctgtttatcattcaggcatgtcgcggaactgaactcgattgtgggattgagactgat

SEQ ID NO: 326705 - DNA, 855 bp, Artificial Sequence
  derived and/or modified sequence
atgatcgagactgattcgggtgtcgatgacgacatggcgtgtcacaaaatcccggtggaggccgacttcctgtacgcgtatagcaccgcgccgggatactactcgtggaggaactcgaaggacggctcgtggtttatccaatctctctgcgcaatgctcaagcagtacgcggataaactggagtttatgcatatcctgaccagggtcaaccgcaaggtcgctaccgaattcgaatcgttctcctttgatgcaactttccatgcaaagaagcagatcccgtgcattgtctccatgctgaccaaggagctgtacttttaccacggatcgccgatggaaaacaccgagaatagcgtggcctcgaagtcgatcaaaaacctggaacctaaaatcattcacgggtccgaatcaatggcctccggcatctctctggacaatagctacaagatggattacccggagatgggactgtgcatcattatcaacaataagaacttccacaagagcactggcatgacctcaagatcaggaactgatgtggacgcggcgaacctgcgggaaacttttcgcaacctgaaatacgaagtgaggaataagaacgatttgactcgcgaagaaatcgtcgaactgatgcgggacgtcagcaaggaggatcattcgaagcgctcctcgttcgtgtgcgtgctgctctcgcacggagaggaaggaattatcttcggaaccaacggacctgtggacctcaagaagatcacgaacttcttcagaggagacaggtgtaggtcactgaccggtaagccgaagctgttcattattcaggcctgtcggggcacggaactggattgcggcatcgagactgac

SEQ ID NO: 326706 - DNA, 855 bp, Artificial Sequence
  derived and/or modified sequence
atgatcgaaactgactcaggagtggatgacgacatggcttgccataagatcccggtggaagcggatttcctgtacgcttactcgaccgctcctggctactactcgtggcggaactcgaaggacggctcgtggttcatccagagcctgtgcgcgatgctgaagcagtacgctgacaagctggaattcatgcacatcctgacccgcgtgaaccggaaggtcgcaaccgagtttgagagcttctccttcgatgccactttccatgcaaaaaagcagatcccgtgcattgtgagcatgctgactaaggaactgtacttttatcacgggagcccgatggagaatactgagaacagcgtggcgtccaagtccatcaagaacctggaaccaaaaatcatccacggcagcgaatcaatggctagcggaatttccctcgacaacagctacaagatggactacccagaaatgggactctgcattatcatcaataacaaaaacttccacaagtccactggaatgacgtcgaggtcgggaaccgacgtcgatgctgctaacctccgcgaaaccttccgcaacctgaagtacgaggtgcgaaacaaaaacgacctcacccgcgaagagatcgtggagctgatgcgggatgtttcaaaggaagatcactccaagcggtcatcgttcgtgtgcgtcctgctgtctcatggagaggaaggtatcatttttggtacgaacggaccggtggatctcaaaaagattaccaacttcttccgcggagatcggtgcaggtccctgaccggtaagcccaaacttttcatcattcaggcctgtcggggcactgaattggactgcggaatagagactgat

SEQ ID NO: 326707 - DNA, 855 bp, Artificial Sequence
  derived and/or modified sequence
atgattgaaacggactcaggggtggacgacgacatggcgtgtcataaaatacctgtcgaagctgattttttgtacgcctattctacggcgcctggctactatagctggagaaattccaaagatggctcgtggtttatccagagtttgtgcgctatgctgaagcagtacgctgacaagctggagttcatgcacattcttacgagggtgaataggaaggttgcaactgaatttgaatccttttcctttgatgctacgtttcacgccaaaaagcagatcccctgtatagtatcaatgctgactaaagaactttatttttaccacgggagccccatggaaaacacagaaaattctgtagcctccaagagcattaaaaacttagaacctaagatcatccatgggtccgaaagcatggcctctggtatctctctggacaactcctataagatggattatccagagatgggattgtgcatcattatcaacaacaagaacttccacaaatctaccggaatgacaagccgcagcggcacagacgtagacgccgcaaacctccgggaaacatttcgcaacttgaagtatgaagtccgaaacaaaaatgatctgacaagagaagaaattgttgagcttatgcgggacgtcagtaaagaggaccatagcaagcgctcctctttcgtgtgtgtactgttatcccacggagaggagggaatcattttcggaacaaatggccctgtcgatcttaaaaaaatcacgaacttctttaggggagatcgttgtcgctcgttgaccggcaagcctaagctgttcattatacaggcctgccggggcactgaactggattgtggcattgagacagat

SEQ ID NO: 326708 - DNA, 855 bp, Artificial Sequence
  derived and/or modified sequence
atgatcgagacagacagtggcgtggacgatgacatggcatgtcataaaatccccgtggaggcagactttctatatgcctactccacagcccctggttactattcctggcgcaactcaaaagatgggtcctggttcatacagtctctctgtgctatgctgaagcaatatgcggacaagctggaattcatgcacattctgacgcgcgttaaccgcaaggttgctaccgagtttgagagcttttctttcgacgccaccttccacgcaaagaagcagatcccttgtatcgtcagcatgctgactaaggagctctatttctaccatggaagccccatggagaacacggagaatagcgtagctagtaagtcaatcaagaatctggaacccaagatcatccatggtagcgagagcatggcctcaggaatctcccttgacaactcatataaaatggactacccggagatgggactctgcattattattaataataagaattttcacaaaagcaccggtatgacgtcccgctcaggaaccgacgtggatgcagcaaacctgagagagacttttcgaaatcttaagtacgaggtccggaacaaaaacgatttaacccgggaggagattgtcgaactgatgcgggatgtgtccaaagaggatcattctaaacgaagtagtttcgtatgtgtgctgcttagccacggtgaagaagggatcatcttcggaactaacggtcctgtcgacctgaagaaaattaccaatttcttcagaggggatcggtgtcgtagcctgaccgggaagcccaagttgtttattatccaggcctgcagaggaacggaactagactgtggaattgaaaccgat

SEQ ID NO: 326709 - DNA, 2673 bp, Artificial Sequence
  derived and/or modified sequence
acatctcccggcggcgggccgcggaagcagtgcagacgcggctcctagcggatgggtgctattgtgaggcggttgtagaagagtttcgtgagtgctcgcagctcatacctgtggctgtgtatccgtggccacagctggttggcgtcgccttgaaatcccaggccgtgaggagttagcgagccctgctcacactcggcgctctggttttcggtgggtgtgccctgcacctgcctcttcccccattctcattaataaaggtatccatggagaacactgaaaactcagtggattcaaaatccattaaaaatttggaaccaaagatcatacatggaagcgaatcaatggactctggaatatccctggacaacagttataaaatggattatcctgagatgggtttatgtataataattaataataagaattttcataaaagcactggaatgacatctcggtctggtacagatgtcgatgcagcaaacctcagggaaacattcagaaacttgaaatatgaagtcaggaataaaaatgatcttacacgtgaagaaattgtggaattgatgcgtgatgtttctaaagaagatcacagcaaaaggagcagttttgtttgtgtgcttctgagccatggtgaagaaggaataatttttggaacaaatggacctgttgacctgaaaaaaataacaaactttttcagaggggatcgttgtagaagtctaactggaaaacccaaacttttcattattcaggcctgccgtggtacagaactggactgtggcattgagacagacagtggtgttgatgatgacatggcgtgtcataaaataccagtggaggccgacttcttgtatgcatactccacagcacctggttattattcttggcgaaattcaaaggatggctcctggttcatccagtcgctttgtgccatgctgaaacagtatgccgacaagcttgaatttatgcacattcttacccgggttaaccgaaaggtggcaacagaatttgagtccttttcctttgacgctacttttcatgcaaagaaacagattccatgtattgtttccatgctcacaaaagaactctatttttatcactaaagaaatggttggttggtggttttttttagtttgtatgccaagtgagaagatggtatatttggtactgtatttccctctcattttgacctactctcatgctgcagagggtactttaagacatactccttccatcaaatagaaccactatgaagctacctcaaacttccagtcaggtagttgcaattgaattaaattaggaataaataaaaatggatactggtgcagtcattatgagaggcaatgattgttaatttacagctttcatgattagcaagttacagtgatgctgtgctatgaattttcaagtaattgtgaaaaagttaaacattgaagtaatgaatttttatgatattccccccacttaagactgtgtattctagttttgtcaaactgtagaaatgatgatgtggaagaacttaggcatctgtgggcatggtcaaaggctcaaacctttattttagaattgatatacacggatgacttaactgcatttttagaccatttatctgggattatggttttgtgatgtttgtcctgaacacttttgttgtaaaaaaataataataatgtttaatattgagaaagaaactaatattttatgtgagagaaagtgtgagcaaactaacttgacttttaaggctaaaacttaacattcatagaggggtggagttttaactgtaaggtgctacaatgcccctggatctaccagcataaatatcttctgatttgtccctatgcatatcagttgagcttcatataccagcaatatatctgaagagctattatataaaaaccccaaactgttgattattagccaggtaatgtgaataaattctataggaacatatgaaaatacaacttaaataataaacagtggaatataaggaaagcaataaatgaatgggctgagctgcctgtaacttgagagtagatggtttgagcctgagcagagacatgactcagcctgttccatgaaggcagagccatggaccacgcaggaagggcctacagcccatttctccatacgcactggtatgtgtggatgatgctgccagggcgccatcgccaagtaagaaagtgaagcaaatcagaaacttgtgaagtggaaatgttctaaaggtggtgaggcaataaaaatcatagtactctttgtagcaaaattcttaagtatgttattttctgttgaagtttacaatcaaaggaaaatagtaatgttttatactgtttactgaaagaaaaagacctatgagcacataggactctagacggcatccagccggaggccagagctgagccctcagcccgggaggcaggctccaggcctcagcaggtgcggagccgtcactgcaccaagtctcactggctgtcagtatgacatttcacgggagatttcttgttgctcaaaaaatgagctcgcatttgtcaatgacagtttcttttttcttactagacctgtaacttttgtaaatacacatagcatgtaatggtatcttaaagtgtgtttctatgtgacaattttgtacaaatttgttattttccatttttatttcaaaatatacattcaaacttaaaatta

SEQ ID NO: 326710 - DNA, 2621 bp, Artificial Sequence
  derived and/or modified sequence
atccgtggccacagctggttggcgtcgccttgaaatcccaggccgtgaggagttagcgagccctgctcacactcggcgctctggttttcggtgggtgtgccctgcacctgcctcttcccccattctcaatgagatcaccatcctcagaataatttgtaccccgctgggcactagctaatggaggtgatgtcatgctaagcagcacttcagtgagttttgcgggaaccaaagctctgctcccaggagtgtggatttggtgctttcatgtggaaaaagcggatgatgacaagtagagagcaaatgtgcgcatgtctgatgctttaataaaggtatccatggagaacactgaaaactcagtggattcaaaatccattaaaaatttggaaccaaagatcatacatggaagcgaatcaatggactctggaatatccctggacaacagttataaaatggattatcctgagatgggtttatgtataataattaataataagaattttcataaaagcactggaatgacatctcggtctggtacagatgtcgatgcagcaaacctcagggaaacattcagaaacttgaaatatgaagtcaggaataaaaatgatcttacacgtgaagaaattgtggaattgatgcgtgatgtttctaaagaagatcacagcaaaaggagcagttttgtttgtgtgcttctgagccatggtgaagaaggaataatttttggaacaaatggacctgttgacctgaaaaataacaaactttttcagaggggatcgttgtagaagtctaactggaaaacccaaacttttcattattcaggttattattcttggcgaaattcaaaggatggctcctggttcatccagtcgctttgtgccatgctgaaacagtatgccgacaagcttgaatttatgcacattcttacccgggttaaccgaaaggtggcaacagaatttgagtccttttcctttgacgctacttttcatgcaaagaaacagattccatgtattgtttccatgctcacaaaagaactctatttttatcactaaagaaatggttggttggtggttttttttagtttgtatgccaagtgagaagatggtatatttggtactgtatttccctctcattttgacctactctcatgctgcagagggtactttaagacatactccttccatcaaatagaaccactatgaagctacctcaaacttccagtcaggtagttgcaattgaattaaattaggaataaataaaaatggatactggtgcagtcattatgagaggcaatgattgttaatttacagctttcatgattagcaagttacagtgatgctgtgctatgaattttcaagtaattgtgaaaaagttaaacattgaagtaatgaatttttatgatattccccccacttaagactgtgtattctagttttgtcaaactgtagaaatgatgatgtggaagaacttaggcatctgtgggcatggtcaaaggctcaaacctttattttagaattgatatacacggatgacttaactgcatttttagaccatttatctgggattatggttttgtgatgtttgtcctgaacacttttgttgtaaaaaaataataataatgtttaatattgagaaagaaactaatattttatgtgagagaaagtgtgagcaaactaacttgacttttaaggctaaaacttaacattcatagaggggtggagttttaactgtaaggtgctacaatgcccctggatctaccagcataaatatcttctgatttgtccctatgcatatcagttgagcttcatataccagcaatatatctgaagagctattatataaaaaccccaaactgttgattattagccaggtaatgtgaataaattctataggaacatatgaaaatacaacttaaataataaacagtggaatataaggaaagcaataaatgaatgggctgagctgcctgtaacttgagagtagatggtttgagcctgagcagagacatgactcagcctgttccatgaaggcagagccatggaccacgcaggaagggcctacagcccatttctccatacgcactggtatgtgtggatgatgctgccagggcgccatcgccaagtaagaaagtgaagcaaatcagaaacttgtgaagtggaaatgttctaaaggtggtgaggcaataaaaatcatagtactctttgtagcaaaattcttaagtatgttattttctgttgaagtttacaatcaaaggaaaatagtaatgttttatactgtttactgaaagaaaaagacctatgagcacataggactctagacggcatccagccggaggccagagctgagccctcagcccgggaggcaggctccaggcctcagcaggtgcggagccgtcactgcaccaagtctcactggctgtcagtatgacatttcacgggagatttcttgttgctcaaaaaatgagctcgcatttgtcaatgacagtttcttttttcttactagacctgtaacttttgtaaatacacatagcatgtaatggtatcttaaagtgtgtttctatgtgacaattttgtacaaatttgttattttccatttttatttcaaaatatacattcaaacttaaaatt

SEQ ID NO: 326711 - DNA, 549 bp, Artificial Sequence
  derived and/or modified sequence
agtgcagacgcggctcctagcggatgggtgctattgtgaggcggttgtagaagagtttcgtgagtgctcgcagctcatacctgtggctgtgtatccgtggccacagctggttggcgtcgccttgaaatcccaggccgtgaggagttagcgagccctgctcacactcggcgctctggttttcgttaataaaggtatccatggagaacactgaaaactcagtggattcaaaatccattaaaaatttggaaccaaagatcatacatggaagcgaatcaatggactctggaatatccctggacaacagttataaaatggattatcctgagatgggtttatgtataataattaataataagaattttcataaaagcactggaatgacatctcggtctggtacagatgtcgatgcagcaaacctcagggaaacattcagaaacttgaaatatgaagtcaggaataaaaatgatcttacacgtgaagaaattgtggaattgatgcgtgatgtttctaaagaagatcacagcaaaaggagcagttttgtttgtgtgc

SEQ ID NO: 326712 - DNA, 2540 bp, Artificial Sequence
  derived and/or modified sequence
aggggcgggcgggaggcggggctggcgctggagcacatctcccggcggcgggccgcggaagcagtgcagacgcggctcctagcggatgggtgctattgtgaggcggttgtagaagttaataaaggtatccatggagaacactgaaaactcagtggattcaaaatccattaaaaatttggaaccaaagatcatacatggaagcgaatcaatggactctggaatatccctggacaacagttataaaatggattatcctgagatgggtttatgtataataattaataataagaattttcataaaagcactggaatgacatctcggtctggtacagatgtcgatgcagcaaacctcagggaaacattcagaaacttgaaatatgaagtcaggaataaaaatgatcttacacgtgaagaaattgtggaattgatgcgtgatgtttctaaagaagatcacagcaaaaggagcagttttgtttgtgtgcttctgagccatggtgaagaaggaataatttttggaacaaatggacctgttgacctgaaaaaaataacaaactttttcagaggggatcgttgtagaagtctaactggaaaacccaaacttttcattattcaggcctgccgtggtacagaactggactgtggcattgagacagacagtggtgttgatgatgacatggcgtgtcataaaataccagtggaggccgacttcttgtatgcatactccacagcacctggttattattcttggcgaaattcaaaggatggctcctggttcatccagtcgctttgtgccatgctgaaacagtatgccgacaagcttgaatttatgcacattcttacccgggttaaccgaaaggtggcaacagaatttgagtccttttcctttgacgctacttttcatgcaaagaaacagattccatgtattgtttccatgctcacaaaagaactctatttttatcactaaagaaatggttggttggtggttttttttagtttgtatgccaagtgagaagatggtatatttggtactgtatttccctctcattttgacctactctcatgctgcagagggtactttaagacatactccttccatcaaatagaaccactatgaagctacctcaaacttccagtcaggtagttgcaattgaattaaattaggaataaataaaaatggatactggtgcagtcattatgagaggcaatgattgttaatttacagctttcatgattagcaagttacagtgatgctgtgctatgaattttcaagtaattgtgaaaaagttaaacattgaagtaatgaatttttatgatattccccccacttaagactgtgtattctagttttgtcaaactgtagaaatgatgatgtggaagaacttaggcatctgtgggcatggtcaaaggctcaaacctttattttagaattgatatacacggatgacttaactgcatttttagaccatttatctgggattatggttttgtgatgtttgtcctgaacacttttgttgtaaaaaaataataataatgtttaatattgagaaagaaactaatattttatgtgagagaaagtgtgagcaaactaacttgacttttaaggctaaaacttaacattcatagaggggtggagttttaactgtaaggtgctacaatgcccctggatctaccagcataaatatcttctgatttgtccctatgcatatcagttgagcttcatataccagcaatatatctgaagagctattatataaaaaccccaaactgttgattattagccaggtaatgtgaataaattctataggaacatatgaaaatacaacttaaataataaacagtggaatataaggaaagcaataaatgaatgggctgagctgcctgtaacttgagagtagatggtttgagcctgagcagagacatgactcagcctgttccatgaaggcagagccatggaccacgcaggaagggcctacagcccatttctccatacgcactggtatgtgtggatgatgctgccagggcgccatcgccaagtaagaaagtgaagcaaatcagaaacttgtgaagtggaaatgttctaaaggtggtgaggcaataaaaatcatagtactctttgtagcaaaattcttaagtatgttattttctgttgaagtttacaatcaaaggaaaatagtaatgttttatactgtttactgaaagaaaaagacctatgagcacataggactctagacggcatccagccggaggccagagctgagccctcagcccgggaggcaggctccaggcctcagcaggtgcggagccgtcactgcaccaagtctcactggctgtcagtatgacatttcacgggagatttcttgttgctcaaaaaatgagctcgcatttgtcaatgacagtttcttttttcttactagacctgtaacttttgtaaatacacatagcatgtaatggtatcttaaagtgtgtttctatgtgacaattttgtacaaatttgttattttccatttttatttcaaaatatacattcaaacttaaaatta

SEQ ID NO: 326713 - DNA, 834 bp, Artificial Sequence
  derived and/or modified sequence
atggagaacaccgagaacagcgtggacagcaagagcatcaagaacctggagcccaagatcatccacggcagcgagagcatggacagcggcatcagcctggacaacagctacaagatggactaccccgagatgggcctgtgcatcatcatcaacaacaagaacttccacaagagcaccggcatgaccagcagaagcggcaccgacgtggacgccgccaacctgagagagaccttcagaaacctgaagtacgaggtgagaaacaagaacgacctgaccagagaggagatcgtggagctgatgagagacgtgagcaaggaggaccacagcaagagaagcagcttcgtgtgcgtgctgctgagccacggcgaggagggcatcatcttcggcaccaacggccccgtggacctgaagaagatcaccaacttcttcagaggcgacagatgcagaagcctgaccggcaagcccaagctgttcatcatccaggcctgcagaggcaccgagctggactgcggcatcgagaccgacagcggcgtggacgacgacatggcctgccacaagatccccgtggaggccgacttcctgtacgcctacagcaccgcccccggctactacagctggagaaacagcaaggacggcagctggttcatccagagcctgtgcgccatgctgaagcagtacgccgacaagctggagttcatgcacatcctgaccagagtgaacagaaaggtggccaccgagttcgagagcttcagcttcgacgccaccttccacgccaagaagcagatcccctgcatcgtgagcatgctgaccaaggagctgtacttctaccactag

SEQ ID NO: 326714 - DNA, 471 bp, Artificial Sequence
  derived and/or modified sequence
atgagcgacgccctgatcaaggtgagcatggagaacaccgagaacagcgtggacagcaagagcatcaagaacctggagcccaagatcatccacggcagcgagagcatggacagcggcatcagcctggacaacagctacaagatggactaccccgagatgggcctgtgcatcatcatcaacaacaagaacttccacaagagcaccggcatgaccagcagaagcggcaccgacgtggacgccgccaacctgagagagaccttcagaaacctgaagtacgaggtgagaaacaagaacgacctgaccagagaggagatcgtggagctgatgagagacgtgagcaaggaggaccacagcaagagaagcagcttcgtgtgcgtgctgctgagccacggcgaggagggcatcatcttcggcaccaacggccccgtggacctgaagaacaacaagctgttccagagaggcagcctgtag

SEQ ID NO: 326715 - DNA, 354 bp, Artificial Sequence
  derived and/or modified sequence
atggagaacaccgagaacagcgtggacagcaagagcatcaagaacctggagcccaagatcatccacggcagcgagagcatggacagcggcatcagcctggacaacagctacaagatggactaccccgagatgggcctgtgcatcatcatcaacaacaagaacttccacaagagcaccggcatgaccagcagaagcggcaccgacgtggacgccgccaacctgagagagaccttcagaaacctgaagtacgaggtgagaaacaagaacgacctgaccagagaggagatcgtggagctgatgagagacgtgagcaaggaggaccacagcaagagaagcagcttcgtgtgcgtgtag

SEQ ID NO: 326716 - DNA, 1059 bp, Artificial Sequence
  derived and/or modified sequence
taatacgactcactatagggaaataagagagaaaagaagagtaagaagaaatataagagccaccatgattgagacagacagtggtgttgatgatgacatggcgtgtcataaaataccagtggaggccgacttcttgtatgcatactccacagcacctggttattattcttggcgaaattcaaaggatggctcctggttcatccagtcgctttgtgccatgctgaaacagtatgccgacaagcttgaatttatgcacattcttacccgggttaaccgaaaggtggcaacagaatttgagtccttttcctttgacgctacttttcatgcaaagaaacagattccatgtattgtttccatgctcacaaaagaactctatttttatcacgatgaagttgatgggggatcccccatggagaacactgaaaactcagtggattcaaaatccattaaaaatttggaaccaaagatcatacatggaagcgaatcaatggactctggaatatccctggacaacagttataaaatggattatcctgagatgggtttatgtataataattaataataagaattttcataagagcactggaatgacatctcggtctggtacagatgtcgatgcagcaaacctcagggaaacattcagaaacttgaaatatgaagtcaggaataaaaatgatcttacacgtgaagaaattgtggaattgatgcgtgatgtttctaaagaagatcacagcaaaaggagcagttttgtttgtgtgcttctgagccatggtgaagaaggaataatttttggaacaaatggacctgttgacctgaaaaaaataacaaactttttcagaggggatcgttgtagaagtctaactggaaaacccaaacttttcattattcaggcctgccgtggtacagaactggactgtggcattgagacagactgataataggctggagcctcggtggccatgcttcttgccccttgggcctccccccagcccctcctccccttcctgcacccgtacccccgtggtctttgaataaagtctgagtgggcggctctaga

SEQ ID NO: 326717 - DNA, 1044 bp, Artificial Sequence
  derived and/or modified sequence
taatacgactcactatagggaaataagagagaaaagaagagtaagaagaaatataagagccaccatgattgagacagacagtggtgttgatgatgacatggcgtgtcataaaataccagtggaggccgacttcttgtatgcatactccacagcacctggttattattcttggcgaaattcaaaggatggctcctggttcatccagtcgctttgtgccatgctgaaacagtatgccgacaagcttgaatttatgcacattcttacccgggttaaccgaaaggtggcaacagaatttgagtccttttcctttgacgctacttttcatgcaaagaaacagattccatgtattgtttccatgctcacaaaagaactctatttttatcacggatcccccatggagaacactgaaaactcagtggcttcaaaatccattaaaaatttggaaccaaagatcatacatggaagcgaatcaatggcctctggaatatccctggacaacagttataaaatggattatcctgagatgggtttatgtataataattaataataagaattttcataagagcactggaatgacatctcggtctggtacagatgtcgatgcagcaaacctcagggaaacattcagaaacttgaaatatgaagtcaggaataaaaatgatcttacacgtgaagaaattgtggaattgatgcgtgatgtttctaaagaagatcacagcaaaaggagcagttttgtttgtgtgcttctgagccatggtgaagaaggaataatttttggaacaaatggacctgttgacctgaaaaaaataacaaactttttcagaggggatcgttgtagaagtctaactggaaaacccaaacttttcattattcaggcctgccgtggtacagaactggactgtggcattgagacagactgataataggctggagcctcggtggccatgcttcttgccccttgggcctccccccagcccctcctccccttcctgcacccgtacccccgtggtctttgaataaagtctgagtgggcggctctaga

SEQ ID NO: 326718 - DNA, 1036 bp, Artificial Sequence
  derived and/or modified sequence
gggaaataagagagaaaagaagagtaagaagaaatataagagccaccatgattgagacagacagtggtgttgatgatgacatggcgtgtcataaaataccagtggaggccgacttcttgtatgcatactccacagcacctggttattattcttggcgaaattcaaaggatggctcctggttcatccagtcgctttgtgccatgctgaaacagtatgccgacaagcttgaatttatgcacattcttacccgggttaaccgaaaggtggcaacagaatttgagtccttttcctttgacgctacttttcatgcaaagaaacagattccatgtattgtttccatgctcacaaaagaactctatttttatcacgatgaagttgatgggggatcccccatggagaacactgaaaactcagtggattcaaaatccattaaaaatttggaaccaaagatcatacatggaagcgaatcaatggactctggaatatccctggacaacagttataaaatggattatcctgagatgggtttatgtataataattaataataagaattttcataagagcactggaatgacatctcggtctggtacagatgtcgatgcagcaaacctcagggaaacattcagaaacttgaaatatgaagtcaggaataaaaatgatcttacacgtgaagaaattgtggaattgatgcgtgatgtttctaaagaagatcacagcaaaaggagcagttttgtttgtgtgcttctgagccatggtgaagaaggaataatttttggaacaaatggacctgttgacctgaaaaaaataacaaactttttcagaggggatcgttgtagaagtctaactggaaaacccaaacttttcattattcaggcctgccgtggtacagaactggactgtggcattgagacagactgataataggctggagcctcggtggccatgcttcttgccccttgggcctccccccagcccctcctccccttcctgcacccgtacccccgtggtctttgaataaagtctgagtgggcggc

SEQ ID NO: 326719 - DNA, 1861 bp, Artificial Sequence
  derived and/or modified sequence
atttaaagaatgctaacaagaatgaaattccacaattagttggtgaaatttatcagaatttctttgtggagagcaaagaaatatctgtggaaaaatcactttacaaagaaattcagcagtgtcttgtaggaaataaaggtattgaagtattctacaaaatccaggaagatgtttatgagaccctaaaggataggtattacccttcatttattgtcagtgacctgtatgagaaattgttgataaaagaggaagaaaaacatgcctcacagatgatttccaacaaggatgagatgggcccaagagatgaggctggtgaggaagccgtggatgatggtaccaatcagatcaatgaacaagccagttttgctgtaaacaaactgcgagaactaaatgagaaacttgaatataaaagatgtttccaagttgaaggatgaaataatcctaatagagaaagaacgcacagaccttcagctgcacatggcaagaacggattggtggtgtgaaaaccttggcatgtggaaagcctccatcaccagtggagaggttacagaagagaatggtgagcaattgccatgttactttgtcatggtaagcctacaagaagttggaggagttgaaactaagaactggacggtccccagaaggctcagcgagtttcagaatttacaccggaaactcagtgagtgcgtcccttctttaaaaaaagtccagttgccttctcttagcaagctgcctttcaaatctatagatcaaaagtttatggaaaagtcgaagaatcaattaaataagtttttacagaatctgctttcagatgaaagactgtgtcagagtgaagcactttatgccttcttgagcccttctcctgactacctcaaggttatcgacgtgcaggggaaaaaaaattctttttcattatcctcatttttggaaagacttcctcgcgacttcttctcccaccaggaggaggagacagaggaggacagtgacctgtcagattatggtgatgatgtggatgggaggaaagacgccttggctgaaccatgtttcatgttgattggggagatttttgaacttcgaggaatgtttaaatgggtgagaagaacattaattgccctcgttcaggtcacttttggaagaaccatcaacaaacaaatccgggacacagtcagctggattttcagtgagcaaatgttggtttactacatcaatattttccgggatgctttttggccaaatgggaagttggcaccaccgaccacaatcagaagcaaagagcaaagtcaggaaacaaaacagagagcacagcaaaagctgcttgaaaacattccagatatgcttcagagccttgttggacagcaaaatgcccgccacggtataataaaaatattcaatgcactgcaagaaacaagagccaacaagcatctgttatatggaacttcaacaaatacgcttctgtctcctagagaccatgattgaaattttctgaaataaggcctgaactttggaatttgtaaaagatcctcgggtgattttaacatgcagagaagcttgggaaccactgctgtaatatcagagtcagccaagggactcagaagactcccccactcaggctgaacaatctgtgttccacaaacactgctctaccaagtctgctatgatgtaattctgactcgtggatgtgatggacctaagatgtgcacagctttttggtttttctttttttaaaaaaaatctaaacttaagagttagtactcataatgatctcccttacaccccctccactaccacaccccttgctttttagtatttactttgagatgtgaaacgcatttgggatctaaataaattgatcacatggatt

SEQ ID NO: 326720 - protein, 361 aa, Artificial Sequence [sequence omitted]

SEQ ID NO: 326721 - DNA, 282 bp, Artificial Sequence
  derived and/or modified sequence
atgatccccatgttcaccgtgaccctggaggacagcggcaccctgtggaagagcctgcacagcagcagcgagagcgagatgaccaccctgccccccctgcccatgaccagacccaagctgaccgccctggccagacagaagctgccctgcagcagcagaaagatccccagaagccagctgatcaaggagaaggacgacatcgaccactacctggaggtgaacttcaagggcctgagcaaggaggaggtggccgcctacagaaacagctacaagaagaactag

SEQ ID NO: 326722 - DNA, 282 bp, Artificial Sequence
  derived and/or modified sequence
atgattcctatgtttacggttacattagaggactctgggacactgtggaagtccttgcacagttctagtgagtctgaaatgacaactttacccccacttcctatgaccaggcccaagctcactgcgcttgccaggcagaagctcccatgcagctctcgcaaaataccaagaagtcagttgattaaggagaaggatgacattgaccactacctggaggtaaactttaagggactgtcgaaagaagaggttgctgcttaccggaatagttataaaaagaactag

SEQ ID NO: 326723 - DNA, 282 bp, Artificial Sequence
  derived and/or modified sequence
atgatccccatgttcaccgtgaccctggaggacagcggcaccctgtggaagagcctgcacagcagcagcgagagcgagatgaccaccctgccccccctgcccatgacccggcccaagctgacagccctggcccggcagaagctgccctgcagcagcaggaagatccccaggagccagctgatcaaggagaaggatgacatcgaccactacctggaggtgaacttcaagggcctgagcaaggaggaggtggccgcctacagaaattcctacaagaagaactag

SEQ ID NO: 326724 - DNA, 282 bp, Artificial Sequence
  derived and/or modified sequence
atgatccccatgttcaccgtgaccctggaggacagcggcaccctgtggaaatccctgcactcttcatcagagagcgaaatgactaccctcccgccacttccgatgactcgacctaagctcactgcccttgctaggcaaaagctgccctgttcctcccgcaagattccacggagccagctgatcaaagaaaaagacgacatagatcattacttggaagtcaactttaagggactgtctaaggaggaagtggctgcttataggaactcttataagaaaaattag

SEQ ID NO: 326725 - DNA, 282 bp, Artificial Sequence
  derived and/or modified sequence
atgataccaatgttcacagttaccctggaagattcaggcactctgtggaaatctcttcatagtagctccgagagtgagatgacaacccttccccctctgcccatgaccaggccaaaactgaccgcattggccagacaaaagctgccctgtagcagcagaaaaataccaagaagtcaactgattaaggagaaagatgatattgatcattatctcgaggtgaatttcaaagggttgagcaaggaggaagtcgcagcatacaggaactcctataagaagaattag

SEQ ID NO: 326726 - DNA, 565 bp, Artificial Sequence
  derived and/or modified sequence
cagcagtaatctgcaaatagattgtagctgtgatacaagagccaaccagcagatcaaagagtacaccaaatttcttctgaataccaacagtggaatggcttcaggcggccttttgatctttgtctcagcacccgatgatgccacactgtagcactgcccacttgctagcactggcggaggttcctgtgggtcctcctaacaggctgattcagcctgagctcctggggctaagctcatttggtagcagccaaagagggctacactggtgtgggttaagaacttagatgattccgatgttcactgtaacattggaagactctggaactctgtggaaaagtcttcacagctcctctgaatccgaaatgaccaccctgcccccactgcccatgacacgcccgaagcttacagccttagccagacagaagctgccttgctcctccagaaaaattccaaggtctcaattgatcaaagaaaaagatgacatagatcattatctagaggtaaatttcaaaggattatcaaaagaggaagttgctgcttataggaactcctacaagaagaatat

SEQ ID NO: 326727 - protein, 606 aa, Artificial Sequence
  derived and/or modified sequence
MGNTCRVCYQLEAIKRSNEMSNVMGNTTWTTSGLKSQGRLSVGSNRDREISMSVGLGRSQLDSKGGVVGGTIDVNALEMVAHISEHPNQQPSHKIQITMGSTEARVDYMGSSILMGIFSNADLKLQDEWKVNLYNTLDSSITDKSEIFVHGDLKWDIFQVMISRSTTPDLIKIGMKLQEFFTQQFDTSKRALSTWGPVPYLPPKTMTSNLEKSSQEQLLDAAHHRHWPGVLKVVSGCHISLFQIPLPEDGMQFGGSMSLHGNHMTLACFHGPNFRSKSWALFHLEEPNIAFWTEAQKIWEDGSSDHSTYIVQTLDFHLGHNTMVTKPCGALESPMATITKITRRRHENPPHGVASVKEWFNYVTATRNEELNLLRNVDANNTENSTTVKNSSLLSGFRGGSSYNHETETIFALPRMQLDFKSIHVQEPQEPSLQDASLKPKVECSVVTEFTDHICVTMDAELIMFLHDLVSAYLKEKEKAIFPPRILSTRPGQKSPIIIHDDNSSDKDREDSITYTTVDWRDFMCNTWHLEPTLRLISWTGRKIDPVGVDYILQKLGFHHARTTIPKWLQRGVMDPLDKVLSVLIKKLGTALQDEKEKKGKDKEEH

SEQ ID NO: 326728 - protein, 498 aa, Artificial Sequence
  derived and/or modified sequence
MLLKKHAGKGGGREPRSEDPTPAEQHCARTMPPCAVLAALLSVVAVVSCLYLGVKTNDLQARIAALESAKGAPSIHLLPDTLDHLKTMVQEKVERLLAQKSYEHMAKIRIAREAPSECNCPAGPPGKRGKRGRRGESAGPPGAPAPSQGPPGPKGDKGEQGDQGPRGPLGPPGQKGSIGAPGIPGMNGQKGEPGLPGAVGQNGIPGPKGEPGEQGEKGDAGENGPKGDTGEKGDPGSSAAGIKGEPGESGRPGQKGEPGLPGLPGLPGIKGEPGFIGPQGEPGLPGLPGTKGERGEAGPPGRGERGEPGAPGPKGKQGESGTRGPKGSKGDRGEKGDSGAQGPRGPPGQKGDQGATEIIDYNGNLHEALQRITTLTVTGPPGPPGPQGLQGPKGEQGSPGIPGMDGEQGLKGSKGDMGDPGSQWNERRKRRFWNAGSTGSFYHRPTRPTRSPWPTWPHGTSWTSWTKGSIWLRRKARIPGYRWSYGTPWPCRSQRRKS

SEQ ID NO: 326729 - protein, 70 aa, Artificial Sequence
  derived and/or modified sequence
MLLKKHAGKGGGREPRSEDPTPAEQHCARTMPPCAVLAALLSVVAVVSCLYLGVKTNDLQARIAALESAK

SEQ ID NO: 326730 - DNA, 1497 bp, Artificial Sequence
  derived and/or modified sequence
atgctgctgaagaagcacgccggcaagggcggcggcagagagcccagaagcgaggaccccacccccgccgagcagcactgcgccagaaccatgcccccctgcgccgtgctggccgccctgctgagcgtggtggccgtggtgagctgcctgtacctgggcgtgaagaccaacgacctgcaggccagaatcgccgccctggagagcgccaagggcgcccccagcatccacctgctgcccgacaccctggaccacctgaagaccatggtgcaggagaaggtggagagactgctggcccagaagagctacgagcacatggccaagatcagaatcgccagagaggcccccagcgagtgcaactgccccgccggcccccccggcaagagaggcaagagaggcagaagaggcgagagcgccggcccccccggcgcccccgcccccagccagggcccccccggccccaagggcgacaagggcgagcagggcgaccagggccccagaggccccctgggcccccccggccagaagggcagcatcggcgcccccggcatccccggcatgaacggccagaagggcgagcccggcctgcccggcgccgtgggccagaacggcatccccggccccaagggcgagcccggcgagcagggcgagaagggcgacgccggcgagaacggccccaagggcgacaccggcgagaagggcgaccccggcagcagcgccgccggcatcaagggcgagcccggcgagagcggcagacccggccagaagggcgagcccggcctgcccggcctgcccggcctgcccggcatcaagggcgagcccggcttcatcggcccccagggcgagcccggcctgcccggcctgcccggcaccaagggcgagagaggcgaggccggcccccccggcagaggcgagagaggcgagcccggcgcccccggccccaagggcaagcagggcgagagcggcaccagaggccccaagggcagcaagggcgacagaggcgagaagggcgacagcggcgcccagggccccagaggcccccccggccagaagggcgaccagggcgccaccgagatcatcgactacaacggcaacctgcacgaggccctgcagagaatcaccaccctgaccgtgaccggcccccccggcccccccggcccccagggcctgcagggccccaagggcgagcagggcagccccggcatccccggcatggacggcgagcagggcctgaagggcagcaagggcgacatgggcgaccccggcagccagtggaacgagagaagaaagagaagattctggaacgccggcagcaccggcagcttctaccacagacccaccagacccaccagaagcccctggcccacctggccccacggcaccagctggaccagctggaccaagggcagcatctggctgagaagaaaggccagaatccccggctacagatggagctacggcaccccctggccctgcagaagccagagaagaaagagctag

SEQ ID NO: 326731 - DNA, 1497 bp, Artificial Sequence
  derived and/or modified sequence
atgctgttaaagaagcatgccgggaagggcggagggcgagagccccggtctgaggaccccactcctgccgaacagcattgcgcgcggactatgcccccctgcgctgtgctggctgcgctgctgtctgtggttgcagtcgtcagctgtctgtatctaggtgtgaagacaaacgatcttcaagcaaggattgcagccttagagagcgccaagggggcaccgtcaatccacttactgcccgacaccctagaccacctgaagacaatggtgcaagaaaaagtggaacggcttctcgcacagaaaagctacgagcacatggcaaaaattagaattgcaagagaggctccatccgaatgtaattgtcccgctggtccgcctggcaagagaggaaaacgaggccgccgaggggagtctgcaggaccgcctggggccccggcccccagccagggtcctccagggcctaagggtgacaagggggagcaaggcgaccagggacctagaggtcccttgggtcctcctggccagaagggcagtataggggcccccgggatccccggtatgaacggccaaaagggcgaaccaggccttcctggggccgtagggcaaaatggtatcccagggccaaagggcgagcccggtgagcagggagagaaaggtgacgctggcgagaacggccctaaaggggacaccggagaaaagggggatccagggtccagcgctgctgggattaaaggcgagcctggcgagagcggccgaccaggtcaaaaaggagagccgggcctcccaggactcccgggtctgccaggaattaaaggggagcctggcttcatagggcctcagggggagcctgggcttcccgggctgccgggaaccaagggtgagagaggagaagccggacctccagggcgcggcgagcgtggggaaccgggtgcgcctggcccgaaagggaaacagggcgagagcggcactcgggggccaaagggcagcaaaggggaccggggcgaaaaaggtgattccggcgcccagggcccacgcggccctcctggccagaagggtgaccagggcgccactgagattattgactacaacggcaatcttcacgaggccctgcagcgcatcactacactgactgtaacgggaccacctggccctcccggtccgcagggactgcagggaccgaaaggtgagcagggcagtcctgggatcccaggcatggacggtgagcagggactaaaaggatcaaagggcgacatgggagatcccggttctcagtggaatgaacgccggaagcgcagattttggaatgccggatcaactggatctttttaccaccggcccacaaggcctacgcgcagtccttggcccacttggcctcacggcacctcttggacatcctggacgaagggaagcatatggctaagacgaaaggcgaggattccgggatacaggtggtcttacggtacaccatggccatgccgatcgcagcgcagaaaatcatag

SEQ ID NO: 326732 - DNA, 1497 bp, Artificial Sequence
  derived and/or modified sequence
atgctgctgaagaagcatgctggaaaaggaggcggccgggagcccaggtctgaggaccccaccccagctgagcagcactgtgcccggaccatgccaccctgtgctgtgctggccgccctgctgtctgtggtggccgtggtgtcctgcctgtacctgggcgtgaagaccaatgacctgcaggccagaattgctgccctggagagcgccaagggggcccccagcatccacctgctgcctgacaccctggaccacctgaagaccatggtgcaggagaaggtggagcggctgctggcccagaagagctatgagcacatggccaagatccgcatcgcccgggaggcccccagcgagtgcaactgcccagctggccccccaggcaagaggggcaagagaggaagaagaggagagagcgctggccccccaggggccccagcccccagccagggccccccaggccccaagggggacaagggggagcagggcgaccagggcccccggggccccctgggccccccaggccagaagggcagcatcggggcccctggcatccctggcatgaatggccagaagggggagcccggcctgcccggggctgtgggccagaatggcatccctggccccaagggggagcctggagagcagggcgagaagggagatgctggggagaatggccccaagggggacacaggagagaagggggaccccggcagcagcgctgctggcatcaagggggagcccggggagagcggccggcccggccagaagggggagcccggcctgcccggcctgcccggcctgcccggcatcaagggggagcccggcttcatcggcccccagggcgagcccggcctgcccggcctgcccggcaccaagggggagcggggggaggccggccccccaggccgcggggagcggggggagcccggggcccctggccccaagggcaagcagggcgagagcggcacccggggccccaagggcagcaaaggagacagaggagagaagggggacagcggggcccagggcccccggggccccccaggccagaagggggaccagggcgccacagagatcatcgactacaacggcaacctgcacgaggccctgcagaggatcaccaccctgactgtgacaggccccccaggccccccaggcccccagggcctgcagggccccaagggggagcagggcagccctggcatccctggcatggatggagagcagggcctgaagggcagcaagggggacatgggagaccccggcagccagtggaatgaaagaaggaagaggcgcttctggaatgccggcagcacaggcagcttctaccaccggcccacccggcccaccaggagcccctggcccacctggccccacggcacctcctggacctcctggaccaagggcagcatctggctgcggaggaaggcccgcatccctggctaccgctggagctatggcaccccctggccctgccgcagccagaggaggaagagctag

SEQ ID NO: 326733 - DNA, 1497 bp, Artificial Sequence
  derived and/or modified sequence
atgctgctgaagaagcacgccggcaagggcggcggccgggagcccaggagcgaggacccaaccccggccgagcagcattgtgctcggacaatgcctccatgcgccgttctggccgcattgctctcggtggttgccgtcgtgagctgcctgtatctaggcgttaaaactaacgacttgcaggctaggatcgccgctctcgagagcgctaagggagcccccagcatccacttattgcctgacaccctagatcatctgaagacaatggtgcaggagaaggtggagcgcttgctggcacagaagagttatgagcacatggccaaaatacgcatagcccgagaggcaccttccgagtgcaattgccccgcaggtccccccgggaagcgcgggaagcgaggccgcagaggcgagtccgcagggccaccaggagcacccgctccatcccaggggccccctggcccaaagggcgacaagggcgagcaaggggaccaggggcctcgcggcccccttggcccaccgggacagaagggtagtatcggcgcacccggaatccccggcatgaatggccagaagggggagccagggctcccgggcgctgtcggccagaacggcattcctgggcccaagggtgaacccggcgagcagggggaaaagggcgatgctggagagaacggtcctaaaggggacacgggtgagaaaggtgatcctggctcctcggccgccgggatcaaaggcgagcctggggagagcgggcggccgggccagaagggtgagcctgggttgcccggcctgccaggccttccgggaatcaaaggtgagcctggatttattggtcctcagggcgaacccgggctgccagggctcccgggtacaaagggtgaaagaggagaagctggaccccccggcaggggcgaacgtggggagccgggcgccccaggtcctaagggtaaacagggagaatcgggtactagagggccgaaggggagtaaaggagacagaggtgaaaagggcgacagcggagcacaggggccgagaggccctcccgggcagaaaggagaccaaggggcgactgaaattattgattataacggaaatctgcacgaagctctgcagaggattaccacacttacggtgacaggccctccaggaccaccaggcccccagggactgcagggaccgaagggggaacagggcagtcctgggattccaggaatggacggagagcagggcctgaagggcagtaaaggagatatgggggaccctggctcccagtggaacgaacggcggaagagacggttttggaacgcgggaagtacagggtctttctaccacagacccacaaggcccacacgctccccctggcctacatggccccacggcacatcgtggacaagttggactaaaggctctatttggttgcgaaggaaggctaggattccgggctatcggtggtcttatggtactccatggccatgtaggagccaacgaaggaaaagctag

SEQ ID NO: 326734 - DNA, 1497 bp, Artificial Sequence
  derived and/or modified sequence
atgctgcttaaaaaacatgcaggcaaaggaggagggagggaacctcgctccgaggatccaacccctgcagaacagcattgcgccaggaccatgcctccttgcgccgttcttgcagctctgcttagtgtcgtggccgtcgtgagttgcctttatcttggcgtcaaaaccaatgaccttcaggccagaattgccgcactagaatcggctaagggagcccctagcattcacttgttgcctgacacactggaccatctcaagacaatggttcaggaaaaagtcgagcgcctgctggcccagaagtcctacgagcacatggccaagatacgcatcgccagagaagctccatccgagtgcaactgtcccgcaggtccgccaggaaagcgtggaaagagaggcagacggggtgagtccgccggacccccaggagcacctgctccgagtcagggcccacccggaccaaaaggcgataaaggagaacagggggaccagggccctcggggaccactggggcctccaggccagaaaggctctattggcgcacctggaattcctgggatgaatggtcagaagggagaaccgggtctgcctggggctgttggacagaacggtatccccggaccaaaaggggaacccggagagcaaggggagaaaggcgacgccggagagaacggcccaaaaggcgatacaggagagaagggggatccaggctcatccgcagccggtatcaaaggcgagccaggcgagtccggccgtcctggccagaaaggtgagccagggttaccaggtctgcccggactccccggaatcaagggggaacccggatttataggtccccagggcgagccgggactcccagggttgccaggcaccaaaggtgagaggggggaggcaggaccacccggacggggtgaacgcggagaaccaggagctccaggccctaaaggtaagcagggcgaatccggaacccgcggtccaaagggttctaaaggcgacagaggtgagaaaggagattccggagcccaaggcccaaggggtcctccagggcagaagggtgaccagggagctacggaaatcatcgactataacggaaatctgcatgaggcgctacaacgtataaccaccctgacagtgacagggcctcctggtccgcctggccctcagggcctgcaaggtcctaaaggtgaacagggctcacccggaatccctggcatggacggagagcagggactcaaaggctcaaaaggggatatgggagatcccggttcacagtggaatgaacggaggaagcgcagattctggaatgccggttccactggtagcttttaccataggcccacaaggcctacgcgatctccatggcctacctggccgcatggaacgtcttggacaagctggaccaagggatctatttggctgcgacggaaagccagaatccctggctacagatggtcatacggcaccccctggccatgtaggtctcagcggagaaagtcatag

SEQ ID NO: 326735 - DNA, 1494 bp, Artificial Sequence
  derived and/or modified sequence
atgctgctgaagaagcacgcagggaaaggagggggccgggagcccagatccgaggacccgacccctgccgaacagcattgtgcccggaccatgcccccgtgtgccgtcctggcggccctcctgtcagtggtggccgtggtgtcttgcctgtacctgggtgtgaaaaccaacgacctccaggcgaggatcgccgctctcgaatccgccaaaggggccccttccattcatctgctgcctgataccctggatcacctcaagactatggtgcaagagaaagtggagcgacttctggctcagaaatcctatgaacatatggctaaaataagaatcgcaagagaagcaccttcagaatgtaactgcccagcaggccctccagggaaacgaggtaagagaggccgaagaggagaatctgctgggccgccaggggcacctgcccccagtcagggccctcctggtccaaaaggcgataagggagaacaaggtgatcagggacctaggggtcctctagggcctccgggacaaaagggttctattggagcacctggaattccagggatgaatgggcaaaagggtgagcccgggttgcctggagcagtaggacagaatggaataccaggacctaagggagaacctggagaacaaggtgaaaagggagacgctggagagaacggccccaagggtgacacaggcgaaaagggtgaccctggatcatctgctgcaggaattaagggagaacctggggaatctggtcgtccagggcaaaagggtgaaccagggcttcctgggcttcctggacttccggggataaagggagaaccaggtttcattggtcctcaaggagaaccaggcttaccaggtttaccaggaacaaaaggtgaacggggggaagcagggcctcctggaagaggtgagcgaggggaacctggagcccccggaccaaaggggaaacaaggtgaatcaggaactagaggcccaaaggggtcaaagggggatcgtggagaaaaaggggactctggagctcagggaccaaggggtccacctggtcaaaaaggggatcaaggagccactgagatcatagactacaacggcaacctccacgaagccttacagaggattaccaccttaactgtcacgggtccccctggacctcctggacctcaaggactacaagggccaaagggagagcagggatctccaggaatcccaggaatggatggagagcagggactcaaaggctcaaagggagacatgggggacccagggagccaatggaatgaaaggagaaaaaggagattctggaatgccgggtccacagggtccttctatcataggcccaccaggcccaccaggtccccatggcccacctggccccatgggacctcatggacttcctggaccaaagggagcatctggcttagacggaaagccaggatcccggggtacagatggtcctatgggaccccatggccctgcaggtcccaaaggagaaagagt

SEQ ID NO: 326736 - protein, 656 aa, Artificial Sequence
  derived and/or modified sequence
MLLKKHAGKGGGREPRSEDPTPAEQHCARTMPPCAVLAALLSVVAVVSCLYLGVKTNDLQARIAALESAKGAPSIHLLPDTLDHLKTMVQEKVERLLAQKSYEHMAKIRIAREAPSECNCPAGPPGKRGKRGRRGESAGPPGAPAPSQGPPGPKGDKGEQGDQGPRMVFPKINHGFLSADQQLIKRRLIKGDQGQAGPPGPPGPPGPRGPPGDTGKDGPRGMPGVPGEPGKPGEQGLMGPLGPPGQKGSIGAPGIPGMNGQKGEPGLPGAVGQNGIPGPKGEPGEQGEKGDAGENGPKGDTGEKGDPGSSAAGIKGEPGESGRPGQKGEPGLPGLPGLPGIKGEPGFIGPQGEPGLPGLPGTKGERGEAGPPGRGERGEPGAPGPKGKQGESGTRGPKGSKGDRGEKGDSGAQGPRGPPGQKGDQGATEIIDYNGNLHEALQRITTLTVTGPPGPPGPQGLQGPKGEQGSPGIPGMDGEQGLKGSKGDMGDPGMTGEKGGIGLPGLPGANGMKGEKGDSGMPGPQGPSIIGPPGPPGPHGPPGPMGPHGLPGPKGTDGPMGPHGPAGPKGERGEKGAMGEPGPRGPYGLPGKDGEPGLDGFPGPRGEKGDLGEKGEKGFRGVKGEKGEPGQPGLDGLDAPCQLGPDGLPMPGCWQK

SEQ ID NO: 326737 - protein, 583 aa, Artificial Sequence
  derived and/or modified sequence
MLLKKHAGKGGGREPRSEDPTPAEQHCARTMPPCAVLAALLSVVAVVSCLYLGVKTNDLQARIAALESAKGAPSIHLLPDTLDHLKTMVQEKVERLLAQKSYEHMAKIRIAREAPSECNCPAGPPGKRGKRGRRGESAGPPGGPPGPKGDKGEQGDQGPRMVFPKINHGFLSADQQLIKRRLIKGDQGQAGPPGPPGPPGPRGPPGDTGKDGPRGMPGVPGEPGKPGEQGLMGPLGPPGQKGSIGAPGIPGMNGQKGEPGLPGAVGQNGIPGPKGEPGEQGEKGDAGENGPKGDTGEKGDPGSSAAGIKGEPGESGRPGQKGEPGFIGPQGEPGLPGLPGTKGERGEAGPPGRGERGEPGAPGPKGKQGESGTRGPKGSKGDRGEKGDSGAQGPRGPPGQKGDQGATEIIDYNGNLHEALQRITTLTVTGPPGPPGPQGLQGPKGEQGSPGIPGMDGEQGLKGSKGDMGDPGMTGEKGGIGLPGLPGANGMKGEKGDSGMPGPQGPSIIGPPGPPGPHGPPGPMGPHGLPGPKGTDGPMGPHGPAGPKGERGEKGAMGEPGPRGPYGLPQGPDGLPMPGCWQK

SEQ ID NO: 326738 - protein, 29 aa, Artificial Sequence
  derived and/or modified sequence
  misc_feature (1)..(1): Xaa can be any naturally occurring amino acid
XGPRGEKGDLGEKGEKGPDGLPMPGCWQK

SEQ ID NO: 326739 - DNA, 213 bp, Artificial Sequence
  derived and/or modified sequence
atgctgctgaagaagcacgccggcaagggcggcggcagagagcccagaagcgaggaccccacccccgccgagcagcactgcgccagaaccatgcccccctgcgccgtgctggccgccctgctgagcgtggtggccgtggtgagctgcctgtacctgggcgtgaagaccaacgacctgcaggccagaatcgccgccctggagagcgccaagtag

SEQ ID NO: 326740 - DNA, 213 bp, Artificial Sequence
  derived and/or modified sequence
atgctgctgaagaagcatgctggcaaagggggtggccgcgaacctcgcagtgaggatcccacaccagctgaacagcattgcgcaaggaccatgcctccttgcgccgtgctcgcagctctgcttagcgttgttgcagtcgtgtcctgcctgtacctcggagtaaaaactaacgatctgcaggccagaatcgctgccctggaaagcgccaagtag

SEQ ID NO: 326741 - DNA, 213 bp, Artificial Sequence
  derived and/or modified sequence
atgctgctgaagaagcatgctggaaaaggaggcggccgggagcccaggtctgaggaccccaccccagctgagcagcactgtgcccggaccatgccaccctgtgctgtgctggccgccctgctgtctgtggtggccgtggtgtcctgcctgtacctgggcgtgaagaccaatgacctgcaggccagaattgctgccctggagagcgccaagtag

SEQ ID NO: 326742 - DNA, 213 bp, Artificial Sequence
  derived and/or modified sequence
atgctgctgaagaagcacgccggcaagggcggcggccgggagccccgctcggaggatccaacaccggccgaacagcattgtgctcgaacaatgcctccttgcgccgtgctggcggctttactctcggtggtagccgtagtaagctgcttgtatttgggtgtaaagacgaatgatctacaggcacggatcgccgccctcgagagtgccaagtag

SEQ ID NO: 326743 - DNA, 213 bp, Artificial Sequence
  derived and/or modified sequence
atgctgctgaagaaacatgcaggtaaggggggagggcgagaacctcgctctgaagaccccaccccggcagagcaacattgcgctcgtaccatgccaccttgcgctgtgttggcagccctactgtctgttgtggccgttgtttcttgtctatatctgggcgtgaaaaccaacgatctgcaggccagaatcgcagcactcgagtcagcgaagtag

SEQ ID NO: 326744 - DNA, 428 bp, Artificial Sequence
  derived and/or modified sequence
gatccttcgggcagccgcgacttcggcttcgcgagtagcattggttccttgggtttatttcgttttcctctctcttctccaccttagtcgcccctttcgcgctgcgctgtagcgtgctctcacagcctttttgccttgaactgaatgcaggtgggaaacaggattatttgaggtgtagagggtgggaagcgaagccgagacggccgaccccgccacgatgctgctgaagaagcacgcagggaaaggagggggccgggagcccagatccgaggacccgacccctgccgaacagcattgtgcccggaccatgcccccgtgtgccgtcctggcggccctcctgtcagtggtggccgtggtgtcttgcctgtacctgggtgtgaaaaccaacgacctccaggcgaggatcgccgctctcgaatccgccaaag

SEQ ID NO: 326745 - DNA, 30 bp, Artificial Sequence
  derived and/or modified sequence
atgagctactaccagagacccttcagctag

SEQ ID NO: 326746 - DNA, 30 bp, Artificial Sequence
  derived and/or modified sequence
atgagttactaccagcggcctttctcttag

SEQ ID NO: 326747 - DNA, 30 bp, Artificial Sequence
  derived and/or modified sequence
atgagctactaccagaggcccttctcctag

SEQ ID NO: 326748 - DNA, 30 bp, Artificial Sequence
  derived and/or modified sequence
atgagctactaccagcggcccttcagctag

SEQ ID NO: 326749 - DNA, 30 bp, Artificial Sequence
  derived and/or modified sequence
atgtcatactatcagcgtccattttcctag

SEQ ID NO: 326750 - protein, 68 aa, Artificial Sequence
  derived and/or modified sequence
MSYYQRPFSPSAYSLPASLNSSIVMQHGTSLDSTDTYPQHAQSLDGTTSSSIPLYRSSEEEKRVTVIK

SEQ ID NO: 326751 - protein, 59 aa, Artificial Sequence
  derived and/or modified sequence
MSYYQRPFSPSAYSLPASLNSSIVMQHGTSLDSTDTYPQHAQSLDGTTSSSIPLYRSSE

SEQ ID NO: 326752 - protein, 56 aa, Artificial Sequence
  derived and/or modified sequence
MSYYQRPFSPSAYSLPASLNSSIVMQHGTSLDSTDTYPQHAQSLDGTTSSSIPLYR

SEQ ID NO: 326753 - protein, 93 aa, Artificial Sequence
  derived and/or modified sequence
MSYYQRPFSPSAYSLPASLNSSIVMQHGTSLDSTDTYPQHAQSLDGTTSSSIPLYRSSEEEKRVTVIKAPHYPGIGPVDESGIPTAIRTTVDR

SEQ ID NO: 326754 - protein, 89 aa, Artificial Sequence
  derived and/or modified sequence
MSYYQRPFSPSAYSLPASLNSSIVMQHGTSLDSTDTYPQHAQSLDGTTSSSIPLYRSSEEEKRVTVIKAPHYPGIGPVDESGIPTAIRT

SEQ ID NO: 326755 - protein, 100 aa, Artificial Sequence
  derived and/or modified sequence
MSYYQRPFSPSAYSLPASLNSSIVMQHGTSLDSTDTYPQHAQSLDGTTSSSIPLYRSSEEEKRVTVIKAPHYPGIGPVDESGIPTAIRTTVDRPKDWYKT

SEQ ID NO: 326756 - DNA, 120 bp, Artificial Sequence
  derived and/or modified sequence
atggagatcaaggaggagggcgccagcgaggagggccagcacttcctgcccaccgcccaggccaacgaccccggcgactgccagttcaccagcatccagaagacccccaacgagccctag

SEQ ID NO: 326757 - DNA, 120 bp, Artificial Sequence
  derived and/or modified sequence
atggagataaaggaggaaggggcaagtgaggagggccagcacttcctgcccactgctcaggcgaatgaccccggagattgtcagtttacatctatacagaagacgccgaatgagccttag

SEQ ID NO: 326758 - DNA, 120 bp, Artificial Sequence
  derived and/or modified sequence
atggagatcaaggaggagggcgccagcgaggagggccagcacttcctgcccacagcccaggccaatgaccccggggactgccagttcaccagcatccagaagaccccaaatgagccctag

SEQ ID NO: 326759 - DNA, 120 bp, Artificial Sequence
  derived and/or modified sequence
atggagatcaaggaggagggcgccagcgaggagggccagcacttccttcccaccgcgcaggccaatgatcccggtgactgtcagtttacatctattcaaaagaccccaaacgaaccctag

SEQ ID NO: 326760 - DNA, 120 bp, Artificial Sequence
  derived and/or modified sequence
atggaaatcaaggaagagggtgcaagcgaagagggtcagcatttcttgcccaccgcccaagccaacgatcccggtgattgccagttcacatctatccagaagacgccaaatgagccctag

SEQ ID NO: 326761 - protein, 39 aa, Artificial Sequence
  derived and/or modified sequence
MEIKEEGASEEGQHFLPTAQANDPGDCQFTSIQKTPNEP

SEQ ID NO: 326762 - protein, 938 aa, Artificial Sequence
  derived and/or modified sequence
MEIKEEGASEEGQHFLPTAQANDPGDCQFTSIQKTPNEPQLEFILACKDLVAPVRDRKLNTLVQISVIHPVEQSLTRYSSTEIVEGTRDPLFLTGVTFPSEYPIYEETKIKLTVYDVKDKSHDTVRTSVLPEHKDPPPEVGRSFLGYASFKVGELLKSKEQLLVLSLRTSDGGKVVGTIEVSVVKMGEIEDGEADHITTDVQGQKCALVCECTAPESVSGKDNLPFLNSVLKNPVCKLYRFPTSDNKWMRIREQMSESILSFHIPKELISLHIKEDLCRNQEIKELGELSPHWDNLRKNVLTHCDQMVNMYQDILTELSKETGSSFKSSSSKGEKTLEFVPINLHLQRMQVHSPHLKDALYDVITVGAPAAHFQGFKNGGLRKLLHRFETERRNTGYQFIYYSPENTAKAKEVLSNINQLQPLIATHADLLLNSASQHSPDSLKNSLKMLSEKTELFVHAFKDQLVRSALLALYTARPGGILKKPPSPKSSTEESSPQDQPPVMRGQDSIPHHSDYDEEEWDRVWANVGKSLNCIIAMVDKLIERDGGSEGSGGNNDGEKEPSLTDAIPSHPREDWYEQLYPLILTLKDCMGEVVNRAKQSLTFVLLQELAYSLPQCLMLTLRRDIVFSQALAGLVCGFIIKLQTSLYDPGFLQQLHTVGLIVQYEGLLSTYSDEIGMLEDMAVGISDLKKVAFKIIEAKSNDVLPVITGRREHYVVEVKLPARMFESLPLQIKEGQLLHVYPVLFNVGINEQQTLAERFGDVSLQESINQENFELLQEYYKIFMEKMPPDYISHFQEQNDLKALLENLLQNIQSKKRKNVEIMWLAATICRKLNGIRFTCCKSAKDRTSMSVTLEQCSILRDEHQLHKDFFIRALDCMRSRQTQGALNESDDPETGCLTDNKPTSRHFYPVALLLVSSHLLVVWLILSLALLLAKYQ

SEQ ID NO: 326763 - protein, 817 aa, Artificial Sequence
  derived and/or modified sequence
MEIKEEGASEEGQHFLPTAQANDPGDCQFTSIQKTPNEPQLEFILACKDLVAPVRDRKLNTLVQISVIHPVEQSLTRYSSTEIVEGTRDPLFLTGVTFPSEYPIYEETKIKLTVYDVKDKSHDTVRTSVLPEHKDPPPEVGRSFLGYASFKVGELLKSKEQLLVLSLRTSDGGKVVGTIEVSVVKMGEIEDGEADHITTDVQGQKCALVCECTAPESVSGKDNLPFLNSVLKNPVCKLYRFPTSDNKWMRIREQMSESILSFHIPKELISLHIKEDLCRNQEIKELGELSPHWDNLRKNVLTHCDQMVNMYQDILTELSKETGSSFKSSSSKGEKTLEFVPINLHLQRMQVHSPHLKDALYDVITVGAPAAHFQGFKNGGLRKLLHRFETERRNTGYQFIYYSPENTAKAKEVLSNINQLQPLIATHADLLLNSASQHSPDSLKNSLKMLSEKTELFVHAFKDQLVRSALLALYTARPGGILKKPPSPKSSTEESSPQDQPPVMRGQDSIPHHSDYDEEEWDRVWANVGKSLNCIIAMVDKLIERDGGSEGSGGNNDGEKEPSLTDAIPSHPREDWYEQLYPLILTLKDCMGEVVNRAKQSLTFVLLQELAYSLPQCLMLTLRRDIVFSQALAGLVCGFIIKLQTSLYDPGFLQQLHTVGLIVQYEGLLSTYSDEIGMLEDMAVGISDLKKVAFKIIEAKSNDVLPVITGRREHYVVEVKLPARMFESLPLQIKEGQLLHVYPVLFNVGINEQQTLAERFGDVSLQESINQENFELLQEYYKIFMEKMPPDYISHFQEQNDLKALLENLLQNIQSKK

SEQ ID NO: 326764 - protein, 656 aa, Artificial Sequence
  derived and/or modified sequence
MGEIEDGEADHITTDVQGQKCALVCECTAPESVSGKDNLPFLNSVLKNPVCKLYRFPTSDNKWMRIREQMSESILSFHIPKELISLHIKEDLCRNQEIKELGELSPHWDNLRKNVLTHCDQMVNMYQDILTELSKETGSSFKSSSSKGEKTLEFVPINLHLQRMQVHSPHLKDALYDVITVGAPAAHFQGFKNGGLRKLLHRFETERRNTGYQFIYYSPENTAKAKEVLSNINQLQPLIATHADLLLNSASQHSPDSLKNSLKMLSEKTELFVHAFKDQLVRSALLALYTARPGGILKKPPSPKSSTEESSPQDQPPVMRGQDSIPHHSDYDEEEWDRVWANVGKSLNCIIAMVDKLIERDGGSEGSGGNNDGEKEPSLTDAIPSHPREDWYEQLYPLILTLKDCMGEVVNRAKQSLTFVLLQELAYSLPQCLMLTLRRDIVFSQALAGLVCGFIIKLQTSLYDPGFLQQLHTVGLIVQYEGLLSTYSDEIGMLEDMAVGISDLKKVAFKIIEAKSNDVLPVITGRREHYVVEVKLPARMFESLPLQIKEGQLLHVYPVLFNVGINEQQTLAERFGDVSLQESINQENFELLQEYYKIFMEKMPPDYISHFQEQNDLKALLENLLQNIQSKKKECRNYVAGCNDLPQTEWYSFHLL

SEQ ID NO: 326765 - DNA, 2817 bp, Artificial Sequence
  derived and/or modified sequence
atggagatcaaggaggagggcgccagcgaggagggccagcacttcctgcccaccgcccaggccaacgaccccggcgactgccagttcaccagcatccagaagacccccaacgagccccagctggagttcatcctggcctgcaaggacctggtggcccccgtgagagacagaaagctgaacaccctggtgcagatcagcgtgatccaccccgtggagcagagcctgaccagatacagcagcaccgagatcgtggagggcaccagagaccccctgttcctgaccggcgtgaccttccccagcgagtaccccatctacgaggagaccaagatcaagctgaccgtgtacgacgtgaaggacaagagccacgacaccgtgagaaccagcgtgctgcccgagcacaaggaccccccccccgaggtgggcagaagcttcctgggctacgccagcttcaaggtgggcgagctgctgaagagcaaggagcagctgctggtgctgagcctgagaaccagcgacggcggcaaggtggtgggcaccatcgaggtgagcgtggtgaagatgggcgagatcgaggacggcgaggccgaccacatcaccaccgacgtgcagggccagaagtgcgccctggtgtgcgagtgcaccgcccccgagagcgtgagcggcaaggacaacctgcccttcctgaacagcgtgctgaagaaccccgtgtgcaagctgtacagattccccaccagcgacaacaagtggatgagaatcagagagcagatgagcgagagcatcctgagcttccacatccccaaggagctgatcagcctgcacatcaaggaggacctgtgcagaaaccaggagatcaaggagctgggcgagctgagcccccactgggacaacctgagaaagaacgtgctgacccactgcgaccagatggtgaacatgtaccaggacatcctgaccgagctgagcaaggagaccggcagcagcttcaagagcagcagcagcaagggcgagaagaccctggagttcgtgcccatcaacctgcacctgcagagaatgcaggtgcacagcccccacctgaaggacgccctgtacgacgtgatcaccgtgggcgcccccgccgcccacttccagggcttcaagaacggcggcctgagaaagctgctgcacagattcgagaccgagagaagaaacaccggctaccagttcatctactacagccccgagaacaccgccaaggccaaggaggtgctgagcaacatcaaccagctgcagcccctgatcgccacccacgccgacctgctgctgaacagcgccagccagcacagccccgacagcctgaagaacagcctgaagatgctgagcgagaagaccgagctgttcgtgcacgccttcaaggaccagctggtgagaagcgccctgctggccctgtacaccgccagacccggcggcatcctgaagaagccccccagccccaagagcagcaccgaggagagcagcccccaggaccagccccccgtgatgagaggccaggacagcatcccccaccacagcgactacgacgaggaggagtgggacagagtgtgggccaacgtgggcaagagcctgaactgcatcatcgccatggtggacaagctgatcgagagagacggcggcagcgagggcagcggcggcaacaacgacggcgagaaggagcccagcctgaccgacgccatccccagccaccccagagaggactggtacgagcagctgtaccccctgatcctgaccctgaaggactgcatgggcgaggtggtgaacagagccaagcagagcctgaccttcgtgctgctgcaggagctggcctacagcctgccccagtgcctgatgctgaccctgagaagagacatcgtgttcagccaggccctggccggcctggtgtgcggcttcatcatcaagctgcagaccagcctgtacgaccccggcttcctgcagcagctgcacaccgtgggcctgatcgtgcagtacgagggcctgctgagcacctacagcgacgagatcggcatgctggaggacatggccgtgggcatcagcgacctgaagaaggtggccttcaagatcatcgaggccaagagcaacgacgtgctgcccgtgatcaccggcagaagagagcactacgtggtggaggtgaagctgcccgccagaatgttcgagagcctgcccctgcagatcaaggagggccagctgctgcacgtgtaccccgtgctgttcaacgtgggcatcaacgagcagcagaccctggccgagagattcggcgacgtgagcctgcaggagagcatcaaccaggagaacttcgagctgctgcaggagtactacaagatcttcatggagaagatgccccccgactacatcagccacttccaggagcagaacgacctgaaggccctgctggagaacctgctgcagaacatccagagcaagaagagaaagaacgtggagatcatgtggctggccgccaccatctgcagaaagctgaacggcatcagattcacctgctgcaagagcgccaaggacagaaccagcatgagcgtgaccctggagcagtgcagcatcctgagagacgagcaccagctgcacaaggacttcttcatcagagccctggactgcatgagaagcagacagacccagggcgccctgaacgagagcgacgaccccgagaccggctgcctgaccgacaacaagcccaccagcagacacttctaccccgtggccctgctgctggtgagcagccacctgctggtggtgtggctgatcctgagcctggccctgctgctggccaagtaccagtag

SEQ ID NO: 326766 - DNA, 2817 bp, Artificial Sequence
  derived and/or modified sequence
atggaaattaaggaggagggtgccagtgaagaaggtcagcacttcttgcccacggctcaggcgaatgaccccggcgattgccaatttacttctattcagaagacaccgaacgaaccccagctggagttcatcctagcctgtaaagatctggtcgctcccgtgcgagatcgaaaacttaacaccctcgtccagatttccgtgatacaccctgttgaacagtctctgactcgctactcctccactgaaattgttgaagggacccgcgacccccttttcctgacaggcgttactttcccttccgaatacccaatctatgaggagactaaaatcaaattgacggtgtacgatgttaaggacaaatctcacgacaccgtccggacaagtgtgctgcccgaacacaaggacccacctcccgaggtgggccgcagtttcttgggatacgctagtttcaaagtgggcgagctgttgaagtccaaggaacagcttctggttctctcacttcgcacctctgacgggggtaaagttgtggggaccatcgaggtgtcagtcgttaagatgggagagatcgaggatggggaggccgaccatatcaccactgacgttcagggccagaaatgcgccctggtgtgtgagtgcactgcccctgagtccgtgtccggcaaagacaatcttccttttttaaattcagtgctcaaaaatcctgtgtgtaagctgtatcgctttccgacgtccgataataagtggatgcggattagggagcagatgtctgagagcatcctctcttttcatatccccaaggaactgattagcctgcacattaaggaggacctctgcaggaatcaggagattaaggaactcggcgagctctctccccattgggacaatttgcgtaaaaacgtgttaacccactgcgaccagatggttaacatgtatcaggatatcctgacagagctgtctaaggagaccggttctagctttaaaagttcctcaagcaagggggagaagacccttgaattcgtccctatcaacttgcacctgcagcggatgcaggtgcatagccctcacctcaaggatgccctctacgacgtgataactgtcggggctccagcagcacactttcagggtttcaagaatggtggcctgaggaaactcctgcatcgctttgaaaccgagaggcggaatactggttatcagtttatatactactcacccgagaataccgcgaaagccaaggaggtattgtcgaatatcaatcaattgcagccgttgatagcgacccacgccgacctccttctgaattccgccagccagcactccccggacagcctgaagaacagccttaagatgctgagcgaaaagaccgagctgttcgtgcacgcctttaaggatcaactggtccgatctgcactcctggcgctgtataccgctcggcctgggggaatcctaaagaaaccccctagtccaaagtcaagcaccgaggagagcagtccacaagatcaaccacctgttatgagaggccaggacagcatcccgcaccactccgattacgatgaggaagaatgggaccgggtgtgggccaacgttggaaagtctctgaattgcataattgcaatggtcgataagctgatcgagagagatggcggtagcgaggggtccggggggaataatgacggcgagaaggaaccctccctgaccgatgcgatccccagccatccccgcgaggactggtatgaacagctgtacccgctaatactcaccctaaaagattgcatgggcgaagttgtgaatcgcgccaagcagtctctgaccttcgtgctcctgcaggaactagcgtactctcttccccagtgcctcatgctcaccctgaggcgcgatattgtgttctcacaggcccttgccggcttggtgtgcggcttcatcataaaattgcagacaagtctgtatgaccctggcttcctccagcaactccatacagtggggctgatcgttcagtatgagggactcctgtcaacatattctgacgagataggaatgctggaagacatggctgtagggatcagcgatctgaagaaggtcgccttcaaaatcatagaagccaaaagtaacgatgtcctccccgtgattacaggccgcagggagcattacgtcgttgaggtgaagctgcctgctagaatgttcgagagcctcccattgcagatcaaggagggtcagctgctccatgtgtacccagtcctcttcaatgtcggaatcaatgaacagcaaacgctggctgagcgtttcggggatgtctccttgcaggagagcataaaccaggaaaatttcgagttgctgcaggagtactataaaatcttcatggaaaagatgcccccagactacatttcccattttcaggaacaaaatgacctgaaagctctgttggaaaatttgctgcaaaacattcagagcaaaaagaggaaaaacgtggagatcatgtggctcgcggctactatctgccgcaagctcaatggcatccgattcacctgttgcaaatctgccaaagacagaacttcaatgagtgtgactctcgaacaatgtagcatacttcgcgatgagcaccagctccacaaagatttcttcatccgagccctcgactgcatgagaagcagacagacacagggggctctcaatgagagtgacgatccagagaccggatgcctgacggacaataaaccgacatctagacatttttaccctgtagcactgctgctggtgtctagtcacctcctggtagtctggctcattctgtctctcgctctcctcttagccaagtaccagtag

SEQ ID NO: 326767 - DNA, 2817 bp, Artificial Sequence
  derived and/or modified sequence
atggagatcaaggaggagggcgccagcgaggagggccagcacttcctgcccacagcccaggccaatgaccccggggactgccagttcaccagcatccagaagaccccaaatgagccccagctggagttcatcctggcctgcaaggacctggtggcccctgtgcgggacaggaagctgaacaccctggtgcagatcagcgtcatccaccctgtggagcagagcctgacccgctacagcagcacagaaattgtggagggcacccgggaccccctcttcctgactggagtgaccttccccagcgagtaccccatctatgaggagaccaagatcaagctgactgtgtatgatgtgaaggacaagagccatgacacagtgaggacctctgtgctgcctgagcacaaggaccccccacctgaggtgggccgctccttcctgggctacgccagcttcaaggtgggggagctgctgaagagcaaggagcagctgctggtgctgagcctgcggaccagtgatggcggcaaggtggtgggcaccatcgaggtgtctgtggtgaagatgggagaaattgaagatggagaggccgaccacatcaccacagatgtgcagggccagaagtgtgccctggtgtgtgaatgtacagcccctgagagcgtgtctgggaaggacaacctgcccttcctgaacagcgtgctgaagaaccctgtgtgcaagctgtaccgcttccccaccagtgacaacaagtggatgaggatccgggagcagatgtctgagagcatcctgtccttccacatccccaaggagctgatcagcctgcacatcaaggaggacctgtgcaggaaccaggagatcaaggagctgggggagctgagcccccactgggacaacctgaggaagaatgtgctgacccactgtgaccagatggtgaacatgtaccaggacatcctgacagagctgagcaaggagaccggcagcagcttcaagagcagcagcagcaagggggagaagaccctggagtttgtgcccatcaacctgcacctgcagaggatgcaggtgcacagcccccacctgaaggatgccctgtatgatgtgatcaccgtgggcgccccagctgcccacttccagggcttcaagaatggaggcctgaggaagctgctgcacagatttgaaacagagaggaggaacacaggctaccagttcatctactacagcccagaaaatacagccaaggccaaggaggtgctgagcaacatcaaccagctgcagcccctcatcgccacccacgccgacctgctgctgaacagcgccagccagcacagcccagacagcctgaagaacagcctgaagatgctgtctgagaagacagagctgtttgtgcacgccttcaaggaccagctggtgcgcagcgccctgctggccctgtacacagcccggcctgggggcatcctgaagaagccacccagccccaagagcagcacagaggagagcagcccccaggaccagccccctgtgatgaggggccaggacagcatcccccaccacagcgactatgatgaggaggagtgggacagagtgtgggccaacgtgggcaagagcctgaactgcatcatcgccatggtggacaagctgattgaaagagatggcggcagcgagggcagcggcggcaacaatgatggagagaaggagcccagcctgacagatgccatccccagccacccccgggaggactggtatgagcagctgtaccccctcatcctgaccctgaaggactgcatgggagaggtggtgaacagagccaagcagagcctgacctttgtgctgctgcaggagctggcctacagcctgccccagtgcctgatgctgaccctgcggcgggacatcgtgttcagccaggccctggccggcctggtgtgtggcttcatcatcaagctgcagaccagcctgtatgaccccggcttcctgcagcagctgcacacagtgggcctcatcgtgcagtatgagggcctgctgagcacctacagtgatgagatcggcatgctggaggacatggctgtgggcatcagtgacctgaagaaggtggccttcaagatcatcgaggccaagagcaatgatgtgctgcccgtcatcactggaagaagagagcactacgtggtggaggtgaagctgcctgccaggatgtttgagagcctgcccctgcagatcaaggagggccagctgctgcacgtgtaccctgtgctcttcaacgtgggcatcaatgagcagcagaccctggccgagagatttggagatgtgtccctgcaggagagcatcaaccaggagaactttgagctgctgcaggagtactacaagatcttcatggagaagatgcccccagactacatcagccacttccaggagcagaatgacctgaaggccctgctggagaacctgctgcagaacatccagagcaagaagaggaagaatgtggagatcatgtggctggccgccaccatctgcaggaagctgaatggcatccgcttcacctgctgcaagagcgccaaggacaggacctccatgtctgtgaccctggagcagtgcagcatcctgagagatgagcaccagctgcacaaggacttcttcatccgggccctggactgcatgaggagccggcagacccagggcgccctgaatgaaagtgatgatcctgagaccggctgcctgacagacaacaagcccaccagccgccacttctaccctgtggccctgctgctggtgagcagccacctgctggtggtgtggctgatcctgagcctggccctgctgctggccaagtaccagtag

SEQ ID NO: 326768 - DNA, 4334 bp, Artificial Sequence
  derived and/or modified sequence
cgcacacgctcacacgctcgcaagcgaacgcaggaaagtcaggctaaaagtgtctgctgctgctgccgccccccactccgcctccgggagagaatacaaagaaatggtgttacctggcaagaggtcttctgtcttttatgaaaaattagacaaagagccttgaaaccagcgaaacaataatcaaagagcagttctgtcaaagaaaacaacataaatcaggtacagaatttcagagtgggatatcagatctttagtgtgaagatacatctacattaaaccaggaatcactagaactgacatttggacaagaaaatttggaaaattttaaaactgtgaaggttgatcatggaaattaaagaggaaggggcatcagaagaagggcagcactttcttcctacagcccaggccaatgatcccggggactgtcagttcacaagtatccagaagactccaaatgaaccgcagttggaattcatccttgcatgcaaggatctcgtggctcctgtccgtgatcgtaaactgaatacactggtgcagatctccgtaatccaccccgtggagcagagtctgacaagatactccagcaccgaaattgtggagggaacaagggacccactgtttttgactggtgtcacattcccatctgagtatcccatctatgaggagaccaaaataaaactaacagtctatgatgtcaaggataagtctcatgacaccgttcgaaccagtgtcctaccagaacataaggatcccccgccagaagttgggcgaagtttcttgggctatgccagttttaaagtgggagagctgctgaagtcaaaggagcaattgctggtcctgagcctgagaacttcagatggtggcaaagtggttggcaccatagaagtcagtgtcgtgaagatgggggagattgaggatggggaagccgaccacatcaccacagatgtacagggacaaaagtgtgccctggtatgtgaatgtacagccccggaaagtgtgagcggaaaagataacttaccttttttgaattcagtgttaaagaacccagtatgtaaattatatagatttcccacatctgacaataagtggatgcgaattcgagagcagatgtcagagagcattctttcctttcatattcctaaggaattgatttcccttcacattaaagaagatttgtgcagaaaccaggagataaaagaacttggtgagctttctccacattgggacaatctgcgaaaaaatgtccttactcactgtgatcaaatggtgaatatgtaccaagacattctgacagaacttagcaaggaaacagggtcctctttcaaatcaagcagcagcaaaggagagaaaacattagaatttgttccaataaatctacatctgcaaagaatgcaggtacacagccctcacttgaaagatgctctctacgatgtcatcactgtgggagccccagctgcccattttcagggatttaagaatggtggtcttcggaagctactccatagatttgaaacagaaagaagaaataccggataccagtttatttactattcacctgaaaacacagccaaagcaaaggaagttctcagcaacatcaatcaactacaacctcttatagcaacccatgcagacctactgcttaattctgcaagccagcattctccagacagcttgaagaattctttaaagatgctttcagaaaaaacagagctttttgtacatgccttcaaggatcaacttgtcaggagtgctcttttagcactctacactgcaaggccaggaggcattcttaagaagccaccctctcctaagagcagcacagaggagagcagtccccaagaccaacccccagtgatgagagggcaggactccataccacatcattcagactatgatgaggaagagtgggacagggtgtgggccaatgtggggaagagcctgaactgcattattgctatggtggacaaactgattgaaagagatggtggcagtgaaggcagtggcggcaacaatgatggagaaaaggaaccttcattaacagatgccattccctctcacccaagagaggactggtatgaacagttgtatcccctcatccttaccctgaaggactgcatgggagaagtggtgaaccgagccaagcagtccctgacatttgtgctccttcaggaacttgcgtacagcttgccccagtgtctgatgctgacgctaagaagagacatcgtcttcagccaagcacttgctggattggtttgtggttttatcatcaaattacagacaagtctgtatgacccaggcttcctacagcagcttcacacagtggggttgatagtacaatatgaaggactgctaagtacatacagcgatgaaattggaatgctagaggacatggccgttggcatttccgatttaaagaaagttgcatttaaaataattgaagccaaatccaatgatgtgttgccagttataacaggaagacgagaacattacgtggtagaggtcaagcttccagccagaatgtttgagtcactacctctacagattaaagaaggacagttgcttcatgtgtatccagtactttttaatgttggaatcaatgaacagcaaactctggctgaaaggtttggagatgtctctttgcaagaaagtattaatcaggaaaacttcgaacttctacaagaatattacaagatatttatggaaaagatgcctcctgattatatttcacattttcaggaacaaaatgatttaaaagcattgctagaaaatctccttcaaaatatccaatccaaaaaaagaaagaatgtagaaattatgtggctggctgcaacgatttgccgcaaactgaatggtattcgtttcacctgttgtaaaagtgccaaagacaggacatcgatgtcagtgacacttgaacaatgctcaatcttgagagatgagcaccagttacacaaggacttctttatccgagcgctggattgcatgagaagcagacaaacccagggagcactgaatgaatccgatgatcctgaaacaggctgtctaactgataacaagccaacttctcgacacttctatcctgtcgccttgctgcttgtcagctcacacctgctagttgtgtggcttattttaagtctggcgttactcttagccaaataccaataagttttatgttgtattcctttttcttttctacaaatgacaatgaactttaaattatggggacaatgctgtaatatttttacattttcaaattcacagaatttaaaaaatgttaaattgtgtttagtttgtttttcctaaaatctaaaaaacaaaaagtactatgcattaggtggattattttgctcttttgttcatggaaaggtgtttcccactgttaactagctcaagaagaatttttaaattactgtctttggaataagacaaagaacagaatcctgaaagcttgaagttctgaacctcctgtcctcatcccactaaatttattaaagaaattaagactgaaatttgcacaaacactgaaaccctgagacaagttctagagatgtgggaggttgcagactttatttccactgtgctaatatcatagatgccatctgctgatagaaattttttttaacctgttttacttctttgctgcaattaactcttttctgtcaagtaactttatggagagaatggctatttatgttttgtaattaaattacctgtttgtatctcttgtttgggttgatttggctttcagaggacttttctattctttttaacaaggtcttgtttgtgtcttgatgtaccattcccagcacttgtgacttttgtactgtccgtggacaagcactcttcctttataaagctgagacttggcccaggctgttcagaaagccattttctctcttccttgcacagctaaaataataaaatagagatgaaatttttctttaaaaatctatagggccagacttaataaattaaatgccttatttctagaacctgcatccttagggctacatatagattttaatgtgttttaaagagactgagaaattaatttgtggaaatgttataaaaaggcagatatatttatgaaactaaagtggagctgtattgtggagcaaattatatttaaagagtttattaaattttaaatgttaagagtaaagagacttaagtcatctctttcagagggcaataatggtattgggcctggcctaggatttaattttgtaagatgtatcatcacttgtggaaaaaaaaaatgtagagttgaatctttgttatttttacttggatggttgctgcaactctgcattaaacaaataaagcatatttattta

SEQ ID NO: 326769 - DNA, 2817 bp, Artificial Sequence
  derived and/or modified sequence
atggagatcaaggaggagggcgccagcgaggagggccagcacttccttccgacggcccaggcaaatgacccgggggactgccagttcacctctatccagaaaactccaaacgaaccccagctggagttcatcctggcctgcaaagatctggtagctcctgtaagggataggaaattgaataccttagtccagatttccgttatacaccctgtcgagcaatcattgacgaggtacagcagcacggagatcgtggagggtacgcgtgacccgctctttctaaccggcgtgaccttccctagtgagtatccaatctacgaagagacgaaaatcaaactaactgtgtatgacgtgaaagacaaatctcacgacacagtccgtacttctgttctgcccgagcacaaagacccccctccggaagtgggtaggtctttcttagggtatgcctcttttaaggtaggggaattgctcaagtccaaagagcagctgctcgttttgagcttacgaacttcagacggaggaaaggtcgttggcacaatcgaagtgtctgtggttaagatgggcgagattgaagatggtgaggctgaccacatcaccaccgatgtccagggacagaaatgcgctctggtctgcgaatgtacagcgcctgaatccgtctctggaaaagacaacttgcccttcttaaacagcgttctgaagaatcctgtgtgcaaactctaccgttttcccacttctgataataagtggatgaggatcagagagcagatgtctgaatccatcctgagtttccacatccctaaggagctgattagtttgcacatcaaagaggatctgtgccgaaaccaggaaatcaaagaactcggggaactgagtccccattgggataacttacggaaaaacgtacttactcattgtgaccagatggtaaacatgtaccaggatatcctgacagaactcagtaaggagacaggctccagctttaagtccagctcgagtaaaggggaaaagaccctagaatttgtacccatcaacctgcatcttcagaggatgcaggtgcattccccacacctgaaggatgctttatacgacgttatcactgtcggagcacccgccgctcacttccagggcttcaaaaacggcggattaaggaaactgttgcaccgcttcgagaccgagcgaaggaacacaggttaccagtttatttactatagtcctgaaaacacagcaaaggccaaagaggtgctctcaaacatcaatcaactgcaacccctcatcgccacccacgctgatctgctcttgaacagcgcatcacagcatagtccggattcactcaagaatagtctgaagatgttgagcgagaagacagaactgttcgtgcatgcctttaaggaccaactggttcgctctgctctgcttgctctgtatacagcaagacctggcgggatcctcaagaaacctccttcccccaagagcagcactgaggagtcatcaccacaagatcaaccacccgtgatgaggggtcaggattccatccctcatcacagcgactacgatgaggaggagtgggaccgcgtgtgggcaaatgtgggaaagagcctcaattgcatcattgcgatggtggataaactgattgagagggatgggggctccgaggggagtggtggaaacaacgacggggaaaaagaaccaagcctgactgacgccatccctagccacccaagagaggattggtacgagcaactataccctctaatcctgactctgaaggactgcatgggagaggtagtgaatagagctaagcagtccttgacgtttgtactcctgcaggagttggcctatagcttaccccagtgcctgatgctcacattacgaagggatatcgtcttttcacaggctctcgccggtctcgtctgtgggttcattataaagctgcagacaagcctgtatgacccggggttcctgcagcagctgcacaccgttggccttatcgtacagtatgagggtctcttaagtacctatagtgatgagataggtatgctcgaagatatggccgtgggcatcagcgacctgaagaaagtcgccttcaaaatcatcgaagccaaaagcaatgacgtgttgccagtaatcactggtcggagagagcactatgtggtggaggtgaaattgcccgcaaggatgtttgagagcctgccactgcagattaaggaagggcagctgcttcatgtgtatcctgtgttatttaacgttggtatcaatgaacaacagaccctcgctgagagattcggggatgtttccttgcaggagagtattaatcaagaaaactttgaactgctgcaggaatattacaagatattcatggaaaaaatgccacccgattacataagccacttccaggagcagaacgaccttaaggccctactagagaacttactgcagaatatccagagcaaaaaaagaaagaatgtggaaatcatgtggctcgccgccaccatttgcaggaagcttaatggcataagatttacctgttgcaagtcggctaaagaccgcacaagcatgagcgtcacactagaacagtgcagcatccttagggacgagcatcagcttcacaaggacttctttattcgtgctttagactgcatgaggagccgtcaaacacagggcgccctaaatgagtccgacgacccagaaaccggctgtttaaccgataacaaaccgacttccagacacttctaccccgtcgcactgcttctggttagctcacacctactcgtggtctggctgatcctcagcttggctctgctcctcgccaagtaccaatag

SEQ ID NO: 326770 - DNA, 2817 bp, Artificial Sequence
  derived and/or modified sequence
atggagatcaaagaagaaggtgcttctgaagaaggccagcattttttacctacagcccaggccaacgaccccggtgactgccaatttacaagtatccaaaagaccccaaatgagccccagttggagtttatattggcctgcaaggacctggtggctccagtgagggatagaaagcttaataccctcgtccaaataagcgtgattcatcccgtcgagcagtctctaaccaggtattcctcgactgagatcgtcgagggaacccgggatccattatttctgacgggtgttaccttccctagtgagtaccctatctatgaggagaccaaaatcaagctgacggtatacgacgtgaaagataagtcacacgataccgtacggacctccgtcctccctgagcacaaagacccaccccctgaggtcggcagaagttttctcggctatgcctcctttaaagtgggggagcttctgaagtcaaaggaacaactgctcgtcctatcactgagaaccagtgacgggggaaaggtcgtgggtactattgaggtgtcagtcgtaaaaatgggggagattgaagacggcgaggcggaccatatcactacagatgtccaggggcagaaatgcgctctggtatgtgagtgtactgcccctgagtctgtgagtgggaaggacaatttacctttcctcaacagtgtcctgaaaaaccccgtctgcaagctgtaccggtttcctacctcagacaacaagtggatgaggatccgcgaacagatgtctgaatccatcctgtctttccacatcccaaaggagctcatttccctccatatcaaggaggacctttgtcgaaaccaggaaattaaagagctcggcgaactgtcgccccattgggataacctgcgaaagaacgttctgacacattgcgaccagatggtaaatatgtaccaggatatactgaccgaattgagcaaagaaacaggaagctcctttaaatcttcctcatcaaagggagagaagacattagagttcgtgcccatcaatcttcacctccaacggatgcaagtacattccccgcacctcaaggacgcactttacgacgtgatcactgtgggcgctcctgctgcacacttccaaggctttaagaacgggggtctccgaaaactgttgcaccggtttgagactgaaaggcgcaacaccggctatcaatttatttactacagtcctgagaacacagccaaggccaaggaggtcctcagcaatattaaccagctccagccccttattgctacccatgcagacctgctgcttaacagcgccagccagcattctcctgactcattgaaaaacagcttgaagatgctctccgagaagacagaactgttcgtacacgccttcaaggaccaacttgtacgctccgccctcttggcactctacacagcaaggcccggtggcattctgaagaagcctccaagccccaaatcctcaaccgaggaatcatcccctcaagaccagcctcctgtgatgcgcggtcaggactcaataccacaccactcggactacgacgaggaagaatgggatcgggtctgggcaaacgtgggaaagtccctgaattgcatcattgctatggtggataagctcatcgaacgggatggaggcagtgaggggagcggcggaaacaacgatggagagaaggaacctagcctaaccgatgctataccttcccatccgagggaggattggtatgagcaactgtacccgctgatcctgaccctgaaggattgtatgggcgaggttgtcaacagggccaaacagtctcttaccttcgtgctcctgcaagaactggcttatagcttgccacaatgtctcatgttgacactgcggagggacattgtgttctctcaagcactcgccggacttgtgtgcggatttatcatcaaactgcagactagcttgtatgacccgggatttttgcagcagttgcatactgtgggccttattgtgcaatacgaaggcttactgtctacttacagcgacgagattggtatgttggaagatatggccgtcggcatctcagacctgaagaaggttgcatttaaaatcatcgaagcgaaatctaatgatgtgctccccgttatcacaggcaggcgggaacattatgtcgtggaggtgaaactgccagctaggatgtttgaatcactgccgctgcaaatcaaggaggggcagctgctccacgtgtaccctgtactgtttaacgtggggataaacgagcagcagaccctggccgagcgcttcggcgacgttagcctgcaagagtcgataaatcaagaaaactttgaactgctgcaggagtactacaagattttcatggaaaagatgcctccagattacatcagtcattttcaggagcagaacgacctgaaagccctgctggagaacctgctacagaacattcaatccaaaaagagaaagaacgttgagataatgtggctggccgctacaatctgtcggaagttaaatggaatccgatttacgtgttgcaagagcgcgaaagataggacttccatgagtgtcaccctggaacagtgctctatcctgagggatgaacaccaactgcacaaggattttttcatcagggcactagactgcatgcgcagtcgtcagactcagggggctctgaacgagtcggacgatcctgagacgggatgtcttacggacaataagcccacaagccggcacttttaccccgttgccctcctgctggtatcttcccatctgctagtagtttggctgattttaagcctcgccctgctgttggccaaatatcagtag

SEQ ID NO: 326771 - protein, 131 aa, Artificial Sequence
  derived and/or modified sequence
MEIKEEGASEEGQHFLPTAQANDPGDCQFTSIQKTPNEPQLEFILACKDLVAPVRDRKLNTLVQISVIHPVEQSLTRYSSTEIVEGTRDPLFLTGVTFPSEYPIYEETKIKLTVYDVKDKSHDTIANSSRI

SEQ ID NO: 326772 - protein, 84 aa, Artificial Sequence
  derived and/or modified sequence
MEIKEEGASEEGQHFLPTAQANDPGDCQFTSIQKTPNEPQLEFILACKDLVAPVRDRKLNTLVQISVIHPVEQSLTRYSSTEIV

SEQ ID NO: 326773 - protein, 53 aa, Artificial Sequence
  derived and/or modified sequence
MEIKEEGASEEGQHFLPTAQANDPGDCQFTSIQKTPNEPQLEFILDLNQELRD

SEQ ID NO: 326774 - protein, 344 aa, Artificial Sequence
  derived and/or modified sequence
MKDLGAEHLAGHEGVQLLGLLNVYLEQEERFQPREKGLSLIEATPENDNTLCPGLRNAKVEDLRSLANFFGSCTETFVLAVNILDRFLALMKVKPKHLSCIGVCSFLLAARIVEEDCNIPSTHDVIRISQCKCTASDIKRMEKIISEKLHYELEATTALNFLHLYHTIILCHTSERKEILSLDKLEAQLKACNCRLIFSKAKPSVLALCLLNLEVETLKSVELLEILLLVKKHSKINDTEFFYWRELVSKCLAEYSSPECCKPDLKKLVWIVSRRTAQNLHNSYYSVPELPTIPEGGCFDESESEDSCEDMSCGEESLSSSPPSDQECTFFFNFKVAQTLCFPS

SEQ ID NO: 326775 - protein, 344 aa, Artificial Sequence
  derived and/or modified sequence
MKDLGAEHLAGHEGVQLLGLLNVYLEQEERFQPREKGLSLIEATPENDNTLCPGLRNAKVEDLRSLANFFGSCTETFVLAVNILDRFLALMKVKPKHLSCIGVCSFLLAARIVEEDCNIPSTHDVIRISQCKCTASDIKRMEKIISEKLHYELEATTALNFLHLYHTIILCHTSERKEILSLDKLEAQLKACNCRLIFSKAKPSVLALCLLNLEVETLKSVELLEILLLVKKHSKINDTEFFYWRELVSKCLAEYSSPECCKPDLKKLVWIVSRRTAQNLHNSYYSVPELPTIPEGGCFDESESSVAQAGVQWPDLSSFQPPPTRFKRFSCLSLRSSWDYSSWT

SEQ ID NO: 326776 - protein, 160 aa, Artificial Sequence
  derived and/or modified sequence
MKDLGAEHLAGHEGVQLLGLLNVYLEQEERFQPREKGLSLIEATPENDNTLCPGLRNAKVEDLRSLANFFGSCTETFVLAVNILDRFLALMKVKPKHLSCIGVCSFLLAARIVEEDCNIPSTHDVIRISQCKCTASDIKRMEKIISEKLHYELEATTALN

SEQ ID NO: 326777 - DNA, 1035 bp, Artificial Sequence
  derived and/or modified sequence
atgaaggacctgggcgccgagcacctggccggccacgagggcgtgcagctgctgggcctgctgaacgtgtacctggagcaggaggagagattccagcccagagagaagggcctgagcctgatcgaggccacccccgagaacgacaacaccctgtgccccggcctgagaaacgccaaggtggaggacctgagaagcctggccaacttcttcggcagctgcaccgagaccttcgtgctggccgtgaacatcctggacagattcctggccctgatgaaggtgaagcccaagcacctgagctgcatcggcgtgtgcagcttcctgctggccgccagaatcgtggaggaggactgcaacatccccagcacccacgacgtgatcagaatcagccagtgcaagtgcaccgccagcgacatcaagagaatggagaagatcatcagcgagaagctgcactacgagctggaggccaccaccgccctgaacttcctgcacctgtaccacaccatcatcctgtgccacaccagcgagagaaaggagatcctgagcctggacaagctggaggcccagctgaaggcctgcaactgcagactgatcttcagcaaggccaagcccagcgtgctggccctgtgcctgctgaacctggaggtggagaccctgaagagcgtggagctgctggagatcctgctgctggtgaagaagcacagcaagatcaacgacaccgagttcttctactggagagagctggtgagcaagtgcctggccgagtacagcagccccgagtgctgcaagcccgacctgaagaagctggtgtggatcgtgagcagaagaaccgcccagaacctgcacaacagctactacagcgtgcccgagctgcccaccatccccgagggcggctgcttcgacgagagcgagagcgaggacagctgcgaggacatgagctgcggcgaggagagcctgagcagcagcccccccagcgaccaggagtgcaccttcttcttcaacttcaaggtggcccagaccctgtgcttccccagctag

SEQ ID NO: 326778 - DNA, 1035 bp, Artificial Sequence
  derived and/or modified sequence
atgaaggacctgggcgccgagcacctggccggccacgagggcgtgcagctgctgggcctgctgaacgtgtacctggagcaggaggagagattccagcccagagagaagggcctgagcctgatcgaggccacccccgagaacgacaacaccctgtgccccggcctgagaaacgccaaggtggaggacctgagaagcctggccaacttcttcggcagctgcaccgagaccttcgtgctggccgtgaacatcctggacagattcctggccctgatgaaggtgaagcccaagcacctgagctgcatcggcgtgtgcagcttcctgctggccgccagaatcgtggaggaggactgcaacatccccagcacccacgacgtgatcagaatcagccagtgcaagtgcaccgccagcgacatcaagagaatggagaagatcatcagcgagaagctgcactacgagctggaggccaccaccgccctgaacttcctgcacctgtaccacaccatcatcctgtgccacaccagcgagagaaaggagatcctgagcctggacaagctggaggcccagctgaaggcctgcaactgcagactgatcttcagcaaggccaagcccagcgtgctggccctgtgcctgctgaacctggaggtggagaccctgaagagcgtggagctgctggagatcctgctgctggtgaagaagcacagcaagatcaacgacaccgagttcttctactggagagagctggtgagcaagtgcctggccgagtacagcagccccgagtgctgcaagcccgacctgaagaagctggtgtggatcgtgagcagaagaaccgcccagaacctgcacaacagctactacagcgtgcccgagctgcccaccatccccgagggcggctgcttcgacgagagcgagagcagcgtggcccaggccggcgtgcagtggcccgacctgagcagcttccagcccccccccaccagattcaagagattcagctgcctgagcctgagaagcagctgggactacagcagctggacctag

SEQ ID NO: 326779 - DNA, 483 bp, Artificial Sequence
  derived and/or modified sequence
atgaaggacctgggcgccgagcacctggccggccacgagggcgtgcagctgctgggcctgctgaacgtgtacctggagcaggaggagagattccagcccagagagaagggcctgagcctgatcgaggccacccccgagaacgacaacaccctgtgccccggcctgagaaacgccaaggtggaggacctgagaagcctggccaacttcttcggcagctgcaccgagaccttcgtgctggccgtgaacatcctggacagattcctggccctgatgaaggtgaagcccaagcacctgagctgcatcggcgtgtgcagcttcctgctggccgccagaatcgtggaggaggactgcaacatccccagcacccacgacgtgatcagaatcagccagtgcaagtgcaccgccagcgacatcaagagaatggagaagatcatcagcgagaagctgcactacgagctggaggccaccaccgccctgaactag

SEQ ID NO: 326780 - DNA, 5526 bp, Artificial Sequence
  derived and/or modified sequence
aagtgcaggatccctccgcggggagtcacgtgccccgcccccttgggggcgtcgaaactcttaacaaaaacaaggggctcggggaggtttccgctgaggcggcgggggtgcggcggtgggctggtcttccgcggccggcgttgcgccgcggcggagggtgggcgcgcggggagcgggatggagccggggctgtgaggccgaggcggcggtgcctgggaggaagggtcggatgccggaccgggggcaccgctgaggcggtgggtccccgacctgcgagacaggtttggaagcccccgctgcgcccagtccgtgcggaccgcgaggccgcgggcgggtggaggcgcgtctccggcacgatgaaggatttgggggcagagcacttggcaggtcatgaaggggtccaacttctcgggttgttgaacgtctacctggaacaagaagagagattccaacctcgagaaaaagggctgagtttgattgaggctaccccggagaatgataacactttgtgtccaggattgagaaatgccaaagttgaagatttaaggagtttagccaacttttttggatcttgcactgaaacttttgtcctggctgtcaatattttggacaggttcttggctcttatgaaggtgaaacctaaacatttgtcttgcattggagtctgttcttttttgctggctgctagaatagttgaagaagactgcaatattccatccactcatgatgtgatccggattagtcagtgtaaatgtactgcttctgacataaaacggatggaaaaaataatttcagaaaaattgcactatgaattggaagctactactgccttaaactttttgcacttataccatactattatactttgtcatacttcagaaaggaaagaaatactgagccttgataaactagaagctcagctgaaagcttgcaactgccgactcatcttttcaaaagcaaaaccatctgtattagccttgtgccttctcaatttggaagtggaaactttgaaatctgttgaattactggaaattctcttgctagttaaaaaacattccaagattaatgacactgagttcttctactggagagagttggtttctaaatgcctagccgagtattcttctcctgaatgttgcaaaccagatcttaagaagttggtttggatcgtttcaaggcgcacagcccagaacctccacaacagctactatagtgttcctgagctgccaacgatacctgaggggggttgttttgatgaaagtgaaagtgaggactcttgtgaagatatgagttgtggagaggagagtctcagcagctctcctcccagtgatcaagagtgcaccttctttttcaacttcaaagtggcacaaacactgtgctttccatcttagaaatctgattgttctgtcagaatttatatttacaggtttcaaagcaataaatgggggaataggtagtttcctggtttagcccccatctagtcaggaattaatatactggaatacctaccttctatttgttattcagatcagatctggcctattttcatatttatcctaagccatcaaatggggtagtgcctcttaaaccattaacagtactttagacattggcactttatttttctcgtagatctttagctactttggggaggagggaaggtgctgataccttcaatttgttacttttcaagatttttaaaaataactagtgtagcttatcttaaacattttataaaaccttcagatgtctttaagcagattggaagtatgcaagtgcttccttagcagggacagtggataatccttaatggtttatcatagatttcaccctccccccttctcagaagagtgagtatgctcttaaatgtcaaacacatttttgttgttttgttttttaaatgatcagtgtctatttgatgtgatgcagatcttataaatttgggaattataatattgacatttctgtgatttttatatatgtaatgtcttaattgagatttctgttaaggcagaaataattaggctagggctcttagttttcattcctattgcccaagtattgtcaaactatggtattattttaatgttactttaaaaatccataatctgctagttttgcatgtacttatatgaaaacagtgcagtaagttgaaaactcagtatctatggaattgataaatgttgatctggtgtagtatattttatcgcattttcttatattaaaaaatgtctgcatgattacattttatttcctttgtaatttacatttcagaatagtgtattgctatatgggtgccaagattgaatatgaagaacccgagtgtttgtagtattatagttttaagcaaatctgtgtggtgatacagccataagaatggggcttatataaactctgtacatgtaagattttgtacagagaatttttaactttataaattgtatatgaacatgtaaatcttttaaaatgtacataaaatactgtatttttttaccttgtgtgtgatagtctagtcattgcatgtaaatataatttattatgtattctgtagtataaatcatacattgatgacttacatttttactggtaagtcaacatccgttggatgttttctgaagtggctctttttgaagtgataatagattgtaattcaaaataaaattattaatgaattctccttgtttgggatcacatcttaatttttaatctgttaaaagttcttgatgtattttaatgagaagactttaggtgaggctacagtgattccagagtgagccttctaactggctagcagaagttctctaggtttggcatctgtgccttggagatactgaaagagaatctgtcatttgacaattgacctctttgtgggatggactcattaagtatgctctcagagactggtatattaccagaatgcctattaattttcagtgagaggcaacaggtattaagtagaacagaatgctcaggttggcagattagaacgatctttcaggagacaaagcaagttttaatcagttgtttggttaataagtatggggtgttcgctgtgatagggccccgccagcttctggctcttgtggacctcaaaagtatcaggtggttttgcaagtggtggtcctttcccctgccccaccccaataggttccccatctgtctagtttgatttttgtagacctttgttttctctagttagaaaatcaggtacactgaatatggttttcatgtaacacctcttctctggagataggggtatgttttcctacccttctagtggagaatcctacttgaggatgacctttcctctcttactaaataatattagtaaatagtgggcaatatattctgctttcagattttgatttgttgagatgtaaaagttgtttggggcttaccaaatctcaagactctctttagctcctgcaggattgtattgcttttcttactggatatttttcctgggtaagcatctttgtggcttcatctcttccccctgtggttttcagtgtatttagtcgagacctctctgctgagcttgcaacctgtttattcacatggcctgccatgccacttggaggtttctgattactcccaaacctgctggttctttatgtctttctcagcgaataattccatctattcatgttggaaacttaggtgatatgctcatctccttttgcctgtttatggaggtcaccagcctctatcatttgtatgatttcgtttacactgtttatatctctctgtcccccctttttctgccattggcatggtttagacctgtactctttatcagcagaggtactgtaatatatttgtgatccctcagcttccaggcttactcctggtctctgccttcctatctacatatccttttaaaataaaattttaactatctcctgaaaaattgttgagtaggtcacgcacaatcaggagaaaaatctattcatgacatacaagtctctgtctaatctgaacactgcacctgtctctggcctttttttcttgtcatttcctagaccttaaaaaatgtgtattgagaaagaactctgttagctatacagaagatgaactgggcaatatagagtagcagcatggagaccagtctgactgaactaaggcagtggaagtgtggatgaggaagagaggtgaaaattgagaagcgctatcctttctctttgggcattattaggaggctcacagacaagtccaggagcctggttataccctcctgtgccattcaaccaggtggctttcccatgactgtgatgaataaaattgagaagcccctgcccttttcagagcagagggtgaggagaaagctaccattttgtcctcatccttacccccgttgacttggcgagagatttgacctttcaggttttgatcctgtcattttctaggatgtggtgcacgcactttgctgttgcgcatggtgaagtattgtgcctaggtcctgggtcttcatctgtttggctctgctactgtttcctcctcccaggaagtgtggttagacaaataatgtgttttaattacctgtcacactcaggattaatacatactcaggttaactgtagagaggcattggcttcagaacactcctcgtgacaattttaaccattttctttgtctagagtctgcctttttcttttttacaatttcttttatttcaacactaggtttcaatatggtgttcctgctacctcccacctccctcctccctcatcacacatgcaaattgtcagcttattgagacaacccacttagattcatatatggacaaggacaaggtattttgcatttgttactggaattcagttttcctaactatttactaccagaaatggtcaataacttactttgtgtttagcaaatcaaattgtgtgatagatagtttcccagtatgatggccagtcagtctttccatccctgtgcctacatgctgctcttcccgtccacaagtggagtctgtttctcttgagttttggctggccttatgaatggctttgcttactgaagtgcagcagaagaaatttagtatatgtccaagcctaggctttaagagactggcagctttccttttatcctttttggaagctagccaccatgctgcaaagaagctcagctggattactgaaagatgagaggccatgtggagagagactcttgaggatgagagattatcttggatgttccagccttaagctcccagctgaatgtgggtgtatcctcagctacaccacagaaaacagaggaactactcagtcgatcccaatcaacccacagactcactagaaataacaaattattgttttaagccacgaggttttgggggagggttgttaaacagtaatagataagtgagacagattgcttgttatttatggtcaaatggtgattatctctggtgagattacaggtgatgttttttttaagttatgcctatctgtagtttcctttttttcctaaaattgatttgaattattagtgtattaacagaataaagaatgaactttaaaacac

SEQ ID NO: 326781 - DNA, 1338 bp, Artificial Sequence
  derived and/or modified sequence
gaaactcttaacaaaaacaaggggctcggggaggtttccgctgaggcggcgggggtgcggcggtgggctggtcttccgcggccggcgttgcgccgcggcggagggtgggcgcgcggggagcgggatggagccggggctgtgaggccgaggcggcggtgcctgggaggaagggtcggatgccggaccgggggcaccgctgaggcggtgggtccccgacctgcgagacaggtttggaagcccccgctgcgcccagtccgtgcggaccgcgaggccgcgggcgggtggaggcgcgtctccggcacgatgaaggatttgggggcagagcacttggcaggtcatgaaggggtccaacttctcgggttgttgaacgtctacctggaacaagaagagagattccaacctcgagaaaaagggctgagtttgattgaggctaccccggagaatgataacactttgtgtccaggattgagaaatgccaaagttgaagatttaaggagtttagccaacttttttggatcttgcactgaaacttttgtcctggctgtcaatattttggacaggttcttggctcttatgaaggtgaaacctaaacatttgtcttgcattggagtctgttcttttttgctggctgctagaatagttgaagaagactgcaatattccatccactcatgatgtgatccggattagtcagtgtaaatgtactgcttctgacataaaacggatggaaaaaataatttcagaaaaattgcactatgaattggaagctactactgccttaaactttttgcacttataccatactattatactttgtcatacttcagaaaggaaagaaatactgagccttgataaactagaagctcagctgaaagcttgcaactgccgactcatcttttcaaaagcaaaaccatctgtattagccttgtgccttctcaatttggaagtggaaactttgaaatctgttgaattactggaaattctcttgctagttaaaaaacattccaagattaatgacactgagttcttctactggagagagttggtttctaaatgcctagccgagtattcttctcctgaatgttgcaaaccagatcttaagaagttggtttggatcgtttcaaggcgcacagcccagaacctccacaacagctactatagtgttcctgagctgccaacgatacctgaggggggttgttttgatgaaagtgaaagctctgttgcccaggctggagtgcagtggcccgatctcagctcattccaacctccacctaccaggttcaagcgattctcatgcctcagcctccggagtagctgggattacagctcctggacctga

SEQ ID NO: 326782 - DNA, 1410 bp, Artificial Sequence
  derived and/or modified sequence
ggtcttacccagcgctggccggcggacctgaccacggctcctccccctgccacacctccctggccgtggtggggattgccctggggctctggcggacgtgactggtcccttcacccgctccttgtcggggtgtgctggggcgacccttgctggaggtactggcctcagccctttctcccgcttccccacccctcttacccccagattacattctctgtgtggtgtctttactgcagatgaaggatttgggggcagagcacttggcaggtcatgaaggggtccaacttctcgggttgttgaacgtctacctggaacaagaagagagattccaacctcgagaaaaagggctgagtttgattgaggctaccccggagaatgataacactttgtgtccaggattgagaaatgccaaagttgaagatttaaggagtttagccaacttttttggatcttgcactgaaacttttgtcctggctgtcaatattttggacaggttcttggctcttatgaaggtgaaacctaaacatttgtcttgcattggagtctgttcttttttgctggctgctagaatagttgaagaagactgcaatattccatccactcatgatgtgatccggattagtcagtgtaaatgtactgcttctgacataaaacggatggaaaaaataatttcagaaaaattgcactatgaattggaagctactactgccttaaactttttgcacttataccatactattatactttgtcatacttcagaaaggaaagaaatactgagccttgataaactagaagctcagctgaaagcttgcaactgccgactcatcttttcaaaagcaaaaccatctgtattagccttgtgccttctcaatttggaagtggaaactttgaaatctgttgaattactggaaattctcttgctagttaaaaaacattccaagattaatgacactgagttcttctactggagagagttggtttctaaatgcctagccgagtattcttctcctgaatgttgcaaaccagatcttaagaagttggtttggatcgtttcaaggcgcacagcccagaacctccacaacagctactatagtgttcctgagctgccaacgatacctgaggggggttgttttgatgaaagtgaaagtgaggactcttgtgaagatatgagttgtggagaggagagtctcagcagctctcctcccagtgatcaagagtgcaccttctttttcaacttcaaagtggcacaaacactgtgctttccatcttagaaatctgattgttctgtcagaatttatatttacaggtttcaaagcaataaatgggggaataggtagtttcctggtttagcccccatctagtcaggaattaatatactggaatacctaccttctatttgttattcagatc

SEQ ID NO: 326783 - DNA, 1459 bp, Artificial Sequence
  derived and/or modified sequence
cttaacaaaaacaaggggctcggggaggaagggtcggatgccggaccgggggcaccgctgaggcggtgggtccccgacctgcgagacaggtttggaagcccccgctgcgcccagtccgtgcggaccgcgaggccgcgggcgggtggaggcgcgtctccggcacgatgaaggatttgggggcagagcacttggcaggtcatgaaggggtccaacttctcgggttgttgaacgtctacctggaacaagaagagagattccaacctcgagaaaaagggctgagtttgattgaggctaccccggagaatgataacactttgtgtccaggattgagaaatgccaaagttgaagatttaaggagtttagccaacttttttggatcttgcactgaaacttttgtcctggctgtcaatattttggacaggttcttggctcttatgaaggtgaaacctaaacatttgtcttgcattggagtctgttcttttttgctggctgctagaatagttgaagaagactgcaatattccatccactcatgatgtgatccggattagtcagtgtaaatgtactgcttctgacataaaacggatggaaaaaataatttcagaaaaattgcactatgaattggaagctactactgccttaaactttttgcacttataccatactattatactttgtcatacttcagaaaggaaagaaatactgagccttgataaactagaagctcagctgaaagcttgcaactgccgactcatcttttcaaaagcaaaaccatctgtattagccttgtgccttctcaatttggaagtggaaactttgaaatctgttgaattactggaaattctcttgctagttaaaaaacattccaagattaatgacactgagttcttctactggagagagttggtttctaaatgcctagccgagtattcttctcctgaatgttgcaaaccagatcttaagaagttggtttggatcgtttcaaggcgcacagcccagaacctccacaacagctactatagtgttcctgagctgccaacgatacctgaggggggttgttttgatgaaagtgaaagtgaggactcttgtgaagatatgagttgtggagaggagagtctcagcagctctcctcccagtgatcaagagtgcaccttctttttcaacttcaaagtggcacaaacactgtgctttccatcttagaaatctgattgttctgtcagaatttatatttacaggtttcaaagcaataaatgggggaataggtagtttcctggtttagcccccatctagtcaggaattaatatactggaatacctaccttctatttgttattcagatcagatctggcctattttcatatttatcctaagccatcaaatggggtagtgcctcttaaaccattaacagtactttagacattggcactttatttttctcgtagatctttagctactttgggg

SEQ ID NO: 326784 - DNA, 578 bp, Artificial Sequence
  derived and/or modified sequence
ctggccgtggtggggattgccctggggctctggcggacgtgactggtcccttcacccgctccttgtcggggtgtgctggggcgacccttgctggagatgaaggatttgggggcagagcacttggcaggtcatgaaggggtccaacttctcgggttgttgaacgtctacctggaacaagaagagagattccaacctcgagaaaaagggctgagtttgattgaggctaccccggagaatgataacactttgtgtccaggattgagaaatgccaaagttgaagatttaaggagtttagccaacttttttggatcttgcactgaaacttttgtcctggctgtcaatattttggacaggttcttggctcttatgaaggtgaaacctaaacatttgtcttgcattggagtctgttcttttttgctggctgctagaatagttgaagaagactgcaatattccatccactcatgatgtgatccggattagtcagtgtaaatgtactgcttctgacataaaacggatggaaaaaataatttcagaaaaattgcactatgaattggaagctactactgccttaaactt

SEQ ID NO: 326785 - DNA, 1035 bp, Artificial Sequence
  derived and/or modified sequence
atgaaggacttaggggccgagcatttggctgggcatgaaggagtccaactcttgggtctcctcaacgtctacctagagcaggaggagcgttttcagcctagggagaaggggcttagcctgatcgaagcaactcccgaaaacgacaacacactgtgtcctgggctgcgcaacgctaaagtcgaggatctacgttctttggctaacttcttcggcagctgcacagagacatttgtgctggccgtcaatattctcgacaggtttcttgccctgatgaaggtgaaaccaaagcacctcagttgtatcggcgtgtgttcattcctgctcgctgctcgcatagtcgaggaagactgcaatattccctccacacatgacgtcatccggatcagtcagtgcaaatgtaccgcatcagacatcaaaagaatggaaaagatcatatcagagaagcttcattacgaactcgaggctaccactgccttgaacttcctgcatctttaccataccatcatcctgtgccatacttctgagcggaaagagattttgtccctggacaagttagaagcccagcttaaggcgtgtaactgtaggcttatattttccaaggccaagccgtctgtcctcgccctgtgtctacttaatttggaagtggagaccctcaagtcagtggagctgctggagattctgcttttagtgaaaaaacattctaaaattaacgataccgaattcttctactggcgcgagttggtctctaaatgccttgcagagtattcgagtccggagtgctgcaagcccgatcttaaaaaactggtttggatcgttagccggcgcacagcacaaaatcttcataattcctactactctgtgcccgagctacccaccatccccgaaggcgggtgctttgacgagtccgagtcggaggactcttgcgaagatatgagctgtggagaagaatcactctccagcagcccaccctctgaccaggaatgtactttcttcttcaactttaaggtagcgcagaccctatgttttccttcatag

SEQ ID NO: 326786 - DNA, 1035 bp, Artificial Sequence
  derived and/or modified sequence
atgaaggacctcggagctgaacacctcgccggccatgaaggcgtgcagctcctgggcttgcttaacgtttatcttgaacaggaagagcgatttcagccccgagaaaaaggactgtccctgattgaagccactcctgagaatgataataccctatgcccgggactgaggaacgcgaaggtggaggatctgcgttcgctcgcgaacttctttgggagctgtacagagacttttgtgctggctgtgaacattctcgacaggtttttggcactgatgaaagtgaaaccaaagcacctcagttgcattggagtctgttccttcctcttggctgctcggattgtggaagaagactgtaatataccctctacgcatgacgtgatacgcatttcccagtgtaagtgcactgcctcggacatcaaacgcatggagaagattatcagcgaaaaacttcactacgagctcgaggctacaactgccctgaactttcttcacctttaccacacaattattttatgccacacctccgaacgtaaggagatcctgagcctagacaagctcgaagctcagctgaaagcctgtaactgcagactgatcttcagcaaagctaagccgtctgtcttggcactgtgcctcctgaatctcgaggtcgaaaccctgaaatccgtggagttgctggagattcttctcctcgttaaaaagcactctaaaattaatgatacagaattcttttactggcgcgagctggtttccaagtgcctggcagaatactcatcccccgagtgctgcaagccagatctgaagaagcttgtgtggattgtaagcaggaggactgcccaaaacctccacaatagttactattcggtccccgagctccccactatacccgagggtgggtgttttgacgaaagcgagagcagcgtggcccaggcaggcgtgcagtggcctgacctttcgtcttttcagcccccgccaacccggttcaaaaggttcagctgcctctccctgaggagcagctgggactatagctcttggacatag

SEQ ID NO: 326787 - DNA, 1035 bp, Artificial Sequence
  derived and/or modified sequence
atgaaggatctgggcgccgagcatctggccggacatgaaggcgtccagctgttgggtttactcaatgtttatcttgaacaggaagaaagattccagccacgggagaagggactctctttgattgaggcaacccccgagaacgacaacacattatgcccgggccttagaaatgccaaggttgaggatctgaggtcccttgccaactttttcggcagttgcactgagacattcgtcctggcagtgaatattctggatagattcctagccctcatgaaggtgaagccaaagcacctgagctgcattggtgtctgtagtttcctgcttgccgcacggattgttgaggaagattgtaatatccccagcacacacgacgtgatcaggatttcccagtgtaaatgcactgctagcgatatcaaaagaatggagaaaatcatctctgagaagctgcattacgagttggaagccacgactgccctcaatttcttacacttatatcatactatcatcctgtgccacacatcagagcgaaaagagatcctctctctggacaaactcgaagcgcagctgaaggcttgcaattgcaggctgatcttttccaaggctaaaccttcagtactggctctttgcctgctcaacctggaagttgaaaccctcaaatctgttgaactgctagagatccttttgctcgtgaagaaacatagcaaaatcaatgacaccgaattcttctattggagggaactggtctcaaaatgtctggctgaatacagtagcccagaatgttgcaagcctgaccttaaaaaactggtctggatcgtaagtaggaggaccgcccagaatctgcacaactcctactacagtgtgcctgaactgcccacgatccctgagggtggctgtttcgatgaatctgaatccgaggactcctgtgaggacatgagttgtggggaagagtccctatctagcagccccccttctgaccaggagtgtacattctttttcaactttaaggtggctcagaccctgtgcttcccatcatag

SEQ ID NO: 326788 - DNA, 1035 bp, Artificial Sequence
  derived and/or modified sequence
atgaaagacctcggcgccgagcacttggcaggacacgaaggggtgcagctgctgggactccttaacgtgtacctggagcaggaggagcggtttcaaccacgagaaaaggggctcagtctcatcgaagctacccccgaaaacgacaacacactttgccctgggcttcgtaacgccaaggtggaggacctgcgatcactcgctaatttcttcgggtcctgcacagaaaccttcgtgctcgccgtcaacatcctggataggtttctggccctaatgaaggtgaagcctaagcatctgtcgtgtattggagtttgtagcttcctcttggccgcaaggatcgtcgaggaagattgtaacattccgtctactcatgatgtgatccgtatatcacagtgtaaatgtactgcaagtgatatcaagcggatggaaaaaatcatttctgaaaagctgcactacgaacttgaagctacgaccgccctcaacttcctccacctttaccatacaatcattctgtgtcatacaagtgagagaaaagagatattgtcattagataagctagaagcacagctgaaagcttgtaactgccgcctcatctttagcaaagccaaaccttctgtgctcgccctgtgtctactgaacctggaagtggagaccttgaaaagtgtcgaactgcttgagatccttctgctggttaaaaaacactccaaaatcaatgacaccgagtttttctactggagagagttggtctccaagtgtctggcagagtatagctccccggagtgttgcaaacctgatttgaagaagctggtttggattgtgtcacggcgcactgcccaaaacttgcacaactcctattactcagtcccggagctccctaccatccccgaggggggctgctttgatgaaagcgagtcagaggacagctgcgaagacatgtcctgcggtgaggagtcactgtcatcctcacctccgtcagatcaggaatgcacgttctttttcaacttcaaggtggcccagaccctgtgtttcccatcttag

SEQ ID NO: 326789 - DNA, 483 bp, Artificial Sequence
  derived and/or modified sequence
atgaaggacctaggcgcagaacacctggccggacacgagggggttcaactgctggggctattgaacgtctatcttgaacaggaggaacgattccagccgcgagaaaaaggcctgtcgctaatcgaggccacacccgagaacgataacacactctgcccaggcttgaggaatgccaaggtcgaggacttgcgttctctcgccaatttcttcggttcctgtaccgaaaccttcgtattggccgtaaacatccttgacaggttcctagcactgatgaaggttaagcctaagcacctgtcgtgtataggggtctgctcgtttctgctggccgccaggattgtggaggaagattgtaacatccctagcacccacgacgtaattaggatatcccagtgcaagtgtacagcttcagatatcaagcgaatggagaaaatcatctcggagaagttgcattatgagcttgaagccactacagccttgaattag

SEQ ID NO: 326790 - DNA, 1035 bp, Artificial Sequence
  derived and/or modified sequence
atgaaggacctgggcgctgagcacctggccggccacgagggcgtgcagctgctgggcctgctgaatgtgtacctggagcaggaggagcgcttccagccccgggagaagggcctgagcctgattgaggccaccccagaaaatgacaacaccctgtgccccggcctgagaaatgccaaggtggaggacctgcggagcctggccaacttcttcggcagctgcacagagacctttgtgctggccgtgaacatcctggaccgcttcctggccctgatgaaggtgaagcccaagcacctgagctgcattggagtgtgcagcttcctgctggccgcccgcatcgtggaggaggactgcaacatccccagcacccatgatgtgatccgcatcagccagtgcaagtgcacagccagtgacatcaagaggatggagaagatcatcagcgagaagctgcactatgagctggaggccaccacagccctgaacttcctgcacctgtaccacaccatcatcctgtgccacaccagcgagaggaaggagatcctgagcctggacaagctggaggcccagctgaaggcctgcaactgccgcctcatcttcagcaaggccaagcccagcgtgctggccctgtgcctgctgaacctggaggtggagaccctgaagtctgtggagctgctggagatcctgctgctggtgaagaagcacagcaagatcaatgacacagagttcttctactggagggagctggtgtccaagtgcctggccgagtacagcagccctgagtgctgcaagccagacctgaagaagctggtgtggatcgtgtccagaagaacagcccagaacctgcacaacagctactacagcgtgcctgagctgcccaccatccctgagggcggctgctttgatgagagcgagagcgaggacagctgtgaggacatgagctgtggggaggagagcctgagcagcagcccccccagcgaccaggagtgcaccttcttcttcaacttcaaggtggcccagaccctgtgcttccccagctag

SEQ ID NO: 326791 - DNA, 1035 bp, Artificial Sequence
  derived and/or modified sequence
atgaaggacctgggcgctgagcacctggccggccacgagggcgtgcagctgctgggcctgctgaatgtgtacctggagcaggaggagcgcttccagccccgggagaagggcctgagcctgattgaggccaccccagaaaatgacaacaccctgtgccccggcctgagaaatgccaaggtggaggacctgcggagcctggccaacttcttcggcagctgcacagagacctttgtgctggccgtgaacatcctggaccgcttcctggccctgatgaaggtgaagcccaagcacctgagctgcattggagtgtgcagcttcctgctggccgcccgcatcgtggaggaggactgcaacatccccagcacccatgatgtgatccgcatcagccagtgcaagtgcacagccagtgacatcaagaggatggagaagatcatcagcgagaagctgcactatgagctggaggccaccacagccctgaacttcctgcacctgtaccacaccatcatcctgtgccacaccagcgagaggaaggagatcctgagcctggacaagctggaggcccagctgaaggcctgcaactgccgcctcatcttcagcaaggccaagcccagcgtgctggccctgtgcctgctgaacctggaggtggagaccctgaagtctgtggagctgctggagatcctgctgctggtgaagaagcacagcaagatcaatgacacagagttcttctactggagggagctggtgtccaagtgcctggccgagtacagcagccctgagtgctgcaagccagacctgaagaagctggtgtggatcgtgtccagaagaacagcccagaacctgcacaacagctactacagcgtgcctgagctgcccaccatccctgagggcggctgctttgatgagagcgagagctctgtggcccaggccggcgtgcagtggccagacctgagcagcttccagcccccacccacccgcttcaagcgcttcagctgcctgagcctgcggagctcctgggactacagctcctggacctag

SEQ ID NO: 326792 - DNA, 483 bp, Artificial Sequence
  derived and/or modified sequence
atgaaggacctgggcgctgagcacctggccggccacgagggcgtgcagctgctgggcctgctgaatgtgtacctggagcaggaggagcgcttccagccccgggagaagggcctgagcctgattgaggccaccccagaaaatgacaacaccctgtgccccggcctgagaaatgccaaggtggaggacctgcggagcctggccaacttcttcggcagctgcacagagacctttgtgctggccgtgaacatcctggaccgcttcctggccctgatgaaggtgaagcccaagcacctgagctgcattggagtgtgcagcttcctgctggccgcccgcatcgtggaggaggactgcaacatccccagcacccatgatgtgatccgcatcagccagtgcaagtgcacagccagtgacatcaagaggatggagaagatcatcagcgagaagctgcactatgagctggaggccaccacagccctgaactag

SEQ ID NO: 326793 - DNA, 1035 bp, Artificial Sequence
  derived and/or modified sequence
atgaaggacctgggcgccgagcacctggccggccacgagggcgtgcagctactgggcctgctgaacgtgtacttagagcaggaggagcggttccagcccagagaaaagggattatcgctgatagaggccaccccagagaatgacaatactctgtgtcccgggttaagaaatgccaaggtagaggatttgcgaagtttagccaacttttttggctcatgtactgagacttttgtcctggcagtgaacatactcgacagattcctcgctctgatgaaggttaaacccaagcatctctcctgtatcggcgtgtgctcatttctcctcgctgctcggatcgtggaagaagattgtaacattcccagcacacacgatgtcattcgaatctcccagtgtaagtgtactgcaagtgacatcaagcgaatggagaagatcatcagcgagaaactgcattacgaactggaagccacgaccgccttgaattttttacacttgtaccacacaataatactgtgccacaccagcgaacgaaaggagattctgtctctggacaagctggaggcacagttgaaggcttgcaattgtcggctgatcttttcaaaagcaaagccctccgtgctcgctctgtgcctcctgaatcttgaggtagagaccctcaaatccgtggagctgctggaaattcttctcttagttaagaaacacagtaagattaacgacacggagtttttttactggcgtgaactggtgtccaaatgtctggcggaatattcatcacccgagtgttgcaaaccagatctcaaaaagttggtctggattgtgagtagaagaactgctcagaatctgcacaattcgtattattcggtacctgaactccctactatcccagaaggcgggtgttttgacgagtccgaatctgaggactcgtgtgaggacatgagttgtggagaggagagtctgagttcctctcctcctagcgatcaagaatgcacttttttctttaattttaaggtggcccaaacactctgcttcccttcctag

SEQ ID NO: 326794 - DNA, 1035 bp, Artificial Sequence
  derived and/or modified sequence
atgaaggacctgggcgccgagcacctggccggccacgagggcgtgcagctgttaggcttgttgaacgtctacttggaacaagaagaacgttttcaaccccgggaaaagggtctgtccctcatagaggcgactcccgagaacgacaacacactttgtcccggactcaggaatgccaaagttgaagatctccgaagtctcgctaattttttcgggtcatgtactgagacattcgtgctggctgttaatattttggacagatttctggcacttatgaaagttaagccaaaacacctctcctgtatcggcgtctgtagctttctcctcgccgctcggatcgtggaggaggattgtaacataccaagcacccacgacgtaatccggatcagtcagtgtaaatgcacagcatctgatattaaaagaatggagaaaatcatctcggagaagctgcattatgagctggaggctacaactgccttgaacttcctgcatctgtatcacacaattattctgtgccatactagcgaaaggaaagagattctttccctcgacaagctggaggctcaactgaaagcttgtaattgcaggcttattttttccaaggctaagccttcagtgctcgcactctgcttactgaatctagaggtagagactctgaagtccgtggaattgttggagatcttgcttcttgtgaagaaacacagcaagatcaacgacaccgagtttttttactggcgagagctggtgagtaaatgcctggcggagtactcaagcccagagtgttgcaaacctgacttgaaaaaactagtttggattgtgagccgcaggaccgcccagaatctgcataattcgtattacagcgtgcccgagctgccaaccattcctgaaggtggctgcttcgatgaatcagagagctccgtagcccaggcgggtgtgcagtggccagatctttcctcgttccaacccccccccacccggttcaagcggttctcttgtctgagcctacgtagcagttgggactactcttcatggacatag

SEQ ID NO: 326795 - DNA, 1035 bp, Artificial Sequence
  derived and/or modified sequence
atgaaggacctgggcgccgagcacctggccggccacgagggcgtgcaattactagggttgctgaacgtgtatctcgagcaagaagagagattccaacctagggaaaaaggcctgtctctcattgaagcaaccccagaaaacgacaacactctgtgccctgggcttcgcaatgccaaagtggaggacctgcggtcccttgccaatttctttgggtcctgcaccgaaacctttgtattagccgtgaatatcctggatcggttcttagcactgatgaaagttaaacccaaacacctatcatgtatcggcgtatgcagctttcttctcgcagcaaggattgtcgaggaggattgcaacattccgagcacccacgatgtaatcaggataagccagtgtaagtgtacggccagtgatattaagcggatggaaaagattatatcggagaaactccactacgagctggaggcgactactgccctcaacttcttgcatctataccacacgatcatcctgtgtcacactagcgaacgcaaggagattctcagccttgacaaactggaggctcagctcaaggcatgcaattgtcgcttaatattcagtaaggcaaagccatctgtcctggctttgtgtctgctaaatctggaagttgaaacacttaaatccgttgaactcctcgagatattgctcttagtgaaaaaacattctaagattaacgataccgaatttttttattggcgtgaattagtttcaaagtgtttagccgagtactcttctcccgagtgttgtaaaccagacctaaagaaattagtgtggatagtttccaggcgcaccgcacagaatctgcataactcctactacagtgttcccgagctgcccaccattccggaagggggctgttttgatgagtcagagtccgaggattcttgtgaggacatgtcttgcggagaagaatccttgagctcatcccctccttctgaccaagagtgtacctttttcttcaattttaaggtggcacagacactttgtttccctagctag

SEQ ID NO: 326796 - DNA, 1035 bp, Artificial Sequence
  derived and/or modified sequence
atgaaggacctgggcgccgagcacctggccggccacgagggcgtgcagttactcgggttgctgaatgtttacctcgaacaagaagaacgctttcagcccagggaaaaaggtctgtccctgatcgaggcaacacctgaaaacgacaacaccctttgtcccggtttgcgaaacgcgaaggttgaagaccttcgatccttggcgaacttttttggctcttgtaccgagacattcgttctagcagttaatattcttgaccgctttctggccctcatgaaggtgaaaccaaagcatctcagctgtatcggcgtctgttcctttctcctagccgcccggatcgtggaggaggactgcaacataccatcaactcacgatgtgattagaatcagccaatgtaagtgtaccgcatctgatattaaacgcatggaaaagatcatttctgagaaactgcattacgaattggaggccaccacggctctgaacttcctacacctctatcatactataattctctgccatacctccgagcgtaaggaaatcctgtctctcgataaattggaggctcagctgaaagcctgtaattgtagactgattttcagcaaggcaaagccctcagtcctggctttgtgtctgctgaacctggaagtggagaccctgaagtcggtggaactgctggaaatcctgctgctggtaaagaaacattcaaaaataaatgacacagaattcttctactggcgcgagcttgtgtctaagtgtttggctgagtactcaagtcctgagtgctgcaaacctgacctgaaaaaacttgtttggatcgtttcccgccgtactgcccagaatctccacaattcatattatagcgtgccagagttgccgacaatccctgaaggcggctgctttgacgagagcgaaagcgaagatagctgcgaggatatgtcatgcggcgaggagagtctctccagcagccccccatctgaccaagagtgtaccttcttttttaacttcaaagtggcccagaccctgtgttttccatcctag

SEQ ID NO: 326797 - DNA, 483 bp, Artificial Sequence
  derived and/or modified sequence
atgaaggacctgggcgccgagcacctggccggccacgagggcgtgcagctactcgggctcctgaatgtctacttagagcaggaagagaggtttcaaccacgtgagaagggactgagtctgattgaagcaactcctgagaatgacaacacactttgcccagggctccggaatgccaaggtcgaagaccttcggagcttggcaaacttcttcggcagctgtaccgagacattcgtcctcgctgtgaatatcctggatcggtttttagcactgatgaaagtgaagcccaagcatctgtcttgcattggggtctgttcctttcttctggccgcccgcatcgtagaggaggattgtaatatcccctccacacatgacgtcattaggatcagccagtgcaagtgcaccgcaagcgacatcaaacgtatggagaagatcatctcggaaaaactccattacgagctggaggccaccactgcactaaactag

SEQ ID NO: 326798 - DNA, 1035 bp, Artificial Sequence
  derived and/or modified sequence
atgaaagacctcggtgctgagcatctggccggacacgagggtgtacagctgctaggactgctgaatgtgtatctggagcaggaggagagattccaacccagggagaagggactttccttgattgaggcaactcctgagaatgacaataccctgtgccccggactgcgcaatgcaaaagtggaagatctcagatccctcgccaacttcttcgggagttgcacagagacattcgtcctagccgtgaatatattggacaggtttttagcactcatgaaggtgaagcccaagcatctgagctgtatcggcgtctgttcatttctacttgcggctcgcatcgtggaagaggactgtaatattccctccactcacgacgtaatcaggatctctcagtgtaaatgcacagcttcagatatcaaaagaatggaaaagatcatttccgaaaaacttcattacgaactcgaagccactacagctttaaactttctgcatctgtatcacaccattatcttgtgccatacaagcgagcggaaggagattctaagcctggataaactggaggcgcagctgaaggcatgcaactgccgcttgatcttttccaaagccaagccttcagtcctcgccctttgcctcctcaaccttgaagtggagaccctgaagtctgtcgagctgctagaaatactgctgctggttaagaagcattctaaaatcaacgacaccgaattcttctactggagggaactggtgtccaaatgtttggccgaatactcaagcccagagtgctgtaaaccagacctgaaaaagcttgtgtggatcgtctccaggcgtaccgcacagaacctgcacaattcttattactcagtgcccgagctgcctactatccccgagggaggatgttttgacgagtctgagtctgaagactcttgcgaggatatgagctgcggcgaggagagcctgtccagtagccctccaagcgatcaggaatgcactttcttctttaatttcaaggtcgctcagaccctttgctttccaagctag

SEQ ID NO: 326799 - DNA, 1035 bp, Artificial Sequence
  derived and/or modified sequence
atgaaggaccttggggcagaacacctcgccggacatgaaggagtccagcttctcggcctgctgaacgtatacttggagcaggaagagcgatttcagccaagagagaaaggtctgtccctcatcgaagctacccctgagaatgacaataccctgtgccctgggctcagaaatgctaaagtggaagatttgcggagcttggcaaacttttttggttcatgcacagaaacattcgttctggccgtcaacatcctcgaccgcttcttggcacttatgaaagtcaagcccaagcacttatcctgtataggcgtttgcagtttccttctagctgcacgaattgtggaagaagactgcaatatcccttccacccacgatgtgatacgaatctctcagtgtaagtgtaccgcatcggacatcaaaagaatggagaaaattatcagcgaaaaactccactatgagctcgaggcgacgacagccctgaacttcttgcacttgtaccacactattatactatgccataccagcgagaggaaagagattctttctctggataagttggaggcccaactaaaggcttgcaactgcagactcattttctcaaaagcgaaaccttctgtgttggcgctgtgcctcctcaacctcgaggttgaaacgctgaagtccgtggagctactggagattctactcctggtcaaaaagcatagtaagatcaatgataccgagtttttctactggcgtgagctcgtctcaaaatgcctggctgagtacagtagtcctgagtgctgtaagcctgatttaaagaaactagtgtggattgtaagcaggagaaccgcccagaacctacacaactcctattactccgtgcctgagctgcctaccatacctgaaggtgggtgtttcgatgagtccgaaagtagtgtggctcaggcgggagttcagtggcctgacctgtcaagttttcagcctcctccaacacgcttcaaaagattctcatgtctcagtttgcggtcctcctgggactactcctcttggacctag

SEQ ID NO: 326800 - DNA, 1035 bp, Artificial Sequence
  derived and/or modified sequence
atgaaggatctgggcgcagagcatctggctggccacgagggtgtgcagctactgggcttgcttaacgtttacctggaacaagaggaacgattccaacccagggagaagggcctgtccctgatcgaagccacgccagagaacgataatacactctgccccggactccggaacgccaaggtggaggatttgaggtccctagccaatttttttggctcatgcactgagactttcgttctggctgtgaacatactcgacaggttcttggcactgatgaaagtaaagcctaaacacctgagttgtattggcgtttgctccttcctgctggccgcacgcatcgtagaagaagactgtaacataccctccacccacgacgtcattcggatcagccagtgtaagtgcacagcctccgatatcaagcgcatggaaaaaattatcagtgagaaactccactatgaactcgaagccacaaccgccctcaacttcctgcacctctatcatactatcattctgtgccacacgagtgaaaggaaggaaatcctgtcattggataagctcgaggcacagctaaaagcttgtaactgccggctgatcttcagtaaggcaaagccatccgtcctcgcactctgtctcttgaacctggaggtggaaacgctcaagagtgtggagctcctcgagatccttttgctcgtgaagaagcactccaaaattaacgatacagaatttttctactggagagaattggtctctaaatgcctggcggaatactcaagtccagagtgctgcaaaccagacctgaaaaagctggtgtggatcgtcagtcggaggaccgcacagaatttacacaattcttactactcagtgccagagcttcctactattcccgaaggcggatgtttcgacgaatccgagagtgaagattcttgcgaggacatgagctgcggtgaggaatctctgtcgtcgagccctccttctgaccaggaatgcacgtttttttttaatttcaaggttgcacagaccctttgcttcccctcctag

SEQ ID NO: 326801 - DNA, 1035 bp, Artificial Sequence
  derived and/or modified sequence
atgaaagatttgggggctgaacacctcgctggacatgagggtgtgcagcttctcgggctgcttaatgtgtatctagagcaagaagaaaggttccagcctagagagaaaggactgtcattgatcgaggccacacctgagaacgacaacaccctgtgtccaggactgcgcaacgctaaagtagaggacctgagatcgctggcaaatttcttcggctcatgcactgaaaccttcgttctggctgttaacatcctagatcggtttctcgcgttgatgaaagttaagccaaagcacctctcctgcattggagtttgttccttcctgttggcagctcggattgtggaagaagactgcaacatcccgtccacacacgatgtgattcggattagtcagtgcaagtgcacggcctcagatattaaaaggatggagaaaattatctccgaaaagctgcactatgaattggaagccacaactgccctgaattttctccatctgtatcatacaattatactgtgtcatacttcagagaggaaagagatcctctctttggacaagcttgaagctcagctcaaagcgtgcaactgcagactgatttttagtaaagctaagccctctgtgctcgcgctctgtttgctgaacctggaggtggagacccttaagagtgtggagctgttggagatacttctgttggtaaagaaacattcaaagattaatgatacagaattcttttactggcgtgagctggtgtccaagtgcctggcagaatattcttcaccagagtgctgcaagccagacttgaaaaagcttgtctggatagtctccaggcgtacggctcagaacttgcataactcctactactctgtccccgaacttccaacaatcccagaaggtggatgttttgacgaaagcgagagcgaagactcctgtgaagacatgtcgtgtggcgaggagagcctttcatcatctcctccttcagaccaggagtgcacattcttctttaacttcaaagtggctcagaccctatgcttcccctcgtag

SEQ ID NO: 326802 - DNA, 483 bp, Artificial Sequence
  derived and/or modified sequence
atgaaagatctcggcgcagagcatttggccggacatgagggtgtccagctgctgggcctcctcaatgtgtatttggagcaggaagaaagattccagcctagggagaaaggactcagtctgatcgaagcaacacccgaaaacgacaacaccctatgcccagggctgcggaatgccaaggtcgaagatctacgctcgctggctaatttcttcggctcatgcaccgagacgtttgttctggctgtcaatattctggacaggttcctggcattgatgaaagtgaagcctaagcatttgagctgtatcggtgtgtgttctttcctgttagcagctcgaattgtggaagaggattgtaacatcccctccacccacgacgttatacggatctcgcaatgcaaatgcaccgcctctgacatcaaaagaatggagaagattatctctgaaaagctgcactatgaactagaggccacaacagccttaaactag

SEQ ID NO: 326803 - protein, 561 aa, Artificial Sequence
  derived and/or modified sequence
MSFIMKLHRHFQRTVILLATFCMVSIIISAYYLYSGYKQENELSETASEVDCGDLQHLPYQLMEVKAMKLFDASRTDPTVLVFVESQYSSLGQDIIMILESSRFQYHIEIAPGKGDLPVLIDKMKGKYILIIYENILKYINMDSWNRSLLDKYCVEYGVGVIGFHKTSEKSVQSFQLKGFPFSIYGNLAVKDCCINPHSPLIRVTKSSKLEKGSLPGTDWTVFQINHSAYQPVIFAKVKTPENLSPSISKGAFYATIIHDLGLHDGIQRVLFGNNLNFWLHKLIFIDAISFLSGKRLTLSLDRYILVDIDDIFVGKEGTRMNTNDVKEHGIPTDMGYAVAPHHSGVYPVHVQLYEAWKKVWNIKITSTEEYPHLKPARYRRGFIHKNIMVLPRQTCGLFTHTIFYKEYPGGPKELDKSIQGGELFFTVVLNPISIFMTHLSNYGNDRLGLYTFVNLANFVKSWTNLRLQTLPPVQLAHKYFELFPDQKDPLWQNPCDDKRHRDIWSKEKTCDRLPKFLVIGPQKTGTTALYLFLVMHPSILSNSPSPKTFEEVYGFLPSPI

SEQ ID NO: 326804 - DNA, 1686 bp, Artificial Sequence
  derived and/or modified sequence
atgagcttcatcatgaagctgcacagacacttccagagaaccgtgatcctgctggccaccttctgcatggtgagcatcatcatcagcgcctactacctgtacagcggctacaagcaggagaacgagctgagcgagaccgccagcgaggtggactgcggcgacctgcagcacctgccctaccagctgatggaggtgaaggccatgaagctgttcgacgccagcagaaccgaccccaccgtgctggtgttcgtggagagccagtacagcagcctgggccaggacatcatcatgatcctggagagcagcagattccagtaccacatcgagatcgcccccggcaagggcgacctgcccgtgctgatcgacaagatgaagggcaagtacatcctgatcatctacgagaacatcctgaagtacatcaacatggacagctggaacagaagcctgctggacaagtactgcgtggagtacggcgtgggcgtgatcggcttccacaagaccagcgagaagagcgtgcagagcttccagctgaagggcttccccttcagcatctacggcaacctggccgtgaaggactgctgcatcaacccccacagccccctgatcagagtgaccaagagcagcaagctggagaagggcagcctgcccggcaccgactggaccgtgttccagatcaaccacagcgcctaccagcccgtgatcttcgccaaggtgaagacccccgagaacctgagccccagcatcagcaagggcgccttctacgccaccatcatccacgacctgggcctgcacgacggcatccagagagtgctgttcggcaacaacctgaacttctggctgcacaagctgatcttcatcgacgccatcagcttcctgagcggcaagagactgaccctgagcctggacagatacatcctggtggacatcgacgacatcttcgtgggcaaggagggcaccagaatgaacaccaacgacgtgaaggagcacggcatccccaccgacatgggctacgccgtggccccccaccacagcggcgtgtaccccgtgcacgtgcagctgtacgaggcctggaagaaggtgtggaacatcaagatcaccagcaccgaggagtacccccacctgaagcccgccagatacagaagaggcttcatccacaagaacatcatggtgctgcccagacagacctgcggcctgttcacccacaccatcttctacaaggagtaccccggcggccccaaggagctggacaagagcatccagggcggcgagctgttcttcaccgtggtgctgaaccccatcagcatcttcatgacccacctgagcaactacggcaacgacagactgggcctgtacaccttcgtgaacctggccaacttcgtgaagagctggaccaacctgagactgcagaccctgccccccgtgcagctggcccacaagtacttcgagctgttccccgaccagaaggaccccctgtggcagaacccctgcgacgacaagagacacagagacatctggagcaaggagaagacctgcgacagactgcccaagttcctggtgatcggcccccagaagaccggcaccaccgccctgtacctgttcctggtgatgcaccccagcatcctgagcaacagccccagccccaagaccttcgaggaggtgtacggcttcctgcccagccccatctag

SEQ ID NO: 326805 - DNA, 1686 bp, Artificial Sequence
  derived and/or modified sequence
atgagcttcattatgaaacttcataggcactttcagcggactgtgatcctgctggcaactttctgtatggtgagcatcataatttccgcatactatctctattctggatataagcaggagaacgagctctccgagaccgccagcgaagtcgattgcggtgatctccagcacctcccataccaactgatggaggtgaaggccatgaaactgttcgacgcatcgaggacagatcccaccgtgttggtttttgtggaatcacagtatagcagtcttgggcaggacatcatcatgattctcgagtcctctcggtttcagtatcacatagaaatcgcccccggcaaaggagatcttcctgtgttgatagataagatgaaggggaaatacatcctgattatctacgagaatatactgaagtatattaacatggattcctggaaccgctccctcctggacaagtattgcgtggagtatggggtgggggttatcggattccacaaaacgtcggagaaatctgtacagagctttcagctgaaaggcttccccttctctatctatggaaatctagcagtcaaggattgctgtattaacccccacagccccttgattagggtgacgaaatccagtaaactggagaagggctcattgccgggtaccgactggacagtcttccagatcaaccactctgcatatcaacccgtaatcttcgcaaaagtcaagaccccggagaatcttagcccttctatctccaagggtgccttttatgctactatcatacatgatcttggtctccatgatggcatccagagagtgttatttggaaataaccttaacttttggctccacaagttaatttttatcgatgccatctcctttctatctgggaaaagactgactctctcactggataggtatattttggttgatattgatgacatctttgtgggaaaagagggcacaaggatgaataccaacgatgtgaaggagcatggaatccctacggatatgggctatgcagttgccccacaccattctggggtatatcccgtgcacgtgcagctgtacgaagcatggaaaaaggtgtggaacattaagatcactagtacggaggagtatccccacctgaagccagctaggtatcgcagaggcttcattcacaaaaatattatggtgctgccacgccagacttgtggtctgttcacacacaccatcttctacaaggagtaccctgggggccccaaggagctcgacaagtccatccaaggcggtgaactgttctttaccgtggtcctgaaccctataagcatatttatgacccatctatccaactacggcaacgacagattgggactctacacctttgtgaatctagctaatttcgtcaagagttggaccaacctgcggcttcagacattgccacccgtccagctcgcccacaagtattttgagctatttccagaccagaaagaccctctctggcagaacccgtgcgatgataagcgtcaccgcgatatttggagcaaggaaaagacatgcgatcgcttgcctaaatttctcgtgatcggcccacagaagacaggaacaactgcattgtacttgtttcttgtgatgcacccaagcatcttaagcaatagtcccagccccaaaacattcgaagaggtgtacggtttcctgccctcacccatatag

SEQ ID NO: 326806 - DNA, 1686 bp, Artificial Sequence
  derived and/or modified sequence
atgtccttcatcatgaagctgcaccgccacttccagaggacagtcatcctgctggccaccttctgcatggtgtccatcatcatcagcgcctactacctgtacagcggctacaagcaggagaatgagctgtctgaaacagccagcgaggtggactgtggggacctgcagcacctgccctaccagctgatggaggtgaaggccatgaagctgtttgatgccagcaggacagaccccaccgtgctggtgtttgtggagagccagtacagcagcctgggccaggacatcatcatgatcctggagagcagccgcttccagtaccacatcgagatcgcccctgggaagggggacctgcctgtgctgattgacaagatgaagggcaagtacatcctgatcatctatgagaacatcctgaagtacatcaacatggacagctggaacagaagcctgctggacaagtactgtgtggagtatggagtgggcgtcatcggcttccacaagaccagcgagaagtctgtgcagagcttccagctgaagggcttccccttcagcatctacggcaacctggccgtgaaggactgctgcatcaacccccacagccccctcatccgggtgaccaagagcagcaagctggagaagggcagcctgcccggcacagactggacagtgttccagatcaaccacagcgcctaccagcccgtcatctttgccaaggtgaagaccccagagaacctgagccccagcatcagcaagggggccttctacgccaccatcatccatgacctgggcctgcatgatggcatccagagggtgctgtttggaaacaacctgaacttctggctgcacaagctgatcttcattgatgccatctccttcctgagcggcaagaggctgaccctgagcctggaccgctacatcctggtggacattgatgacatctttgtgggcaaggagggcaccaggatgaacaccaatgatgtgaaggagcacggcatccccacagacatgggctatgctgtggccccccaccacagcggcgtgtaccctgtgcacgtgcagctgtatgaggcctggaagaaggtgtggaacatcaagatcaccagcacagaggagtacccccacctgaagccagcccgctaccgccggggcttcatccacaagaacatcatggtgctgccccggcagacctgtggcctcttcacccacaccatcttctacaaggagtacccaggcggccccaaggagctggacaagagcatccagggcggggagctgttcttcaccgtggtgctgaaccccatcagcatcttcatgacccacctgagcaactatggaaatgaccggctgggcctgtacacctttgtgaacctggccaactttgtgaagtcctggaccaacctgcggctgcagaccctgccccctgtgcagctggcccacaagtactttgagctgttcccagaccagaaggaccccctgtggcagaacccctgtgatgacaagaggcaccgggacatctggagcaaggagaagacctgtgaccggctgcccaagttcctggtgattggcccccagaagacaggcaccacagccctgtacctgttcctggtgatgcaccccagcatcctgagcaacagccccagccccaagacctttgaggaggtgtatggcttcctgcccagccccatctag

SEQ ID NO: 326807 - DNA, 2001 bp, Artificial Sequence
  derived and/or modified sequence
aaaaagcctgagccgatggtaacgagtggtactgtttccgtttcttttccatctattgcaactttctcaagcattttcagctctgaactttaattccagactgtattttctgtgagtcctgatcaagtgatacaaatgagctgcaatggtgacataaactcttgacagagattggaaaagtagctggaacaccatcttttcttttaactttttatggtgcttctgttggcatagttggggaaagcacctacaacatgagttttatcatgaagcttcacagacactttcaaagaacagtcattctgcttgccactttttgtatggtgagcattatcatttctgcttactacctgtacagtggctacaaacaggaaaatgaactctctgagacggcttcagaagttgactgtggcgacctccaacacctaccatatcaactaatggaagtgaaagcaatgaagctttttgatgcctcaaggacagaccccacagtcctagtatttgtagagagccagtactcatctcttggtcaagacatcattatgattctagaatcaagtagattccagtatcacattgaaattgcccctggaaagggagatctcccagtgcttatagacaaaatgaaaggcaaatacattctcattatttatgagaatattttaaagtatataaatatggattcctggaatcgaagccttctagataaatactgtgtagaatatggtgtgggtgtcattggattccacaaaactagtgagaagagtgtacagagctttcagttaaaaggtttccctttttccatatatggaaatcttgcagtaaaagattgttgtattaatcctcattctccattgattcgtgtgaccaaatcttccaagcttgaaaaaggttctttacctggaactgactggacagtttttcagattaatcattcagcctatcaaccagtaatatttgccaaagtaaagaccccagaaaacctttctccttccatctctaaaggtgctttttatgccactattatacatgacctggggcttcatgatggaattcaaagggttctttttggcaacaacttgaacttttggctgcacaagctcatcttcatagatgccatctccttcttatcagggaagaggctgacattgtccttggacaggtacattcttgtggatattgatgatatatttgtgggaaaagagggaacaagaatgaacaccaatgatgtaaaggagcacggcattccaacggacatgggctacgctgtggcccctcaccattcgggcgtctaccctgtacatgttcagctttatgaggcctggaagaaggtctggaatattaaaatcaccagcactgaagaatatccacatctgaagccagctagataccggaggggttttatccacaaaaacatcatggttctcccaagacaaacctgtgggcttttcactcacaccattttctacaaagaatatccagggggtcctaaagagctggataagagtatccaaggaggagaacttttcttcactgtcgtcctcaaccctatcagcattttcatgacccatttgtccaactatgggaatgaccgactgggattatatacatttgttaatctggccaactttgtgaagagctggaccaacctgcgacttcagactctgcctccagtacaactggcccacaagtattttgagctgtttcctgatcagaaagaccctctctggcagaatccttgcgatgacaaacgccacagagacatttggtctaaagaaaaaacttgtgatcgcttaccaaaattcttggtaataggaccccagaaaactggtaccactgctttgtatttgttcctggttatgcatccttccatccttagtaactcccccagcccaaaaacctttgaggaggtatatggatttcttcccagtcccatctaatgtcactaccgactttttgtttgagaagagtgccaattacttccactcagaggaagcccct

SEQ ID NO: 326808 - DNA, 1686 bp, Artificial Sequence
  derived and/or modified sequence
atgagcttcatcatgaagctgcaccggcacttccagcggaccgtgatcctcctcgccactttttgcatggtgtcaattattatcagcgcttattacctgtactccggctacaagcaggagaacgaactgagtgaaaccgcatccgaagtcgactgtggcgacctccagcacctaccttaccagctcatggaggtaaaggctatgaagttgttcgatgccagtcggaccgaccctaccgtgcttgtgtttgtggagtcacagtactcatcattaggacaggatatcatcatgatcttggaaagctcccggttccagtaccacatcgagattgcccccgggaagggggatctgcccgtactcatcgacaaaatgaaagggaagtatatcctgattatttacgagaatatcttaaagtacattaacatggattcttggaacagatccctgctggacaaatattgcgtggagtatggcgttggtgtgatcggcttccacaagacctccgaaaaatccgtgcagtcttttcagctgaagggatttccttttagtatctacggcaacctcgccgtgaaagattgttgtatcaacccacattctccattgatccgagtgactaagtctagtaagctggaaaaaggaagcctccctggtaccgactggaccgtgttccaaatcaatcattcagcataccaacctgtgattttcgctaaagtgaaaaccccggagaacctctctcccagcatcagtaagggggctttctatgctacgataattcatgatctgggcctccacgacgggatacagcgagttctatttggcaacaacttgaacttttggctccacaaattgatcttcatcgacgctataagctttctgtccggtaagcggctcactctgtcactcgataggtacatattggtcgacattgacgacatcttcgtcggaaaggagggcacaagaatgaatactaacgacgttaaggaacacggcatacccaccgacatgggctacgctgttgcccctcaccactcaggggtgtatcctgtgcacgtgcagctctacgaagcttggaagaaagtttggaacattaagattacctcaacagaagagtacccccatctcaaacccgctaggtaccgtcgaggctttatccataagaatattatggtcctgccacgccagacatgtggactcttcacacacaccattttttacaaagagtacccgggaggcccaaaggaacttgataagtctattcagggcggcgagttgttttttacggtggtactcaatcctattagcatcttcatgacccacttgtcaaactatggaaacgacagattgggcttgtatacgttcgtaaacctggccaattttgtaaagagctggaccaacttgcgacttcagaccttacccccagtgcagttggctcacaagtattttgaactatttccagatcagaaggaccctctatggcagaacccttgcgatgataagcggcacagagatatttggtcaaaggaaaagacctgtgacagactgccgaagtttctggtgatcggccctcagaaaacggggaccacagctctgtatctttttttagttatgcacccatccatcctgtctaacagtccaagccctaagacatttgaggaagtctatggttttcttccctctccaatatag

SEQ ID NO: 326809 - DNA, 1686 bp, Artificial Sequence
  derived and/or modified sequence
atgtcattcataatgaaactgcatcgccacttccagagaaccgtcatcctgcttgccactttctgtatggtctctatcatcatctcagcttattatctttatagtggttataagcaggaaaacgaactctctgaaaccgcctcagaagtcgactgcggtgatcttcaacacctcccctaccagctgatggaagtgaaagctatgaagctttttgatgcatctcgtacggaccctaccgtgctcgtgttcgtggagagccagtactcatcacttggccaggacattatcatgatactggagagcagtaggttccagtatcacatcgagatcgcccctgggaagggcgacttgcccgtgctcatcgacaaaatgaaggggaagtacatcctcattatctacgagaacattcttaaatacattaacatggactcctggaaccggagcttgctggataaatattgtgtggagtatggcgtaggggtgattgggttccacaagacaagcgaaaagagtgtccaaagctttcagctaaaaggctttccattcagcatctacggaaatttggctgtgaaggattgctgcatcaatcctcattcccccctgatccgagttacaaaatctagcaagctggagaaaggatctctgccaggtaccgactggacagtgtttcagattaaccatagcgcatatcagcctgtaattttcgctaaggtgaagactcccgaaaatctgtccccatcaatttccaaaggcgctttctatgccaccatcattcacgacttggggcttcacgacggaatccagagagtcctgttcggcaataacctgaacttctggctccataagctcatcttcattgacgccatttccttcttgtccggcaagagattgacactgtcactggacaggtatatcttagtggacattgacgacatctttgtgggaaaagagggcactcggatgaataccaatgacgttaaggaacatggaattcccaccgacatgggctacgcagttgctcctcaccacagtggcgtctatccagtacatgtgcaactctacgaggcctggaagaaagtctggaacatcaagataacaagtacagaagagtaccctcatttgaaaccagcccgataccggagaggctttattcacaaaaatataatggttctgccccgtcagacctgcggcctcttcacccataccattttctacaaagaatatcccggaggtcctaaagagctggataagagtatccagggaggagaactcttctttacagttgttctgaaccctattagcattttcatgacccacctgagcaattatgggaatgaccgtctagggctttatacctttgtgaacctggccaattttgtcaagagttggacaaacctacgtttgcagacgctgccacccgtccagcttgctcataagtacttcgagttgttccctgaccagaaggatcccctctggcaaaacccttgtgatgacaagcgacatagagatatctggtccaaggaaaaaacttgcgacaggctcccgaaattcctcgttatcggccctcagaaaactggaactacggccctctacctgttcttagtgatgcatcctagcatcctgagcaattccccatcacctaagacctttgaagaagtgtacgggtttctgccgtcccccatctag

SEQ ID NO: 326810 - protein, 1087 aa, Artificial Sequence
  derived and/or modified sequence
MPPPICPPLAPGPWPGGLGGSHALLLLRSCGSLLPELKLEERTEFAHRIWDTLQKLGAVYDVSHYNALLKVYLQNEYKFSPTDFLAKMEEANIQPNRVTYQRLIASYCNVGDIEGASKILGFMKTKDLPVTEAVFSALVTGHARAGDMENAENILTVMRDAGIEPGPDTYLALLNAYAEKGDIDHVKQTLEKVEKSELHLMDRDLLQIIFSFSKAGYPQYVSEILEKVTCERRYIPDAMNLILLLVTEKLEDVALQILLACPVSKEDGPSVFGSFFLQHCVTMNTPVEKLTDYCKKLKEVQMHSFPLQFTLHCALLANKTDLAKALMKAVKEEGFPIRPHYFWPLLVGRRKEKNVQGIIEILKGMQELGVHPDQETYTDYVIPCFDSVNSARAILQENGCLSDSDMFSQAGLRSEAANGNLDFVLSFLKSNTLPISLQSIRSSLLLGFRRSMNINLWSEITELLYKDGRYCQEPRGPTEAVGYFLYNLIDSMSDSEVQAKEEHLRQYFHQLEKMNVKIPENIYRGIRNLLESYHVPELIKDAHLLVESKNLDFQKTVQLTSSELESTLETLKAENQPIRDVLKQLILVLCSEENMQKALELKAKYESDMVTGGYAALINLCCRHDKVEDALNLKEEFDRLDSSAVLDTGKYVGLVRVLAKHGKLQDAINILKEMKEKDVLIKDTTALSFFHMLNGAALRGEIETVKQLHEAIVTLGLAEPSTNISFPLVTVHLEKGDLSTALEVAIDCYEKYKVLPRIHDVLCKLVEKGETDLIQKAMDFVSQEQGEMVMLYDLFFAFLQTGNYKEAKKIIETPGIRARSARLQWFCDRCVANNQVETLEKLVELTQKLFECDRDQMYYNLLKLYKINGDWQRADAVWNKIQEENVIPREKTLRLLAEILREGNQEVPFDVPELWYEDEKHSLNSSSASTTEPDFQKDILIACRLNQKKGAYDIFLNAKEQNIVFNAETYSNLIKLLMSEDYFTQAMEVKAFAETHIKGFTLNDAANSRLIITQVRRDYLKEAVTTLKTVLDQQQTPSRLAVTRVIQALAMKGDVENIEVVQKMLNGLEDSIGLSKMVFINNIALAQ

SEQ ID NO: 326811 - protein, 17 aa, Artificial Sequence
  derived and/or modified sequence
SCPCLAQEGPQGDLLTK

SEQ ID NO: 326812 - DNA, 333 bp, Artificial Sequence
  derived and/or modified sequence
atgagctgccagcagagccagcagcagtgccagcccccccccaagtgcactccaaagtgcccccctaagtgtccaacaccgaaatgccctccaaaatgcccacccaaatgccccccagtgtcctcatgttgcagtgtttcttccggggggtgttgtggatcatcttcgggagggggatgctcttcaggcgggggcggctgctgcctgtcacatcatcgccgacatcggtcccaccggcaccggctgcagtctagcgggtgctgtagtcaaccttctggcggcagctcctgctgtgggggagactctggacagcattccggaggatgttgctag

SEQ ID NO: 326813 - protein, 318 aa, Artificial Sequence
  derived and/or modified sequence
MSDHGDVSLPPEDRVRALSQLGSAVEVNEDIPPRRYFRSGVEIIRMASIYSEEGNIEHAFILYNKYITLFIEKLPKHRDYKSAVIPEKKDTVKKLKEIAFPKAEELKAELLKRYTKEYTEYNEEKKKEAEELARNMAIQQELEKEKQRVAQQKQQQLEQEQFHAFEEMIRNQELEKERLKIVQEFGKVDPGLGGPLVPDLEKPSLDVFPTLTVSSIQPSDCHTTVRPAKPPVVDRSLKPGALSNSESIPTIDGLRHVVVPGRLCPQFLQLASANTARGVETCGILCGKLMRNEFTITHVLIPKQSAGSDYCNTENEEE

SEQ ID NO: 326814 - protein, 348 aa, Artificial Sequence
  derived and/or modified sequence
MSDHGDVSLPPEDRVRALSQLGSAVEVNEDIPPRRYFRSGVEIIRMASIYSEEGNIEHAFILYNKYITLFIEKLPKHRDYKSAVIPEKKDTVKKLKEIAFPKAEELKAELLKRYTKEYTEYNEEKKKEAEELARNMAIQQELEKEKQRVAQQKQQQLEQEQFHAFEEMIRNQELEKERLKIVQEFGKVDPGLGGPLVPDLEKPSLDVFPTLTVSSIQPSDCHTTVRPAKPPVVDRSLKPGALSNSESIPTIDGLRHVVVPGRLCPQFLQLASANTARGVETCGILCGKLMRNEFTITHVLIPKQSAGSDYCNTENEEELFLIQDQQGLITLGWIHVETLWSLKSLHAP

SEQ ID NO: 326815 - DNA, 492 bp, Artificial Sequence
  derived and/or modified sequence
atgagcgaccacggcgacgtgagcctgccccccgaggacagagtgagagccctgagccagctgggcagcgccgtggaggtgaacgaggacatcccccccagaagatacttcagaagcggcgtggagatcatcagaatggccagcatctacagcgaggagggcaacatcgagcacgccttcatcctgtacaacaagtacatcaccctgttcatcgagaagctgcccaagcacagagactacaagagcgccgtgatccccgagaagaaggacaccgtgaagaagctgaaggagatcgccttccccaaggccgaggagctgaaggccgagctgctgaagagatacaccaaggagtacaccgagtacaacgaggagaagaagaaggaggccgaggagctggccagaaacatggccatccagcaggagctggagaaggagaagcagagagtggcccagcagaagcagcagcagctggagcaggagcagttccactag

SEQ ID NO: 326816 - DNA, 957 bp, Artificial Sequence
  derived and/or modified sequence
atgagcgaccacggcgacgtgagcctgccccccgaggacagagtgagagccctgagccagctgggcagcgccgtggaggtgaacgaggacatcccccccagaagatacttcagaagcggcgtggagatcatcagaatggccagcatctacagcgaggagggcaacatcgagcacgccttcatcctgtacaacaagtacatcaccctgttcatcgagaagctgcccaagcacagagactacaagagcgccgtgatccccgagaagaaggacaccgtgaagaagctgaaggagatcgccttccccaaggccgaggagctgaaggccgagctgctgaagagatacaccaaggagtacaccgagtacaacgaggagaagaagaaggaggccgaggagctggccagaaacatggccatccagcaggagctggagaaggagaagcagagagtggcccagcagaagcagcagcagctggagcaggagcagttccacgccttcgaggagatgatcagaaaccaggagctggagaaggagagactgaagatcgtgcaggagttcggcaaggtggaccccggcctgggcggccccctggtgcccgacctggagaagcccagcctggacgtgttccccaccctgaccgtgagcagcatccagcccagcgactgccacaccaccgtgagacccgccaagccccccgtggtggacagaagcctgaagcccggcgccctgagcaacagcgagagcatccccaccatcgacggcctgagacacgtggtggtgcccggcagactgtgcccccagttcctgcagctggccagcgccaacaccgccagaggcgtggagacctgcggcatcctgtgcggcaagctgatgagaaacgagttcaccatcacccacgtgctgatccccaagcagagcgccggcagcgactactgcaacaccgagaacgaggaggagtag

SEQ ID NO: 326817 - DNA, 414 bp, Artificial Sequence
  derived and/or modified sequence
atgagcgaccacggcgacgtgagcctgccccccgaggacagagtgagagccctgagccagctgggcagcgccgtggaggtgaacgaggacatcccccccagaagatacttcagaagcggcgtggagatcatcagaatggccagcatctacagcgaggagggcaacatcgagcacgccttcatcctgtacaacaagtacatcaccctgttcatcgagaagctgcccaagcacagagactacaagagcgccgtgatccccgagaagaaggacaccgtgaagaagctgaaggagatcgccttccccaaggccgaggagctgaaggccgagctgctgaagagatacaccaaggagtacaccgagtacaacgaggagaagaagaaggaggccgaggagctggccagaaacatggcctag

SEQ ID NO: 326818 - DNA, 1047 bp, Artificial Sequence
  derived and/or modified sequence
atgagcgaccacggcgacgtgagcctgccccccgaggacagagtgagagccctgagccagctgggcagcgccgtggaggtgaacgaggacatcccccccagaagatacttcagaagcggcgtggagatcatcagaatggccagcatctacagcgaggagggcaacatcgagcacgccttcatcctgtacaacaagtacatcaccctgttcatcgagaagctgcccaagcacagagactacaagagcgccgtgatccccgagaagaaggacaccgtgaagaagctgaaggagatcgccttccccaaggccgaggagctgaaggccgagctgctgaagagatacaccaaggagtacaccgagtacaacgaggagaagaagaaggaggccgaggagctggccagaaacatggccatccagcaggagctggagaaggagaagcagagagtggcccagcagaagcagcagcagctggagcaggagcagttccacgccttcgaggagatgatcagaaaccaggagctggagaaggagagactgaagatcgtgcaggagttcggcaaggtggaccccggcctgggcggccccctggtgcccgacctggagaagcccagcctggacgtgttccccaccctgaccgtgagcagcatccagcccagcgactgccacaccaccgtgagacccgccaagccccccgtggtggacagaagcctgaagcccggcgccctgagcaacagcgagagcatccccaccatcgacggcctgagacacgtggtggtgcccggcagactgtgcccccagttcctgcagctggccagcgccaacaccgccagaggcgtggagacctgcggcatcctgtgcggcaagctgatgagaaacgagttcaccatcacccacgtgctgatccccaagcagagcgccggcagcgactactgcaacaccgagaacgaggaggagctgttcctgatccaggaccagcagggcctgatcaccctgggctggatccacgtggagaccctgtggagcctgaagagcctgcacgccccctag

SEQ ID NO: 326819 - DNA, 492 bp, Artificial Sequence
  derived and/or modified sequence
atgtccgaccacggggatgtgagcctcccccccgaagatagggtgcgggccctgtctcagctgggttctgccgttgaggtgaatgaagacatccctcctcggaggtatttcagatccggagtggagattatacggatggcctctatatacagtgaggaagggaacatagaacacgcgttcattctctacaataaatatatcacattgtttattgaaaagttacccaagcacagggactataaatccgccgtgatcccggaaaagaaagacaccgtgaagaaactcaaagagattgccttccccaaagccgaggagttaaaagccgagttgttgaaacggtacaccaaggaatacactgagtataatgaagagaaaaagaaggaggcagaagagctagcacggaacatggccattcagcaggagcttgaaaaggaaaagcagcgagtggcacagcaaaaacagcagcagctggaacaggagcaatttcattag

SEQ ID NO: 326820 - DNA, 957 bp, Artificial Sequence
  derived and/or modified sequence
atgagcgaccatggcgatgtaagtctgcctccagaggatcgcgtgagggccctttctcagttgggatcggccgtagaggtgaacgaagacatcccaccgagacgttatttccgatccggggtcgaaattattcgaatggcctcaatatactcagaggaaggcaatattgagcacgcctttatactgtataacaaatacattacactgtttatcgagaagttgccaaaacatagggattataagtcagcagttatacccgaaaaaaaagacacagtgaaaaagttgaaggaaatcgcctttcctaaagccgaagaactgaaggcggaattgctgaagcggtatacaaaggagtacacagaatacaacgaggagaaaaaaaaagaagctgaagaattagctcggaacatggccatccagcaggagctggaaaaagagaaacagagagtggcccagcagaagcagcagcaattggaacaggagcaattccacgcgttcgaagagatgattcgcaaccaggagctagagaaagaaaggctaaagatcgttcaggaattcgggaaggtggacccgggactcgggggtccactggtgcccgatctggaaaaaccttctttggacgtatttcccaccctcacagtctctagcattcagccatccgattgtcatactacagtgcgccctgctaaaccccccgttgtggataggtcactgaaaccaggcgctctcagtaattctgagtccattcctactatcgacggcctgaggcatgtagtcgtccctggcagactgtgcccccagtttttgcagctggcctctgcaaacacggccaggggggtagagacttgtggaatactttgtggaaaattgatgagaaacgaatttacaataacacatgtgttgattcctaagcagtcagcaggaagcgattactgtaacacggaaaatgaagaggagtag

SEQ ID NO: 326821 - DNA, 414 bp, Artificial Sequence
  derived and/or modified sequence
atgagtgatcacggggatgtcagtttaccaccagaggacagggttcgtgccttatcccagctcgggtccgcagtcgaggtgaacgaggacattcccccacgtaggtattttaggagtggcgtcgagataatccgaatggcaagcatttatagcgaggagggcaatattgaacacgctttcatcttgtataataagtacataactttgtttatcgagaagctgcccaaacatagggactataaatccgcggtgatcccagagaagaaagacacagtgaagaagctcaaagagatcgcgttcccgaaagctgaggagcttaaagctgaactgctgaaaaggtacacaaaagaatacaccgaatacaatgaagaaaagaagaaggaggctgaggaactggccagaaacatggcctag

SEQ ID NO: 326822 - DNA, 1047 bp, Artificial Sequence
  derived and/or modified sequence
atgtccgatcacggcgacgtcagtcttccccctgaggatcgcgtgcgcgctctgagccagctggggtctgcagtggaagtcaatgaggacattccacctagaaggtattttaggtcaggagttgagatcattcgcatggcttccatctacagtgaggagggcaatattgagcacgccttcattctttacaataaatacatcactttgtttattgaaaaactgcccaaacacagagactacaaatcggctgtgatccccgagaagaaggatacagtaaaaaagctgaaggaaattgcttttccaaaagctgaagagctcaaggccgagctgctcaagcgctacaccaaagaatatacagagtataatgaggagaagaaaaaagaggccgaggagctcgcccgaaacatggctatccagcaggagttggagaaggaaaaacaaagggtggcacagcagaagcagcagcagctcgaacaagagcaatttcatgcctttgaggagatgatccgtaaccaggaactcgagaaggaaaggcttaagatcgtgcaagaattcgggaaagtggaccccggcctgggtggcccccttgtgcccgaccttgagaagccatcactcgacgtttttccaactttaaccgttagcagcatacaaccctccgattgtcataccaccgtgcgacccgcaaaaccacccgtggtggacaggagcctaaagccaggcgctttgagcaatagtgaaagtattcctacaattgatggtcttaggcatgttgttgtgcctgggcggctctgcccccagtttctccaattggcctcagctaatactgctcggggcgtggaaacctgtggcattctgtgcgggaagctgatgcgcaatgaatttacaataacacacgtgctgattcccaaacagagcgcagggagtgactattgtaacacagagaatgaagaagaactgtttctgatccaagatcagcagggattgataaccctggggtggatccacgtagagactctgtggagtctgaaatcactgcatgccccctag

SEQ ID NO: 326823 - DNA, 492 bp, Artificial Sequence
  derived and/or modified sequence
atgtctgaccatggagatgtgtccctgcccccagaggacagagtgcgggccctgagccagctgggcagcgctgtggaggtgaatgaagacatccccccccggcgctacttccgctctggagtggagatcatccgcatggccagcatctacagcgaggagggcaacatcgagcacgccttcatcctgtacaacaagtacatcaccctcttcatcgagaagctgcccaagcaccgggactacaagtctgctgtgattcctgagaagaaggacacagtgaagaagctgaaggagatcgccttccccaaggccgaggagctgaaggccgagctgctgaagcgctacaccaaggagtacacagagtacaatgaggagaagaagaaggaggccgaggagctggccaggaacatggccatccagcaggagctggagaaggagaagcagagggtggcccagcagaagcagcagcagctggagcaggagcagttccactag

SEQ ID NO: 326824 - DNA, 957 bp, Artificial Sequence
  derived and/or modified sequence
atgtctgaccatggagatgtgtccctgcccccagaggacagagtgcgggccctgagccagctgggcagcgctgtggaggtgaatgaagacatccccccccggcgctacttccgctctggagtggagatcatccgcatggccagcatctacagcgaggagggcaacatcgagcacgccttcatcctgtacaacaagtacatcaccctcttcatcgagaagctgcccaagcaccgggactacaagtctgctgtgattcctgagaagaaggacacagtgaagaagctgaaggagatcgccttccccaaggccgaggagctgaaggccgagctgctgaagcgctacaccaaggagtacacagagtacaatgaggagaagaagaaggaggccgaggagctggccaggaacatggccatccagcaggagctggagaaggagaagcagagggtggcccagcagaagcagcagcagctggagcaggagcagttccacgcctttgaggagatgatccggaaccaggagctggagaaggagcggctgaagatcgtgcaggagtttgggaaggtggaccccggcctgggcggccccctggtgcctgacctggagaagcccagcctggatgtgttccccaccctgactgtgagcagcatccagcccagcgactgccacaccaccgtgcggcctgccaagccccctgtggtggacaggagcctgaagccaggggccctgagcaacagcgagagcatccccaccattgatggcctgcggcacgtggtggtgcccggccgcctgtgcccccagttcctgcagctggccagcgccaacacagcccggggcgtggagacctgtggcatcctgtgtgggaagctgatgagaaatgagttcaccatcacccacgtgctgatccccaagcagagcgctggcagtgactactgcaacacagaaaatgaggaggagtag

SEQ ID NO: 326825 - DNA, 414 bp, Artificial Sequence
  derived and/or modified sequence
atgtctgaccatggagatgtgtccctgcccccagaggacagagtgcgggccctgagccagctgggcagcgctgtggaggtgaatgaagacatccccccccggcgctacttccgctctggagtggagatcatccgcatggccagcatctacagcgaggagggcaacatcgagcacgccttcatcctgtacaacaagtacatcaccctcttcatcgagaagctgcccaagcaccgggactacaagtctgctgtgattcctgagaagaaggacacagtgaagaagctgaaggagatcgccttccccaaggccgaggagctgaaggccgagctgctgaagcgctacaccaaggagtacacagagtacaatgaggagaagaagaaggaggccgaggagctggccaggaacatggcctag

SEQ ID NO: 326826 - DNA, 1047 bp, Artificial Sequence
  derived and/or modified sequence
atgtctgaccatggagatgtgtccctgcccccagaggacagagtgcgggccctgagccagctgggcagcgctgtggaggtgaatgaagacatccccccccggcgctacttccgctctggagtggagatcatccgcatggccagcatctacagcgaggagggcaacatcgagcacgccttcatcctgtacaacaagtacatcaccctcttcatcgagaagctgcccaagcaccgggactacaagtctgctgtgattcctgagaagaaggacacagtgaagaagctgaaggagatcgccttccccaaggccgaggagctgaaggccgagctgctgaagcgctacaccaaggagtacacagagtacaatgaggagaagaagaaggaggccgaggagctggccaggaacatggccatccagcaggagctggagaaggagaagcagagggtggcccagcagaagcagcagcagctggagcaggagcagttccacgcctttgaggagatgatccggaaccaggagctggagaaggagcggctgaagatcgtgcaggagtttgggaaggtggaccccggcctgggcggccccctggtgcctgacctggagaagcccagcctggatgtgttccccaccctgactgtgagcagcatccagcccagcgactgccacaccaccgtgcggcctgccaagccccctgtggtggacaggagcctgaagccaggggccctgagcaacagcgagagcatccccaccattgatggcctgcggcacgtggtggtgcccggccgcctgtgcccccagttcctgcagctggccagcgccaacacagcccggggcgtggagacctgtggcatcctgtgtgggaagctgatgagaaatgagttcaccatcacccacgtgctgatccccaagcagagcgctggcagtgactactgcaacacagaaaatgaggaggagctgttcctgatccaggaccagcagggcctcatcaccctgggctggattcatgtggagaccctgtggagcctgaagagcctgcacgccccctag

SEQ ID NO: 326827 - DNA, 492 bp, Artificial Sequence
  derived and/or modified sequence
atgagcgaccacggcgacgtgagcctgccccccgaggaccgggtgagggccctgagccagttggggtctgctgtggaagtaaatgaagatataccacctagaaggtactttaggtccggggtcgagattatccgtatggcgtcaatatactctgaggaagggaacatcgaacatgcctttattctttacaacaaatacataacgttattcattgaaaagctgcctaagcaccgggactacaaaagcgctgtgattcccgaaaagaaggacaccgtcaaaaaactcaaagaaatcgccttccctaaggctgaggagttgaaagccgagctgttgaagaggtatacaaaggaatatacagagtacaatgaagagaagaaaaaggaggccgaggagctggcgagaaatatggctatccagcaggagttggaaaaagaaaagcagcgggtggcccaacagaaacaacaacagttggagcaagagcagtttcattag

SEQ ID NO: 326828 - DNA, 957 bp, Artificial Sequence
  derived and/or modified sequence
atgagcgaccacggcgacgtgagcctgccccccgaggaccgggtgcgggcgttatctcagctggggtctgccgtagaagtgaacgaggacatcccacccagaagatattttcggtccggcgtggagatcattcgaatggcaagcatctacagtgaggagggcaatatcgagcacgcttttatcctgtacaacaaatacatcactctcttcatcgagaagcttccaaaacatagagattataagagcgcggtgatccccgaaaagaaggataccgtcaagaagttaaaggaaattgctttcccaaaagcagaagaattaaaggccgagctgctcaagagatacacaaaggaatataccgaatataatgaggaaaaaaaaaaggaggccgaagagcttgcacgaaacatggcaatccagcaggagctggaaaaagagaagcaacgagtggcacagcagaagcagcagcagttagagcaggagcagtttcacgcctttgaagaaatgatacgtaaccaggagctcgagaaagagcgattgaagattgttcaggagttcgggaaggtggatcctggtctgggtggccccctggtgccagacttggaaaaaccttccctcgacgtcttccctacactgactgtgagcagtatccagccgtccgactgtcatacaacagtgcgaccggccaagccacccgttgtagataggagtttgaaacccggggcactaagcaattccgaatccattcccacaattgacggcttgaggcatgttgttgtgcccggacgattgtgtcctcaattcctgcagctagcttccgctaacacagcaagaggcgtggagacttgcggtattctgtgtggtaagctcatgcgcaacgaattcacaatcacccacgtacttattcccaagcagagcgccgggtccgattactgtaacactgagaacgaagaggaatag

SEQ ID NO: 326829 - DNA, 414 bp, Artificial Sequence
  derived and/or modified sequence
atgagcgaccacggcgacgtgagcctgccccccgaggaccgggtgcgtgccttgtcccagttgggctcagccgtggaagttaacgaagacataccaccccgacggtatttccggtccggagtggagattatccgcatggcctctatctattccgaggagggaaacattgaacacgcctttatactgtacaataagtacatcacactattcatcgagaagctccccaagcatagggattataagtccgcagttattccggaaaaaaaggacaccgttaagaagctgaaggaaatagcatttcccaaagctgaagaactgaaggcagaactgctcaaaagatacacaaaggaatataccgagtataatgaagagaagaagaaggaggctgaggaactggcccggaacatggcatag

SEQ ID NO: 326830 - DNA, 1047 bp, Artificial Sequence
  derived and/or modified sequence
atgagcgaccacggcgacgtgagcctgccccccgaggaccgggtgcgagctctttcccaacttggcagcgccgtcgaggtgaatgaggatatacccccacgccggtatttccggtctggcgttgagatcattcgaatggcgtcgatatatagtgaggaaggaaatatagagcatgcatttatcctgtacaacaaatacatcacgctgtttattgagaagctccccaaacacagggactacaagtcagcagtgatcccggaaaagaaagacacggtaaagaaactgaaggaaatagcctttcctaaagccgaagagcttaaagccgagctcttgaaacgatacaccaaggagtacactgaatacaacgaagagaagaagaaagaggctgaagaactcgcccggaacatggcaatccagcaggaattagagaaggagaaacagcgtgtcgctcagcagaaacagcagcagctagagcaagagcagttccacgcttttgaagaaatgattcggaatcaagaactcgagaaggagcgcttaaagattgtgcaggaattcggaaaagtggatccggggctgggagggcccttggttcctgatctagaaaagccttccctggatgtcttccccaccctgaccgtgtcatcaatccaaccgtcagattgccatactaccgtgagacctgctaaaccacctgtcgttgatcggagtctgaaaccgggcgcattgagcaattccgagtctatcccgactatagacggactcaggcacgttgtcgtgccaggacggctatgcccacagtttctgcaactggccagcgctaacacggcacggggcgtggaaacttgtggcattctgtgtggcaagctgatgaggaatgagtttactataacccatgtgctcatacccaagcagagtgcaggtagtgattattgcaataccgagaatgaggaggagttgtttctgattcaggaccaacaggggcttatcacactggggtggatacacgttgaaacgctgtggtctcttaaaagccttcacgcaccttag

SEQ ID NO: 326831 - DNA, 492 bp, Artificial Sequence
  derived and/or modified sequence
atgtcagatcacggcgacgtgtctctgccccctgaggatcgcgtccgagctctatctcagctgggcagtgcggtggaagtcaatgaggacattcctcccaggaggtatttcaggagtggagtggagatcattaggatggcatccatttactccgaagaggggaatatagagcacgcctttatactgtataacaagtatattacgctgtttatcgagaaattgcctaagcacagggactacaagagcgccgtaattcccgagaaaaaagacactgtgaagaagttgaaggaaatcgctttccccaaagcagaagaattgaaggccgagctgttaaaaaggtacaccaaagaatataccgaatataacgaagagaaaaaaaaggaggccgaagaactggccaggaatatggccatacagcaggagctggagaaagagaagcaacgggtggcacaacaaaaacagcaacaattggagcaggaacagtttcactag

SEQ ID NO: 326832 - DNA, 957 bp, Artificial Sequence
  derived and/or modified sequence
atgtccgatcacggggacgtgagtctgcctcctgaggatcgggttagagccctttcacaactgggaagcgcagtggaggtcaacgaggacataccgcctagaagatatttcagatccggagtggagattattaggatggcttcaatttatagcgaggagggaaacatcgagcacgcctttatcctgtataacaagtatattaccctattcatcgaaaagctccctaagcaccgggattacaaatcagctgtaattccagagaaaaaagacaccgtgaagaaacttaaagaaattgcattcccaaaggctgaagaactcaaagctgaattattgaagcggtacaccaaagaatacactgaatacaacgaggaaaaaaaaaaggaggcagaagaactcgcccgtaacatggccattcagcaggagcttgaaaaggaaaagcagagggttgcacagcagaaacagcagcagcttgagcaggaacaatttcatgccttcgaagagatgattcggaaccaggaactggagaaagaaaggctaaaaatcgttcaggaatttggcaaggtggacccagggctggggggtcccctggtcccagatctggagaaaccatcattggatgtatttcccactcttaccgttagcagcatccagccatctgattgccacactacggtcaggcccgcaaaaccacccgtggtagaccggagcctcaagcccggagccctgtcaaattccgagagcattcccaccatcgatggtcttcggcatgtagtggtcccgggacgtctgtgtccgcaatttctgcagctggccagcgccaacaccgctaggggagtggaaacctgtgggatcctgtgcgggaagttgatgcgaaacgagttcaccattacccatgtgctcatccctaagcagtctgcgggatctgattactgtaatactgagaatgaagaggagtag

SEQ ID NO: 326833 - DNA, 414 bp, Artificial Sequence
  derived and/or modified sequence
atgagtgaccacggagatgtatcccttcccccagaggatcgggtcagggccctatctcaactgggttcagcagtcgaggtcaatgaggatattcctcccagacgctattttcggagtggcgtcgaaattataagaatggcctccatatatagtgaggagggcaatatcgagcatgccttcatactgtataataagtacattacactctttatagaaaaactacctaaacacagagattacaagtcggctgtgatcccagagaaaaaagacaccgtcaagaaactcaaagagatcgccttcccgaaggcagaggagctgaaagcggagctactgaagcggtatacaaaagagtacacggagtataacgaggaaaagaagaaggaagccgaagagctggcacgaaacatggcatag

SEQ ID NO: 326834 - DNA, 1047 bp, Artificial Sequence
  derived and/or modified sequence
atgagcgaccacggagatgtgtcgcttccaccagaggatcgagtgagagccctatctcaactgggctccgccgtggaggtcaacgaagatatccctcctcggagatacttccgaagtggcgtggagataatccgtatggcgtcaatctacagcgaggaaggcaacattgagcatgcctttattttatacaataaatatatcacactctttattgaaaagctcccaaaacatagggactacaagagtgctgtaattcccgagaaaaaggacactgtgaagaagctgaaggaaatcgccttcccaaaggccgaggagctcaaagccgagctgcttaaacggtataccaaagagtacactgaatacaatgaggaaaagaagaaggaggcggaagagcttgctaggaatatggctattcagcaagagttagaaaaggaaaagcagcgggttgctcagcagaagcagcagcagctggagcaggagcagttccacgccttcgaggagatgatacgaaaccaagaactggagaaggagcgtttaaaaattgtgcaagagttcggcaaggtcgaccccggtctggggggaccactcgtcccagacctggaaaagccatcactcgatgtctttccaacactgaccgtaagctccattcagccatccgactgccatactaccgttcgacctgcaaagcctccagttgtggaccgcagcttaaagccaggcgcactttctaactcagagtcaatacctacaattgatggattgagacatgtcgtggtgccagggagactgtgtccccaattcctgcagctcgctagtgccaatacggcccgaggggtggaaacatgcggtattctttgcggtaagctgatgcgtaatgagtttactattacacacgtgctgattccaaaacagagcgccggatctgactattgtaatacggagaatgaagaggagctttttctgattcaggatcaacaaggccttatcactctaggttggattcatgtcgagacgttatggtctctgaaatctctacacgcaccttag

SEQ ID NO: 326835 - DNA, 583 bp, Artificial Sequence
  derived and/or modified sequence
gggaaaggtggggaagggtcccgggaacgtggtggggcagggcctccgagcgtggttggactttgaaggggatcggccgccaacttggtcctgatgtctgaccatggagatgtgagcctcccgcccgaagaccgggtgagggctctctcccagctgggtagtgcggtagaggtgaatgaagacattccaccccgtcggtacttccgctctggagttgagattatccgaatggcatccatttactctgaggaaggcaacattgaacatgccttcatcctctataacaagtatatcacgctctttattgagaaactaccaaaacatcgagattacaaatctgctgtcattcctgaaaagaaagacacagtaaagaaattaaaggagattgcatttcccaaagcagaagagctgaaggcagagctgttaaaacgatataccaaagaatatacagaatataatgaagaaaagaagaaggaagcagaggaattggcccggaacatggccatccagcaagagctggaaaaggaaaaacagagggtagcacaacagaagcagcagcaattggaacaggaacagttccatg

SEQ ID NO: 326836 - DNA, 1156 bp, Artificial Sequence
  derived and/or modified sequence
gcggggaaaggtggggaagggtcccgggaacgtggtggggcagggcctccgagcgtggttggactttgaaggggatcggccgccatgctgcatcccctttttggaattgctcaaccaggtggtaaccggcgccgcttcctggccttgggaggtggttcctttcttaacccacaagaacctctcccaagagaacttggtcctgatgtctgaccatggagatgtgagcctcccgcccgaagaccgggtgagggctctctcccagctgggtagtgcggtagaggtgaatgaagacattccaccccgtcggtacttccgctctggagttgagattatccgaatggcatccatttactctgaggaaggcaacattgaacatgccttcatcctctataacaagtatatcacgctctttattgagaaactaccaaaacatcgagattacaaatctgctgtcattcctgaaaagaaagacacagtaaagaaattaaaggagattgcatttcccaaagcagaagagctgaaggcagagctgttaaaacgatataccaaagaatatacagaatataatgaagaaaagaagaaggaagcagaggaattggcccggaacatggccatccagcaagagctggaaaaggaaaaacagagggtagcacaacagaagcagcagcaattggaacaggaacagttccatgccttcgaggagatgatccggaaccaggagctagaaaaagagcgactgaaaattgtacaggagtttgggaaggtagaccctggcctaggtggcccgctagtgcctgacttggagaagccctccttagatgtgttccccaccttaacagtctcatccatacagccttcagactgtcacacaactgtaaggccagctaagccacctgtggtggacaggtccttgaaacctggagcactgagcaactcagaaagtattcccacaatcgatggattgcgccatgtggtggtgcctgggcggctgtgcccacagtttctccagttagccagtgccaacactgcccggggagtggagacatgtggaattctctgtggaaaactgatgaggaatgaatttaccattacccatgttctcatccccaagcaaagtgctgggtctgattactgcaacacagagaacgaagaagaa

SEQ ID NO: 326837 - DNA, 560 bp, Artificial Sequence
  derived and/or modified sequence
ggaacctccgggtgtcatccgcggggaaagatgctgcatcccctttttggaattgctcaaccaggtggtaaccggcgccgcttcctggccttgggaggtggttcctttcttaacccacaagaacctctcccaagagaacttggtcctgatgtctgaccatggagatgtgagcctcccgcccgaagaccgggtgagggctctctcccagctgggtagtgcggtagaggtgaatgaagacattccaccccgtcggtacttccgctctggagttgagattatccgaatggcatccatttactctgaggaaggcaacattgaacatgccttcatcctctataacaagtatatcacgctctttattgagaaactaccaaaacatcgagattacaaatctgctgtcattcctgaaaagaaagacacagtaaagaaattaaaggagattgcatttcccaaagcagaagagctgaaggcagagctgttaaaacgatataccaaagaatatacagaatataatgaagaaaagaagaaggaagcagaggaattggcccggaacatggcca

SEQ ID NO: 326838 - DNA, 1097 bp, Artificial Sequence
  derived and/or modified sequence
acgtttccggaacctccgggtgtcatccgcggggaaagaacttggtcctgatgtctgaccatggagatgtgagcctcccgcccgaagaccgggtgagggctctctcccagctgggtagtgcggtagaggtgaatgaagacattccaccccgtcggtacttccgctctggagttgagattatccgaatggcatccatttactctgaggaaggcaacattgaacatgccttcatcctctataacaagtatatcacgctctttattgagaaactaccaaaacatcgagattacaaatctgctgtcattcctgaaaagaaagacacagtaaagaaattaaaggagattgcatttcccaaagcagaagagctgaaggcagagctgttaaaacgatataccaaagaatatacagaatataatgaagaaaagaagaaggaagcagaggaattggcccggaacatggccatccagcaagagctggaaaaggaaaaacagagggtagcacaacagaagcagcagcaattggaacaggaacagttccatgccttcgaggagatgatccggaaccaggagctagaaaaagagcgactgaaaattgtacaggagtttgggaaggtagaccctggcctaggtggcccgctagtgcctgacttggagaagccctccttagatgtgttccccaccttaacagtctcatccatacagccttcagactgtcacacaactgtaaggccagctaagccacctgtggtggacaggtccttgaaacctggagcactgagcaactcagaaagtattcccacaatcgatggattgcgccatgtggtggtgcctgggcggctgtgcccacagtttctccagttagccagtgccaacactgcccggggagtggagacatgtggaattctctgtggaaaactgatgaggaatgaatttaccattacccatgttctcatccccaagcaaagtgctgggtctgattactgcaacacagagaacgaagaagaacttttcctcatacaggatcagcagggcctcatcacactgggctggattcatgtagaaactttgtggtcactgaagtccttacatgccccatga

SEQ ID NO: 326839 - protein, 397 aa, Artificial Sequence
  derived and/or modified sequence
MSVGRRRIKLLGILMMANVFIYFIMEVSKSSSQEKNGKGEVIIPKEKFWKISTPPEAYWNREQEKLNRQYNPILSMLTNQTGEAGRLSNISHLNYCEPDLRVTSVVTGFNNLPDRFKDFLLYLRCRNYSLLIDQPDKCAKKPFLLLAIKSLTPHFARRQAIRESWGQESNAGNQTVVRVFLLGQTPPEDNHPDLSDMLKFESEKHQDILMWNYRDTFFNLSLKEVLFLRWVSTSCPDTEFVFKGDDDVFVNTHHILNYLNSLSKTKAKDLFIGDVIHNAGPHRDKKLKYYIPEVVYSGLYPPYAGGGGFLYSGHLALRLYHITDQVHLYPIDDVYTGMCLQKLGLVPEKHKGFRTFDIEEKNKNNICSYVDLMLVHSRKPQEMIDIWSQLQSAHLKC

SEQ ID NO: 326840 - DNA, 1194 bp, Artificial Sequence
  derived and/or modified sequence
atgagcgtgggcagaagaagaatcaagctgctgggcatcctgatgatggccaacgtgttcatctacttcatcatggaggtgagcaagagcagcagccaggagaagaacggcaagggcgaggtgatcatccccaaggagaagttctggaagatcagcaccccccccgaggcctactggaacagagagcaggagaagctgaacagacagtacaaccccatcctgagcatgctgaccaaccagaccggcgaggccggcagactgagcaacatcagccacctgaactactgcgagcccgacctgagagtgaccagcgtggtgaccggcttcaacaacctgcccgacagattcaaggacttcctgctgtacctgagatgcagaaactacagcctgctgatcgaccagcccgacaagtgcgccaagaagcccttcctgctgctggccatcaagagcctgaccccccacttcgccagaagacaggccatcagagagagctggggccaggagagcaacgccggcaaccagaccgtggtgagagtgttcctgctgggccagaccccccccgaggacaaccaccccgacctgagcgacatgctgaagttcgagagcgagaagcaccaggacatcctgatgtggaactacagagacaccttcttcaacctgagcctgaaggaggtgctgttcctgagatgggtgagcaccagctgccccgacaccgagttcgtgttcaagggcgacgacgacgtgttcgtgaacacccaccacatcctgaactacctgaacagcctgagcaagaccaaggccaaggacctgttcatcggcgacgtgatccacaacgccggcccccacagagacaagaagctgaagtactacatccccgaggtggtgtacagcggcctgtaccccccctacgccggcggcggcggcttcctgtacagcggccacctggccctgagactgtaccacatcaccgaccaggtgcacctgtaccccatcgacgacgtgtacaccggcatgtgcctgcagaagctgggcctggtgcccgagaagcacaagggcttcagaaccttcgacatcgaggagaagaacaagaacaacatctgcagctacgtggacctgatgctggtgcacagcagaaagccccaggagatgatcgacatctggagccagctgcagagcgcccacctgaagtgctag

SEQ ID NO: 326841 - DNA, 1194 bp, Artificial Sequence
  derived and/or modified sequence
atgtctgtgggtcggcgacgaataaaactgcttggaatccttatgatggcgaacgtgtttatttactttataatggaagtgtctaaatcgagctcccaggaaaaaaacgggaagggggaagtcattataccaaaagaaaagttttggaaaatttcaacgccccccgaggcctattggaatagagaacaagagaagctgaatcgccagtacaatccaatcctgagcatgctgactaaccagactggggaagcaggtcgcctttcaaatatttcccacttgaattactgcgaacccgacctgagggtgacctctgtggtgaccgggttcaataatcttccggatcgttttaaggattttctcctttacctccgatgtcgcaattactccctactgattgatcagcccgacaaatgtgccaagaaaccgtttctgctgctggccatcaaaagccttaccccgcattttgctcgccgacaggcaatccgtgagtcttggggccaggagagcaacgcaggaaaccagactgtcgtgagagtgtttctactgggacagacccctccagaagataaccatcccgacctgtcagatatgttgaagttcgaaagtgagaagcatcaagatattctgatgtggaattatcgcgatactttcttcaaccttagcctgaaggaggtgctgtttcttagatgggtgagcaccagttgccccgataccgaattcgtgttcaaaggtgacgacgacgtgttcgttaatactcatcatatactgaactatcttaactctctatctaagactaaggctaaggatttgtttattggcgacgtgatccacaacgcaggacctcatagagataagaagttgaagtactacatccctgaagttgtgtattcaggcctctaccccccatacgccggcggcggcggctttctgtatagcggtcacctggcccttcgcctgtaccatattaccgatcaggtgcacctgtaccctatcgacgacgtttatactgggatgtgtctgcagaaactgggactggtgccggagaagcacaagggcttccggaccttcgacatcgaggaaaaaaacaagaacaacatctgcagctatgtagatctgatgctcgtccacagccggaagccccaggagatgatcgatatctggagccaactgcagtctgctcacctcaaatgttag

SEQ ID NO: 326842 - DNA, 1194 bp, Artificial Sequence
  derived and/or modified sequence
atgtccgttggtcggcggcggatcaaactactgggaatcttaatgatggcgaatgtttttatttatttcatcatggaagtttccaagagttctagccaggaaaaaaacggcaaaggagaggtcattatccctaaagagaaattttggaaaatatccacacccccagaggcttactggaatagggagcaagaaaaactgaacagacagtacaaccccatcctatcgatgctcactaatcagacgggcgaggccggacggttgagtaatatctctcatttgaattactgtgaaccagatctgagggtgacatctgtggttactggattcaataacttacctgaccgcttcaaggactttctgctttatcttcgatgcagaaactattcacttctaattgaccagccagataagtgtgccaaaaaaccattcctcttgctcgccattaaaagtctgacgcctcactttgctcgaagacaggcgattcgggagtcgtgggggcaggagtccaacgccgggaatcaaacagtcgtccgggtctttctgctaggacagacccccccggaggacaatcaccctgatctctcggatatgttgaagttcgagagtgagaaacaccaagacatcctgatgtggaactaccgtgatacttttttcaatttatctctgaaggaagtactgtttcttagatgggtgtccaccagctgcccagacacggaatttgttttcaagggagatgacgatgtgttcgtcaacacacatcatatcctgaattatttgaattctctatctaaaaccaaagcaaaagatttgtttatcggagacgtgattcataatgccggcccccaccgcgataagaagctgaaatactatatccctgaggttgtgtacagcggcctttacccaccctacgcgggaggcggtggttttctttattcagggcacctggctctgagattgtatcacatcacagatcaggtgcatttatatcccatagacgacgtgtatacaggaatgtgcttacagaaactggggctggtgccagaaaagcacaagggcttccgcacatttgatattgaggagaaaaacaagaacaacatatgctcctacgttgacctgatgctggttcactctaggaaaccccaggagatgattgacatctggagccaactgcaatccgctcacctgaaatgttag

SEQ ID NO: 326843 - DNA, 1194 bp, Artificial Sequence
  derived and/or modified sequence
atgtctgtgggcagaagacgcatcaagctgctgggcatcctgatgatggccaacgtgttcatctacttcatcatggaggtgtccaagagcagcagccaggagaagaatggcaagggggaggtgatcatccccaaggagaagttctggaagatcagcaccccacctgaggcctactggaaccgggagcaggagaagctgaaccggcagtacaaccccatcctgtccatgctgaccaaccagacaggagaggccggccgcctgagcaacatcagccacctgaactactgtgagccagacctgcgggtgacctctgtggtgacaggcttcaacaacctgcctgaccgcttcaaggacttcctgctgtacctgcgctgcaggaactacagcctgctgattgaccagcctgacaagtgtgccaagaagcccttcctgctgctggccatcaagagcctgaccccccactttgcccggcggcaggccatccgggagagctggggccaggagagcaatgccggcaaccagacagtggtgcgggtcttcctgctgggccagaccccacctgaggacaaccacccagacctgagtgacatgctgaagtttgagagcgagaagcaccaggacatcctgatgtggaactacagagacaccttcttcaacctgagcctgaaggaggtgctcttcctgcgctgggtgtccaccagctgcccagacacagaatttgtgttcaagggagatgatgatgtgtttgtgaacacccaccacatcctgaactacctgaacagcctgagcaagaccaaggccaaggacctcttcatcggagatgtgatccacaatgccggcccccaccgggacaagaagctgaagtactacatccctgaggtggtgtacagcggcctgtacccaccctatgctgggggcggcggcttcctgtacagcggccacctggccctgcggctgtaccacatcacagaccaggtgcacctgtaccccattgatgatgtgtacacaggcatgtgcctgcagaagctgggcctggtgcctgagaagcacaagggcttccgcacctttgacatcgaggagaagaacaagaacaacatctgcagctatgtggacctgatgctggtgcacagcaggaagccccaggagatgattgacatctggagccagctgcagagcgcccacctgaagtgctag

SEQ ID NO: 326844 - DNA, 1194 bp, Artificial Sequence
  derived and/or modified sequence
atgagcgtgggccggcggcggatcaagctgctgggcatcctgatgatggccaacgtatttatctattttattatggaggtctccaagtcttcctcgcaagagaagaatggtaaaggggaggtgattatcccaaaggagaaattttggaaaatttcaactccacctgaggcctactggaatagagaacaggaaaagctcaacagacagtacaaccccatactctccatgctgaccaaccagactggagaggcagggcggttgagtaatatcagtcacctaaactactgtgagcctgatctgcgggtgacgtccgtcgtgacaggttttaataatcttcccgatcgattcaaagactttctgttgtacctgaggtgtagaaattattcactgttaatcgatcaaccagacaaatgtgctaaaaaaccatttctcttgctggccattaaatccctcactcctcatttcgccaggagacaagccattcgtgaatcttggggccaggagtcgaacgccgggaaccagacagtggtgagggtgtttctcttggggcagacaccgcccgaggacaaccatccggatctaagcgacatgctgaagttcgagtcagagaagcaccaagacattcttatgtggaattatcgggacaccttcttcaaccttagtctgaaagaggttctatttctaagatgggtgtccacatcctgccccgacaccgagttcgtgttcaagggagatgacgacgtattcgtgaatacccatcacattctgaattatctaaactccctttcaaaaacaaaggccaaagacttgttcattggagatgtcatacacaacgccggcccacacagggacaaaaagctcaagtattacattcctgaggtcgtgtattcggggctgtatcctccctacgctggcggcggtggctttctgtattctggccacctggcgctgcgactgtatcatatcactgatcaagttcatctctaccctattgatgatgtctatactggcatgtgtctgcaaaaactcgggctggttccagagaaacacaagggtttcagaacattcgatatagaagaaaagaataagaacaacatctgctcctatgttgacttgatgctggtgcacagccgaaaaccacaggaaatgatcgatatctggtcacagctgcagagcgcacatctcaagtgttag

SEQ ID NO: 326845 - DNA, 1194 bp, Artificial Sequence
  derived and/or modified sequence
atgagcgtgggccggcggcggatcaagctgctgggcatcctgatgatggctaacgttttcatatattttattatggaggtcagcaaatcttccagccaggaaaaaaatggtaagggcgaggtcataataccaaaggagaagttctggaagatcagcacaccgcccgaggcttattggaaccgggaacaggagaaactcaataggcagtataacccaatcctgagcatgctgactaatcaaaccggagaggctggcagactcagcaacatttctcatctgaactactgtgagcctgatctgagggttacctctgtggttactggatttaataatctgcctgatagattcaaggactttctgctctaccttaggtgtcgcaattacagcctgttaatcgatcagccagataagtgcgccaagaagccgttcctactgctcgcaatcaaatcactaacccctcactttgctcggaggcaggcgatcagagaaagttggggacaggaaagtaatgctggaaaccagaccgtcgtccgagttttcctgttaggtcaaactccacctgaagataaccacccagatctttcagacatgctcaagtttgaaagtgagaagcatcaagatattcttatgtggaactaccgcgacactttttttaatttgtccctaaaagaggtgctgttcctgcggtgggtgtctacttcctgccccgataccgagtttgtgtttaagggggacgatgatgtatttgtgaacacacatcacattcttaattatctcaacagcctgagcaagacaaaggcaaaagacctctttatcggcgacgtgatccataatgcagggccgcaccgcgataagaagctgaaatactacatccctgaggtcgtgtactcaggcctgtatccaccctacgcaggtggcggtggattcttatactctgggcacctagctttaaggctctaccacattactgaccaggttcatctgtatcccatcgacgacgtatatactggaatgtgtctccagaaactgggactcgtgccagaaaagcacaaaggttttcggacgtttgacattgaggagaaaaataagaacaacatctgttcctacgtggacctcatgctggtgcactctcggaagccccaggaaatgatcgatatttggtctcagctccagtctgcccaccttaaatgctag

SEQ ID NO: 326846 - DNA, 1194 bp, Artificial Sequence
  derived and/or modified sequence
atgtccgtcgggaggagaagaatcaaattactaggaatcttaatgatggcaaatgtgttcatctacttcatcatggaagtttcaaagtcttcgagtcaggagaagaatggaaagggggaagtgatcatccctaaagagaaattctggaagatctccactccacccgaggcatattggaaccgggagcaggaaaagctaaacaggcagtataacccaattctatcaatgctgacaaatcagaccggtgaggctggcaggctgtccaacatttcacacctcaattattgcgaacctgacctccgcgttacttctgttgtcactggattcaacaatctccccgatcgcttcaaggacttcttactgtacctgcgctgccggaactattctttgctgattgaccagcccgacaaatgtgcaaagaagccatttctattgctcgctataaagagcctaaccccccatttcgctagaagacaagccattcgcgaaagctggggacaggaaagcaatgctggcaatcagacagtcgtgcgtgtgtttttactcggtcagacacccccagaggataaccaccccgatttaagcgacatgctgaagtttgagagtgagaagcatcaggatatactgatgtggaactatcgcgatactttctttaatcttagcttgaaggaagtcctattcctcaggtgggtgtctacatcctgccccgatactgaatttgtctttaaaggggatgatgacgtcttcgtaaacacgcatcacatattaaattaccttaactctttgagcaaaactaaggccaaagatctgtttattggagacgtgatacacaacgctgggcctcacagagataaaaaactgaaatactacatccctgaagtggtgtactctggtttatatcctccttacgcgggaggaggaggatttttgtactccggtcacttggctctgcggctgtaccacattaccgaccaggtgcatctgtacccaattgatgacgtctacacaggaatgtgtctgcaaaagcttggcctggtccctgagaagcacaaagggttccggactttcgacatagaggaaaaaaacaagaataatatctgcagttatgttgacctcatgctcgtgcatagtagaaaacctcaggaaatgattgatatttggagccagctgcaatccgcacacctgaaatgttag

SEQ ID NO: 326847 - DNA, 1194 bp, Artificial Sequence
  derived and/or modified sequence
atgtctgtgggcaggagaagaattaagctgctggggattctgatgatggctaatgtctttatctactttatcatggaagtcagcaaatcctcctctcaggagaaaaacggaaagggtgaagtgatcattcccaaagagaaattctggaaaatcagcaccccgcctgaagcctactggaatcgcgaacaagagaagctgaacaggcagtacaacccaatactttcaatgctgaccaaccagaccggcgaggccggaaggttgtccaatatctcccacctgaactactgcgaaccagatttgcgagtcactagcgtggtgactggattcaacaatctccctgaccggttcaaggactttcttctttatctaaggtgccggaactacagcttgcttatcgatcaaccggacaagtgtgcgaagaagccctttctcctgctggcaattaaaagtctaactccccacttcgcgcgacgccaggcgatacgtgagtcctggggccaagagtctaacgcaggcaatcagaccgtcgtgcgcgtttttctgctgggtcagaccccgcctgaagacaaccacccagacttgtcagacatgttaaagttcgaaagtgagaagcaccaggatatcttgatgtggaactacagagacaccttttttaacctttcactgaaagaggtactgttcttaaggtgggtgtccacgagttgccccgataccgagttcgttttcaaaggggatgatgacgtgttcgtgaacacccaccacatcctcaattacttgaactccttaagtaaaactaaggctaaagacctgttcattggcgatgtgattcacaacgcaggtccccaccgggacaagaagctgaaatattatatccctgaggtcgtgtattctggcctctatcccccttatgcaggcggtggagggtttctctatagcggccacctggccctgagactgtaccatattaccgatcaggtgcatttgtacccaatcgacgatgtgtacacaggtatgtgcctccagaagctgggacttgtgcctgagaaacataaagggttcaggacatttgatatagaggaaaaaaacaagaataatatctgttcttacgtggatttgatgctcgtccactcaagaaaaccacaggagatgattgatatctggtcccaattgcagtccgctcacctgaagtgttag

SEQ ID NO: 326848 - DNA, 2763 bp, Artificial Sequence
  derived and/or modified sequence
ggagcctggagtgaggcgcagcggcagcggcagcagcggcaacaagtgccggaggctagcagagccaagccggagcagtccctgccgccgacaccgccgggccgcccgtccggggcgccgcgcatggagcgtgagctgcggcggtcgccgggctgagccgcgcggagcggccgggacgtggatgtggccgcgatctcccgcccttgcccccgccccgccgagctggagctgctcccggacaagatatgagaaatgagtgttggacgtcgaagaataaagttgttgggtatcctgatgatggcaaatgtcttcatttattttattatggaagtctccaaaagcagtagccaagaaaaaaatggaaaaggggaagtaataatacccaaagagaagttctggaagatatctacccctcccgaggcatactggaaccgagagcaagagaagctgaaccggcagtacaaccccatcctgagcatgctgaccaaccagacgggggaggcgggcaggctctccaatataagccatctgaactactgcgaacctgacctgagggtcacgtcggtggttacgggttttaacaacttgccggacagatttaaagactttctgctgtatttgagatgccgcaattattcactgcttatagatcagccggataagtgtgcaaagaaacctttcttgttgctggcgattaagtccctcactccacattttgccagaaggcaagcaatccgggaatcctggggccaagaaagcaacgcagggaaccaaacggtggtgcgagtcttcctgctgggccagacacccccagaggacaaccaccccgacctttcagatatgctgaaatttgagagtgagaagcaccaagacattcttatgtggaactacagagacactttcttcaacttgtctctgaaggaagtgctgtttctcaggtgggtaagtacttcctgcccagacactgagtttgttttcaagggcgatgacgatgtttttgtgaacacccatcacatcctgaattacttgaatagtttatccaagaccaaagccaaagatctcttcataggtgatgtgatccacaatgctggacctcatcgggataagaagctgaagtactacatcccagaagttgtttactctggcctctacccaccctatgcagggggaggggggttcctctactccggccacctggccctgaggctgtaccatatcactgaccaggtccatctctaccccattgatgacgtttatactggaatgtgccttcagaaactcggcctcgttccagagaaacacaaaggcttcaggacatttgatatcgaggagaaaaacaaaaataacatctgctcctatgtagatctgatgttagtacatagtagaaaacctcaagagatgattgatatttggtctcagttgcagagtgctcatttaaaatgctaaaatagatacaaactcaattttgcatagaaaggtgtattttgaatagttcccatgttgtgttctcacattagagtaatttctatattaaaccatgaaaattgcctttatgagtgatacccatttgagggcctctaaacccttcaatttggtactcacgtgaagagggaaagcggaagatggtaatttttttttatggatgatatggcaggatgattggttctgatcttaccggctagtggtcatttttaaaaaacttgtaccctcttatctgaaatcctgtttctggaatttggccattttaagtgattttgtttgccctcttctataatattcctacttcccataataatgactgatttatttgtaattcaggtatttataaacctattggctacaaagactttgttaaacattatccagtggttttcgtgaaatggaattatgtttatttttatgggatttgggtaaattttaaattgtctagaaaactgaaatttcagttgtcagttgtggaattcagtttttcaattgtggaaatttcctgccaccccaacagtatttttgtgtgttaattaattttgcaaaatgagaatcatggtgtgacactcatctaatttatcttgttgtgatgttatggtcataataaggagaaagagggtttaatttttcttgtatttggtttcctggtggtatcatagtgtaattttagtatttgaaaatcagtgtgattccttaatggccaactgaagattgaattgccgctaacaaccatatcgtgttagtgaattttcaatatggaccaggaaggcatatgtattttgaacttgagtgaaaaggttgaagttacagacttttgcatagatggtttgtcaatttaaaattccagaatttattattgccatattttcacatgctgcttatacaagattattattgagtagtaactgcttccctgtctatgtagaagtgcctgtgtttttatttattgttcagatcaaagaccaaaacattttcttaaatatattttatgtaatattttatttgtatacagtgttgttgatgaaatatttaactagagcatgatattttaaatgttaaggtgtaacatatgttaaataaaactgttatttttgaattttaaaatttgttttttgggggtatgaactactagagtttaaaattctgccaaactattacttatatgtactattgtgtaacatactttcttgaaatatttttgtttatagaattgaaggttcttatcagatgggatactggggactataaacaatggaaataaagccactgtatttttaa

SEQ ID NO: 326849 - DNA, 2436 bp, Artificial Sequence
  derived and/or modified sequence
agagccatttagctgcaaactgtctctgtctctgtttatccgagcagaacctggaaggggctggcaaggactaggcaacagatgggacagccagagagatatgagaaatgagtgttggacgtcgaagaataaagttgttgggtatcctgatgatggcaaatgtcttcatttattttattatggaagtctccaaaagcagtagccaagaaaaaaatggaaaaggggaagtaataatacccaaagagaagttctggaagatatctacccctcccgaggcatactggaaccgagagcaagagaagctgaaccggcagtacaaccccatcctgagcatgctgaccaaccagacgggggaggcgggcaggctctccaatataagccatctgaactactgcgaacctgacctgagggtcacgtcggtggttacgggttttaacaacttgccggacagatttaaagactttctgctgtatttgagatgccgcaattattcactgcttatagatcagccggataagtgtgcaaagaaacctttcttgttgctggcgattaagtccctcactccacattttgccagaaggcaagcaatccgggaatcctggggccaagaaagcaacgcagggaaccaaacggtggtgcgagtcttcctgctgggccagacacccccagaggacaaccaccccgacctttcagatatgctgaaatttgagagtgagaagcaccaagacattcttatgtggaactacagagacactttcttcaacttgtctctgaaggaagtgctgtttctcaggtgggtaagtacttcctgcccagacactgagtttgttttcaagggcgatgacgatgtttttgtgaacacccatcacatcctgaattacttgaatagtttatccaagaccaaagccaaagatctcttcataggtgatgtgatccacaatgctggacctcatcgggataagaagctgaagtactacatcccagaagttgtttactctggcctctacccaccctatgcagggggaggggggttcctctactccggccacctggccctgaggctgtaccatatcactgaccaggtccatctctaccccattgatgacgtttatactggaatgtgccttcagaaactcggcctcgttccagagaaacacaaaggcttcaggacatttgatatcgaggagaaaaacaaaaataacatctgctcctatgtagatctgatgttagtacatagtagaaaacctcaagagatgattgatatttggtctcagttgcagagtgctcatttaaaatgctaaaatagatacaaactcaattttgcatagaaaggtgtattttgaatagttcccatgttgtgttctcacattagagtaatttctatattaaaccatgaaaattgcctttatgagtgatacccatttgagggcctctaaacccttcaatttggtactcacgtgaagagggaaagcggaagatggtaatttttttttatggatgatatggcaggatgattggttctgatcttaccggctagtggtcatttttaaaaaacttgtaccctcttatctgaaatcctgtttctggaatttggccattttaagtgattttgtttgccctcttctataatattcctacttcccataataatgactgatttatttgtaattcaggtatttataaacctattggctacaaagactttgttaaacattatccagtggttttcgtgaaatggaattatgtttatttttatgggatttgggtaaattttaaattgtctagaaaactgaaatttcagttgtcagttgtggaattcagtttttcaattgtggaaatttcctgccaccccaacagtatttttgtgtgttaattaattttgcaaaatgagaatcatggtgtgacactcatctaatttatcttgttgtgatgttatggtcataataaggagaaagagggtttaatttttcttgtatttggtttcctggtggtatcatagtgtaattttagtatttgaaaatcagtgtgattccttaatggccaactgaagattgaattgccgctaacaaccatatcgtgttagtgaattttcaatatggaccaggaaggcatatgtattttgaacttgagtgaaaaggttgaagttacagacttttgcatagatggtttgtcaatttaaaattccagaatttattattgccatattttcacatgctgcttatacaagattattattgagtagtaactgcttccctgtctatgtagaagtgcctgtgtttttatttattgttcagatcaaagaccaaaacattttcttaaatatattttatgtaatattttatttgtatacagtgttgttgatgaaatatttaactagagcatgatattttaaatgttaaggtgtaacatatgttaaataaaactgttatttttgaa

SEQ ID NO: 326850 - DNA, 339 bp, Artificial Sequence
  derived and/or modified sequence
atgccgagaaaccagggattttcagaacccgagtactctgccgaatactcggccgaatattccgtctccctgccttctgatccggaccgtggagtgggccgcacacatgagatcagtgtgcggaatagtggctcttgcctttgtttgccacgctttatgagactaactttcgttccagaatccttagagaatctctaccagacttacttcaaacgccagcgacacgagactcttctcgtgctggtcgtgttcgccgctctgtttgattgttacgttgttgtgatgtgcgccgtggtcttcagtagcgacaaactggccagcctggccgtcgccggatag

SEQ ID NO: 326851 - DNA, 572 bp, Artificial Sequence
  derived and/or modified sequence
atttacagcttctaaggactgggcctggagggaatttagttctagctgatcagtgctacctgtgctctggaaacccgctctgcgttcctgctggaggtggcctcccctccgccccagacaagaagaggccctcagccctcccccggtctcagagagccctgagaggaggcccagtccagagctcttcctccgttcccagtccacttctctagggccagtagcagacaccagccagtatgccgaggaaccagggcttctccgagcccgaatactcggccgagtactcagccgagtactccgtcagcctgccctccgaccctgaccgcggggtgggccggacccatgaaatctcggtccggaactcgggctcctgcctgtgcctgcctcgcttcatgcggctgactttcgtgccggagtccttggagaacctctaccagacctacttcaaaaggcagcgccacgagaccctgctggtgctggtggtctttgcagccctctttgactgctacgtggtggtcatgtgtgctgtggtcttctccagcgacaagctggcttccctcgccgtggctgga

SEQ ID NO: 326852 - DNA, 339 bp, Artificial Sequence
  derived and/or modified sequence
atgcccaggaaccagggcttcagcgagcctgagtacagcgctgagtacagcgctgagtacagcgtgtccctgcccagcgaccctgacagaggagtgggccgcacccatgagatctctgtgagaaattctggcagctgcctgtgcctgccccgcttcatgaggctgacctttgtgcctgagagcctggagaacctgtaccagacctacttcaagaggcagagacatgagaccctgctggtgctggtggtgtttgctgccctgtttgactgctacgtggtggtgatgtgtgctgtggtgttcagcagtgacaagctggccagcctggccgtggccggctag

SEQ ID NO: 326853 - DNA, 339 bp, Artificial Sequence
  derived and/or modified sequence
atgccccggaaccagggcttcagcgagcccgagtacagcgccgagtattctgccgagtattccgtcagcctgccatccgatccagatagaggcgtgggtcggacgcatgaaatttcagttaggaattccggctcttgcctctgtctgcctcgctttatgcgcctaacgtttgtcccggaatctctagagaacctctaccaaacatattttaagcgccagagacacgagaccctgctggtgctcgtagttttcgccgctctgtttgattgttatgtagttgtgatgtgtgccgtggtcttctctagcgacaagctcgcaagtctcgcagttgcaggatag

SEQ ID NO: 326854 - DNA, 339 bp, Artificial Sequence
  derived and/or modified sequence
atgcccagaaaccaagggttctccgaaccggaatacagcgccgagtactccgcggagtactcagtgagcttaccaagcgaccccgacaggggtgtgggtaggacacatgaaatctcagttcggaactctggctcttgcctgtgtttaccaaggttcatgcgactcacttttgtgccagagtctctggagaacctgtaccagacgtatttcaaaaggcaacgacatgagacgttactagtccttgtcgtgttcgccgctttgtttgattgctacgtggtcgtcatgtgtgccgtggtgttttcctctgataagctcgcctccctagctgtggctggctag

SEQ ID NO: 326855 - DNA, 339 bp, Artificial Sequence
  derived and/or modified sequence
atgcccagaaaccagggcttcagcgagcccgagtacagcgccgagtacagcgccgagtacagcgtgagcctgcccagcgaccccgacagaggcgtgggcagaacccacgagatcagcgtgagaaacagcggcagctgcctgtgcctgcccagattcatgagactgaccttcgtgcccgagagcctggagaacctgtaccagacctacttcaagagacagagacacgagaccctgctggtgctggtggtgttcgccgccctgttcgactgctacgtggtggtgatgtgcgccgtggtgttcagcagcgacaagctggccagcctggccgtggccggctag

SEQ ID NO: 326856 - DNA, 477 bp, Artificial Sequence
  derived and/or modified sequence
atggccgccggcgagctggagggcggcaagcccctgagcggcctgctgaacgccctggcccaggacaccttccacggctaccccggcatcaccgaggagctgctgcgcagccagctgtaccccgaggtgccccccgaggagttccgccccttcctggccaagatgcgcggcatcctgaagagcatcgccagcgccgacatggacttcaaccagctggaggccttcctgaccgcccagaccaagaagcagggcggcatcaccagcgaccaggccgccgtgatcagcaagttctggaagagccacaagaccaagatccgcgagagcctgatgaaccagagccgctggaacagcggcctgcgcggcctgagctggcgcgtggacggcaagagccagagccgccacagcgcccagatccacacccccgtggccatcatcgagctggagctgggcaagtacggccaggtgcactgcaaccag

SEQ ID NO: 326857 - DNA, 480 bp, Artificial Sequence
  derived and/or modified sequence
atggccgccggcgagctggagggcggcaagcccctgagcggcctgctgaacgccctggcccaggacaccttccacggctaccccggcatcaccgaggagctgctgagaagccagctgtaccccgaggtgccccccgaggagttcagacccttcctggccaagatgagaggcatcctgaagagcatcgccagcgccgacatggacttcaaccagctggaggccttcctgaccgcccagaccaagaagcagggcggcatcaccagcgaccaggccgccgtgatcagcaagttctggaagagccacaagaccaagatcagagagagcctgatgaaccagagcagatggaacagcggcctgagaggcctgagctggagagtggacggcaagagccagagcagacacagcgcccagatccacacccccgtggccatcatcgagctggagctgggcaagtacggccaggtgcactgcaaccagtag

SEQ ID NO: 326858 - DNA, 480 bp, Artificial Sequence
  derived and/or modified sequence
atggcagccggggagctcgaaggggggaagcccctgagtggactcttaaacgctctggcacaagacactttccacggctatcctggaataacggaagagctgctgaggtcccaattgtatcctgaagtgccacccgaggagttccgaccgttcctagctaaaatgcgggggatcctcaaaagcattgcctctgccgacatggactttaatcagctggaggcattcctgaccgcacagaccaagaagcagggcggcattacctcggaccaggctgctgtaattagtaagttttggaaaagtcataagactaaaatccgggagagtctcatgaatcagtcacgctggaacagcggtctgcggggcctatcatggcgcgtggatggaaagtctcaaagtagacacagcgctcagattcacacccccgtcgccattattgagttggagcttggtaagtacggtcaggtccactgcaatcaatag

SEQ ID NO: 326859 - DNA, 480 bp, Artificial Sequence
  derived and/or modified sequence
atggctgctggggagctggagggcggcaagcccctgagcggcctgctgaatgccctggcccaggacaccttccacggctacccaggcatcacagaggagctgctgcggagccagctgtacccagaggtgcccccagaggagttccggcccttcctggccaagatgaggggcatcctgaagagcatcgccagcgctgacatggacttcaaccagctggaggccttcctgacagcccagaccaagaagcagggcggcatcaccagtgaccaggccgccgtcatcagcaagttctggaagagccacaagaccaagatccgggagagcctgatgaaccagagccgctggaacagcggcctgcggggcctgtcctggagggtggatggcaagagccagagccgccacagcgcccagatccacacccctgtggccatcatcgagctggagctgggcaagtatggccaggtgcactgcaaccagtag

SEQ ID NO: 326860 - DNA, 805 bp, Artificial Sequence
  derived and/or modified sequence
agagcatggcggcgggcgagcttgagggtggcaaacccctgagcgggctgctgaatgcgctggcccaggacactttccacgggtaccccggcatcacagaggagctgctacggagccagctatatccagaggtgccacccgaggagttccgcccctttctggcaaagatgagggggattcttaagtctattgcgtctgcagacatggatttcaaccagctggaggcattcttgactgctcaaaccaaaaagcaaggtgggatcacatctgaccaagctgctgtcatttccaaattctggaagagccacaagacaaaaatccgtgagagcctcatgaaccagagccgctggaatagcgggcttcggggcctgagctggagagttgatggcaagtctcagtcaaggcactcagctcaaatacacacacctgttgccattatagagctggaattaggcaaatatggacaggttcattgcaaccagtgattcacattctccaagcccactttgtatatgtggcgaccggctatccattgaagccatgaaaccttcaaaactgctttgccacatggagaccaagcaccctgcattaaaagacaagcctttggagtttttcaaaagaagaaaatgtgaatacaaagaacagaagcaattattgaaggccaccacttcaaatgtgtctgcattgagagcatcattcttagtagctaaccacattgctaaagctaagaagccctttactattggtaagagttgatcctaaggacatttgttttgaaccttcaggagaggacacagttcagaag

SEQ ID NO: 326861 - DNA, 480 bp, Artificial Sequence
  derived and/or modified sequence
atggccgccggcgagctggagggcggcaagcccctgagcggcctgttgaacgccctggcccaggacacattccatggttatccgggcattaccgaagagctgctgagatcccagctatatccagaagtgcctccggaagagtttaggccttttctggccaagatgcgtgggatcctgaaatctattgctagtgccgacatggacttcaaccagttagaggcttttttgactgcgcagacaaaaaagcagggtggaatcacttctgaccaggcagcagtgatttccaagttctggaagtcacataaaacaaagatccgggagtcgcttatgaaccagagtaggtggaattctggactgcgtggtctcagctggcgtgtcgacgggaaaagccagtcccgccacagcgcccagattcacactccagtggcaatcattgagctggaactaggcaaatacggccaagtgcactgcaatcagtag

SEQ ID NO: 326862 - DNA, 480 bp, Artificial Sequence
  derived and/or modified sequence
atggcagctggggagcttgagggtgggaagccactgtccgggctcttaaatgctttggctcaagacacattccacggatatccgggaatcaccgaggagctgctgcgatcccaactctaccccgaggtgccacctgaggagttccgtccattcttggctaaaatgaggggcattctgaaatcaatcgctagtgccgatatggatttcaatcagttagaggccttcctgaccgcccagactaaaaagcagggcggaattacatctgaccaagccgctgtgatttcaaagttctggaagtcacacaagaccaagatcagagagtccctaatgaatcagtcacggtggaatagtggtctccgaggcctgagttggagagttgatggcaagtctcaaagccgacattcggcacagatacacaccccggttgctataattgaattggagctgggaaaatacggtcaagtccattgtaaccagtag

SEQ ID NO: 326863 - protein, 18 aa, Artificial Sequence
  derived and/or modified sequence
HSAQIHTPVAIIELELGK

SEQ ID NO: 326864 - protein, 38 aa, Artificial Sequence
  derived and/or modified sequence
  misc_feature (1)..(1): Xaa can be any naturally occurring amino acid
XQESEFLCLEFDEVKVNQILKTLSEVEESISTLISQPN

SEQ ID NO: 326865 - protein, 32 aa, Artificial Sequence
  derived and/or modified sequence
  misc_feature (1)..(1): Xaa can be any naturally occurring amino acid
XCLEFDEVKVNQILKTLSEVEESISTLISQPN

SEQ ID NO: 326866 - DNA, 111 bp, Artificial Sequence
  derived and/or modified sequence
caggagagcgagttcctgtgcctggagttcgacgaggtgaaggtgaaccagatcctgaagaccctgagcgaggtggaggagagcatcagcaccctgatcagccagcccaac

SEQ ID NO: 326867 - DNA, 93 bp, Artificial Sequence
  derived and/or modified sequence
tgcctggagttcgacgaggtgaaggtgaaccagatcctgaagaccctgagcgaggtggaggagagcatcagcaccctgatcagccagcccaac

SEQ ID NO: 326868 - DNA, 117 bp, Artificial Sequence
  derived and/or modified sequence
tgacaggagagcgagttcctgtgcctggagttcgacgaggtgaaggtgaaccagatcctgaagaccctgagcgaggtggaggagagcatcagcaccctgatcagccagcccaactag

SEQ ID NO: 326869 - DNA, 99 bp, Artificial Sequence
  derived and/or modified sequence
tgatgcctggagttcgacgaggtgaaggtgaaccagatcctgaagaccctgagcgaggtggaggagagcatcagcaccctgatcagccagcccaactag

SEQ ID NO: 326870 - DNA, 117 bp, Artificial Sequence
  derived and/or modified sequence
tgacaagagagcgagttcctgtgcctggaatttgatgaggtgaaggtgaatcagattctaaaaacactaagcgaggtagaggaatctattagtactctgatcagccaacccaactag

SEQ ID NO: 326871 - DNA, 99 bp, Artificial Sequence
  derived and/or modified sequence
taatgtttagaatttgacgaagttaaggtcaatcaaatcctgaagaccctatccgaggtggaggagtccatctcaacattaatctcgcagccaaattag

SEQ ID NO: 326872 - DNA, 117 bp, Artificial Sequence
  derived and/or modified sequence
taacaggagtcagaatttctttgcctcgaattcgacgaggtcaaagtaaatcaaattctcaaaactctgtccgaagtcgaggaatcgatcagcactctgatcagtcagcccaactag

SEQ ID NO: 326873 - DNA, 117 bp, Artificial Sequence
  derived and/or modified sequence
tgacaggagagcgagttcctgtgcctggagtttgatgaggtgaaggtgaaccagatcctgaagaccctgtctgaggtggaggagagcatcagcaccctcatcagccagcccaactag

SEQ ID NO: 326874 - DNA, 99 bp, Artificial Sequence
  derived and/or modified sequence
tgatgcctggagtttgatgaggtgaaggtgaaccagatcctgaagaccctgtctgaggtggaggagagcatcagcaccctcatcagccagcccaactag

SEQ ID NO: 326875 - DNA, 117 bp, Artificial Sequence
  derived and/or modified sequence
tgacaggagagcgagttcctgtgcctggagttcgacgaggtgaaggtcaaccaaatcctgaaaactctaagcgaggtggaggagagcatttcaactttgatttcacagcctaattag

SEQ ID NO: 326876 - DNA, 99 bp, Artificial Sequence
  derived and/or modified sequence
tgatgcctggagttcgacgaggtgaaggtgaaccagatcctgaagacactaagcgaggtcgaagaaagcatttcaaccctgatctctcagcccaactag

SEQ ID NO: 326877 - DNA, 117 bp, Artificial Sequence
  derived and/or modified sequence
tgacaggagagcgagttcctgtgcctggagttcgacgaggtgaaggtcaatcagattttgaagaccctctctgaagtggaggaatccatctcgacacttatctctcagcctaactag

SEQ ID NO: 326878 - DNA, 117 bp, Artificial Sequence
  derived and/or modified sequence
taacaagaatcagaatttctgtgcctcgagttcgacgaggtgaaggtgaaccaaatcctcaaaaccctgtcagaagtcgaagaatctatctctactttgatcagccagcccaattag

SEQ ID NO: 326879 - DNA, 99 bp, Artificial Sequence
  derived and/or modified sequence
tgatgcctggaatttgatgaggtgaaagtgaatcagattttaaagaccttatccgaagtggaggagagtatttcaaccttaatctcccagccaaactag

SEQ ID NO: 326880 - DNA, 117 bp, Artificial Sequence
  derived and/or modified sequence
tagcaagagagtgagtttttgtgtctggagttcgacgaggtcaaggtaaaccagatcctgaagacattgagtgaggtggaggaaagtattagcactctgatttctcagcctaactag

SEQ ID NO: 326881 - protein, 529 aa, Artificial Sequence
  derived and/or modified sequence
MFPLTEENKHVAQLLLNTGTCPRCIFRFCGVDFHAPYKLPYKELLNELQKFLETEKDELILEVMNPPPKKIRLQELEDSIDNLSQNGEGRISVSHVGSTASKNSNLNVCNVCLGILQEFCEKDFIKKVCQKVEASGFEFTSLVFSVSFPPQLSVREHAAWLLVKQEMGKQSLSLGRDDIVQLKEAYKWITHPLFSEELGVPIDGKSLFEVSVVFAHPETVEDCHFLAAICPDCFKPAKNKQSVFTRMAVMKALNKIKEEDFLKQFPCPPNSPKAVCAVLEIECAHGAVFVAGRYNKYSRNLPQTPWIIDGERKLESSVEELISDHLLAVFKAESFNFSSSGREDVDVRTLGNGRPFAIELVNPHRVHFTSQEIKELQQKINNSSNKIQVRDLQLVTREAIGHMKEGEEEKTKTYSALIWTNKAIQKKDIEFLNDIKDLKIDQKTPLRVLHRRPLAVRARVIHFMETQYVDEHHFRLHLKTQAGTYIKEFVHGDFGRTKPNIGSLMNVTADILELDVESVDVDWPPALDD

SEQ ID NO: 326882 - protein, 120 aa, Artificial Sequence
  derived and/or modified sequence
MFPLTEENKHVAQLLLNTGTCPRCIFRFCGVDFHAPYKLPYKELLNELQKFLETEKDELILEVMNPPPKKIRLQELEDSIDNLSQNGEGRISVSHVGSTASKNSNLNVCNVCLGILQEFC

SEQ ID NO: 326883 - DNA, 1590 bp, Artificial Sequence
  derived and/or modified sequence
atgttccccctgaccgaggagaacaagcacgtggcccagctgctgctgaacaccggcacctgccccagatgcatcttcagattctgcggcgtggacttccacgccccctacaagctgccctacaaggagctgctgaacgagctgcagaagttcctggagaccgagaaggacgagctgatcctggaggtgatgaaccccccccccaagaagatcagactgcaggagctggaggacagcatcgacaacctgagccagaacggcgagggcagaatcagcgtgagccacgtgggcagcaccgccagcaagaacagcaacctgaacgtgtgcaacgtgtgcctgggcatcctgcaggagttctgcgagaaggacttcatcaagaaggtgtgccagaaggtggaggccagcggcttcgagttcaccagcctggtgttcagcgtgagcttccccccccagctgagcgtgagagagcacgccgcctggctgctggtgaagcaggagatgggcaagcagagcctgagcctgggcagagacgacatcgtgcagctgaaggaggcctacaagtggatcacccaccccctgttcagcgaggagctgggcgtgcccatcgacggcaagagcctgttcgaggtgagcgtggtgttcgcccaccccgagaccgtggaggactgccacttcctggccgccatctgccccgactgcttcaagcccgccaagaacaagcagagcgtgttcaccagaatggccgtgatgaaggccctgaacaagatcaaggaggaggacttcctgaagcagttcccctgcccccccaacagccccaaggccgtgtgcgccgtgctggagatcgagtgcgcccacggcgccgtgttcgtggccggcagatacaacaagtacagcagaaacctgccccagaccccctggatcatcgacggcgagagaaagctggagagcagcgtggaggagctgatcagcgaccacctgctggccgtgttcaaggccgagagcttcaacttcagcagcagcggcagagaggacgtggacgtgagaaccctgggcaacggcagacccttcgccatcgagctggtgaacccccacagagtgcacttcaccagccaggagatcaaggagctgcagcagaagatcaacaacagcagcaacaagatccaggtgagagacctgcagctggtgaccagagaggccatcggccacatgaaggagggcgaggaggagaagaccaagacctacagcgccctgatctggaccaacaaggccatccagaagaaggacatcgagttcctgaacgacatcaaggacctgaagatcgaccagaagacccccctgagagtgctgcacagaagacccctggccgtgagagccagagtgatccacttcatggagacccagtacgtggacgagcaccacttcagactgcacctgaagacccaggccggcacctacatcaaggagttcgtgcacggcgacttcggcagaaccaagcccaacatcggcagcctgatgaacgtgaccgccgacatcctggagctggacgtggagagcgtggacgtggactggccccccgccctggacgactag

SEQ ID NO: 326884 - DNA, 363 bp, Artificial Sequence
  derived and/or modified sequence
atgttccccctgaccgaggagaacaagcacgtggcccagctgctgctgaacaccggcacctgccccagatgcatcttcagattctgcggcgtggacttccacgccccctacaagctgccctacaaggagctgctgaacgagctgcagaagttcctggagaccgagaaggacgagctgatcctggaggtgatgaaccccccccccaagaagatcagactgcaggagctggaggacagcatcgacaacctgagccagaacggcgagggcagaatcagcgtgagccacgtgggcagcaccgccagcaagaacagcaacctgaacgtgtgcaacgtgtgcctgggcatcctgcaggagttctgctag

SEQ ID NO: 326885 - DNA, 1590 bp, Artificial Sequence
  derived and/or modified sequence
atgttcccgctgaccgaggagaataaacacgttgcccagcttttgctcaataccgggacatgtccccgctgcatttttcggttctgtggggtggacttccacgccccctataaacttccttacaaggagcttctgaatgaactccagaaattcctggagactgagaaggatgagttgattcttgaagtgatgaatcccccacctaagaagattagattgcaagagctggaggactctatcgacaatctctcgcagaacggggaggggaggataagcgtcagtcatgtgggatcgaccgccagcaaaaatagtaacctgaacgtgtgtaacgtttgcctcggaattctgcaggaattttgtgaaaaggatttcattaaaaaggtctgtcagaaggtagaggctagcggattcgagtttacttcgttggtattttccgtctcgtttcctccgcagctttctgtccgggaacacgccgcctggttgctggtgaaacaggaaatggggaagcaatctctgtccctaggtcgcgacgatattgttcagctgaaagaggcttacaagtggatcacccacccactcttctctgaagagctgggagtccctatagacgggaagtcgctgttcgaagtctctgtggtgttcgctcaccccgagaccgtggaagactgtcactttctcgcagccatttgtcccgactgctttaagcccgcaaagaacaaacaatcagtgttcacgaggatggccgtgatgaaggccctgaacaagataaaagaagaagactttctgaagcagtttccatgtcctccgaactctccaaaagcagtgtgcgcggtgctggaaattgaatgcgctcacggtgccgtgtttgtagccggcaggtataacaagtactcccgcaatctcccacagactccgtggatcatagatggtgagcgtaaactggagtcgtcagtggaagagttaattagcgaccatctgcttgcagtttttaaggctgagtcattcaatttcagctcaagcggtcgggaagatgtggacgtgcgcacattaggtaatggcagaccatttgccattgaactggttaatcctcaccgcgtgcattttacatcccaagagatcaaggaactgcagcagaagatcaacaactcttccaataaaatccaggtcagagatttacaactcgtcactcgggaggccatcgggcatatgaaggaaggcgaggaggagaagacaaagacctatagcgcgcttatctggactaataaggcaatccagaaaaaggatatcgaatttcttaacgacattaaggatctgaaaattgaccagaaaactccattacgagtgctgcataggcgccccctcgcagtacgtgccagagtaatccacttcatggagacccaatacgtggacgaacatcattttagactccatcttaagacacaggctggcacctacatcaaggaatttgttcacggcgactttgggcggacaaagcccaacattggaagcttaatgaacgtgactgcggacatccttgagctggacgtcgaaagcgttgatgttgattggccccccgccctggacgactag

SEQ ID NO: 326886 - DNA, 1590 bp, Artificial Sequence
  derived and/or modified sequence
atgtttcccctaactgaagagaacaagcacgtagcccaactgctcctgaacaccgggacgtgtccacgctgcatcttccggttttgtggcgttgattttcatgcaccctataagttgccatacaaagaactgctgaacgaattgcaaaagttcctggaaactgagaaggatgagctgattctggaggtaatgaacccaccccctaaaaagatcagactgcaggaactggaagactccatcgacaacctttcacagaatggtgaggggcggatttcagtgagtcacgttggtagcacagccagcaaaaactctaacctgaatgtgtgtaatgtgtgcctgggtatcctccaggagttttgcgagaaagactttatcaagaaagtgtgtcaaaaggtggaggcctccggatttgaatttacatccctggtgttttctgtttcgttccctccacagctctccgtgcgcgaacatgctgcatggctgctggttaaacaggagatgggcaaacagtctctatccctgggtcgagacgacatcgtgcaactgaaagaggcatacaaatggatcacccatccactcttcagcgaggagctgggggtgcctattgacggcaagagcctctttgaggtatcggtcgtttttgcccatccagagacagtcgaggattgccattttctggcagccatctgtcctgactgttttaaaccagctaaaaacaagcagtcagtttttacccgtatggccgttatgaaggccctgaacaagatcaaggaggaggacttcctgaagcagtttccgtgtcctcccaactcccccaaggccgtctgtgccgtcctggagatcgaatgtgcacatggcgccgtgttcgtcgctggtcggtacaacaaatattctagaaatttaccccagaccccctggattatcgacggcgagcgtaagttggaatcttctgtcgaggagttaatctccgaccacctgctagctgtcttcaaagcggaatcattcaatttctcctctagcggcagagaagatgtggacgttcgaacgctaggtaacgggcgccctttcgccattgagcttgtaaacccccacagggtgcatttcacatcgcaggagattaaggaactgcaacaaaaaatcaataattcgtccaacaagatacaggtaagagatcttcagctggtgacccgggaggcaatcggacacatgaaggagggagaggaagagaagactaagacatacagcgcactgatctggacgaataaagccatccagaagaaagatattgaatttttaaatgatattaaggacttaaaaattgatcagaagaccccactgagggttctccataggagacctctggctgtgcgcgcaagagtgatccattttatggagactcagtacgtggacgagcaccattttcggttgcacctgaagacacaggctgggacatatattaaggaattcgttcatggggactttggtagaactaaacccaatattgggtccttgatgaacgtcacagcagacatcctagagctggatgtggagagtgtggacgtcgactggcccccagcgctcgacgattag

SEQ ID NO: 326887 - DNA, 363 bp, Artificial Sequence
  derived and/or modified sequence
atgttccccctcaccgaggagaataagcatgtcgcccagcttctgcttaatacggggacctgcccacgttgcatcttccggttctgcggggtagactttcacgctccttacaagctgccttataaagagcttcttaacgaactgcagaagttcctggagacagaaaaggacgaactgatcctggaggttatgaaccctccccccaagaaaattaggttacaagaactggaggacagtatcgacaacctgagtcagaacggcgagggaaggatctccgtcagtcacgttggatcgaccgcctccaaaaattcaaacctgaacgtttgtaatgtatgtctggggatacttcaagaattctgttag

SEQ ID NO: 326888 - DNA, 1590 bp, Artificial Sequence
  derived and/or modified sequence
atgttccccctgacagaggagaacaagcacgtggcccagctgctgctgaacacaggcacctgcccccgctgcatcttccgcttctgtggggtggacttccacgccccctacaagctgccctacaaggagctgctgaatgagctgcagaagttcctggagacagagaaggatgagctgatcctggaggtgatgaaccccccacccaagaagatccggctgcaggagctggaggacagcattgacaacctgagccagaatggagagggccgcatctctgtgagccacgtgggcagcacagccagcaagaacagcaacctgaatgtgtgcaatgtgtgcctgggcatcctgcaggagttctgtgagaaggacttcatcaagaaggtgtgccagaaggtggaggccagcggctttgagttcaccagcctggtgttttctgtgtccttccccccccagctgtctgtgcgggagcacgccgcctggctgctggtgaagcaggagatgggcaagcagagcctgagcctgggcagagatgacatcgtgcagctgaaggaggcctacaagtggatcacccaccccctcttcagcgaggagctgggcgtgcccattgatggcaagagcctgtttgaggtgtctgtggtgtttgcccaccctgagaccgtggaggactgccacttcctggccgccatctgcccagactgcttcaagccagccaagaacaagcagagcgtcttcaccaggatggctgtgatgaaggccctgaacaagatcaaggaggaggacttcctgaagcagttcccctgcccccccaacagccccaaggctgtgtgtgctgtgctggagattgaatgtgcccatggagctgtgtttgtggccggccgctacaacaagtacagcaggaacctgccccagaccccctggatcattgatggagagaggaagctggagagctctgtggaggagctgatcagtgaccacctgctggccgtgttcaaggccgagagcttcaacttcagcagcagcggcagagaagatgtggatgtgaggaccctgggcaatggccggccctttgccatcgagctggtgaacccccaccgggtgcacttcaccagccaggagatcaaggagctgcagcagaagatcaacaacagcagcaacaagatccaggtgcgggacctgcagctggtgacccgggaggccatcggccacatgaaggagggggaggaggagaagaccaagacctacagcgccctgatctggaccaacaaggccatccagaagaaggacatcgagttcctgaatgacatcaaggacctgaagattgaccagaagacccccctgcgggtgctgcacagaagacccctggccgtgcgggcccgggtcatccacttcatggagacccagtatgtggatgagcaccacttccggctgcacctgaagacccaggccggcacctacatcaaggagtttgtgcatggagactttggccgcaccaagcccaacatcggcagcctgatgaatgtgacagctgacatcctggagctggatgtggagagcgtggatgtggactggcccccagccctggatgactag

SEQ ID NO: 326889 - DNA, 363 bp, Artificial Sequence
  derived and/or modified sequence
atgttccccctgacagaggagaacaagcacgtggcccagctgctgctgaacacaggcacctgcccccgctgcatcttccgcttctgtggggtggacttccacgccccctacaagctgccctacaaggagctgctgaatgagctgcagaagttcctggagacagagaaggatgagctgatcctggaggtgatgaaccccccacccaagaagatccggctgcaggagctggaggacagcattgacaacctgagccagaatggagagggccgcatctctgtgagccacgtgggcagcacagccagcaagaacagcaacctgaatgtgtgcaatgtgtgcctgggcatcctgcaggagttctgctag

SEQ ID NO: 326890 - DNA, 1590 bp, Artificial Sequence
  derived and/or modified sequence
atgttccccctgaccgaggagaacaagcacgtggcccagctgctgcttaacaccggcacatgtccaagatgcattttcaggttctgtggcgtcgattttcacgccccttataagctaccttataaggaattgttgaatgaactccagaagttcctggagaccgaaaaagacgaactcatcctcgaagtgatgaatccaccacctaagaagatcaggctacaagagctggaggattcaattgataacttgtctcaaaacggggaaggtaggatatccgtctcccatgtgggtagcaccgcctccaaaaacagcaacttaaacgtgtgcaatgtctgtctcggcatcctccaggaattttgcgagaaggattttataaaaaaagtgtgtcagaaagtggaggccagcgggtttgagttcaccagcttggtgttttcagtctcctttcccccccaactctcagttagggaacacgctgcatggctcctcgtgaagcaagaaatgggaaagcagagtctgagcctcggtcgcgatgatattgttcaactgaaggaggcctataaatggataacacatccgctgttttcagaagagttaggagtgccgattgacggaaaatccctattcgaggtctcggtagtcttcgcccacccagagaccgtcgaagattgtcacttcctcgccgcgatttgtcctgattgtttcaaacctgcaaaaaataagcaatcagtgtttacccgcatggcagtgatgaaagcactcaataaaattaaagaagaggattttctgaaacagttcccctgccctcctaactccccaaaggccgtctgtgctgtacttgaaatagaatgtgctcatggtgcagtgttcgtcgccggtaggtacaacaagtatagccggaatctcccacagaccccgtggattatcgacggcgagcgtaaactggaatctagcgtagaggaactaataagtgaccatttgttagcggtttttaaagcggagtcctttaatttttccagttcaggacgagaagatgtagatgtgcggacgctcgggaatggaaggccctttgctattgaattggttaatcctcatagggtacacttcacttcccaggagatcaaggaactacagcagaagatcaataatagtagcaacaagatccaggttcgcgacttgcagctggtgacacgggaggcgatagggcacatgaaggaaggagaagaagagaaaacaaagacatattctgcactcatctggacaaataaagctatccagaaaaaagatatcgaattcctgaacgatatcaaggatctaaagattgaccagaagacccccctgagagttctgcatcgtcgacctctggccgtgcgtgcccgtgtgatccactttatggagacccaatatgtggacgagcaccatttccggctgcatttgaaaactcaagctggcacctatattaaggaatttgtgcatggagattttggccggacaaaacccaatatagggagcttaatgaacgtcacggcagatatccttgaactcgacgttgaaagcgtggatgtggactggccaccagcccttgacgattag

SEQ ID NO: 326891 - DNA, 1590 bp, Artificial Sequence
  derived and/or modified sequence
atgttccccctgaccgaggagaacaagcacgtggcccagctgctgttgaatacaggcacgtgtcctcgatgcatttttagattctgcggggtggatttccatgcaccctacaaattgccatacaaggagctcttgaacgagctgcagaaatttctggagacggagaaggacgagctgatcctcgaagttatgaacccacccccaaaaaaaattcgtctgcaggagttggaggactccatagataacctttctcagaacggcgaggggagaatttctgtgtcccacgttgggtccacagcatccaaaaactccaatctaaacgtctgcaatgtgtgcctgggtatcttacaggagttttgcgagaaggactttattaaaaaggtgtgccagaaggtggaggcaagtggttttgagttcactagtttagtattcagcgtgtcatttcctccacagttgtcagtgcgggagcatgctgcatggctccttgtgaaacaggaaatgggcaagcagtctttgagtctcggacgagatgacattgtacagctaaaggaggcctataagtggatcacacaccctttattttctgaggagctgggagtgcctattgatggcaaaagtctgtttgaagtaagcgtggtgtttgcccatcctgaaacagtggaggattgtcatttcctggcggctatttgtcccgattgcttcaaaccagccaaaaataaacagtccgtgttcacacgcatggccgtgatgaaggctcttaacaaaattaaggaagaggactttctgaagcaattcccttgccccccaaattccccaaaggccgtctgtgctgtcctcgagattgagtgtgcccatggggcggtgtttgtcgcaggacgctataacaaatactctcggaatctgcctcagacaccctggatcatcgacggagaaagaaagcttgaatctagcgtagaggagctgattagtgaccaccttttagcagttttcaaggctgaaagcttcaacttctcatcttccggcagggaggatgtcgacgtgagaacgctgggaaacgggcggcctttcgcaattgagctggtcaatcctcaccgggtccatttcacaagccaggaaattaaggagctccagcagaagatcaacaacagctccaataagatacaggtgagagatctgcagctggtgaccagggaggccattgggcatatgaaggagggcgaggaggaaaagacaaagacttactccgcgctgatctggacaaataaagccatccagaagaaagatattgagttcttaaatgacattaaagatctgaagatagatcagaaaacccctttgagggtgctgcaccgaagaccactcgcagtgagggctagggtgattcacttcatggaaacgcagtacgtggatgagcaccacttcagactccacctcaagactcaggctggaacctacataaaggagtttgtacatggcgattttgggcggaccaaaccaaatattggttccttgatgaatgtgacggctgatattctcgagctggatgtggagagcgtggatgtggattggccacccgccttggacgattag

SEQ ID NO: 326892 - DNA, 363 bp, Artificial Sequence
  derived and/or modified sequence
atgttccccctgaccgaggagaacaagcacgtggcccagctgctgctgaacacagggacatgtcccagatgtatattccgtttctgtggggtcgacttccacgccccttacaaattgccttataaagagctccttaacgagctccaaaagttcctggaaacagaaaaagacgaactcattcttgaagtcatgaatcctcctcccaaaaagataagactgcaggagctggaagattctattgataacttaagccagaacggagagggccgcatctcagtctcacacgtgggatcgacagcctcgaagaactctaatctgaacgtttgcaacgtgtgcttgggcattttacaagaattttgctag

SEQ ID NO: 326893 - DNA, 1590 bp, Artificial Sequence
  derived and/or modified sequence
atgtttcctttgactgaggaaaacaaacatgttgctcagctccttctcaatactggtacttgccctcgatgtatcttcagattctgtggagtcgatttccacgccccatacaaactgccttacaaagagcttctcaacgagcttcaaaagttcctcgagactgaaaaagatgagctgattctcgaggtgatgaaccctccccctaagaagatcagattacaagagttagaagacagtatagacaacttatctcagaacggggagggacgcattagtgtatcccatgtggggtcaactgcatcaaagaatagcaacctcaatgtgtgcaatgtctgcttgggtatcttgcaggaattctgtgaaaaagatttcattaaaaaggtctgtcagaaggtagaggcttctggtttcgagttcacatccctggtgttctcagtcagcttcccccctcaactcagtgtcagagagcacgctgcctggctcctggtgaaacaagagatggggaaacagtccctgtctttaggccgagatgacatcgtccagttaaaggaggcctacaagtggatcacgcatcctctcttcagcgaagagttgggtgtgcctatcgacggaaagagcctgttcgaggtgagtgtagtattcgctcatccagagacagtggaagactgccactttctagcagccatttgcccagactgtttcaaaccggctaagaacaagcagagcgtcttcacccgtatggccgtgatgaaagcactcaacaagatcaaggaggaggacttccttaaacaattcccgtgtcctcctaatagcccaaaggccgtgtgtgccgttctcgagatcgagtgcgcacacggggctgtgtttgtggcagggagatacaacaaatacagcaggaacctgccgcagaccccgtggattatcgacggcgagcgcaagcttgaatcttcggtcgaagagctgataagtgaccacctgcttgccgtcttcaaggccgagtccttcaatttctcaagctccggaagggaagacgttgatgtgcggacacttgggaatgggagaccattcgccattgaactcgtcaacccgcatagggtgcactttacatcccaagaaatcaaagagcttcagcaaaagattaacaactcatcaaacaagattcaagtgagggacctgcagcttgtcactcgcgaagctatcggacatatgaaagagggggaagaagagaagacgaagacatactcagcccttatctggaccaacaaggccattcagaagaaagacattgagttcctgaatgacattaaagaccttaagatcgatcaaaagaccccgttgcgggtgctgcataggcgccctctggccgtgcgagcccgagtcatccactttatggaaacccaatacgttgatgagcaccacttccggctgcacctgaagacacaggccggtacatacataaaggagttcgtgcacggcgactttggacgcacaaagccaaatataggtagcctcatgaatgttacagccgacattcttgagctggatgtggagagtgtggatgtggactggccccctgcactagatgactag

SEQ ID NO: 326894 - DNA, 1590 bp, Artificial Sequence
  derived and/or modified sequence
atgttcccgctgaccgaagaaaacaagcatgttgcgcagctgctgctgaacacgggaacctgccccagatgtattttccggttctgtggcgtggattttcatgccccttacaagttgccttacaaagaactgctgaacgagctgcaaaaattcctagagactgagaaggatgaactcatcctggaggtgatgaacccccctcctaagaaaattaggctccaggaactggaagactcaatcgataatctgagtcagaacggcgaaggaaggatcagcgtctcgcacgtggggtcaacagccagcaaaaactcaaatctgaatgtttgcaatgtgtgtctgggcatccttcaggaattctgcgagaaggacttcataaaaaaagtgtgccagaaggtggaagcgtcaggctttgagttcacaagcctagtgttctccgtgtcgttccctccacaactgtctgttagagaacacgccgcatggctgctcgtaaagcaggagatgggaaaacaatccctgtctctcgggagggatgatatcgtgcagctgaaagaagcatataaatggataacccatccgctcttctctgaggaattgggggtgcccatcgacggtaagtctctttttgaagtctctgtggtgttcgcccaccctgagacagtcgaagattgccacttcttggcagcaatctgccctgactgcttcaaaccagcgaagaataagcaatctgttttcacgcgcatggcagtgatgaaggctcttaataagatcaaagaggaagatttcctgaaacaatttccctgtcctccaaactctcccaaagcagtctgtgcagtgctagaaatcgagtgtgcacatggggcagttttcgttgccggtcggtacaataaatactctcggaaccttccccagacaccttggattatcgacggggagcgaaaactagagagctctgtcgaggagctgatttcagatcacttactagcagtcttcaaagcagagagcttcaacttcagttcaagtggtcgggaggacgtcgatgtgcgcacgctgggcaacggccgtccctttgccatcgaattagtcaacccccaccgcgtccactttacctcccaagaaatcaaggagcttcagcagaaaattaacaactcgagtaacaagattcaggtgcgcgacctgcagctggttacacgtgaggccatcggacacatgaaggagggcgaagaggagaaaacgaagacatactctgcgctgatttggacgaataaagcaattcaaaagaaagatatcgagtttctgaacgatatcaaggacttaaaaatcgaccaaaagaccccgttgagagtactacacagaaggccactcgccgttagggctcgcgtcatccactttatggagactcagtatgtcgacgagcatcatttccgactgcacctgaagacacaggccggaacatacattaaggagtttgtacatggcgatttcgggagaaccaagccgaacatcggctccctgatgaacgttactgcagacatccttgagctagatgtggaatctgtggacgtcgactggccaccagccttagacgactag

SEQ ID NO: 326895 - DNA, 363 bp, Artificial Sequence
  derived and/or modified sequence
atgttcccattaactgaagagaataaacatgtcgctcaattactactgaacactgggacctgcccgcgatgtattttccgcttctgcggcgtggacttccacgccccatacaaattaccctataaagagctcctcaacgaattgcagaaatttcttgaaacagaaaaagacgagttgatccttgaggtcatgaacccccctccgaaaaagattcggctgcaggagttggaagattcaatagataatttgtctcagaatggtgaagggcgaatttccgtcagtcacgtcggctctactgccagcaagaattcgaatctgaatgtatgcaacgtgtgcctagggatccttcaggaattttgttag

SEQ ID NO: 326896 - DNA, 2278 bp, Artificial Sequence
  derived and/or modified sequence
gagactttgctccctgtcgatgccgtggctggacaaatgccgctctcaactgctacagaccaaagtctacgctttaaagatagagaagccattctgtcaaagtgaaaacagaagcggtaggtaggaagccgcccccctttctttcaagcacagagacccagagagacgcccaggagctcccgaaaaaaacgttgctgattagagctgccgggtcagaaacagctgtgagacactaaagtccccactgttataattattcaatatgttcccactgactgaggaaaacaagcatgtggcccagttgttgctcaatactggtacttgtccaagatgtatcttcagattctgtggtgtggattttcatgcaccttacaaacttccatacaaggagttgctcaatgaactacagaaatttctggaaactgaaaaagatgaattaattttggaagttatgaacccacctcccaagaaaattcgactgcaagaactggaagatagtattgataatctaagtcaaaatggagagggaaggatctctgttagtcatgttggaagcactgcttccaagaactcaaatttaaatgtatgtaatgtatgcctaggaattcttcaagaattctgtgagaaagatttcattaaaaaggtgtgccaaaaggttgaggcctctgggtttgaattcaccagcttggtattttcagtctccttcccaccacaactatctgtaagagagcatgctgcatggttgctggtaaaacaggaaatgggaaagcagagtctgtcgctgggaagagatgatatagttcagctaaaagaagcctacaaatggataactcaccccctgttttcagaggaactgggtgttcccattgatggaaagagcttgtttgaagtgagtgtggtctttgctcacccagaaacagttgaggattgccacttcctagctgcgatatgcccagattgttttaagccagccaaaaacaaacagtctgtattcactagaatggcagttatgaaagccttgaataagataaaggaagaggatttccttaagcagtttccttgtcctccaaactcaccaaaggctgtatgcgctgttcttgaaattgaatgtgctcatggtgctgtttttgtggctgggagatataataaatactccaggaatctaccacaaactccttggataattgatggagaaaggaagctggaatcttcagtggaagaattaatttcagatcatctgttggcagtatttaaagcagagagttttaatttttcatcctctggaagagaagatgtagatgtgagaacattaggaaatggaaggccctttgcaattgagctggtgaatcctcatagagtacatttcacttcacaagaaattaaggaacttcagcagaaaattaataactcatctaacaaaatccaagtacgtgacttgcagcttgtcacaagagaggcaataggacatatgaaagaaggtgaagaagaaaagacaaagacctacagtgccttaatttggacaaataaagcgatacagaagaaagacattgaattcctaaatgacataaaggacttaaaaatcgaccagaaaacacctttgcgcgtccttcaccgaaggcccctggctgtgcgagctcgcgtcattcacttcatggagacacagtacgtggatgagcaccacttccgcctccacttgaaaactcaggctggcacctacattaaagagtttgtacatggagacttcgggagaaccaagccaaacattgggtccctgatgaatgtgactgcagacattctggagctggatgttgagtctgtagatgttgactggccacctgctctggatgactagctttcaaatttggagacaaagagtatggttttcctggcatgatgtggacatccatggagcacatgccgtaaaatggctgtttacccaccataacggtgtcttgaaaactatttggatcatgttgatctatataattgttaatttgttgtaacatctcaggatctatatatgtgtatattttgtgttaaattgttccaaggatgtcttaggatttttctcattccctctttcacccccacaaaccaaactatgaataatgaaataattctccttaattctttcatttagagaggtgcacaaacaggacacattctctgttaacctaagaagctgtaatttcagcaagatttccctccacaagagatataccacctttaaaatcatgttctaatttttgtaaattatctgaataaaagttatatctag

SEQ ID NO: 326897 - DNA, 1820 bp, Artificial Sequence
  derived and/or modified sequence
ggggttaaatctcaggctccggcgtctggggagaaggtgaggcggttataattattcaatatgttcccactgactgaggaaaacaagcatgtggcccagttgttgctcaatactggtacttgtccaagatgtatcttcagattctgtggtgtggattttcatgcaccttacaaacttccatacaaggagttgctcaatgaactacagaaatttctggaaactgaaaaagatgaattaattttggaagttatgaacccacctcccaagaaaattcgactgcaagaactggaagatagtattgataatctaagtcaaaatggagagggaaggatctctgttagtcatgttggaagcactgcttccaagaactcaaatttaaatgtatgtaatgtatgcctaggaattcttcaagaattctgtgagaaagatttcattaaaaaggtgtgccaaaaggttgaggcctctgggtttgaattcaccagcttggtattttcagtctccttcccaccacaactatctgtaagagagcatgctgcatggttgctggtaaaacaggaaatgggaaagcagagtctgtcgctgggaagagatgatatagttcagctaaaagaagcctacaaatggataactcaccccctgttttcagaggaactgggtgttcccattgatggaaagagcttgtttgaagtgagtgtggtctttgctcacccagaaacagttgaggattgccacttcctagctgcgatatgcccagattgttttaagccagccaaaaacaaacagtctgtattcactagaatggcagttatgaaagccttgaataagataaaggaagaggatttccttaagcagtttccttgtcctccaaactcaccaaaggctgtatgcgctgttcttgaaattgaatgtgctcatggtgctgtttttgtggctgggagatataataaatactccaggaatctaccacaaactccttggataattgatggagaaaggaagctggaatcttcagtggaagaattaatttcagatcatctgttggcagtatttaaagcagagagttttaatttttcatcctctggaagagaagatgtagatgtgagaacattaggaaatggaaggccctttgcaattgagctggtgaatcctcatagagtacatttcacttcacaagaaattaaggaacttcagcagaaaattaataactcatctaacaaaatccaagtacgtgacttgcagcttgtcacaagagaggcaataggacatatgaaagaaggtgaagaagaaaagacaaagacctacagtgccttaatttggacaaataaagcgatacagaagaaagacattgaattcctaaatgacataaaggacttaaaaatcgaccagaaaacacctttgcgcgtccttcaccgaaggcccctggctgtgcgagctcgcgtcattcacttcatggagacacagtacgtggatgagcaccacttccgcctccacttgaaaactcaggctggcacctacattaaagagtttgtacatggagacttcgggagaaccaagccaaacattgggtccctgatgaatgtgactgcagacattctggagctggatgttgagtctgtagatgttgactggccacctgctctggatgactagctttcaaatttggagacaaagagtatggttttcctggcatgatgtggacatccatggagcacatgccgtaaaatggctgtttacccaccataacggtgtcttgaaaactatttggatcatgttgatctatataattgttaatttgttgtaacatctcaggatctatatat

SEQ ID NO: 326898 - DNA, 571 bp, Artificial Sequence
  derived and/or modified sequence
agtcgggctgggagtaaagccgcacgcactccttcgctcgtgggggaggtagggtgaggtggcaaaccaggcagtttttcggatttcctctacaaacaagaagggagaagctcacttagtcctagcgagagcgggctggtacttttgttctaaaacgcacgtttcctcggggaacagaattgctagacgcaatagttataattattcaatatgttcccactgactgaggaaaacaagcatgtggcccagttgttgctcaatactggtacttgtccaagatgtatcttcagattctgtggtgtggattttcatgcaccttacaaacttccatacaaggagttgctcaatgaactacagaaatttctggaaactgaaaaagatgaattaattttggaagttatgaacccacctcccaagaaaattcgactgcaagaactggaagatagtattgataatctaagtcaaaatggagagggaaggatctctgttagtcatgttggaagcactgcttccaagaactcaaatttaaatgtatgtaatgtatgcctaggaattcttcaagaattctgtg

SEQ ID NO: 326899 - protein, 423 aa, Artificial Sequence
  derived and/or modified sequence
MPITCPTQNEPFLRTPRNSNYTYPIKPAIENWGSDFLCTEWKASNSVPTSVHQLRPADIKVVAALGDSLTTAVGARPNNSSDLPTSWRGLSWSIGGDGNLETHTTLPNILKKFNPYLLGFSTSTWEGTAGLNVAAEGARARDMPAQAWDLVERMKNSPDINLEKDWKLVTLFIGVNDLCHYCENPEAHLATEYVQHIQQALDILSEELPRAFVNVVEVMELASLYQGQGGKCAMLAAQNNCTCLRHSQSSLEKQELKKVNWNLQHGISSFSYWHQYTQREDFAVVVQPFFQNTLTPLNERGDTDLTFFSEDCFHFSDRGHAEMAIALWNNMLEPVGRKTTSNNFTHSRAKLKCPSPESPYLYTLRNSRLLPDQAEEAPEVLYWAVPVAAGVGLVVGIIGTVVWRCRRGGRREDPPMSLRTVAL

SEQ ID NO: 326900 - protein, 488 aa, Artificial Sequence
  derived and/or modified sequence
MEPAGEKDEPLSVKHGRPMKCPSQESPYLFSYRNSNYLTRLQKPQDKLEVREGAEIRCPDKDPSDTVPTSVHRLKPADINVIGALGDSLTAGNGAGSTPGNVLDVLTQYRGLSWSVGGDENIGTVTTLANILREFNPSLKGFSVGTGKETSPNAFLNQAVAGGRAEDLPVQARRLVDLMKNDTRIHFQEDWKIITLFIGGNDLCDFCNDLVHYSPQNFTDNIGKALDILHAEVPRAFVNLVTVLEIVNLRELYQEKKVYCPRMILRSLCPCVLKFDDNSTELATLIEFNKKFQEKTHQLIESGRYDTREDFTVVVQPFFENVDMPKTSEGLPDNSFFAPDCFHFSSKSHSRAASALWNNMLEPVGQKTTRHKFENKINITCPNQVQPFLRTYKNSMQGHGTWLPCRDRAPSALHPTSVHALRPADIQVVAALGDSLTAGNGIGSKPDDLPDVTTQYRGLSYRESKPGFLSDSWVSKSNRKCTRKAPNP

SEQ ID NO: 326901 - DNA, 1467 bp, Artificial Sequence
  derived and/or modified sequence
atggagcccgccggtgaaaaggacgagccgttgtcggtcaaacacggtcggcccatgaaatgcccctcccaagaatccccgtatctgtttagctaccgaaactccaactacctgacccgactgcaaaagccgcaggacaagctggaagtccgcgagggggctgagatccgctgccctgacaaggatcctagcgataccgtgccgactagcgtccaccgactgaagcctgcagatataaacgtcataggcgccctcggagatagcctgaccgcaggtaacggagccggaagcacccctggcaatgtgctggacgtgctgacacagtaccggggactctcctggtcagtggggggcgacgagaatatcggcacagttactaccctggcgaatatcctaagggaatttaacccttcgctgaagggcttttcagtgggaaccggaaaggagacttcccctaacgcttttttgaatcaagccgtcgccggtggccgagcagaggatctcccagtgcaggctcgccggctggtagatctaatgaagaacgatactagaattcatttccaggaggattggaagattatcacccttttcatcgggggaaatgacttatgcgacttctgcaatgacctggttcattactccccccagaattttactgataacatcggcaaagcgctggatatcctgcacgccgaggtgccacgggccttcgttaacctggtgacggttctggagatcgtcaacttgcgtgaattgtatcaggagaagaaggtatattgcccaagaatgatcctgcgatctctgtgcccctgcgttcttaaatttgacgacaactcgacggaactggcgaccctcattgagttcaacaaaaagtttcaggaaaaaacacatcagctgatcgaatcaggtaggtacgacacaagggaagacttcaccgttgtggtgcagccctttttcgaaaatgtggacatgccaaaaactagtgaaggcctgcccgacaactccttcttcgcacccgactgcttccacttcagctcgaagtcccactcgagggccgccagtgccctttggaataacatgctggaacccgtcggtcagaaaaccacgcgccataagtttgagaacaaaattaacatcacctgcccaaatcaagtacaaccatttctccgaacatataaaaattctatgcagggccacggaacatggctgccttgccgagatagagcaccgagcgcccttcatccaaccagtgtgcatgcgttacggccagcagacatacaggtcgtggcagcgctgggagactcactgaccgctgggaacggtattggatctaagccggatgacctgcccgacgtgacgacacagtataggggcctgtcctaccgagagtctaagcccgggttcctgagcgatagttgggtgtccaaatctaatcgaaaatgtacgcgcaaagcaccgaacccgtag

SEQ ID NO: 326902 - DNA, 1467 bp, Artificial Sequence
  derived and/or modified sequence
atggagcctgctggggagaaggatgagcccctgtctgtgaagcacggccggcccatgaagtgccccagccaggagagcccctacctgttctcctacagaaacagcaactacctgacccggctgcagaagccccaggacaagctggaggtgcgggagggcgctgagatccgctgcccagacaaggaccccagcgacacagtgcccacctctgtgcaccggctgaagccagctgacatcaacgtcatcggggccctgggggacagcctgacagctggaaatggagctggcagcaccccaggaaatgtgctggatgtgctgacccagtaccggggcctgtcctggagcgtgggcggagatgagaacatcggcaccgtgaccaccctggccaacatcctgcgggagttcaaccccagcctgaagggcttctctgtgggcaccgggaaggagaccagccccaatgccttcctgaaccaggccgtggccggcggccgggcagaggacctgcctgtgcaggcccggcggctggtggacctgatgaagaatgacacccgcatccacttccaggaggactggaagatcatcaccctcttcatcggcggcaatgacctgtgtgacttctgcaatgacctggtgcactacagcccccagaacttcacagacaacatcggcaaggccctggacatcctgcatgctgaggtgccccgggcctttgtgaacctggtgacagtgctggagatcgtgaacctgcgggagctgtaccaggagaagaaggtgtactgccccaggatgatcctgcggagcctgtgcccctgtgtgctgaagtttgatgacaacagcacagagctggccaccctcatcgagttcaacaagaagttccaggagaagacccaccagctgattgagagcggccgctatgacacccgggaggacttcaccgtggtggtgcagcccttctttgaaaatgtggacatgcccaagaccagcgagggcctgcctgacaacagcttctttgccccagactgcttccacttcagcagcaagagccacagccgggccgccagcgccctgtggaacaacatgctggagcctgtgggccagaagaccaccaggcacaagtttgagaacaagatcaacatcacctgccccaaccaggtgcagcccttcctgcggacctacaagaacagcatgcagggccacggcacctggctgccctgccgggaccgggcccccagcgccctgcaccccacctctgtgcacgccctgcggcctgctgacatccaggtggtggccgccctgggggacagcctgacagctggaaatggcatcggcagcaagccagatgacctgcctgatgtgaccacccagtaccggggcctgagctaccgggagagcaagccaggcttcctgagtgacagctgggtgtccaagagcaacaggaagtgcaccaggaaggcccccaacccctag

SEQ ID NO: 326903 - DNA, 1467 bp, Artificial Sequence
  derived and/or modified sequence
atggagcccgccggcgagaaggacgagcccctgagcgtgaagcacggtagacccatgaagtgtccctcacaagaaagcccttatctgtttagttatagaaacagtaattatctgactaggctccagaagccgcaggacaaattggaagtcagggaaggcgcagagatcagatgtcctgacaaggacccctctgacacagtgcctacttctgtccacaggttgaagcccgccgatattaacgtgatcggcgctcttggtgacagcttgacggcaggtaacggagctggaagcaccccgggaaatgtgctggatgtactgacccagtaccgggggctaagctggagcgttgggggggacgaaaatatcggtacagttacaaccctcgccaatatcctcagagagtttaatccctccttaaagggatttagtgtgggaaccggaaaggagaccagcccgaatgcattcctgaaccaggccgtagctggtggcagagccgaggatctgcctgttcaagcgaggcggctggtggatctcatgaagaatgatacgaggattcacttccaggaggactggaaaatcatcactctcttcataggcgggaatgacctgtgtgacttctgtaacgacctcgtgcattattcaccccagaacttcaccgataatatcgggaaggccctcgacattttgcacgctgaagtgccgagggcctttgtcaaccttgtgacagtcctggagatagtgaacctgagggagctgtaccaagagaaaaaggtatactgtcctaggatgattcttagatccctgtgtccctgtgtgctcaagtttgacgataactcaaccgagctggcaaccctgattgaatttaacaagaaattccaggagaagacgcatcaactgatcgagagcggcaggtacgatacccgcgaggatttcaccgttgtagtacagcccttttttgaaaacgttgatatgccgaagacaagcgagggtctgccggacaattcattttttgcgcctgattgcttccatttcagcagcaagtcccacagcagggccgcatcagccttgtggaacaatatgctcgagcccgtagggcaaaagaccactcggcataagtttgaaaacaagatcaatatcacatgtcccaatcaggttcagccatttctcaggacctacaagaatagtatgcagggacacggcacctggttgccatgcagagatagagcaccaagcgcacttcatcccacctcagttcatgccttgcggccagctgatatccaggtcgtggccgcgctgggagattcccttaccgctggtaacggaattggtagtaagcccgacgacctcccagacgtgaccacacagtaccgtggactttcttatagggagagcaaaccaggtttcctcagcgactcctgggtcagcaagagcaatcgcaagtgcactcggaaggccccaaacccatag

SEQ ID NO: 326904 - DNA, 3537 bp, Artificial Sequence
  derived and/or modified sequence
cagctctgtcctggctggctgggccccacctcaacctctgctgtgcagcttttccttctaggagagatggagccagcaggagagaaagatgagccattgagtgtaaaacacgggaggccaatgaagtgtccctctcaggagagcccctatctgttcagctacagaaacagcaactacctgaccagactgcagaaaccccaagacaagcttgaggtaagagaaggagcggaaatcagatgtcctgacaaagacccctccgatacggttcccacctcagttcataggctgaagccggctgacatcaacgtaattggagccctgggtgactctctcacggcaggcaatggggccgggtccacacctgggaacgtcttggacgtcttgactcagtaccgaggcctgtcctggagcgtcggcggagatgagaacatcggcaccgttaccaccctggcgaacatcctccgggaattcaacccttccctgaagggcttctctgttggcactgggaaagaaaccagtcctaatgccttcttaaaccaggctgtggcaggaggccgagctgaggatctacctgtccaggccaggaggctggtggacctgatgaagaatgacacgaggatacactttcaggaagactggaagataataaccctgtttataggcggcaatgacctctgtgatttctgcaatgatctggtccactattctccccagaacttcacagacaacattggaaaggccctggacatcctccatgctgaggttcctcgggcatttgtgaacctggtgacggtgcttgagatcgtcaacctgagggagctgtaccaggagaaaaaagtctactgcccaaggatgatcctcaggtctctgtgtccctgtgtcctgaagtttgatgataactcaacagaacttgctaccctcatcgaattcaacaagaagtttcaggagaagacccaccaactgattgagagtgggcgatatgacacaagggaagattttactgtggttgtgcagccgttctttgaaaacgtggacatgccaaagacctcggaaggattgcctgacaactctttcttcgctcctgactgtttccacttcagcagcaagtctcactcccgagcagccagtgctctctggaacaatatgctggagcctgttggccagaagacgactcgtcataagtttgaaaacaagatcaatatcacatgtccgaaccaggtccagccgtttctgaggacctacaagaacagcatgcagggtcatgggacctggctgccatgcagggacagagccccttctgccttgcaccctacctcagtgcatgccctgagacctgcagacatccaagttgtggctgctctgggggattctctgaccgctggcaatggaattggctccaaaccagacgacctccccgatgtcaccacacagtatcggggactgtcatacagagaaagtaaaccagggttcttatcagactcctgggtcagcaaatccaacaggaaatgcaccagaaaagcaccaaatccctgaatcttcacctccccgcttgcatgtatacgtgtacacgtggtgttcctacgtctctgtttactgtctttatgtgtttattcatgttgtcttgtagtcacacagctgcctttacatatatgtacacatctgcacagaaaacctctgaaacccatcgcacacttcgagaggccataaccaagacacaatcacaatcagccatgtcttgaaagattagcaattcgacaagaggaaagggtgagaaagggcatcccgaacacggaagtggagaagctcagggtgtgtcaggcgagcggttgcgtgtagatattctcaagtttctttctctcctaataaagttctcattcctgtaggcttcaaagtaagtggcgagtagctcagaatttacctgggaaaacaactagaacgaagctggccacaagggggcagcgtgctaatgagtggcggagccaggacagcacctttgctgccgcctcccttttcttctgagtcagtttgcttcctggggaagtgacagggagcagggagggggtgatcaagactgtgaaggttctctggccagacctgagcagagtcccagagaggatgggtttccagggcgagagggaggcgccatcactcggcctgtaccacccacaacgaggacctaggttgtccttagcatgaggacatcaacctctcaagaacagaggtcagtgccttcctgcgccaaggtccctgcgtttccacaagtccttggtcaggtacctggtcctaacaggctgccatggaacaaatcagagcctcactgactcaccattctgctcctaatgaggctacaagaaaaaaaaccagaggagagaaagcagagcttattacaatcaggaaagagcatgaggttctggcagctgcacttggtctcagctaaagaaggcaatgacctcatacgatagcatgggaaacaaaaatcaagcagacgaaccacattgcaggtgatagatacgcgacgtgcacctggtggggcagcctggggaagtgaggtgatgtgccctactttaaaacagatcgaccagctgggctcctgggattcagatatgaaccagcagtcctctactaaaagtttctttctgcagcgatgggaaaattcagccattgctctgtttcttccaacaagtgaagtccattacagcctaatgtctcaatcttttagttctagctctaaggcctcaggttcaatggctgctgtccctttaaacccttcatttgtcctaaatgtttcaaatagctgcccccaaatgcacgtgtgttaaagatggaagctctaggtcggggtctgagagacagcttgacacttggtagaatacatagactactgtgtctcaaagtgtgttccatggaacattaactccagacctgttcctggagaagagaaaatcctttgtatctgagggggaaacattaccataaccttcctttggggaattcatgtgtgtattagcatattaaaggctctcataaggcctgcaatgcagaaatctatttaagttttatctgtttaacccaatgtttcccttaattccagaacattttctttgttcataacacctgttaacacctcctgaaagtgttcacgtagtagacttatctgagaaaagcaatttttgagccgttaaagcttctagattggacaaactaggcaattaatgatactagatcaattcagaatgcaatttgagcctcttccccctgggaaacaaagtgaaaagagtggatctcatggaattaggggagaagtagacccagaattcatggggggtgggtggctgtgaacaggacctgcagaagaggctcggctgtgaatatttccaaggccccttgacctgtgagattctgtagtgaacggttccagctttggccagcttaacaatgtgctgggccccaaggtcttgagagcattgccttttcttccattgaaataagttcgcttgtttgggaccattcaaaggatcaaaataaaatttacttacc

SEQ ID NO: 326905 - DNA, 1467 bp, Artificial Sequence
  derived and/or modified sequence
atggaacccgctggggaaaaagatgagccattatctgtcaagcacggaaggcccatgaagtgcccttctcaggagagcccgtatctgttctcttaccgcaattccaactatctaacccggctccaaaaacctcaggacaaactggaagtgagggaaggtgcggagataaggtgccccgataaagatccatctgataccgttcccaccagcgtgcacagactgaaacccgctgacatcaatgtaattggtgccctgggcgactcattaactgcaggcaacggcgcagggagcacgcctggtaatgtcctggacgtgttaacccagtaccgcggtctgagctggagcgttgggggagatgaaaatattggcacggtgactactctagccaacatcctcagagagtttaatccaagtctgaaaggcttctccgtcgggacaggaaaagaaaccagccctaatgcatttcttaaccaagccgtcgccggaggacgagcagaggatctgcctgttcaagcacgcagactcgtcgacctcatgaagaatgatacgagaattcactttcaagaggattggaagattataaccctgtttatcgggggtaacgatctttgtgacttctgcaacgatctggtccattactcaccccagaatttcaccgataacataggcaaggcgttagatatcctccacgccgaggttcccagggcatttgtgaacctggtgactgtcctggaaattgtgaacctacgtgagttataccaagaaaagaaagtctactgtcctcgaatgatcctgcgatcactgtgcccctgtgttctgaagttcgacgataatagtacagaactagctactttgattgagtttaacaaaaagttccaggagaaaactcaccagctgatcgagtccggaagatatgacacacgcgaagattttacagtcgttgtccaacccttttttgagaatgtagacatgcccaagacatccgagggtctgcctgataatagcttttttgctcccgactgctttcacttttccagtaaatctcattctcgagccgcttccgcactgtggaacaacatgctggagccagtagggcagaaaaccacccgacataagttcgagaacaaaatcaatattacctgtcctaatcaggtccagccatttctgaggacatataagaacagcatgcaggggcacggcacgtggctgccttgccgggacagagccccaagcgcgcttcacccaactagtgtccacgcactgcgacccgcagatattcaggttgtggcggcacttggcgacagtcttactgcaggaaacgggattggcagcaagccagatgaccttcccgacgttacgacacaataccgaggcctgtcatacagggaatccaagccgggttttttatctgatagttgggtctccaagtccaacagaaaatgtaccagaaaagcccctaatccgtag

SEQ ID NO: 326906 - DNA, 1467 bp, Artificial Sequence
  derived and/or modified sequence
atggagcccgccggcgagaaggacgagcccctgagcgtgaagcacggcagacccatgaagtgccccagccaggagagcccctacctgttcagctacagaaacagcaactacctgaccagactgcagaagccccaggacaagctggaggtgagagagggcgccgagatcagatgccccgacaaggaccccagcgacaccgtgcccaccagcgtgcacagactgaagcccgccgacatcaacgtgatcggcgccctgggcgacagcctgaccgccggcaacggcgccggcagcacccccggcaacgtgctggacgtgctgacccagtacagaggcctgagctggagcgtgggcggcgacgagaacatcggcaccgtgaccaccctggccaacatcctgagagagttcaaccccagcctgaagggcttcagcgtgggcaccggcaaggagaccagccccaacgccttcctgaaccaggccgtggccggcggcagagccgaggacctgcccgtgcaggccagaagactggtggacctgatgaagaacgacaccagaatccacttccaggaggactggaagatcatcaccctgttcatcggcggcaacgacctgtgcgacttctgcaacgacctggtgcactacagcccccagaacttcaccgacaacatcggcaaggccctggacatcctgcacgccgaggtgcccagagccttcgtgaacctggtgaccgtgctggagatcgtgaacctgagagagctgtaccaggagaagaaggtgtactgccccagaatgatcctgagaagcctgtgcccctgcgtgctgaagttcgacgacaacagcaccgagctggccaccctgatcgagttcaacaagaagttccaggagaagacccaccagctgatcgagagcggcagatacgacaccagagaggacttcaccgtggtggtgcagcccttcttcgagaacgtggacatgcccaagaccagcgagggcctgcccgacaacagcttcttcgcccccgactgcttccacttcagcagcaagagccacagcagagccgccagcgccctgtggaacaacatgctggagcccgtgggccagaagaccaccagacacaagttcgagaacaagatcaacatcacctgccccaaccaggtgcagcccttcctgagaacctacaagaacagcatgcagggccacggcacctggctgccctgcagagacagagcccccagcgccctgcaccccaccagcgtgcacgccctgagacccgccgacatccaggtggtggccgccctgggcgacagcctgaccgccggcaacggcatcggcagcaagcccgacgacctgcccgacgtgaccacccagtacagaggcctgagctacagagagagcaagcccggcttcctgagcgacagctgggtgagcaagagcaacagaaagtgcaccagaaaggcccccaacccctag

SEQ ID NO: 326907 - DNA, 1272 bp, Artificial Sequence
  derived and/or modified sequence
atgcccataacttgcccaacccagaacgaacccttcttgcgaactccccggaatagcaactatacatatcccatcaagcccgccatcgaaaactgggggtcagactttctctgcactgaatggaaggcttccaacagtgtcccaacttccgtgcaccagctcagacccgcagatattaaggtagtagcagccctgggcgactcattaactacagccgtgggcgccagacctaacaattccagcgacttaccaactagttggaggggactgagctggtcaattggcggtgatggaaaccttgaaacccatacaacactgcctaacattctcaaaaagttcaacccgtacttgctgggcttctctacgtccacgtgggaaggtacagccggtctgaatgtagctgccgaaggggcacgggcacgcgatatgcctgcccaggcttgggatttggttgaacggatgaagaacagtcccgacatcaacctggaaaaggattggaagctggtgaccctttttatcggcgtgaatgatctctgtcactattgcgagaaccccgaagcccacctggctactgagtacgtgcagcacatccagcaggcacttgacatccttagtgaagaattgccccgagcatttgttaacgtggtagaggtcatggaactcgcctcgttatatcaaggccagggcgggaagtgcgccatgttagcagcacaaaacaactgcacatgtctacgacacagccagagcagtctagagaagcaagagttgaagaaggtgaactggaacctgcagcatgggatctcaagcttctcctactggcaccaatacacccaacgggaggatttcgccgttgtggtgcagcctttttttcagaacacactcaccccccttaatgagaggggcgacaccgatttaactttcttctcagaggattgctttcacttttccgatcggggccacgctgagatggctatcgcactctggaacaatatgctggagccagtgggacggaagactacgagtaacaattttactcatagtcgggcaaaacttaagtgtcctagccccgaatcaccatacctttacacactcagaaattccaggcttctccccgatcaggcagaagaggccccagaggtcttgtactgggccgtgccggtggccgccggagtcggacttgtagtcggaattattggcaccgtcgtctggaggtgtaggcgcgggggccgaagagaagacccaccgatgagcctcagaacggtcgctttgtag

SEQ ID NO: 326908 - DNA, 1272 bp, Artificial Sequence
  derived and/or modified sequence
atgcccatcacctgccccacccagaatgagcccttcctgcggaccccaagaaacagcaactacacctaccccatcaagccagccatcgagaactggggcagtgacttcctgtgcacagagtggaaggccagcaacagcgtgcccacctctgtgcaccagctgcggcctgctgacatcaaggtggtggccgccctgggggacagcctgaccacagctgtgggcgcccggcccaacaacagcagtgacctgcccacctcctggaggggcctgtcctggagcattggaggagatggcaacctggagacccacaccaccctgcccaacatcctgaagaagttcaacccctacctgctgggcttcagcaccagcacctgggagggcacagctggcctgaatgtggccgctgagggcgcccgggcccgggacatgcctgcccaggcctgggacctggtggagaggatgaagaacagcccagacatcaacctggagaaggactggaagctggtgaccctcttcatcggcgtgaatgacctgtgccactactgtgaaaatcctgaggcccacctggccacagaatatgtgcagcacatccagcaggccctggacatcctgtctgaggagctgccccgggcctttgtgaatgtggtggaggtgatggagctggccagcctgtaccagggccagggcggcaaatgtgccatgctggccgcccagaacaactgcacctgcctgcggcacagccagagcagcctggagaagcaggagctgaagaaggtgaactggaacctgcagcacggcatcagcagcttctcctactggcaccagtacacccagcgggaggactttgctgtggtggtgcagcccttcttccagaacaccctgacccccctgaatgaaagaggagacacagacctgaccttcttcagcgaggactgcttccacttcagtgaccggggccatgctgagatggccatcgccctgtggaacaacatgctggagcctgtgggcaggaagaccaccagcaacaacttcacccacagccgggccaagctgaagtgccccagccctgagagcccctacctgtacaccctgaggaacagccggctgctgcctgaccaggccgaggaggcccctgaggtgctgtactgggccgtgcctgtggccgccggcgtgggcctggtggtgggcatcatcggcaccgtggtgtggcgctgccggcggggcggccggcgggaggacccccccatgagcctgaggacagtggccctgtag

SEQ ID NO: 326909 - DNA, 1272 bp, Artificial Sequence
  derived and/or modified sequence
atgcccatcacctgccccacccagaacgagcccttcctgcggaccccgaggaatagcaattacacttatcctatcaagccagccattgagaactggggctctgattttttgtgtacagagtggaaagccagtaactccgttccaacatcagtgcaccaactgcgtcccgctgatatcaaagttgtcgcggcgctaggcgacagcttgacaaccgccgtcggagccaggcctaataactccagtgatcttcctacgagctggagagggttgagctggagcatcggaggcgacggcaacttagaaactcacactaccctgcccaacattctgaagaagtttaatccatatctgctgggattttcaacttccacctgggaaggaacagccgggttgaatgtcgcagcagagggtgcccgggcgcgcgatatgccggcccaggcttgggatctggtagagaggatgaagaattcccctgacattaatctcgagaaagattggaagctggtgacactgtttataggagtcaatgacctgtgccactattgtgagaatcctgaggcacatctcgccaccgagtacgtgcagcatattcagcaggcacttgacatactttccgaagagctgccacgagctttcgtgaatgtggtcgaagttatggagctggcaagtctgtatcaaggtcagggaggaaagtgtgccatgctcgccgctcaaaacaactgtacttgcttacgacactcccagtcttctctggaaaagcaagaactgaagaaagtcaactggaatttgcagcacgggattagctcgttctcctactggcaccaatacacgcaacgggaggattttgctgtggtcgtccagcctttcttccagaacaccctgacaccactgaatgaaaggggagatacagacctaacattcttttcagaggactgttttcatttcagtgatagaggacacgccgaaatggccatagctctctggaataacatgctggagcccgtgggcaggaagactacaagtaacaactttactcacagccgcgcgaaattgaagtgtccatcccctgaaagcccctatctgtacaccctcagaaattctagactgctgccagatcaggcagaagaggccccggaggtgctctattgggccgtacccgtggctgccggggtaggcctcgtggtaggcattatcggcacagtggtctggaggtgccgcagggggggacgtcgtgaggatccccctatgtcactgaggaccgttgcactatag

SEQ ID NO: 326910 - DNA, 1672 bp, Artificial Sequence
  derived and/or modified sequence
ctttgttcaccatctccgcaatgccttggacgtcctgcatagagaggtgcccagagtcctggtcaacctcgtggacttcctgaaccccactatcatgcggcaggtgttcctgggaaacccagacaagtgcccagtgcagcaggccagcttgaaccacttggaagcaaaacagagaccctggacctgagagcagagatgcccatcacctgtcccactcagaatgagcccttcctgagaacccctcggaatagtaactacacgtaccccatcaagccagccattgagaactggggcagtgacttcctgtgtacagagtggaaggcttccaatagtgttccaacctctgtccaccagctccgaccagcagacatcaaagtggtggccgccctgggtgactctctgactacagcagtgggagctcgaccaaacaactccagtgacctacccacatcttggaggggactctcttggagcattggaggggatgggaacttggagactcacaccacactgcccaacattctgaagaagttcaacccttacctccttggcttctctaccagcacctgggaggggacagcaggactaaatgtggcagcggaaggggccagagctagggacatgccagcccaggcctgggacctggtagagcgaatgaaaaacagccccgacatcaacctggagaaagactggaagctggtcacactcttcattggggtcaacgacttgtgtcattactgtgagaatccggaggcccacttggccacggaatatgttcagcacatccaacaggccctggacatcctctctgaggagctcccaagggctttcgtcaacgtggtggaggtcatggagctggctagcctgtaccagggccaaggcgggaaatgtgccatgctggcagctcagaacaactgcacttgcctcagacactcgcaaagctccctggagaagcaagaactgaagaaagtgaactggaacctccagcatggcatctccagtttctcctactggcaccaatacacacagcgtgaggactttgcggttgtggtgcagcctttcttccaaaacacactcaccccactgaacgagagaggggacactgacctcaccttcttctccgaggactgttttcacttctcagaccgcgggcatgccgagatggccatcgcactctggaacaacatgctggaaccagtgggccgcaagactacctccaacaacttcacccacagccgagccaaactcaagtgcccctctcctgagagcccttacctctacaccctgcggaacagccgattgctcccagaccaggctgaagaagcccccgaggtgctctactgggctgtcccagtggcagcgggagtcggccttgtggtgggcatcatcgggacagtggtctggaggtgcaggagaggtggccggagggaagatcctccaatgagcctgcgcactgtggccctctaggcccgggggtgggtcctcaccctaaactccctatagccactctcttcaccgccctctgccccagccactcccggccaccaggacatgcttcaatgcctggtgccataggaagcccaggggacagtcacaacttcttggggcctgggcttcttccaggcctatgctcctggaatggatacatttaaataaagtccaaagctatttt

SEQ ID NO: 326911 - DNA, 1272 bp, Artificial Sequence
  derived and/or modified sequence
atgcccatcacctgccctacgcagaacgagcctttccttaggacgccgaggaactcaaactacacctatccaattaagcccgctatcgagaattggggaagtgatttcctctgcacagaatggaaagcaagcaattccgtgccgacatccgtgcaccagctgcgcccagctgatattaaggtggtcgccgcactgggtgatagcctcaccacagccgtgggcgctcggccaaataactctagcgacctgcccacaagctggcggggtctctcttggagcatcggcggtgatggcaatctggaaactcacacaactcttccaaatatacttaaaaaattcaatccctatctgctcggattttccactagcacatgggaaggcacagccggtctgaacgtagctgccgagggggcaagagcccgagatatgcctgcacaggcgtgggatctggtcgagagaatgaagaattctcctgatatcaatttggaaaaagattggaagctagtaacattattcatcggtgtgaatgacctgtgccactactgtgagaacccagaagcccacctcgctaccgagtatgtgcaacatatccagcaggccctggacattctatctgaagaactgcctagggcattcgtgaatgtggtagaggtaatggaacttgcctctctgtaccagggacagggcggaaagtgtgccatgctcgccgcacagaacaattgcacttgtctcaggcacagccagtcatccttagaaaagcaagagctcaaaaaagtcaactggaacttgcagcacgggatcagtagtttctcctactggcatcagtacactcagagagaggattttgctgtggtggtccaacccttctttcagaacaccctgactccactgaatgaacggggagacacggacctgacattcttttctgaggactgttttcacttctccgacagggggcatgctgaaatggcgatcgctctatggaacaacatgctggagccagtgggcaggaaaaccacttccaataatttcacacattcaagggctaaattgaagtgtcctagtccggaatcaccatacctctacaccctccggaatagtcgcctcctgccagaccaggccgaggaagctcccgaagtgctctattgggctgtgcctgtggctgccggtgtcgggctagtggtgggaattatcggtacagtcgtctggagatgccgaaggggcggtcgcagagaggatcccccaatgtcactgcggaccgtggcactctag

SEQ ID NO: 326912 - DNA, 1272 bp, Artificial Sequence
  derived and/or modified sequence
atgcccatcacctgccccacccagaacgagcccttcctgagaacccccagaaacagcaactacacctaccccatcaagcccgccatcgagaactggggcagcgacttcctgtgcaccgagtggaaggccagcaacagcgtgcccaccagcgtgcaccagctgagacccgccgacatcaaggtggtggccgccctgggcgacagcctgaccaccgccgtgggcgccagacccaacaacagcagcgacctgcccaccagctggagaggcctgagctggagcatcggcggcgacggcaacctggagacccacaccaccctgcccaacatcctgaagaagttcaacccctacctgctgggcttcagcaccagcacctgggagggcaccgccggcctgaacgtggccgccgagggcgccagagccagagacatgcccgcccaggcctgggacctggtggagagaatgaagaacagccccgacatcaacctggagaaggactggaagctggtgaccctgttcatcggcgtgaacgacctgtgccactactgcgagaaccccgaggcccacctggccaccgagtacgtgcagcacatccagcaggccctggacatcctgagcgaggagctgcccagagccttcgtgaacgtggtggaggtgatggagctggccagcctgtaccagggccagggcggcaagtgcgccatgctggccgcccagaacaactgcacctgcctgagacacagccagagcagcctggagaagcaggagctgaagaaggtgaactggaacctgcagcacggcatcagcagcttcagctactggcaccagtacacccagagagaggacttcgccgtggtggtgcagcccttcttccagaacaccctgacccccctgaacgagagaggcgacaccgacctgaccttcttcagcgaggactgcttccacttcagcgacagaggccacgccgagatggccatcgccctgtggaacaacatgctggagcccgtgggcagaaagaccaccagcaacaacttcacccacagcagagccaagctgaagtgccccagccccgagagcccctacctgtacaccctgagaaacagcagactgctgcccgaccaggccgaggaggcccccgaggtgctgtactgggccgtgcccgtggccgccggcgtgggcctggtggtgggcatcatcggcaccgtggtgtggagatgcagaagaggcggcagaagagaggacccccccatgagcctgagaaccgtggccctgtag

SEQ ID NO: 326913 - DNA, 88 bp, Artificial Sequence
  derived and/or modified sequence
agcaacttcagcaaagtctcaggatacaaaatcaatgagcaaaaatcacaagcattcttacacaccaataacagacaaacagagagcc

SEQ ID NO: 326914 - protein, 573 aa, Artificial Sequence
  derived and/or modified sequence
MGKCLSCCKEDQSFQRCSPEDQVSTDAQHRGASSISQPSISLGHKTSYSPVTHKVNAAKASRRLLSVSSPSFSERRYSLFVGFQKRNASPYWQQSRANFDSEEDTGFTDIKSSSDHCGSFISRRRRFSSRKLSIVSYYKSAIFFDPQASGQNVFNLNEIEIFSKTSSNTDAKKHITISAPEYNTKNFKNFETNTTSPAFGNTIDTASYQQSTSSFFSLASDISSPDQQNGIANDIQQRGQLCKDLKDFLHPRPESYSTGHSPIMIPQHPSQSGTFPFLHKAGFSSSYKNSGCFIPPQSELTSGLFEDEDFAVLFQDEDRSSPIEIPKIRYITANTDTEEQSFPVPKAFNTRVEELNLDVLLQKVDHLRMSESGKSESFELLRDHKEKFRDEIEFMWRFARAYGDMYELSTNTQEKKHYANIGKTLSERAINRAPMNGHCHLWYAVLCGYVSEFEGLQNKINYGHLFKEHLDIAIKLLPEEPFLYYLKGRYCYTVSKLSWIEKKMAATLFGKIPSSTVQEALHNFLKAEELCPGYSNPNYMYLAKCYTDLEENQNALKFCNLALLLPTVTKEEL

SEQ ID NO: 326915 - protein, 150 aa, Artificial Sequence
  derived and/or modified sequence
  misc_feature (1)..(1): Xaa can be any naturally occurring amino acid
XVLCGYVSEFEGLQNKINYGHLFKEHLDIAIKLLPEEPFLYYLKGRYCYTVSKLSWIEKKMAATLFGKIPSSTVQEALHNFLKAEELCPGYSNPNYMYLAKCYTDLEENQNALKFCNLALLLPTVTKEDKEAQKEMQKIMTSLKRLRKTK

SEQ ID NO: 326916 - protein, 126 aa, Artificial Sequence
  derived and/or modified sequence
MISFHVIFLSLGRGKLFLPVNFCFLKLKNSQVRIPKDFTCNLHVLFRTVQGEDRNTMFRGHWSIYSRNFPLAVVPAYVTEDGKNTSHRASGQFCNALSQGEIPSSLQLVNSYALEPRTDMPCNFLT

SEQ ID NO: 326917 - DNA, 381 bp, Artificial Sequence
  derived and/or modified sequence
atgatctcattccatgtgatctttctgtcactgggcagaggcaaactgttcctgcccgtcaacttctgctttcttaagctcaagaactctcaggtcaggatccctaaggattttacctgcaacctgcatgtcctcttcaggacagtccaaggcgaggatagaaacaccatgttcagaggacactggagcatctattcccggaactttcccttggcggtagttccggcttatgtaaccgaagacgggaagaatacaagccacagagcctcaggacaattttgcaacgccctatcgcagggggaaattccctctagcctccaactcgtgaacagctatgctttagaacccaggactgacatgccctgtaactttctgacctag

SEQ ID NO: 326918 - DNA, 381 bp, Artificial Sequence
  derived and/or modified sequence
atgatttcatttcacgtcatttttctgtccctggggcgtggaaagctcttcctcccagtaaacttttgttttctcaagctgaaaaactctcaagtccgaattccaaaggactttacatgcaatctgcacgtgctcttccggacggtccaaggtgaggatcggaataccatgttcagaggccactggtctatctacagtcgaaatttccccctcgcagtcgtacctgcttatgtcacagaagacggaaagaacacctcgcatagagcctccggccagttttgcaacgcactgtctcagggcgaaattccaagttccttacagctggtaaatagttacgctttggagcccaggaccgatatgccatgtaatttcctcacatag

SEQ ID NO: 326919 - DNA, 381 bp, Artificial Sequence
  derived and/or modified sequence
atgatctccttccacgtgatctttctgtcacttggtcggggtaaactattcttacctgtcaatttctgctttcttaaacttaaaaactcccaagttaggatcccgaaagactttacatgtaatttgcacgttctcttccgtacagtgcagggtgaggatcgaaacaccatgttcagggggcactggagcatttacagtagaaacttcccgctcgctgttgtccccgcctacgtgactgaagacggcaagaatactagtcatagagcttccggccagttctgcaatgctctttctcaaggcgaaataccttcctccctgcaattggtgaatagctatgccctcgaaccccggactgacatgccttgtaactttctgacatag

SEQ ID NO: 326920 - DNA, 381 bp, Artificial Sequence
  derived and/or modified sequence
atgatttcattccatgtaatatttttgtcattaggaagaggcaagttatttttacctgtcaatttctgttttttgaaattgaaaaattctcaggtacgaatcccaaaagactttacatgcaacctccatgtcctattcaggactgttcaaggagaagacagaaacaccatgtttagaggtcattggtccatctactctagaaacttccccttggcagtggtccctgcctatgttacagaagacggcaaaaatacgagccatcgtgcatctggccagttctgcaatgctctatcccagggggaaattccttcctcactccagctggtgaacagctatgccctggagcccaggacggacatgccttgtaactttttaacttag

SEQ ID NO: 326921 - RNA, 381 nt, Artificial Sequence
  derived and/or modified sequence
augauuucauuucacgucauuuuucugucccuggggcguggaaagcucuuccucccaguaaacuuuuguuuucucaagcugaaaaacucucaaguccgaauuccaaaggacuuuacaugcaaucugcacgugcucuuccggacgguccaaggugaggaucggaauaccauguucagaggccacuggucuaucuacagucgaaauuucccccucgcagucguaccugcuuaugucacagaagacggaaagaacaccucgcauagagccuccggccaguuuugcaacgcacugucucagggcgaaauuccaaguuccuuacagcugguaaauaguuacgcuuuggagcccaggaccgauaugccauguaauuuccucacauag

SEQ ID NO: 326922 - RNA, 381 nt, Artificial Sequence
  derived and/or modified sequence
augaucuccuuccacgugaucuuucugucacuuggucgggguaaacuauucuuaccugucaauuucugcuuucuuaaacuuaaaaacucccaaguuaggaucccgaaagacuuuacauguaauuugcacguucucuuccguacagugcagggugaggaucgaaacaccauguucagggggcacuggagcauuuacaguagaaacuucccgcucgcuguuguccccgccuacgugacugaagacggcaagaauacuagucauagagcuuccggccaguucugcaaugcucuuucucaaggcgaaauaccuuccucccugcaauuggugaauagcuaugcccucgaaccccggacugacaugccuuguaacuuucugacauag

SEQ ID NO: 326923 - protein, 2530 aa, Artificial Sequence
  derived and/or modified sequence
MTFRATDSEFDLTNIEEYAENSALSRLNNIKAKQRVSYVTSTENESDTQILTFRHITKAQEKTRKRQQPIKLEPLPVLKVYQDHKQPEYIHEQNRFQLMTAGIIKRPVSIAKKSFATSSTQFLEHQDAVKKMQIHRPYVEVFSPSPPKLPHTGIGKRGLFGTRSSAYPKYTFHDREEVVKANIRDPLQIIKIIRENEHLGFLYMIPAVPRSSIEYDTYNLKVVSYENINKNDYYTISQRAVTHIYNEDIEFIEIDRWEQEYLYHRELTKIPIFSLFRKWKAFSVWRKNVRSKKITGCQKSLQKNLFIVNPHLRPALLKINELCYHLSFMGLCYIEKCHTYTLQEFKAAQVIRLAEVTERLGEFRNEAKYVVRRACRFALRAAGFVPDDCAFGPFEDYHKVQSSGSFINTPHELPTYGDSEKMTYTEQASKRHYCMRLTCFIRLNDYLIENTMHILTVNAVNSLLNHLTDKLKRTPSADVIQKWITEEKPEVPDKKGTLMVEKQEEDESLIPMFLTELMLTVQSLLFEPSLEDFLDGILGAVNHCQNTVLSVPNLVPDSYFDAFTSPYINNKLEGKTCGTGPSLAAVFEDDKNFHTIISQIKETIQAAFESARIYAATFEKFQIFFKENESLDLQALKLQEPDINFFSEQLEKYHKQHKDAVALRPTRNVGLLLIDTRLLREKLIPSPLRCLEVLNFMLPRQSKKKVDAIIFEAQDAEYKLEFVPTTTTEYVHSLLFLDEIQERIESLEDEGNIVTQMYKLMEQYQVPTPPEDFAVFATMKPSIVAVRNAIDKSVGDRESSIKQFCVHLGSDLEELNNEVNEVKLQAQDPQILDISADQDKIRLILNNLQSVLADLQKRAFQYKSYQKNFKVEVSKFEALEEVSAELKLKQLLWDSFSEWDKLQQEWLKSKFDCLDPEVLNGQVSKYAKFVTQLEKGLPPNSVVPQLKYKVEKMKEKLPVIIDLRNPTLKARHWAAIEQTVDATLVDAEIPLTLERLSQLHVFDFGQEIQDISGQASGEAALEAILKKVEDSWKTTEFVILPHRDSKDVFILGGTDDIQVLLDDSTINVATLASSRYLGPLKTRVDEWQKQLALFNQTLEEWLTCQRNWLYLESIFNAPDIQRQLPAEAKMFLQVDKSWKEIMRKVNRLPNALRAATQPGLLETFQNNNALLDQIQKCLEAYLESKRVIFPRFYFLSNDELLEILAQTRNPQAVQPHLRKCFDSISKLEFALMPPAEGKIPGIDGEPEKVYTNDILAMLSPEGERVSLGKGLKARGNVEEWLGKVEEAMFTSLRRLCKAAIADYQGKLRTDWVVAGHPSQVILTVSQIMWCRDLTECLETEHSNHIQALKNFEKVNFERLNALAAIVQGSLPKLHRNILTALITIDVHARDIVTELVQSKVETVESFDWQRQLRYYWDIDLDNCVARMALSQYTYGYEYLGACPRLVITPLTDRCYLCLMGALQLDLGGAPAGPAGTGKTETTKDLAKALAIQCVVFNCSDGLDYKMMGRFFSGLAQSGAWCCFDEFNRIDIEVLSVIAQQLITIRNAKAAKLSRFMFEGREIKLVMTCAAFITMNPGYAGRTELPDNLKALFRPFAMMVPNYALIAEVILYSEGFESSKILARKMTQMYKLCSEQLSQQDHYDFGMRAVKSVLVMAGSLKRENPDLNEDVVLIRALQDSNLPKFLTDDALLFSGIISDLFPGVQIPEHDYGILQSTIVDVMNRQNLQPEMCMVRKVIQFYETMLVRHGVMLVGPTGGGKTTVYRILAETLGNLQKLGIENSFYQAVKTYVLNPKSITMGELYGEVNNLTLEWKDGLMALSVRAAVNDTSEDHKWIISDGPVDALWIENMNTVLDDNKMLCLANSERIKLTPQIHMLFEVQDLRVASPATVSRCGMVFVDPEELKWMPYVKTWMKGISKKLTEETQEYILNLFQRYVDEGLHFINKKCSQAIPQVDISKVTTLCCLLESLILGKDGVNLAMEQTKLNTILCQTFVFCYLWSLGGNLTENYYDSFDTFIRTQFDDNPDARLPNSGDLWSIHMDFDTKRLDPWERIIPTFKYNRDVPFFEMLVPTTDTVRYGYLMEKLLAVKHSVLFTGITGVGKSVIAKGLLNKIQESAGYVPVYLNFSAQTSSARTQEIIESKLERKRKNILGAPGNKRIVIFVDDLNMPRLDRYGSQPPIELLRQYQDFGGFYDRNKLFWKEIQDVTIISACAPPGGGRNPVTPRFIRHFSMLCLPMPSEHSLKQIFQAILNGFLSDFPPAVKQTASSIVEASVEIYNKMSVDLLPTPAKSHYVFNLRDLSKCVQDKHFGIAIDLEYFLNKPIIFGDFIKFGADKADRIYDDMPDIEKTANVLQDYLDDYNLTNPKEVKLVFFQDAIEHVSRIARMIRQERGNALLVGVGGTGKQSLTRLAAHICGYKCLQIELSRGYNYDSFHEDLRKLYKMAGVEDKNMVFLFTDTQIVVEEFLEDINNILNSGEVPNLFEKDELEQVLAATRPRAKEVGISEGNRDEVGCARVVMWLYHKNVSSPFI

SEQ ID NO: 326924 - DNA, 7593 bp, Artificial Sequence
  derived and/or modified sequence
atgacgttccgagccacggattcagaattcgacctgaccaatatcgaggagtatgccgagaattcagccctatcacgcctcaacaatatcaaggcaaagcagcgcgttagttacgtgacgagcactgaaaatgagagcgatactcagatcctgacctttcgccacattactaaagcccaggaaaaaacccggaaacgccagcagccaatcaaacttgagccccttcccgtccttaaggtgtatcaagatcataagcagcccgaatacattcatgagcagaacaggttccagctgatgacagctgggattattaaaagacctgtatccattgccaaaaagtcattcgccacctcgagcacacagttcctggaacaccaagacgctgtaaaaaagatgcagatccatcgaccctatgttgaggtgttctccccgtccccgcctaagctgccccatactggaattggtaagaggggactgttcggtacacgctctagcgcatatccgaaatacaccttccatgatagggaagaagtggtcaaagcgaatatcagggacccgctccagatcatcaaaatcattagggagaatgagcatctgggattcctgtatatgataccagccgtcccccgcagtagcatcgagtacgacacatataacctcaaagtggttagctacgagaacatcaacaaaaatgattattacaccatttcccagcgagcagttacccacatttacaacgaagatatcgagttcatcgagattgatagatgggaacaggaatacctgtatcaccgggagttgacgaaaattccaatattctcattgttccggaaatggaaagctttctctgtatggaggaagaacgtgcgctccaagaagattacgggatgtcaaaagtcattgcaaaaaaacctattcatagtcaatccacacctgcggcctgctctactaaagattaacgagctgtgttaccatcttagctttatggggctgtgttatatcgagaagtgccacacatacacgctgcaggagttcaaagcagcacaagtcatcagactggcagaggtgaccgagagactgggcgaatttcgtaacgaagccaagtacgtggtgcgaagagcctgcaggtttgctttgcgggccgccggtttcgtccccgatgattgcgcctttggccccttcgaggactaccacaaagtgcagagttccggctcattcattaatacacctcatgaactgccgacttatggggacagtgaaaagatgacctatacagaacaagcatccaagaggcattattgtatgaggctgacgtgctttataaggcttaatgactacttaatcgaaaataccatgcacattctcaccgtcaacgccgtcaatagcctgctcaaccatctgaccgacaaacttaagagaaccccatcagcagatgtgattcagaaatggatcaccgaggaaaagcccgaagttcccgacaagaaaggcacactgatggtcgagaagcaggaggaagacgagagccttatccccatgttcttgaccgagttgatgctcaccgtgcagtccctactgtttgaaccgtcacttgaggattttctggacgggatcctgggggccgtcaatcactgccagaatacagtattatcggtccctaacctggtgccagactcctactttgacgcgttcacatctccatatattaataataaactggaaggcaaaacatgtggaacaggaccttctctggccgctgttttcgaagatgacaaaaatttccacactattatcagtcagattaaggagacaatccaggccgctttcgagagcgcccggatctatgccgcgactttcgagaagtttcaaattttctttaaggaaaacgaatctctcgatctgcaagcgctgaagcttcaggagcccgacatcaattttttctctgagcaacttgaaaagtatcacaaacagcataaagacgccgtggccctaaggcccaccagaaatgtcggcctgctgctcattgatacccggctgcttagggagaagctcatccctagcccactcagatgcttagaggtgttgaactttatgctaccacgacagtcaaaaaaaaaagtcgacgcaatcatttttgaagcccaggacgcagagtacaagctagaattcgtgcctactacaacaaccgaatatgtccattccctgctgtttcttgatgagatacaggaaagaattgaatcactcgaggatgagggaaatatcgtgacccaaatgtacaaactgatggagcagtaccaggtgcctactcccccggaagacttcgccgtgtttgccacaatgaagcctagtatcgtcgccgtgcggaacgctatcgataaatcagttggggaccgcgaaagcagtatcaagcaattttgtgttcacttggggagtgatctcgaagagctaaataatgaggtcaacgaggtcaaactccaggcccaggaccctcagatcctcgacatttcagccgatcaagataaaatccgactgatattgaataatctgcagagtgttcttgcagatctgcagaagcgggccttccagtacaagtcctaccagaaaaacttcaaagtggaggtttccaaattcgaggctctcgaggaggtgtccgccgaacttaagctgaagcagttgctttgggactccttctcagaatgggacaagcttcagcaggagtggctcaaaagcaaatttgactgtttggatcctgaggtgctgaatggccaagtttctaagtatgccaaattcgttacccagttagagaaaggactgccccctaacagtgtagtaccccagctcaagtacaaggtggagaagatgaaggaaaagctgccagtgatcattgatttacggaaccccaccctgaaggctcggcactgggccgctattgaacagactgttgatgctacacttgttgacgccgaaatcccactaactctggagaggcttagtcagctgcatgtgttcgatttcggtcaagagatccaagacatctccggacaggcaagtggggaagccgccctcgaggccatattgaagaaggtggaggactcctggaagaccacagagttcgtgattctgccacatagagattctaaagatgtcttcattctgggaggaacagatgatattcaggtgcttcttgatgactcaactattaacgttgctacactcgcctcgtccaggtacctgggccccctgaagaccagagtcgacgagtggcagaagcagttagccttgtttaatcagactctggaggagtggctcacatgtcagcggaactggctctacttggagtctatttttaacgcccccgacattcaacggcaactgcctgcagaagctaagatgttcctgcaggtcgataaatcatggaaagaaatcatgcgcaaggttaatcgtctgcctaacgccttaagggctgcaactcagcccggactgttggagacttttcagaacaataatgccctcttagaccagatacagaaatgcctcgaagcctatctggaatcaaagcgcgtcatctttccccgattctacttcctgagcaatgacgagctgctggagatcctggcacagactagaaaccctcaagccgtccagccccacctgagaaagtgcttcgattccatttcaaagcttgagtttgctctgatgccaccagctgagggaaaaatccccgggattgacggcgagcccgaaaaggtttacactaatgatatccttgccatgctgtctccagagggagagcgggtcagcttgggcaaagggctcaaggcccgcggcaacgtggaggagtggctcgggaaggtcgaagaagctatgtttacctctctgagaagactgtgtaaggccgccattgcagactaccagggcaaactgagaactgactgggttgtagcaggacacccctcccaggtgatccttacagtgagtcaaataatgtggtgcagagacctgaccgaatgtctagaaacagaacattccaaccacatccaggccctcaaaaactttgagaaggttaactttgagcgcctgaatgcactagccgcaatcgtgcaggggtccctgccaaagctgcatcggaatatcctaaccgctctcattaccattgatgtgcatgcccgagatattgtgacagagctggttcaaagcaaagttgagacagtcgaatcttttgactggcagcgtcagctgagatactactgggacatagatctggacaattgtgttgcccgtatggccctttctcagtatacctacggatatgagtacctcggcgcctgcccacgcctggtgatcacgcctctcaccgaccggtgctacctgtgcttaatgggagcattacagttggacctgggcggggctccagcaggaccagccggaaccggcaaaaccgagacaacaaaagatctcgccaaagcactggctattcagtgcgtggtgtttaattgctctgacggactggactataaaatgatgggccgcttctttagtggactggcccagagcggtgcctggtgctgcttcgacgaatttaatagaattgacatcgaagtgttatccgtaatcgcgcagcagctcatcacgattcggaacgcaaaggcagccaagttgtcgagattcatgtttgaaggccgcgagattaaacttgtcatgacatgcgccgcgtttattactatgaacccaggctacgccggccggaccgaacttcctgataatctgaaggcgctttttaggccgtttgctatgatggtcccaaactacgcactaatcgccgaagttatcctgtactccgagggctttgaatcttccaagatcctggcacggaaaatgactcagatgtacaagctttgttctgaacagctgtctcagcaggaccactacgacttcggtatgcgagccgtaaaatccgtgctcgtgatggcagggtcactcaagcgagagaacccggatttaaatgaagatgtggttctgataagagccctgcaggattcaaacctccccaagtttctgactgacgacgcacttcttttttcaggcataatatccgacttatttcctggtgtgcagatcccagaacacgactatggcattttgcagtctaccatagtagacgtgatgaaccgtcagaatctgcagcctgaaatgtgcatggttaggaaggttattcaattttacgaaactatgctcgtccggcatggggtgatgctagtaggtcccaccggggggggcaaaaccacggtgtaccggatcctagcagagacacttggtaatcttcagaaattaggaattgaaaattccttctatcaggctgttaaaacatatgtgctgaaccctaagtcaattacaatgggagaattgtatggtgaggttaataacctgacccttgagtggaaagatgggctaatggccctgagtgtcagagctgccgtgaacgatacgtccgaggatcacaagtggattatcagcgatggtcctgttgacgccctctggatcgaaaacatgaatacggttcttgatgacaataagatgctgtgcctggcaaacagcgaacgcatcaagctcacgccacaaatccatatgcttttcgaggtgcaggaccttcgtgtggccagcccagccacggttagtaggtgcgggatggttttcgtagatcctgaggagctgaaatggatgccctacgttaagacttggatgaagggcatttccaagaagctcacagaggaaacccaggagtatatactcaatctgtttcaacgttacgtggacgaggggctgcacttcatcaataagaagtgcagtcaggcgattccgcaggtggacatcagcaaggtaacaactctgtgttgtttgctggaatcactgatcctcggaaaggacggcgtcaacctggctatggaacaaactaagctgaacacaattttgtgccagacgttcgttttctgttacctttggtctctcgggggcaatcttaccgagaattattacgactcatttgacaccttcataagaacccagttcgatgacaatcctgatgcgcgcctcccaaactctggcgatctgtggagtattcacatggatttcgacaccaagaggctggacccctgggaacgaattatcccaaccttcaaatacaaccgggacgttccctttttcgaaatgctggtgcctaccactgataccgtgaggtacgggtatctgatggaaaagctcctggccgttaaacactccgttctctttacggggatcaccggcgtggggaagagcgtgattgccaagggtcttctgaacaaaatacaggagagcgccggctatgtgcccgtatatctcaactttagcgcgcaaacgagctccgcaagaacccaggagatcattgagagtaagcttgagcggaagcgaaagaacattctaggcgcccctgggaacaagcggatcgtcattttcgtagatgacttgaatatgcccaggctcgatagatacggtagtcagcctcctatagagttactgaggcagtatcaagatttcggcggattttatgatcgaaacaagctcttttggaaagagattcaggacgtaaccatcatcagcgcctgtgcaccaccgggcggggggaggaaccccgttacgcctcgattcattaggcacttttcaatgttatgtctgcccatgccttccgaacacagtctcaagcaaatctttcaggcgattctgaacggctttctgtctgactttcctcctgcagtcaaacaaaccgccagttcaattgtggaagcttctgttgagatctacaacaagatgagtgttgacctcttgcccacccccgcaaagtcccattacgtctttaaccttcgggacttgtcaaagtgcgtccaggacaagcattttgggatagccatcgacttagaatacttccttaataagccaattattttcggagatttcatcaagtttggggcagacaaggcggaccgaatctatgatgatatgcctgatatcgaaaagactgccaatgtgctacaagactacctggatgattacaatttgaccaatcctaaggaagtcaaacttgtctttttccaggacgcaattgagcatgtgagtagaattgccaggatgattaggcaggagcgcggaaatgccctactggtaggtgtaggaggtaccggcaagcagtcgctcacccgcctcgcagctcacatctgcgggtataaatgcctgcagatcgaactgtctaggggatacaattacgacagctttcacgaggatttgcgcaagttatataaaatggctggagttgaagacaagaatatggtgttcctgtttaccgatactcagatcgtagttgaggagtttctcgaagatatcaataatattcttaacagcggagaggttccaaacctgtttgaaaaggacgagctggaacaggtattagccgctacaagaccacgcgcgaaagaggtgggcatctcggagggaaacagggacgaagtcggctgcgctagagttgtgatgtggctgtatcacaagaatgtgtcctctccctttatttag

SEQ ID NO: 326925 - DNA, 7593 bp, Artificial Sequence
  derived and/or modified sequence
atgaccttccgggccacagacagcgagtttgacctgaccaacatcgaggagtatgcagagaacagcgccctgagccggctgaacaacatcaaggccaagcagagggtgtcctatgtgaccagcacagaaaatgaaagtgacacccagatcctgaccttccgccacatcaccaaggcccaggagaagaccaggaagaggcagcagcccatcaagctggagcccctgcctgtgctgaaggtgtaccaggaccacaagcagcctgagtacatccacgagcagaaccgcttccagctgatgacagctggcatcatcaagaggcctgtgtccatcgccaagaagagctttgccaccagcagcacccagttcctggagcaccaggatgctgtgaagaagatgcagatccaccggccctacgtggaggtgttcagccccagcccccccaagctgccccacacaggcatcggcaagaggggcctgtttggcaccaggagcagcgcctaccccaagtacaccttccatgaccgggaggaggtggtgaaggccaacatccgggaccccctgcagatcatcaagatcatcagagaaaatgagcacctgggcttcctgtacatgatcccagctgtgcccaggagcagcattgaatatgacacctacaacctgaaggtggtgtcctatgagaacatcaacaagaatgactactacaccatcagccagagagctgtgacccacatctacaatgaagatattgagttcatcgagattgaccgctgggagcaggagtacctgtaccaccgggagctgaccaagatccccatcttcagcctcttcaggaagtggaaggccttctctgtgtggaggaagaatgtgcgcagcaagaagatcaccggctgccagaagagcctgcagaagaacctcttcatcgtgaacccccacctgcggcctgccctgctgaagatcaatgagctgtgctaccacctgtccttcatgggcctgtgctacatcgagaagtgccacacctacaccctgcaggagttcaaggccgcccaggtgatccggctggccgaggtgacagagcggctgggggagttcagaaatgaggccaagtatgtggtgcggcgggcctgccgctttgccctgcgggccgccggctttgtgcctgatgactgtgccttcggcccctttgaggactaccacaaggtgcagagcagcggcagcttcatcaacacccctcatgagctgcccacctacggggacagcgagaagatgacctacacagagcaggccagcaagaggcactactgcatgaggctgacctgcttcatccggctgaatgactacctgattgagaacaccatgcacatcctgactgtgaatgctgtgaacagcctgctgaaccacctgacagacaagctgaagaggacccccagcgcagatgtgatccagaagtggatcacagaggagaagccagaggtgcctgacaagaagggcaccctgatggtggagaagcaggaggaggatgagagcctcatccccatgttcctgacagagctgatgctgactgtgcagagcctgctgtttgagcccagcctggaggacttcctggatggcatcctgggcgctgtgaaccactgccagaacacagtgctgtctgtgcccaacctggtgcctgacagctactttgatgccttcaccagcccctacatcaacaacaagctggagggcaagacctgtggcaccggccccagcctggccgctgtgtttgaagatgacaagaacttccacaccatcatcagccagatcaaggagaccatccaggccgcctttgagagcgcccgcatctatgctgccacctttgagaagttccagatcttcttcaaggaaaatgaaagcctggacctgcaggccctgaagctgcaggagccagacatcaacttcttcagcgagcagctggagaagtaccacaagcagcacaaggatgctgtggccctgcggcccaccagaaatgtgggcctgctgctgattgacacccggctgctgcgggagaagctgatccccagccccctgcgctgcctggaggtgctgaacttcatgctgccccggcagagcaagaagaaggtggatgccatcatctttgaggcccaggatgctgagtacaagctggagtttgtgcccaccaccaccacagaatatgtgcacagcctgctcttcctggatgagatccaggagcgcatcgagagcctggaggatgagggcaacatcgtgacccagatgtacaagctgatggagcagtaccaggtgcccaccccaccagaagattttgctgtgtttgccaccatgaagcccagcatcgtggccgtgagaaatgccatcgacaagtctgtgggggaccgggagagcagcatcaagcagttctgtgtgcacctgggcagtgacctggaggagctgaacaatgaggtgaatgaggtgaagctgcaggcccaggacccccagatcctggacatctctgctgaccaggacaagatccgcctcatcctgaacaacctgcagagcgtgctggccgacctgcagaagagggccttccagtacaagagctaccagaagaacttcaaggtggaggtgtccaagtttgaggccctggaggaggtgtctgctgagctgaagctgaagcagctgctgtgggacagcttcagcgagtgggacaagctgcagcaggagtggctgaagagcaagtttgactgcctggaccctgaggtgctgaatggccaggtgtccaaatatgccaagtttgtgacccagctggagaagggcctgccccccaacagcgtggtgccccagctgaagtacaaggtggagaagatgaaggagaagctgcccgtcatcatcgacctgaggaaccccaccctgaaggcccggcactgggccgccatcgagcagacagtggatgccaccctggtggatgctgagatccccctgaccctggagcggctgagccagctgcacgtgtttgattttggccaggagatccaggacatcagcggccaggccagcggggaggccgccctggaggccatcctgaagaaggtggaggacagctggaagaccacagaatttgtgatcctgccccaccgggacagcaaggatgtgttcatcctgggcggcacagatgacatccaggtgctgctggatgacagcaccatcaacgtggccaccctggccagcagccgctacctgggccccctgaagaccagggtggatgagtggcagaagcagctggccctcttcaaccagaccctggaggagtggctgacctgccagaggaactggctgtacctggagagcatcttcaatgccccagacatccagaggcagctgcctgctgaggccaagatgttcctgcaggtggacaagtcctggaaggagatcatgaggaaggtgaaccggctgcccaatgccctgcgggccgccacccagcccggcctgctggagaccttccagaacaacaatgccctgctggaccagatccagaagtgcctggaggcctacctggagagcaagagggtcatcttcccccgcttctacttcctgagcaatgatgagctgctggagatcctggcccagaccaggaacccccaggccgtgcagccccacctgaggaaatgttttgacagcatcagcaagctggagtttgccctgatgcctcctgctgagggcaagatccctggcattgatggagagcctgagaaggtgtacaccaatgacatcctggccatgctgagccctgagggggagcgggtgtccctgggcaagggcctgaaggcccggggaaatgtggaggagtggctgggcaaggtggaggaggccatgttcaccagcctgcggcggctgtgcaaggccgccatcgctgactaccagggcaagctgaggacagactgggtggtggccggccaccccagccaggtgatcctgactgtgtcccagatcatgtggtgccgggacctgacagaatgtctggagacagagcacagcaaccacatccaggccctgaagaactttgagaaggtgaactttgagcggctgaatgccctggccgccatcgtgcagggcagcctgcccaagctgcacaggaacatcctgacagccctgatcaccattgatgtgcacgcccgggacatcgtgacagagctggtgcagagcaaggtggagaccgtggagagctttgactggcagaggcagctgcgctactactgggacatcgacctggacaactgtgtggccaggatggccctgagccagtacacctacggctatgagtacctgggcgcctgcccccggctggtgatcacccccctgacagaccgctgctacctgtgcctgatgggcgccctgcagctggacctgggcggggccccagctggccctgctggcaccgggaagacagagaccaccaaggacctggccaaggccctggccatccagtgtgtggtgttcaactgcagtgatggcctggactacaagatgatgggccgcttcttcagcggcctggcccagagcggggcctggtgctgctttgatgagttcaacagaattgatattgaggtgctgtctgtgattgcccagcagctgatcaccatcagaaatgccaaggccgccaagctgagccgcttcatgtttgagggccgggagatcaagctggtgatgacctgtgccgccttcatcaccatgaaccctggctacgccggccgcacagagctgcctgacaacctgaaggccctcttccggccctttgccatgatggtgcccaactatgccctgattgctgaggtgatcctgtacagcgagggctttgagagcagcaagatcctggccaggaagatgacccagatgtacaagctgtgcagcgagcagctgagccagcaggaccactatgactttggcatgagagctgtgaagtctgtgctggtgatggccggcagcctgaagcgggagaacccagacctgaatgaagatgtggtgctgatccgggccctgcaggacagcaacctgcccaagttcctgacagatgatgccctgctcttcagcggcatcatcagtgacctcttccctggggtgcagatccctgagcatgactatggcatcctgcagagcaccatcgtggatgtgatgaaccggcagaacctgcagcctgagatgtgcatggtgaggaaggtgatccagttctatgagaccatgctggtgagacatggagtgatgctggtgggccccactggaggcggcaagaccaccgtgtaccgcatcctggccgagaccctgggcaacctgcagaagctgggcattgaaaattccttctaccaggccgtgaagacctacgtgctgaaccccaagagcatcaccatgggagagctgtatggagaggtgaacaacctgaccctggagtggaaggatggcctgatggccctgtctgtgcgggctgctgtgaatgacaccagcgaggaccacaagtggatcatcagtgatggccctgtggatgccctgtggattgagaacatgaacacagtgctggatgacaacaagatgctgtgcctggccaacagcgagcgcatcaagctgaccccccagatccacatgctgtttgaggtgcaggacctgcgggtggccagccctgccaccgtgagccgctgtggcatggtgtttgtggaccctgaggagctgaagtggatgccctacgtgaagacctggatgaagggcatcagcaagaagctgacagaggagacccaggagtacatcctgaacctcttccagagatatgtggatgagggcctgcacttcatcaacaagaagtgcagccaggccatcccccaggtggacatcagcaaggtgaccaccctgtgctgcctgctggagagcctcatcctgggcaaggatggagtgaacctggccatggagcagaccaagctgaacaccatcctgtgccagacctttgtgttctgctacctgtggagcctgggcggcaacctgacagagaactactatgacagctttgacaccttcatccgcacccagtttgatgacaacccagatgcccggctgcccaacagcggggacctgtggagcatccacatggactttgacaccaagaggctggacccctgggagcgcatcatccccaccttcaagtacaacagagatgtgcccttctttgagatgctggtgcccaccacagacacagtgcgctatggctacctgatggagaagctgctggccgtgaagcacagcgtgctcttcaccggcatcaccggggtgggcaagtctgtgattgccaagggcctgctgaacaagatccaggagagcgctggctacgtgcctgtgtacctgaacttcagcgcccagaccagcagcgcccggacccaggagatcatcgagagcaagctggagaggaagaggaagaacatcctgggcgcccctggcaacaagagaattgtcatctttgtggatgacctgaacatgccccggctggacagatatggcagccagccccccatcgagctgctgcggcagtaccaggactttggaggcttctatgacaggaacaagctgttctggaaggagatccaggatgtgaccatcatcagcgcctgtgcccctcctgggggcggcagaaatcctgtgaccccccgcttcatccgccacttctccatgctgtgcctgcccatgcccagcgagcacagcctgaagcagatcttccaggccatcctgaatggcttcctgagtgacttccccccagctgtgaagcagacagccagcagcatcgtggaggcctctgtggagatctacaacaagatgtctgtggacctgctgcccaccccagccaagagccactacgtgttcaacctgcgggacctgagcaaatgtgtgcaggacaagcactttggaattgccatcgacctggagtacttcctgaacaagcccatcatctttggagacttcatcaagtttggagctgacaaggctgaccgcatctatgatgacatgccagacatcgagaagacagccaacgtgctgcaggactacctggatgactacaacctgaccaaccccaaggaggtgaagctggtgttcttccaggatgccattgaacatgtgtccagaattgccaggatgatccggcaggagagaggaaatgccctgctggtgggcgtgggcggcaccgggaagcagagcctgacccggctggccgcccacatctgtggctacaagtgcctgcagatcgagctgagccggggctacaactatgacagcttccacgaggacctgaggaagctgtacaagatggccggcgtggaggacaagaacatggtgttcctgttcacagacacccagatcgtggtggaggagttcctggaggacatcaacaacatcctgaacagcggggaggtgcccaacctgtttgagaaggatgagctggagcaggtgctggccgccacccggccccgggccaaggaggtgggcatcagcgagggcaacagagatgaggtgggctgtgcccgggtggtgatgtggctgtaccacaagaatgtgagcagccccttcatctag

SEQ ID NO: 326926 - DNA, 7593 bp, Artificial Sequence
  derived and/or modified sequence
atgaccttccgggccaccgacagcgagttcgacctgaccaacatcgaggaatatgcggagaattctgccctttccaggctgaacaacataaaggcaaagcagcgtgtgagctatgtcaccagcacagagaatgaaagcgatacccaaatcctgacttttaggcacatcactaaggcgcaggagaagaccaggaaacgacagcagccaatcaagctagagccactacctgtgctgaaagtataccaggatcataaacagcctgaatacatacacgagcagaaccgatttcagttaatgacagctggcatcataaagcgccccgtaagtatcgccaaaaaatcgttcgcaaccagcagtacccaatttttagagcaccaagacgctgtgaagaaaatgcaaattcaccgaccctacgtggaggttttttcaccatctccccctaagctgcctcacacggggatcggtaagagaggactgtttggcaccaggtcctccgcttatccgaagtatacattccatgaccgggaggaggttgtaaaagccaatatccgcgacccactccagataatcaagataatccgcgagaacgagcacctgggctttctgtatatgattcccgccgtccctcggagctctatcgaatacgacacctataatctcaaagtggtaagctacgagaatatcaataagaacgactattacactatttctcagcgcgctgtcacccacatctataacgaggacatcgagtttatagagatcgatcgctgggaacaggaatacctgtatcacagggaactcacgaagatccccatttttagcctgtttcgcaaatggaaggcattcagcgtttggcgcaagaatgtgaggagcaaaaagattaccgggtgccagaaaagtctccagaaaaacctgtttattgttaacccgcacctgcgccccgcccttctgaagattaacgagctgtgttatcatttgagtttcatgggcctgtgctacattgagaagtgccacacttatacactgcaggagttcaaggctgctcaagtcattcggctagccgaggtcacggagaggttgggggaattcagaaatgaagccaagtatgtcgtccggcgagcatgcaggttcgctctgcgagcagcaggcttcgtgccggacgactgtgccttcggaccctttgaggattaccacaaggtgcagtcctccggttcgtttatcaatactcctcacgagctgcccacatatggcgatagcgaaaaaatgacctataccgagcaggcctcaaagagacactactgcatgcgactgacatgttttattcggttgaacgactaccttatcgaaaacaccatgcacatcttgacagtcaacgccgtaaactctttgttaaatcatcttactgacaagctgaagcgaactccttctgcagatgtgatccagaaatggattacggaagagaagcccgaggtccccgataaaaagggtacactgatggtggaaaagcaagaggaagacgagtcccttatccctatgttcctgaccgaattgatgctaactgttcagtctctcttgtttgaaccaagtttagaagatttcttagatggaatccttggagctgtgaatcattgccaaaatactgttctctcagtgcccaacctggttccagatagttactttgacgcttttacttcgccgtacattaacaataaactagaaggtaagacctgcggtacgggtccatccctcgcagctgtgttcgaggatgacaaaaacttccacactatcatctcccagattaaagagacgatccaagccgcgtttgagtccgctcggatctacgcggcgaccttcgaaaagttccaaatctttttcaaggaaaatgaatctctggacttacaggcacttaaactgcaggagccggacattaattttttcagtgagcagctcgagaagtaccataaacaacacaaagacgctgtagctctgcgccctacgcgaaatgtggggctgttactgattgacacacgtctcctaagagaaaagctgatcccatccccgcttcgctgtctcgaggtgttaaacttcatgcttccaagacagtcaaaaaaaaaagtggacgccattatttttgaggcccaagacgcagagtacaaattagaatttgtgccaactaccaccactgaatatgtacacagcctgctttttctcgacgagattcaggagaggatcgagtctctggaggatgagggtaacatcgtgacacagatgtacaaactgatggagcaataccaagttcccacccctcctgaggatttcgccgtttttgccaccatgaaaccctccatcgtagctgttaggaacgccatcgataagtcagtaggggaccgtgaaagctcaatcaaacagttctgcgtgcatctgggaagtgacttggaagaattgaacaacgaagttaacgaagttaaacttcaggctcaagatccgcagatcctagacatcagtgcagatcaagataagatccgactcattttgaacaacctgcaatccgttctggcagatctccagaaacgggcttttcaatataaatcctaccaaaaaaactttaaggttgaagtgagcaagtttgaagcgctagaggaggtgtccgccgagctgaaactgaaacagcttctgtgggactcattctccgaatgggataaactccagcaggaatggctgaaatctaagttcgattgcctggatcctgaggtccttaatggacaggtgtctaagtatgcgaaattcgtgacccagttggaaaagggcttacctccgaacagtgtggtaccgcagttgaagtacaaggttgaaaaaatgaaggaaaagctccctgtgatcattgacctgagaaacccaactttaaaagctagacactgggcagcgatcgagcagaccgtggatgcaacgttggtcgacgccgaaataccactcacacttgagaggctgtcccagctgcatgtcttcgacttcggccaagaaattcaagacatttctggacaagccagcggggaggccgccctggaggccattctcaagaaggtggaagatagctggaaaaccaccgaatttgtgattcttccacaccgagactctaaagacgtcttcatactcggcggcaccgacgacattcaggtcctgcttgacgattcaaccatcaacgtggccaccctagccagtagtcggtatctggggcccctaaagaccagagttgacgaatggcagaagcagctggcactctttaatcagaccctggaagagtggctgacctgtcagagaaactggttgtacctggagagcatcttcaacgcccctgacattcagcggcagctgcccgcagaggctaagatgttcttacaggtggacaagtcttggaaggagataatgcgaaaagtgaaccggctgcctaacgcactgcgcgccgcaactcagcctggactgctagagacatttcaaaacaacaacgcacttctcgatcaaatccagaagtgtcttgaagcttatttggagtcaaaacgtgtcatttttcctaggttctatttcctgtctaacgacgaacttttggaaatactcgcccaaacccgcaatcctcaggccgtgcagccacatttaaggaagtgttttgacagcatatccaaactcgagtttgcgctgatgccgccagccgaggggaagatcccagggatcgacggcgaaccagaaaaggtgtatacaaatgatatcctggctatgctttctcctgaaggagaacgagtatcccttgggaagggtcttaaagcccggggcaatgtcgaagaatggctcggaaaggtggaagaggccatgttcacatccctacgccgattatgcaaagccgcaattgccgattaccaggggaaactcaggaccgactgggtggtcgcaggccatccctctcaggttatcctaaccgtcagccagatcatgtggtgccgcgatttgaccgagtgcctggagaccgaacattctaatcatatccaagctctcaagaacttcgagaaggtgaatttcgaacggctgaatgcactggcggctatagtccaaggcagtctgccaaaactccacaggaatattttaacggctctgatcacgattgatgtccacgctagggacatcgtgaccgaactggtgcagtcaaaggtcgagaccgtggagtcttttgattggcagcgacaattacggtactactgggacatcgacctggacaattgcgtcgcccgtatggccttatcacagtacacatacgggtacgagtatttgggggcatgccctcgcctcgtgataactccactgaccgaccgatgttacttgtgtctcatgggtgcccttcaacttgaccttggaggagcccctgcaggaccagccggtactgggaaaacagaaactaccaaggatctcgccaaggccctggcgattcaatgcgtggtattcaattgttccgacggccttgattacaagatgatgggtcgctttttttccggcctcgcgcagtccggagcgtggtgctgctttgatgagttcaaccgcatagacatcgaggtgctgagcgttatcgcacagcagctcataactatacggaacgccaaggccgctaagctgagtagattcatgtttgaggggagagaaatcaagctggtaatgacctgtgcagcctttattaccatgaacccagggtatgccggccgcacagagcttccagacaatctcaaggcattattccgaccctttgccatgatggtgcctaattacgccctgatcgccgaggtgatcctgtattctgagggttttgagtcatccaaaatcctcgccaggaagatgacacagatgtacaagctgtgctcggagcagctcagtcagcaagatcactacgacttcgggatgcgcgccgtgaaaagcgtcctggttatggctggcagcttgaagcgcgagaatcctgatctgaatgaagacgtcgtgctcataagagctttacaggatagtaatcttcctaagttcctaacagatgatgccctcctgttttcgggcattatttcagaccttttccccggggtgcagatccctgagcacgattatgggatccttcagtctaccattgtagacgtgatgaacagacaaaacctgcagcctgaaatgtgcatggtgagaaaagtgattcagttctacgaaacaatgctggtgcgtcacggtgtgatgttggtgggccccaccggcgggggtaagaccaccgtatatcgaatcctcgcagaaactctgggtaacttacagaaactcggcattgagaactcattttaccaagcggtaaagacatacgtcctgaaccccaagtcaatcaccatgggagaactctatggggaggtcaacaatttgacactggagtggaaagacggacttatggctctcagtgtaagagcagctgttaacgatacatcagaggaccacaaatggattatatcagacggaccagtggatgctctgtggattgagaatatgaacacagtgcttgatgacaataaaatgctgtgcctggcgaattcagaaagaattaaactgacaccacagatccatatgttattcgaggtacaggacctgcgcgtcgccagcccagccactgtcagtcgatgcggcatggttttcgtcgacccggaagagttgaagtggatgccctatgtaaagacatggatgaaaggtattagcaagaaactcacagaggaaacccaggagtatattctgaacctcttccagcggtatgtggacgaagggctccattttatcaataaaaaatgttcacaagccattccccaggtagacattagtaaagtgactacactgtgctgtttgttggagagcctaatcctggggaaagatggagtgaacttggcaatggaacagactaagctgaatactattctctgccagacatttgtgttctgttatctatggtctctaggtggcaacctcactgaaaattattacgatagctttgatactttcatcaggacccagtttgacgataacccagacgcgcgtttacccaactcgggcgacctgtggagcattcacatggattttgacacaaaacgtcttgatccgtgggaacgcatcattccaacctttaagtataacagggatgtgccttttttcgaaatgctggttcctactactgacacagtgaggtacggatacctcatggagaagctgttagccgttaaacactcagttctctttaccggcatcaccggagttggtaaaagtgtgatcgcaaagggactccttaacaagatccaggaaagtgcggggtacgttcctgtatatctcaatttcagcgcccagacatcaagtgctaggacccaggaaataattgagagcaaactcgagcgaaagagaaagaacattctgggggccccaggaaataaacgcatcgtgattttcgtggacgatctgaacatgcctcgcctagaccggtatgggagccagcccccaattgagttgctgcggcagtatcaggatttcggcggcttctacgaccgcaacaagctgttctggaaagaaattcaggacgtgacaatcatttctgcttgcgcgccacccggtggcggtcgcaatcccgtcaccccccggtttatccgacattttagtatgctatgtcttcccatgccatccgagcactccctgaaacagattttccaggctattctaaacggatttttgagtgatttcccacctgcagtgaagcagactgccagcagcatcgtggaggcttcagtggagatttataacaaaatgtcagtggacctactcccgacacccgctaagagtcactatgtgttcaatttgcgtgatctgtcaaagtgcgtgcaggacaagcattttggcatcgccattgatctcgagtattttctgaataagccaattatttttggagactttatcaagttcggtgccgacaaagccgaccggatttacgacgacatgcctgacattgaaaaaaccgccaatgtgctccaggattatctggatgattacaatctgaccaaccctaaagaagttaaactggtatttttccaggatgccatcgaacacgtatcacgaatagcacgtatgatacggcaggagaggggcaatgcgctcctcgtgggagtgggcggcaccggcaagcagagtctgacgcgacttgctgcccacatatgtggctataagtgcttgcagattgagttaagtagaggttacaactacgacagctttcatgaagacctgagaaaactatacaaaatggctggcgtggaagacaaaaacatggtatttctcttcaccgatactcagatcgtagtcgaagagtttctggaagacattaataatattctgaattcaggggaggttcctaacttattcgaaaaggacgagttggagcaggtcctcgcagccacacgcccaagagcaaaagaggtaggaatcagtgaaggtaatagagacgaggtgggctgtgctagagtagtcatgtggctctaccacaagaacgtatccagcccctttatttag

SEQ ID NO: 326927 - DNA, 7592 bp, Artificial Sequence
  derived and/or modified sequence
atgacctttagggcaaccgactccgagttcgatctgaccaacatcgaggaatacgcagagaattctgcccttagccggctcaacaacatcaaagccaagcagagagtgagctacgtgacgtctaccgagaacgagtccgacacccaaatacttacatttaggcatatcactaaggcccaggaaaagactaggaagcgacagcaacccatcaaactggagcccctgcccgtgttgaaagtgtatcaggaccataagcaaccagagtatatccatgagcagaatcgatttcagctgatgacagcgggaataatcaaaaggcctgtgagcattgccaagaaaagcttcgcgacgtcaagcacacaattcttggagcatcaggatgctgtaaaaaaaatgcaaatccatcgcccttatgtggaggtgttcagcccctccccaccaaagttgccccatacagggatcggaaaaagagggctcttcggtaccaggtcaagtgcttatcccaagtacaccttccacgatcgggaggaagtggtcaaggccaacatccgggatcctctacagatcattaagattataagagagaacgagcatcttggctttctctatatgatccccgcagtgccaaggtcttccatcgaatacgatacctataacctgaaggtggtcagctatgaaaacataaacaagaatgattattacacaatcagccagagggctgtgacccatatatataacgaagacatagagttcattgaaatcgacagatgggaacaggagtacctataccatagagaactgacaaagatccccatcttcagtttatttcgcaaatggaaggctttcagtgtctggaggaaaaacgtgaggtccaagaagatcaccggatgccagaagtccctccagaagaacctttttatcgtgaacccacaccttcggccagcacttttgaaaatcaacgaattgtgttatcacctatcgttcatgggcctttgctatatcgaaaagtgccacacctacacgctacaggaattcaaggccgctcaggtcatccggctcgctgaagttacagagcggcttggtgaattccgcaacgaggccaaatatgtggttaggagagcatgtagattcgctcttagggcagctggattcgtgccagacgattgtgcgttcggccctttcgaggactaccataaggttcagagcagcggcagctttatcaacaccccacatgaattgccaacctatggtgacagcgaaaagatgacatatactgaacaggcgtctaagcgacattactgcatgaggcttacatgtttcatccggctcaacgattatctgattgagaatactatgcacattctgaccgtgaacgcggtgaactccctgctcaatcatttgaccgacaagttaaagcggacaccctcagccgatgtgatacaaaaatggattactgaagagaaaccagaagtccccgataaaaaaggcacactcatggtcgaaaaacaggaggaggacgagtcacttattcctatgtttttaacagagctgatgttgaccgtacagagtctgttattcgaaccatccttggaggactttttggacgggatcctgggggctgtgaatcactgccaaaacacggttctgtccgtcccaaatctggttcctgatagctatttcgacgcattcacatccccatatattaataataagttggagggcaaaacgtgcgggaccggcccttccttggccgcagtttttgaagatgacaagaattttcacaccattatttcccaaataaaagaaactatacaggctgctttcgagtctgctcgaatctatgccgctacgtttgagaagtttcagatttttttcaaagagaacgagtctctcgatctgcaggccctgaagttgcaggagcctgatatcaactttttctccgaacagttagaaaagtaccacaagcaacacaaagacgctgtggccctgagacccacccgtaacgtgggtcttctcctcatagacaccagattgctccgcgaaaaactgatcccttccccactccgatgcttggaggtgctgaactttatgttgccacgacagtccaagaaaaaagtggacgccattatttttgaagctcaagacgccgaatataagttggagttcgtgcccacgacaacaaccgagtacgtgcacagcctgttgtttctggacgaaattcaggaaagaattgagtcgctggaagacgagggaaatatcgtcactcaaatgtataagctgatggaacagtaccaggtccctacacctccggaggattttgcagtctttgctacaatgaagccctctatcgtggcagtgcggaacgctattgataaaagcgtgggagaccgggagagttctatcaaacagttctgtgtacacctgggctcagatttggaggagcttaataatgaagtcaacgaggtcaaactgcaggcccaggatcctcagattctggatattagtgcggaccaggacaagatcaggctgattttaaacaatctgcagtctgtgctggccgacttacaaaaaagagcattccagtacaaaagctatcagaaaaacttcaaagtggaggtgagcaagttcgaggcgctggaagaagtgtctgctgagctgaagctgaaacaactactctgggactctttttccgagtgggacaaactgcaacaagaatggttgaaatctaagtttgactgcctagaccctgaggtcctcaatggccaggtgtcaaagtacgccaagtttgtgacacagctcgagaagggcttgccccctaactcagtggtgccacagctcaaatacaaagtcgagaaaatgaaagaaaagctgccagtgattatcgacttacgcaatcccactttgaaggcgcgacactgggcagccatcgaacaaacagttgatgcgacactggtggacgctgaaataccattgacactcgagcgactaagccagttacatgtctttgacttcggccaggaaatacaggacatttcagggcaggctagtggcgaagctgccctggaggccatcctgaagaaagttgaggatagttggaaaactactgaatttgtcatcctgcctcaccgggattccaaggacgtgtttatcctcggtggcacggacgatatccaggtgctgctggacgactcaactatcaacgtagcaacattagcctctagtagatatctcgggccactgaaaacccgagtagatgaatggcagaaacaattagctttgtttaatcaaactcttgaggagtggctgacatgccaacggaattggctgtacctggagtcgatctttaatgctcccgacattcagagacaactgccggctgaagcgaagatgtttctgcaggtcgacaagagctggaaagagatcatgaggaaagttaatcgcctgccaaacgccctgagagctgccacccagccagggcttctagagactttccagaacaataatgctctgctggatcaaattcagaaatgcttagaggcttatttagagagcaaacgcgtgattttccctagattttacttccttagcaacgacgagctccttgaaattctggcccaaactcgtaatcctcaggctgtacagcctcatctgcggaagtgcttcgattcgatatcaaaattggaatttgccttaatgcccccagccgagggcaagatccccggaatcgacggagaaccagagaaagtgtacactaatgacatcctcgctatgctgtccccagaaggcgagagagtgtctctggggaaaggcttgaaagcccgaggcaacgtggaagaatggcttggcaaagtcgaggaagctatgttcacatccctgcggaggctgtgcaaagccgcaatcgccgactatcaaggcaaactccggaccgattgggtggtcgcgggacacccaagccaagtgatcctcaccgtctcgcagatcatgtggtgcagagatttaacagagtgcctggagaccgagcacagcaatcatattcaggcccttaagaattttgagaaggtgaattttgagaggctgaacgccctggccgctattgtgcagggttccttaccgaagctgcaccgcaacatcttgacagccttaattacgattgatgtccatgctcgggatatcgtgacggagctcgtgcagagcaaggtggaaactgttgaaagcttcgactggcaacgccaactgaggtattactgggatattgacctcgacaattgtgtcgcaagaatggctctttctcagtatacgtatggatacgaatacctgggtgcttgcccacgtcttgtaattactcctctcacagataggtgctacttatgcctaatgggggcactgcaactcgatctgggaggcgctccagctggtcccgcaggaacaggaaaaacagagaccacaaaggacttagcaaaagctctggctatccagtgcgttgtgttcaactgcagcgacgggctggattataaaatgatgggcaggttctttagcgggcttgcccagtcgggcgcatggtgttgcttcgatgagttcaatcgcattgatatcgaagtgctgagcgtaatagctcaacagttaatcacgattaggaatgctaaggctgccaagctatctaggttcatgtttgagggaagggagattaaactcgtgatgacgtgtgctgccttcatcacgatgaatccagggtacgccggaaggactgagctcccagataacctgaaagctttattcagaccatttgccatgatggtgcccaactacgcactgatcgccgaagtgatcctttacagcgagggtttcgaatccagcaaaatcttggcaagaaagatgacgcagatgtacaagttgtgttctgaacaactctcccagcaggaccactatgatttcggcatgagagccgtgaaatctgtccttgtcatggccggatctctgaaaagagagaacccagatctaaacgaggatgtggttcttatcagggcactgcaggatagcaatcttcctaagttccttacggatgacgcgcttctgtttagcggcattatttcggacctgtttccgggtgtacagattccagagcatgactacgggatcctgcagtcgaccatagtggatgtgatgaaccgccagaacctacaacccgaaatgtgcatggtgagaaaagtgatacagttttacgaaacgatgctggtccgacacggcgtaatgctggtcggccctacaggcggaggaaaaacaactgtttaccggatcttagctgagactttaggaaacctacaaaagctgggaatcgagaatagtttctatcaggcagtgaaaacgtacgtgctcaaccctaaatcgattacaatgggcgagctgtatggagaggtgaacaatctcacactcgaatggaaagacgggctgatggcgcttagcgtgagagccgctgtgaacgatactagtgaagatcacaagtggatcatcagtgacggaccagtagacgccttgtggatcgagaatatgaacacagtactggacgataataaaatgctgtgcctggcgaacagtgagcggataaagctgacacctcagatacatatgctattcgaagttcaagacctgagggtggctagtcctgcaaccgtgagcagatgtggcatggtatttgtggaccccgaagagttaaaatggatgccctatgtcaagacgtggatgaaaggcatatcgaaaaaattgaccgaagaaacacaagaatacatcctaaatctgttccagcgttatgtcgacgagggtttacatttcattaacaagaagtgctcacaggccattcctcaggtggatatcagcaaagtgacaaccttgtgttgcctgctcgagtctctgatcctcggaaaagatggggttaacttagccatggaacagaccaagctgaacacaattctgtgtcagacctttgtgttctgttacttgtggagtctggggggtaacctgaccgaaaactactatgacagcttcgacactttcatccgcacacagttcgatgacaatccagacgctcgcttgcctaattctggtgacctctggtcgattcacatggatttcgatacgaagaggttggacccgtgggaacgaatcatacctacttttaaatataaccgagatgtccctttcttcgagatgttggtacctaccacagataccgtgcgatatggctatctgatggagaagctcttggccgtcaaacattcagtgctgttcactgggattacgggagttggaaagagcgtcatagccaagggactcctcaacaagattcaggagtccgccggatacgtgcccgtctatctcaacttctctgcacaaactagtagtgctcgtacacaggaaattatcgagtcgaagttagaacgaaaaaggaaaaatattctgggagcgcctggcaacaaacgcatcgtgatatttgtggacgacctgaatatgccaagactggaccgctacggctctcagccaccaatcgagctgttacgtcagtatcaagattttggagggttttatgacagaaataagctgttctggaaagaaatccaggacgtaaccatcatttcagcctgcgcgccacccggagggggtcgcaatcctgtgactccaagattcatcagacatttctctatgctctgcctcccaatgccttctgagcacagcctcaaacagattttccaggcgatactgaacgggtttcttagtgacttccccccagccgttaaacagacagcgagcagcatcgtggaggcttcagtggaaatatataacaagatgtcagttgacctgttgccaacacccgctaagtctcactacgtcttcaatctgagagacctctctaaatgcgttcaagacaaacactttggcatagccattgacctcgagtactttcttaacaagccaataatctttggtgatttcattaagtttggagccgataaagccgaccgcatttatgatgatatgcccgatattgaaaagacggccaacgttttgcaggactatctggatgactataatttaacaaatccaaaggaggtgaagctggttttcttccaggatgcaattgaacacgttagccgcattgcacgcatgatccgccaagagagaggtaatgccctcctcgtcggcgttgggggaacaggcaaacaatctcttactagactcgcagcccacatttgtggatataagtgtctgcagatcgagctgtcaagagggtataattatgactctttccatgaggatttacgaaaactgtataaaatggccggagttgaggataagaacatggtgttcctctttacagacactcaaatagtagtggaagagttcctggaggacattaacaacatcctcaactcaggggaagtaccaaacctgttcgaaaaagatgaacttgagcaagttttggccgcaacgagaccgcgtgcaaaggaagtgggtatctcagaggggaatcgggatgaggtggggtgtgcccgagttgttatgtggctctaccacaagaacgtctctagccccttcattta

SEQ ID NO: 326928 - DNA, 7593 bp, Artificial Sequence
  derived and/or modified sequence
atgaccttcagagccaccgacagcgagttcgacctgaccaacatcgaggagtacgccgagaacagcgccctgagcagactgaacaacatcaaggccaagcagagagtgagctacgtgaccagcaccgagaacgagagcgacacccagatcctgaccttcagacacatcaccaaggcccaggagaagaccagaaagagacagcagcccatcaagctggagcccctgcccgtgctgaaggtgtaccaggaccacaagcagcccgagtacatccacgagcagaacagattccagctgatgaccgccggcatcatcaagagacccgtgagcatcgccaagaagagcttcgccaccagcagcacccagttcctggagcaccaggacgccgtgaagaagatgcagatccacagaccctacgtggaggtgttcagccccagcccccccaagctgccccacaccggcatcggcaagagaggcctgttcggcaccagaagcagcgcctaccccaagtacaccttccacgacagagaggaggtggtgaaggccaacatcagagaccccctgcagatcatcaagatcatcagagagaacgagcacctgggcttcctgtacatgatccccgccgtgcccagaagcagcatcgagtacgacacctacaacctgaaggtggtgagctacgagaacatcaacaagaacgactactacaccatcagccagagagccgtgacccacatctacaacgaggacatcgagttcatcgagatcgacagatgggagcaggagtacctgtaccacagagagctgaccaagatccccatcttcagcctgttcagaaagtggaaggccttcagcgtgtggagaaagaacgtgagaagcaagaagatcaccggctgccagaagagcctgcagaagaacctgttcatcgtgaacccccacctgagacccgccctgctgaagatcaacgagctgtgctaccacctgagcttcatgggcctgtgctacatcgagaagtgccacacctacaccctgcaggagttcaaggccgcccaggtgatcagactggccgaggtgaccgagagactgggcgagttcagaaacgaggccaagtacgtggtgagaagagcctgcagattcgccctgagagccgccggcttcgtgcccgacgactgcgccttcggccccttcgaggactaccacaaggtgcagagcagcggcagcttcatcaacaccccccacgagctgcccacctacggcgacagcgagaagatgacctacaccgagcaggccagcaagagacactactgcatgagactgacctgcttcatcagactgaacgactacctgatcgagaacaccatgcacatcctgaccgtgaacgccgtgaacagcctgctgaaccacctgaccgacaagctgaagagaacccccagcgccgacgtgatccagaagtggatcaccgaggagaagcccgaggtgcccgacaagaagggcaccctgatggtggagaagcaggaggaggacgagagcctgatccccatgttcctgaccgagctgatgctgaccgtgcagagcctgctgttcgagcccagcctggaggacttcctggacggcatcctgggcgccgtgaaccactgccagaacaccgtgctgagcgtgcccaacctggtgcccgacagctacttcgacgccttcaccagcccctacatcaacaacaagctggagggcaagacctgcggcaccggccccagcctggccgccgtgttcgaggacgacaagaacttccacaccatcatcagccagatcaaggagaccatccaggccgccttcgagagcgccagaatctacgccgccaccttcgagaagttccagatcttcttcaaggagaacgagagcctggacctgcaggccctgaagctgcaggagcccgacatcaacttcttcagcgagcagctggagaagtaccacaagcagcacaaggacgccgtggccctgagacccaccagaaacgtgggcctgctgctgatcgacaccagactgctgagagagaagctgatccccagccccctgagatgcctggaggtgctgaacttcatgctgcccagacagagcaagaagaaggtggacgccatcatcttcgaggcccaggacgccgagtacaagctggagttcgtgcccaccaccaccaccgagtacgtgcacagcctgctgttcctggacgagatccaggagagaatcgagagcctggaggacgagggcaacatcgtgacccagatgtacaagctgatggagcagtaccaggtgcccaccccccccgaggacttcgccgtgttcgccaccatgaagcccagcatcgtggccgtgagaaacgccatcgacaagagcgtgggcgacagagagagcagcatcaagcagttctgcgtgcacctgggcagcgacctggaggagctgaacaacgaggtgaacgaggtgaagctgcaggcccaggacccccagatcctggacatcagcgccgaccaggacaagatcagactgatcctgaacaacctgcagagcgtgctggccgacctgcagaagagagccttccagtacaagagctaccagaagaacttcaaggtggaggtgagcaagttcgaggccctggaggaggtgagcgccgagctgaagctgaagcagctgctgtgggacagcttcagcgagtgggacaagctgcagcaggagtggctgaagagcaagttcgactgcctggaccccgaggtgctgaacggccaggtgagcaagtacgccaagttcgtgacccagctggagaagggcctgccccccaacagcgtggtgccccagctgaagtacaaggtggagaagatgaaggagaagctgcccgtgatcatcgacctgagaaaccccaccctgaaggccagacactgggccgccatcgagcagaccgtggacgccaccctggtggacgccgagatccccctgaccctggagagactgagccagctgcacgtgttcgacttcggccaggagatccaggacatcagcggccaggccagcggcgaggccgccctggaggccatcctgaagaaggtggaggacagctggaagaccaccgagttcgtgatcctgccccacagagacagcaaggacgtgttcatcctgggcggcaccgacgacatccaggtgctgctggacgacagcaccatcaacgtggccaccctggccagcagcagatacctgggccccctgaagaccagagtggacgagtggcagaagcagctggccctgttcaaccagaccctggaggagtggctgacctgccagagaaactggctgtacctggagagcatcttcaacgcccccgacatccagagacagctgcccgccgaggccaagatgttcctgcaggtggacaagagctggaaggagatcatgagaaaggtgaacagactgcccaacgccctgagagccgccacccagcccggcctgctggagaccttccagaacaacaacgccctgctggaccagatccagaagtgcctggaggcctacctggagagcaagagagtgatcttccccagattctacttcctgagcaacgacgagctgctggagatcctggcccagaccagaaacccccaggccgtgcagccccacctgagaaagtgcttcgacagcatcagcaagctggagttcgccctgatgccccccgccgagggcaagatccccggcatcgacggcgagcccgagaaggtgtacaccaacgacatcctggccatgctgagccccgagggcgagagagtgagcctgggcaagggcctgaaggccagaggcaacgtggaggagtggctgggcaaggtggaggaggccatgttcaccagcctgagaagactgtgcaaggccgccatcgccgactaccagggcaagctgagaaccgactgggtggtggccggccaccccagccaggtgatcctgaccgtgagccagatcatgtggtgcagagacctgaccgagtgcctggagaccgagcacagcaaccacatccaggccctgaagaacttcgagaaggtgaacttcgagagactgaacgccctggccgccatcgtgcagggcagcctgcccaagctgcacagaaacatcctgaccgccctgatcaccatcgacgtgcacgccagagacatcgtgaccgagctggtgcagagcaaggtggagaccgtggagagcttcgactggcagagacagctgagatactactgggacatcgacctggacaactgcgtggccagaatggccctgagccagtacacctacggctacgagtacctgggcgcctgccccagactggtgatcacccccctgaccgacagatgctacctgtgcctgatgggcgccctgcagctggacctgggcggcgcccccgccggccccgccggcaccggcaagaccgagaccaccaaggacctggccaaggccctggccatccagtgcgtggtgttcaactgcagcgacggcctggactacaagatgatgggcagattcttcagcggcctggcccagagcggcgcctggtgctgcttcgacgagttcaacagaatcgacatcgaggtgctgagcgtgatcgcccagcagctgatcaccatcagaaacgccaaggccgccaagctgagcagattcatgttcgagggcagagagatcaagctggtgatgacctgcgccgccttcatcaccatgaaccccggctacgccggcagaaccgagctgcccgacaacctgaaggccctgttcagacccttcgccatgatggtgcccaactacgccctgatcgccgaggtgatcctgtacagcgagggcttcgagagcagcaagatcctggccagaaagatgacccagatgtacaagctgtgcagcgagcagctgagccagcaggaccactacgacttcggcatgagagccgtgaagagcgtgctggtgatggccggcagcctgaagagagagaaccccgacctgaacgaggacgtggtgctgatcagagccctgcaggacagcaacctgcccaagttcctgaccgacgacgccctgctgttcagcggcatcatcagcgacctgttccccggcgtgcagatccccgagcacgactacggcatcctgcagagcaccatcgtggacgtgatgaacagacagaacctgcagcccgagatgtgcatggtgagaaaggtgatccagttctacgagaccatgctggtgagacacggcgtgatgctggtgggccccaccggcggcggcaagaccaccgtgtacagaatcctggccgagaccctgggcaacctgcagaagctgggcatcgagaacagcttctaccaggccgtgaagacctacgtgctgaaccccaagagcatcaccatgggcgagctgtacggcgaggtgaacaacctgaccctggagtggaaggacggcctgatggccctgagcgtgagagccgccgtgaacgacaccagcgaggaccacaagtggatcatcagcgacggccccgtggacgccctgtggatcgagaacatgaacaccgtgctggacgacaacaagatgctgtgcctggccaacagcgagagaatcaagctgaccccccagatccacatgctgttcgaggtgcaggacctgagagtggccagccccgccaccgtgagcagatgcggcatggtgttcgtggaccccgaggagctgaagtggatgccctacgtgaagacctggatgaagggcatcagcaagaagctgaccgaggagacccaggagtacatcctgaacctgttccagagatacgtggacgagggcctgcacttcatcaacaagaagtgcagccaggccatcccccaggtggacatcagcaaggtgaccaccctgtgctgcctgctggagagcctgatcctgggcaaggacggcgtgaacctggccatggagcagaccaagctgaacaccatcctgtgccagaccttcgtgttctgctacctgtggagcctgggcggcaacctgaccgagaactactacgacagcttcgacaccttcatcagaacccagttcgacgacaaccccgacgccagactgcccaacagcggcgacctgtggagcatccacatggacttcgacaccaagagactggacccctgggagagaatcatccccaccttcaagtacaacagagacgtgcccttcttcgagatgctggtgcccaccaccgacaccgtgagatacggctacctgatggagaagctgctggccgtgaagcacagcgtgctgttcaccggcatcaccggcgtgggcaagagcgtgatcgccaagggcctgctgaacaagatccaggagagcgccggctacgtgcccgtgtacctgaacttcagcgcccagaccagcagcgccagaacccaggagatcatcgagagcaagctggagagaaagagaaagaacatcctgggcgcccccggcaacaagagaatcgtgatcttcgtggacgacctgaacatgcccagactggacagatacggcagccagccccccatcgagctgctgagacagtaccaggacttcggcggcttctacgacagaaacaagctgttctggaaggagatccaggacgtgaccatcatcagcgcctgcgccccccccggcggcggcagaaaccccgtgacccccagattcatcagacacttcagcatgctgtgcctgcccatgcccagcgagcacagcctgaagcagatcttccaggccatcctgaacggcttcctgagcgacttcccccccgccgtgaagcagaccgccagcagcatcgtggaggccagcgtggagatctacaacaagatgagcgtggacctgctgcccacccccgccaagagccactacgtgttcaacctgagagacctgagcaagtgcgtgcaggacaagcacttcggcatcgccatcgacctggagtacttcctgaacaagcccatcatcttcggcgacttcatcaagttcggcgccgacaaggccgacagaatctacgacgacatgcccgacatcgagaagaccgccaacgtgctgcaggactacctggacgactacaacctgaccaaccccaaggaggtgaagctggtgttcttccaggacgccatcgagcacgtgagcagaatcgccagaatgatcagacaggagagaggcaacgccctgctggtgggcgtgggcggcaccggcaagcagagcctgaccagactggccgcccacatctgcggctacaagtgcctgcagatcgagctgagcagaggctacaactacgacagcttccacgaggacctgagaaagctgtacaagatggccggcgtggaggacaagaacatggtgttcctgttcaccgacacccagatcgtggtggaggagttcctggaggacatcaacaacatcctgaacagcggcgaggtgcccaacctgttcgagaaggacgagctggagcaggtgctggccgccaccagacccagagccaaggaggtgggcatcagcgagggcaacagagacgaggtgggctgcgccagagtggtgatgtggctgtaccacaagaacgtgagcagccccttcatctag

SEQ ID NO: 326929 - DNA, 7730 bp, Artificial Sequence
  derived and/or modified sequence
gcttccgtagaggccagctggttgctacgcagcaacaggaaacattccgcgctaccgagtactttctactcccgaccaggcattgctctctctggagaccctcggcggtggttgctgtattttgacttggagtaaggatgacttttcgggccacagatagtgaatttgacctgacaaatattgaagagtatgccgaaaattctgcactttcaagactgaataatataaaagccaaacaaagagtgagttatgtgacatccacagaaaatgaatctgatacacaaatcctaacgtttaggcacattacaaaagctcaggagaagacaagaaaacgacagcagcctataaaactagagcctttgccagtgctaaaagtctaccaagatcataagcagccagaatacatacatgaacagaaccgatttcagttaatgactgcaggaatcattaaacgtccagtaagcatagcaaaaaaaagttttgccacatcatctactcagtttcttgagcatcaagatgctgtgaaaaaaatgcagattcatcggccctatgttgaggtgttctctccctctcctcctaaactgccacatactggtattggaaaaagaggtctctttgggactagatcttcagcttaccctaagtacacttttcacgaccgagaagaagttgttaaagccaacattcgtgatcccttgcaaatcattaaaataatacgtgaaaatgaacatcttggatttctttatatgatccctgcagtgccaagatcatccattgaatatgatacatataatctaaaagttgtaagttatgagaacatcaataaaaatgactactatactattagccaaagggcagtaacacacatttataatgaagacattgaatttatcgaaattgatcgatgggaacaggaatatctgtatcacagagaactcactaagattcccatattttcactgttccggaaatggaaggcttttagtgtatggaggaagaatgtccgctccaagaaaatcactggatgtcaaaaatctctacaaaaaaatttgttcattgttaatcctcatttgcgaccagctcttcttaaaataaatgaattgtgttatcatttgagttttatgggactttgttatattgaaaagtgtcacacctacaccctgcaggaatttaaggccgcacaagtcatacggctagcagaggtgacagaacgcctaggagaatttcgaaatgaggcaaaatatgtagtcaggagggcttgtcgatttgctttgcgtgctgcaggatttgttcctgatgactgtgcatttggaccttttgaggattatcataaagtgcagagcagtggaagtttcattaatacaccacatgagttgcccacttatggagactctgagaaaatgacatatacagaacaggccagcaaaaggcattattgcatgaggctgacgtgctttattcgtctaaacgactatctaattgagaacacaatgcacatcttaacggtaaatgctgttaattcgcttttgaaccatctcactgacaagctaaaacgaacaccttcagcagatgtcattcagaaatggattactgaagagaagcctgaagtccctgataaaaaggggacccttatggtggaaaagcaagaagaagatgaatctctcatccccatgtttctcacagaactaatgttgacagtccagtcactgctctttgagccttctctggaagactttctggatggtattttgggtgcagttaatcactgtcaaaacactgtgttatcagttcctaatctcgtgcctgattcgtattttgatgctttcaccagcccttatattaacaacaaacttgaaggaaaaacctgtggaactgggccaagtttagcagcagtatttgaggatgataagaattttcacacaattatttctcaaataaaggaaaccattcaggccgcatttgaatcagcccgcatctatgcagctacctttgaaaagttccagatattcttcaaggaaaatgaaagtcttgatttacaagctcttaaacttcaggaacctgatattaacttttttagtgaacaactggaaaaatatcacaaacagcacaaggacgcagtagcgctcagacccaccagaaatgtaggattgctgctcattgatactaggcttctaagagaaaaattaattccatcacctttgcgatgcttagaggtgctaaattttatgcttcctcgtcaaagcaagaaaaaagtggatgccattatctttgaggcacaagatgcagagtataaacttgagtttgttccaactactaccacagaatatgttcatagcttattatttcttgatgaaattcaggaacggattgaaagccttgaagatgaggggaatatagtgactcaaatgtacaagcttatggaacaatatcaggtgcccacacctcctgaagactttgctgtttttgcaactatgaagccatccattgttgctgttcggaatgccattgataaatcagtgggtgatagagaatcaagcattaagcaattttgtgtgcatttgggtagtgatcttgaagaattaaacaacgaagtgaatgaagtaaaactgcaagcacaggatccacagattttagatatctctgctgaccaagacaaaataaggctcatattgaataatctgcaatctgttctggctgatcttcagaaacgtgcatttcagtataagtcctatcagaagaattttaaggtagaagtgtccaagtttgaagctttggaagaagtcagtgctgaactgaagctcaaacaattgctctgggattctttctctgaatgggataaactccaacaagaatggttaaagtccaaatttgattgcctggatccagaagtcctaaacggtcaagtttctaaatatgctaaatttgtgactcaactggaaaaaggcttgccacccaacagtgtagtgccccagctcaaatacaaggtggaaaaaatgaaagaaaagcttccagttatcattgacttgaggaacccgactttgaaggcaagacattgggcagctattgaacaaacagttgatgccactctagtggatgctgaaattccattaaccttggagaggctctcccagttgcatgtttttgactttggtcaagaaatccaggacatatctggacaggcttctggagaagctgccttagaagcaattcttaaaaaggtggaggactcttggaaaacaactgaatttgtcattctgcctcaccgtgactccaaagatgtgtttatactgggcggcacagatgacatacaggtccttcttgatgatagcaccatcaatgttgcaactcttgcctcatcacgttaccttggtccactgaaaactcgagtggatgaatggcaaaaacaacttgctttatttaatcaaacactggaagagtggctgacctgccagagaaactggctctacctagaaagtattttcaatgctccagacattcagaggcaattgcctgcagaggccaagatgttccttcaggtggataagtcatggaaagaaatcatgagaaaggtgaatcggctgcctaatgctcttcgagccgctactcagccaggacttctggaaacttttcaaaacaataatgcattacttgaccaaattcagaagtgcctagaggcatacttagaatcaaaaagagttatctttccaaggttttacttcttgtcaaatgatgaacttctggagattttggcccagacacgaaatccacaggccgtgcagccacacttaaggaaatgcttcgactccatttcaaagctcgaatttgctctcatgcctcctgccgaaggaaagattcctggtattgatggagaaccagaaaaggtttatactaatgatattttagcaatgctgtcaccagagggagaaagggttagcttggggaaaggcctcaaggcccgaggcaatgtagaggaatggcttggtaaagtggaagaagccatgttcacatctctgcgtcgcctgtgcaaagctgccatcgctgactatcaggggaaactgaggacagactgggtggttgctggccacccttctcaagttatcctgactgtttctcaaattatgtggtgccgtgatttgactgaatgtctggaaacagaacacagtaatcatatacaggccctgaagaattttgaaaaagtaaattttgagagattaaatgccctagctgcaatagttcaaggcagtcttcctaaattacacagaaacatcctaactgcattgattactattgatgtgcatgcaagagatatagtcactgaacttgttcaatccaaggtggagacagttgaatcttttgactggcagagacaactgcgctattactgggatatagacctggataattgtgtggctagaatggcgctctctcagtacacttatggctatgaatatttgggtgcatgcccaagattggttattactccactcacagatcgctgctatctttgcctcatgggagctttgcagcttgaccttgggggtgcaccagctggtcctgctggcactgggaaaacagagactaccaaagatctggcaaaagctcttgccatccagtgtgtggtctttaactgttcagatggtttggactacaagatgatggggcgcttcttcagtggcttggcacagtcaggggcctggtgctgctttgatgaatttaatcgaattgacatagaagttctgtccgtcatcgcgcagcaactcattaccattaggaacgccaaagcggcaaagctctctagattcatgtttgaggggcgggaaataaagttggtgatgacttgtgcagccttcatcacaatgaatcctggctatgcagggagaactgaattgccagataatttgaaagccctgtttagaccatttgcgatgatggttccaaattatgccttgattgcagaggtaattctatattctgaaggatttgaatccagtaaaatattagcaagaaaaatgactcagatgtataagctttgcagtgagcagctgtctcagcaggatcactacgactttggcatgagagctgtgaagtctgtcctggtcatggctggatctttaaaaagagaaaacccagacctaaatgaagatgtggtgttgataagagctttacaagactccaatttgccaaaatttctaacagatgatgctcttctgttcagtggaatcatatctgacctttttcctggagtccaaattccagaacatgattatggtattttacaatcaacaattgtggatgtcatgaatagacaaaatcttcagcctgagatgtgtatggttagaaaggtgatacagttttatgaaactatgctagtaaggcatggtgttatgttagtcgggccaacaggaggcggcaagaccacagtttaccgaatactagcagaaactttagggaatttacaaaaacttgggatagaaaattccttttaccaagcagttaaaacatatgttctcaaccctaaatcaattaccatgggtgaattatatggagaggttaataacttaaccttggaatggaaagatggtttgatggcactaagtgtccgagcagctgtgaatgatacttcagaagaccataaatggatcatcagtgatgggccagtagatgctctttggattgaaaacatgaatacagtgctggatgataacaagatgctttgcctggctaacagtgagaggattaaactcacacctcaaattcacatgctttttgaggtgcaagatctgcgggttgcctcccctgcaacagtcagtcgatgtggaatggtgtttgtggatcctgaagaactgaaatggatgccttatgttaaaacttggatgaagggtatttctaaaaaactgactgaggaaacccaagaatatatattgaatcttttccaacgttatgttgatgaaggtttacattttatcaataaaaagtgcagccaagcaattccacaagtggacatcagcaaagttactacactctgttgcttattggagtccttgatacttgggaaagatggagttaacttggcaatggaacaaacaaaattgaacactatactatgtcagacttttgtattctgttatttgtggtctttgggtggaaacctaactgaaaactactatgattcttttgatacatttattagaacacaatttgatgataatcctgatgccaggcttcccaattctggtgatctgtggagcattcatatggactttgacaccaaacggctggatccctgggaacgaatcatacctactttcaaatacaaccgagatgttccattttttgaaatgcttgtccccacaactgacacagtgcgctatgggtatctaatggaaaaactactggcagtcaagcattccgtgttgtttactggaataactggagtgggcaagtctgtgattgcaaaaggattgctaaataaaattcaagaatcagctggctatgtccctgtttatctaaatttttctgctcaaacttcatctgcaaggacacaagagatcattgagtcaaaactggagagaaaaagaaaaaatattctaggagcaccgggaaacaaacgaattgtgatttttgttgatgatttaaacatgcccagactggatcgctatggctctcagcctccgattgaattacttcggcagtatcaagattttgggggattttatgacagaaacaaactgttttggaaagaaatacaggatgtaacaatcatatcggcatgtgcacctccaggcggtggccgcaaccctgtgactccccgcttcatcagacacttcagcatgctgtgcctcccaatgccctcagagcacagtctgaaacagatttttcaggccatcttaaatggtttcctgagtgactttccaccagctgtaaagcaaactgcatcaagcattgtagaagcctcagttgagatttataacaaaatgagtgttgacctcctgccaacacccgccaagtcccattatgtctttaacttgagggacttatccaaatgtgtgcaagacaaacattttggaattgcaattgacctggaatattttttgaataagcccatcatatttggagatttcattaagtttggagcagataaagctgatcggatttatgatgacatgcctgatatagagaaaactgcaaatgttctacaggactatcttgatgattataatctcacaaatcccaaagaagtaaagttggtgttcttccaggatgctatagaacatgtttcaaggattgctcggatgatacgtcaagaaagaggcaatgccctgcttgttggagtaggaggcacaggaaagcagtcactcacgagacttgcagctcatatatgcggttacaaatgtttgcagattgaactcagccggggatataattatgatagttttcatgaagacctgaggaagttgtacaaaatggctggtgtagaagacaagaatatggttttccttttcactgacacccagattgtagtggaggagttcctagaagatataaataacatcctgaactcaggtgaagtgcctaatttatttgaaaaggatgaactggagcaggttttagcggccaccagaccaagagcaaaagaagtaggaatttctgaggggaacagagacgaggtaggatgtgccagagtagttatgtggctttatcacaaaaacgtttcttcaccttttatttaa

SEQ ID NO: 326930 - protein, 342 aa, Artificial Sequence
  derived and/or modified sequence
MLENSLYSPTWEGSQFWVTVQRTEAAERCGLHGSYVLRVEAERLTLLTVGAQSQILEPLLSWPYTLLRRYGRDKVMFSFEAGRRCPSGPGTFTFQTAQGNDIFQAVETAIHRQKAQGKAGQGHDVLRADSHEGEVAEGKLPSPPGPQELLDSPPALYAEPLDSLRIAPCPSQDSLYSDPLDSTSAQAGEGVQRKKPLYWDLYEHAQQQLLKAKLTDPKEDPIYDEPEGLAPVPPQGLYDLPREPKDAWWCQARVKEEGYELPYNPATDDYAVPPPRSTKPLLAPKPQGPAFPEPGTATGSGIKSHNSALYSQVQKSGASGSWDCGLSRVGTDKTGVKSEGST

SEQ ID NO: 326931 - DNA, 1955 bp, Artificial Sequence
  derived and/or modified sequence
cgctggccggcagcgccagcgctggaatcgcccccgcgcctgggagtggcctcgcgaggccggcgcgcgccccggggccgaggaatccgcctgcccgcccaggcgtcggccacgagagagcgggagcctcgctggtccccatttcagaggtggaggaagacctgggccgtgctctacccggccagtccccacggcgtagcgcggctcgagttctttgaccataaggggtcgagctctgggggtggccgagggagctcgcgccgcctggactgcaaagtgatccgtctggctgagtgtgtgagtgtggcccccgtcaccgtggagaccccccctgagcccggcgccactgccttccgcctggacactgctcagcgctcgcacctgctggcggccgacgcgccgtccagtgcagcctgggtgcagacgctgtgccgaaacgcctttccgaaaggcagctggactctggcgcctaccgataacccacctaagctttctgccctggagatgctggagaactccttgtacagccctacctgggaaggatcccaattctgggtaacggtgcagaggactgaggccgccgagcgctgtggcctgcatggctcctacgtgctgagggtggaggctgaaaggctgactctcctgaccgtgggggcccagagtcagatactggagccactcctgtcctggccctacactctgttgcgtcgctatggccgggacaaggtcatgttctctttcgaggccggccgccgctgcccctcaggccctggaaccttcaccttccagacggcacagggaaatgacatcttccaggcagttgagactgccatccaccggcagaaggcccagggaaaggccggacaggggcacgatgttctcagagctgactcccatgaaggggaggtggcagaggggaagttgccttccccacctggcccccaagagctcctcgacagtcccccagccctgtatgctgagcccttagactccctgcgcattgctccatgcccttcccaggactccctatactcagaccccttggacagcacgtctgctcaggcaggagagggagtacaacggaagaaacctctctattgggacttgtatgagcatgcgcagcagcagttgctgaaggccaagctgacagaccccaaagaggatcccatctatgatgaacctgagggcctggccccagtccctccccagggcctttatgatctgcctcgggagcccaaggatgcatggtggtgccaagctcgggtgaaggaggagggctatgagctcccctacaaccctgccactgatgactacgctgtgccaccccctcggagcacaaagcccctccttgctcccaagccccagggcccagccttccctgaacctggtactgcaactggcagtggcatcaaaagccacaactcagccctgtacagccaggtccagaagagcggggcctcagggagctgggactgtgggctctctagagtagggactgacaagactggggtcaagtcagagggctctacctgagaaggacggcaaggctgaggtggctaagggggaccatggggaggtggcactagggatcaaagaagatggttagaaccagcagaagccagagggtgggaggggccatgctgtgtgagaccaggggaccagagggatgggagagtcaagggaaggacaatcccaggaagtcctaagaagtggggcagatggcagggctgaggatgggctctgcatcccccaaagccatcccttccctacttccccaaatgaagggacggctgtgggaccaggtctgtggaaagtggtgcatggtcagaatgggtgcagtttgaggggcctgtgtggaggcctcagggagatgttggactgtgcctggatccttactcctgcattgttctttgccagagacctatttaaaaattttaaaattctcattaaagtca

SEQ ID NO: 326932 - protein, 132 aa, Artificial Sequence
  derived and/or modified sequence
MIEESGNKRKTMAEKRQLFIEMRAQNFDVIRLSTYRTACKLRFVQKRCNLHLVDIWNMIEAFRDNGLNTLDHTTEISVSRLETVISSIYYQLNKRLPSTHQISVEQSISLLLNFMIAAYDSEGRGKLTVFSV

SEQ ID NO: 326933 - protein, 319 aa, Artificial Sequence
  derived and/or modified sequence
MTDVFSQMSDSNGLMIFSKFDQFLKEVLKLPTAVFEGPSFGYTEHSVRTCFPQQRKIMLNMFLDTMMADPPPQCLVWLPLMHRLAHVENVFHPVECSYCRCESMMGFRYRCQQCHNYQLCQNCFWRGHAGGPHSNQHQMKEHSSWKSPAKKLSHAISKSLGCVPTREPPHPVFPEQPEKPLDLAHIVPPRPLTNMNDTMVSHMSSGVPTPTKRLQYSQDIPSHLADEHALIASYVARLQHCARVLDSPSRLDEEHRLIARYAARLAAEAGNVTRPPTDLSFNFDANKQQRQLIAELENKNREILQEIQRLRLEHEQASQ

SEQ ID NO: 326934 - DNA, 960 bp, Artificial Sequence
  derived and/or modified sequence
atgacagacgtcttcagtcagatgtccgattctaatggtctgatgatcttctcaaagtttgatcagtttcttaaagaggttcttaaactccccacagctgtctttgaagggccctccttcgggtacaccgagcacagtgtgcgaacatgctttccacaacagaggaagatcatgcttaacatgtttctcgacaccatgatggcagacccaccgcctcagtgtttggtgtggcttcccttaatgcatcggcttgcgcacgtcgaaaatgtctttcatcccgttgaatgttcttactgtcgctgtgaaagtatgatgggattccgataccgttgtcaacagtgccataattaccagctctgccaaaactgtttttggcgcggtcacgccggagggccacactccaaccaacatcaaatgaaagagcactctagctggaagagtcctgcaaagaagctttcccacgcgatcagcaaaagtttagggtgtgtccccacccgagagcctccgcaccccgtgtttccagaacagcctgaaaaacccttagatcttgctcatattgtgccccccaggcctctgacaaatatgaatgatacaatggtgtctcatatgtccagcggcgtaccaactccaaccaagcgcctgcagtactcccaggacatacctagccacctggctgatgagcatgccttgatagcaagttatgtggccaggctccaacactgcgctagggtgctggatagcccatcaagactcgacgaagaacaccggctaattgccagatatgctgcccgcctggcagcagaagccgggaatgttacacggccaccaactgatttgtcttttaacttcgacgctaacaagcagcagcgtcagctgatagccgagcttgaaaacaagaatcgggagattctccaagagatccagaggctgcggctggaacacgagcaagcctcacagtag

SEQ ID NO: 326935 - DNA, 960 bp, Artificial Sequence
  derived and/or modified sequence
atgacagatgtgttcagccagatgtctgacagcaatggcctgatgatcttcagcaagtttgaccagttcctgaaggaggtgctgaagctgcccacagctgtgtttgagggccccagctttggctacacagagcacagcgtgaggacctgcttcccccagcagaggaagatcatgctgaacatgttcctggacaccatgatggctgaccccccaccccagtgcctggtgtggctgcccctgatgcaccggctggcccacgtggagaatgtgttccaccctgtggagtgcagctactgccgctgtgagagcatgatgggcttccgctaccgctgccagcagtgccacaactaccagctgtgccagaactgcttctggaggggccatgctgggggcccccacagcaaccagcaccagatgaaggagcacagctcctggaagagccctgccaagaagctgagccacgccatcagcaagagcctgggctgtgtgcccacccgggagcccccccaccctgtgtttcctgagcagcctgagaagcccctggacctggcccacatcgtgcccccccggcccctgaccaacatgaatgacaccatggtgagccacatgagcagtggagtgcccacccccaccaagaggctgcagtacagccaggacatccccagccacctggctgatgagcacgccctgattgccagctatgtggcccggctgcagcactgtgcccgggtgctggacagccccagccggctggatgaggagcacaggctcatcgcccgctatgctgcccggctggccgctgaggccggaaatgtgaccaggcctcccacagacctgtccttcaactttgatgccaacaagcagcagaggcagctgattgctgagctggagaacaagaaccgggagatcctgcaggagatccagaggctgcggctggagcacgagcaggccagccagtag

SEQ ID NO: 326936 - DNA, 960 bp, Artificial Sequence
  derived and/or modified sequence
atgaccgacgtgttcagccagatgagcgacagcaacggcctgatgatcttttcaaagttcgatcagttcctgaaagaggtgctgaaactgccgaccgctgtgttcgaagggcccagtttcgggtatacagagcacagcgtgcgtacatgctttccgcagcagagaaagatcatgctcaacatgttcctggatactatgatggctgacccacctccacaatgtctcgtctggctgcccctgatgcatagactggcgcatgtggaaaacgtcttccatcctgttgaatgctcgtactgccggtgtgaaagcatgatgggcttccgatatcgatgccagcagtgccacaactaccagttgtgccagaattgtttctggcgggggcacgctggaggcccgcattctaaccagcatcagatgaaagagcactcctcttggaagagtcccgcgaagaaactgtctcacgccatcagtaagtccctgggctgcgtgcccacccgcgagccgccccatcccgtgtttcccgagcagccagaaaagccactggacctcgcgcatattgtgcctcctcggcccctgaccaacatgaacgacacaatggtctcccatatgagctcaggcgtacctactcctacgaagagactgcagtatagccaagatatccccagtcatctggccgacgagcacgccttaatagcaagctacgtcgcgaggctccaacactgtgcgcgagtccttgatagtccgtcacggctggacgaagaacacagactcatagcccggtacgcggcacgccttgccgccgaggcaggtaatgtgacacgccctccaaccgatttgtccttcaactttgacgccaataaacagcagaggcagttaatcgcagagctcgaaaataagaatagggagattttgcaggagatccagaggctgaggctggagcacgagcaagcctcacaatag

SEQ ID NO: 326937 - DNA, 960 bp, Artificial Sequence
  derived and/or modified sequence
atgaccgacgttttttctcagatgtctgactcaaatggactcatgattttcagcaagtttgatcagttcctgaaggaagttctaaagcttccaacagcagtctttgaaggcccatccttcgggtatacagagcacagtgtgagaacctgtttcccgcagcagcggaagattatgctaaatatgtttctcgacactatgatggcagaccctccccctcagtgtcttgtttggcttccactgatgcacaggctggcacacgtcgagaacgtgttccacccagttgagtgctcttattgcagatgtgagagcatgatgggtttccgctaccgctgccagcagtgccacaattaccagctgtgtcagaactgtttctggagaggtcatgctggcggtcctcactctaatcagcatcagatgaaggaacactcatcttggaaatctcccgctaagaagctctcacatgctataagcaaatccctcggctgtgtgcctacacgagaaccacctcatcccgtgtttcctgagcagccagagaagccactggatctggcccatattgttccgcctagaccccttactaatatgaacgataccatggtgtcccacatgagctcaggagtccctaccccgaccaaacggctccaatacagtcaagatatcccaagccaccttgccgacgaacatgctctcattgcaagttacgtggccagacttcagcactgtgctcgtgtactcgactctcccagccggctagacgaagagcacaggctcatagccagatatgcggctcgactggcagccgaggccggtaacgtaacccgaccaccaaccgatctgagtttcaacttcgacgcaaataagcagcagagacaactgatcgccgagctggagaataaaaaccgtgagatcttgcaggagatccaacggttgcgcctagagcacgaacaggcatcacagtag

SEQ ID NO: 326938 - DNA, 960 bp, Artificial Sequence
  derived and/or modified sequence
atgaccgacgtgttcagccagatgagcgacagcaacggcctgatgatcttcagcaagttcgaccagttcctgaaggaggtgctgaagctgcccaccgccgtgttcgagggccccagcttcggctacaccgagcacagcgtgagaacctgcttcccccagcagagaaagatcatgctgaacatgttcctggacaccatgatggccgacccccccccccagtgcctggtgtggctgcccctgatgcacagactggcccacgtggagaacgtgttccaccccgtggagtgcagctactgcagatgcgagagcatgatgggcttcagatacagatgccagcagtgccacaactaccagctgtgccagaactgcttctggagaggccacgccggcggcccccacagcaaccagcaccagatgaaggagcacagcagctggaagagccccgccaagaagctgagccacgccatcagcaagagcctgggctgcgtgcccaccagagagcccccccaccccgtgttccccgagcagcccgagaagcccctggacctggcccacatcgtgccccccagacccctgaccaacatgaacgacaccatggtgagccacatgagcagcggcgtgcccacccccaccaagagactgcagtacagccaggacatccccagccacctggccgacgagcacgccctgatcgccagctacgtggccagactgcagcactgcgccagagtgctggacagccccagcagactggacgaggagcacagactgatcgccagatacgccgccagactggccgccgaggccggcaacgtgaccagaccccccaccgacctgagcttcaacttcgacgccaacaagcagcagagacagctgatcgccgagctggagaacaagaacagagagatcctgcaggagatccagagactgagactggagcacgagcaggccagccagtag

SEQ ID NO: 326939 - protein, 1544 aa, Artificial Sequence
  derived and/or modified sequence
MDSGPVYHGDSRQLSASGVPVNGAREPAGPSLLGTGGPWRVDQKPDWEAAPGPAHTARLEDAHDLVAFSAVAEAVSSYGALSTRLYETFNREMSREAGNNSRGPRPGPEGCSAGSEDLDTLQTALALARHGMKPPNCNCDGPECPDYLEWLEGKIKSVVMEGGEERPRLPGPLPPGEAGLPAPSTRPLLSSEVPQISPQEGLPLSQSALSIAKEKNISLQTAIAIEALTQLSSALPQPSHSTPQASCPLPEALSPPAPFRSPQSYLRAPSWPVVPPEEHSSFAPDSSAFPPATPRTEFPEAWGTDTPPATPRSSWPMPRPSPDPMAELEQLLGSASDYIQSVFKRPEALPTKPKVKVEAPSSSPAPAPSPVLQREAPTPSSEPDTHQKAQTALQQHLHHKRSLFLEQVHDTSFPAPSEPSAPGWWPPPSSPVPRLPDRPPKEKKKKLPTPAGGPVGTEKAAPGIKPSVRKPIQIKKSRPREAQPLFPPVRQIVLEGLRSPASQEVQAHPPAPLPASQGSAVPLPPEPSLALFAPSPSRDSLLPPTQEMRSPSPMTALQPGSTGPLPPADDKLEELIRQFEAEFGDSFGLPGPPSVPIQDPENQQTCLPAPESPFATRSPKQIKIESSGAVTVLSTTCFHSEEGGQEATPTKAENPLTPTLSGFLESPLKYLDTPTKSLLDTPAKRAQAEFPTCDCVEQIVEKDEGPYYTHLGSGPTVASIRELMEERYGEKGKAIRIEKVIYTGKEGKSSRGCPIAKWVIRRHTLEEKLLCLVRHRAGHHCQNAVIVILILAWEGIPRSLGDTLYQELTDTLRKYGNPTSRRCGLNDDRTCACQGKDPNTCGASFSFGCSWSMYFNGCKYARSKTPRKFRLAGDNPKEEEVLRKSFQDLATEVAPLYKRLAPQAYQNQVTNEEIAIDCRLGLKEGRPFAGVTACMDFCAHAHKDQHNLYNGCTVVCTLTKEDNRCVGKIPEDEQLHVLPLYKMANTDEFGSEENQNAKVGSGAIQVLTAFPREVRRLPEPAKSCRQRQLEARKAAAEKKKIQKEKLSTPEKIKQEALELAGITSDPGLSLKGGLSQQGLKPSLKVEPQNHFSSFKYSGNAVVESYSVLGNCRPSDPYSMNSVYSYHSYYAQPSLTSVNGFHSKYALPSFSYYGFPSSNPVFPSQFLGPGAWGHSGSSGSFEKKPDLHALHNSLSPAYGGAEFAELPSQAVPTDAHHPTPHHQQPAYPGPKEYLLPKAPLLHSVSRDPSPFAQSSNCYNRSIKQEPVDPLTQAEPVPRDAGKMGKTPLSEVSQNGGPSHLWGQYSGGPSMSPKRTNGVGGSWGVFSSGESPAIVPDKLSSFGASCLAPSHFTDGQWGLFPGEGQQAASHSGGRLRGKPWSPCKFGNSTSALAGPSLTEKPWALGAGDFNSALKGSPGFQDKLWNPMKGEEGRIPAAGASQLVFYQHKNLNQPNHGLALWEAKMKQLAERARARQEEAARLGLGQQEAKLYGKKRKWGGTVVAEPQQKEKKGVVPTRQALAVPTDSAVTVSSYAYTKVTGPYSRWI

SEQ ID NO: 326940 - DNA, 4983 bp, Artificial Sequence
  derived and/or modified sequence
atggacagcggccccgtgtaccacggcgacagcagacagctgagcgccagcggcgtgcccgtgaacggcgccagagagcccgccggccccagcctgctgggcaccggcggcccctggagagtggaccagaagcccgactgggaggccgcccccggccccgcccacaccgccagactggaggacgcccacgacctggtggccttcagcgccgtggccgaggccgtgagcagctacggcgccctgagcaccagactgtacgagaccttcaacagagagatgagcagagaggccggcaacaacagcagaggccccagacccggccccgagggctgcagcgccggcagcgaggacctggacaccctgcagaccgccctggccctggccagacacggcatgaagccccccaactgcaactgcgacggccccgagtgccccgactacctggagtggctggagggcaagatcaagagcgtggtgatggagggcggcgaggagagacccagactgcccggccccctgccccccggcgaggccggcctgcccgcccccagcaccagacccctgctgagcagcgaggtgccccagatcagcccccaggagggcctgcccctgagccagagcgccctgagcatcgccaaggagaagaacatcagcctgcagaccgccatcgccatcgaggccctgacccagctgagcagcgccctgccccagcccagccacagcaccccccaggccagctgccccctgcccgaggccctgagcccccccgcccccttcagaagcccccagagctacctgagagcccccagctggcccgtggtgccccccgaggagcacagcagcttcgcccccgacagcagcgccttcccccccgccacccccagaaccgagttccccgaggcctggggcaccgacaccccccccgccacccccagaagcagctggcccatgcccagacccagccccgaccccatggccgagctggagcagctgctgggcagcgccagcgactacatccagagcgtgttcaagagacccgaggccctgcccaccaagcccaaggtgaaggtggaggcccccagcagcagccccgcccccgcccccagccccgtgctgcagagagaggcccccacccccagcagcgagcccgacacccaccagaaggcccagaccgccctgcagcagcacctgcaccacaagagaagcctgttcctggagcaggtgcacgacaccagcttccccgcccccagcgagcccagcgcccccggctggtggcccccccccagcagccccgtgcccagactgcccgacagaccccccaaggagaagaagaagaagctgcccacccccgccggcggccccgtgggcaccgagaaggccgcccccggcatcaagcccagcgtgagaaagcccatccagatcaagaagagcagacccagagaggcccagcccctgttcccccccgtgagacagatcgtgctggagggcctgagaagccccgccagccaggaggtgcaggcccacccccccgcccccctgcccgccagccagggcagcgccgtgcccctgccccccgagcccagcctggccctgttcgcccccagccccagcagagacagcctgctgccccccacccaggagatgagaagccccagccccatgaccgccctgcagcccggcagcaccggccccctgccccccgccgacgacaagctggaggagctgatcagacagttcgaggccgagttcggcgacagcttcggcctgcccggcccccccagcgtgcccatccaggaccccgagaaccagcagacctgcctgcccgcccccgagagccccttcgccaccagaagccccaagcagatcaagatcgagagcagcggcgccgtgaccgtgctgagcaccacctgcttccacagcgaggagggcggccaggaggccacccccaccaaggccgagaaccccctgacccccaccctgagcggcttcctggagagccccctgaagtacctggacacccccaccaagagcctgctggacacccccgccaagagagcccaggccgagttccccacctgcgactgcgtggagcagatcgtggagaaggacgagggcccctactacacccacctgggcagcggccccaccgtggccagcatcagagagctgatggaggagagatacggcgagaagggcaaggccatcagaatcgagaaggtgatctacaccggcaaggagggcaagagcagcagaggctgccccatcgccaagtgggtgatcagaagacacaccctggaggagaagctgctgtgcctggtgagacacagagccggccaccactgccagaacgccgtgatcgtgatcctgatcctggcctgggagggcatccccagaagcctgggcgacaccctgtaccaggagctgaccgacaccctgagaaagtacggcaaccccaccagcagaagatgcggcctgaacgacgacagaacctgcgcctgccagggcaaggaccccaacacctgcggcgccagcttcagcttcggctgcagctggagcatgtacttcaacggctgcaagtacgccagaagcaagacccccagaaagttcagactggccggcgacaaccccaaggaggaggaggtgctgagaaagagcttccaggacctggccaccgaggtggcccccctgtacaagagactggccccccaggcctaccagaaccaggtgaccaacgaggagatcgccatcgactgcagactgggcctgaaggagggcagacccttcgccggcgtgaccgcctgcatggacttctgcgcccacgcccacaaggaccagcacaacctgtacaacggctgcaccgtggtgtgcaccctgaccaaggaggacaacagatgcgtgggcaagatccccgaggacgagcagctgcacgtgctgcccctgtacaagatggccaacaccgacgagttcggcagcgaggagaaccagaacgccaaggtgggcagcggcgccatccaggtgctgaccgccttccccagagaggtgagaagactgcccgagcccgccaagagctgcagacagagacagctggaggccagaaaggccgccgccgagaagaagaagatccagaaggagaagctgagcacccccgagaagatcaagcaggaggccctggagctggccggcatcaccagcgaccccggcctgagcctgaagggcggcctgagccagcagggcctgaagcccagcctgaaggtggagccccagaaccacttcagcagcttcaagtacagcggcaacgccgtggtggagagctacagcgtgctgggcaactgcagacccagcgacccctacagcatgaacagcgtgtacagctaccacagctactacgcccagcccagcctgaccagcgtgaacggcttccacagcaagtacgccctgcccagcttcagctactacggcttccccagcagcaaccccgtgttccccagccagttcctgggccccggcgcctggggccacagcggcagcagcggcagcttcgagaagaagcccgacctgcacgccctgcacaacagcctgagccccgcctacggcggcgccgagttcgccgagctgcccagccaggccgtgcccaccgacgcccaccaccccaccccccaccaccagcagcccgcctaccccggccccaaggagtacctgctgcccaaggcccccctgctgcacagcgtgagcagagaccccagccccttcgcccagagcagcaactgctacaacagaagcatcaagcaggagcccgtggaccccctgacccaggccgagcccgtgcccagagacgccggcaagatgggcaagacccccctgagcgaggtgagccagaacggcggccccagccacctgtggggccagtacagcggcggccccagcatgagccccaagagaaccaacggcgtgggcggcagctggggcgtgttcagcagcggcgagagccccgccatcgtgcccgacaagctgagcagcttcggcgccagctgcctggcccccagccacttcaccgacggccagtggggcctgttccccggcgagggccagcaggccgccagccacagcggcggcagactgagaggcaagccctggagcccctgcaagttcggcaacagcaccagcgccctggccggccccagcctgaccgagaagccctgggccctgggcgccggcgacttcaacagcgccctgaagggcagccccggcttccaggacaagctgtggaaccccatgaagggcgaggagggcagaatccccgccgccggcgccagccagctggacagagcctggcagagcttcggcctgcccctgggcagcagcgagaagctgttcggcgccctgaagagcgaggagaagctgtgggaccccttcagcctggaggagggccccgccgaggagccccccagcaagggcgccgtgaaggaggagaagggcggcggcggcgccgaggaggaggaggaggagctgtggagcgacagcgagcacaacttcctggacgagaacatcggcggcgtggccgtggcccccgcccacggcagcatcctgatcgagtgcgccagaagagagctgcacgccaccacccccctgaagaagcccaacagatgccaccccaccagaatcagcctggtgttctaccagcacaagaacctgaaccagcccaaccacggcctggccctgtgggaggccaagatgaagcagctggccgagagagccagagccagacaggaggaggccgccagactgggcctgggccagcaggaggccaagctgtacggcaagaagagaaagtggggcggcaccgtggtggccgagccccagcagaaggagaagaagggcgtggtgcccaccagacaggccctggccgtgcccaccgacagcgccgtgaccgtgagcagctacgcctacaccaaggtgaccggcccctacagcagatggatctag

SEQ ID NO: 326941 - DNA, 4983 bp, Artificial Sequence
  derived and/or modified sequence
atggacagtggccccgtctaccacggcgattcacgccaactgagcgcctctggggtcccagtaaacggggcgcgcgagccagcaggcccatctctccttggcaccgggggcccttggcgggtggaccagaaaccggattgggaagccgccccaggtccggcccacactgcaagactggaggatgcccacgacctcgtggcattttctgcggtagcagaggctgtgagtagctacggggctctaagcactcgtctgtacgaaactttcaatagagagatgtcccgtgaggccggaaacaatagccgagggcccagacccgggccggaaggatgttctgccggctcagaggatttggataccctgcaaaccgcacttgccctggcgagacatggaatgaagccacctaactgcaactgtgatggacccgagtgccccgattatttagagtggctggaagggaaaataaaatcggtggtaatggagggtggggaggaaaggcctaggctgcccggtcccctgccacctggcgaggctggcctgcctgctccatctacccgcccgctgctctcaagcgaagtcccgcagatttctcctcaggaggggctgcccctttctcagagtgccctctccatagcaaaggagaagaacatctccctccaaaccgcgatagccatcgaggccctgacgcaactgtcaagcgctctgcctcaacccagccatagcactccacaggccagttgcccccttcctgaggcattgagcccaccggctccttttcggtctccgcagtcctacttacgggccccaagttggccagttgtgccgcccgaggaacatagcagcttcgctcccgatagctcagcttttcccccagccacccctcgcacggagtttcctgaggcatggggtacagataccccgcccgcaacaccgcgatccagctggccaatgcctagaccaagccctgaccctatggccgaacttgaacaattgctgggaagcgccagtgactatattcagtcagtgttcaagcgtcccgaagctctgccaactaagcctaaagttaaggtggaggcgccgagttcgtcccccgcccccgccccgtctccagtcttacagcgtgaggccccaacaccatccagcgaaccagatactcatcagaaagcgcagaccgccctgcagcagcacctacaccacaagcgatctctgtttttggagcaggtccatgacacaagttttcctgctcccagcgagccaagcgcacccggatggtggccgcctccttcttcccctgtccctcggctgcccgaccgacctcccaaggagaagaagaagaaactgccaacccctgctggtggccccgtgggtacggagaaggctgcacctggtatcaagcctagtgtgcgtaagcccattcagatcaagaaaagtcggccccgggaagcccagcccctgtttccacccgtccggcagatcgtgcttgagggcttgcgctctcccgccagtcaggaagtgcaggcgcatccgcccgcgcctctccccgcaagccagggcagtgctgtgccactgcctcccgagccttccctggcactgtttgcccctagtccgtctcgcgacagtcttctgccccctacccaggaaatgagaagccccagccctatgactgcactgcaacctggaagcacagggccactgcccccagccgatgataagctagaggaattaatacgccagtttgaggccgagtttggtgatagctttggactacctggacctcccagcgtgccaattcaggatcccgagaatcaacaaacttgtctccctgccccagaatctccatttgctacaagatcccctaagcagatcaaaatcgaatcatcaggggctgtgacagtgctgagcacaacatgtttccacagcgaggaagggggccaggaagccaccccgacgaaggctgaaaacccattaaccccaactctttctggcttcttggaaagtcccctcaagtatctggacacacctaccaaaagcctgctcgataccccggctaaaagagcccaagccgagttccctacttgcgactgtgtcgagcagatagttgagaaagatgaagggccctactatactcaccttgggagcggccccaccgttgcttcaattagagaactcatggaggaaaggtatggggagaagggcaaagcgattcgaatcgagaaagtaatctacacaggaaaggaaggcaagagcagcagaggttgccctatagctaagtgggttatcagaaggcatacactggaggaaaagctgctgtgcctcgtacggcatcgggctgggcaccactgccagaacgcagtgatcgtgattctgatcctcgcctgggaaggcatacccagatctttgggcgacacgttgtaccaagagttaacagacactttgcgtaagtacggcaaccccacatctcggaggtgtggcttgaatgatgataggacgtgcgcatgtcagggcaaggatcccaatacctgtggcgcttccttttcatttgggtgtagctggagcatgtattttaatggctgcaagtacgcaaggagcaaaacccccaggaagttcagactggctggagataatccaaaagaggaagaagtccttcgaaaatccttccaggacctggctactgaggtggcccctctgtacaagcgcctggcgccccaggcctatcagaatcaggtcacgaatgaggagattgctattgattgtcgccttggcctcaaagagggtagaccattcgcgggggttacggcatgtatggatttttgcgcacacgcgcataaggaccagcacaacctgtataacggatgcacggttgtctgcacgcttacgaaggaggacaacagatgcgtcggcaaaataccagaagatgaacagctgcacgtcttaccactgtataaaatggctaatacagatgagtttggctctgaggaaaatcaaaatgctaaggtcggcagcggagccatccaggtgctcacggcctttcctagggaggtgcgcaggcttccggaaccagctaagtcatgtcgccagagacagcttgaagccagaaaagctgcagccgagaagaagaagattcagaaagaaaagttgtccacgccagaaaagatcaaacaggaggctctggagctcgccggcataaccagcgaccccggactcagcctaaagggagggttgtcccagcagggtctcaagccatccctgaaagtggagccgcagaatcacttttcctctttcaagtatagcggcaatgctgtagtggaatcttactctgtgctcggaaactgccggccgtctgatccttactcaatgaattcagtgtattcttatcattcctactacgcccagccatcgctgacaagcgtgaatggcttccactccaagtacgcgcttccatcctttagctattatggtttcccttcttcaaacccagtattcccttcacaattcctgggaccaggagcttggggacactccggcagcagcggctccttcgagaaaaagccggatctccatgccctgcacaattcgctgtctcctgcttacggaggggcagagttcgctgagctgcccagtcaggctgtcccaacagatgcccaccaccccaccccccaccaccagcagcctgcatacccagggccaaaggagtaccttctgcctaaggcccccctattgcattcagttagcagggacccctccccttttgcacaaagtagcaactgctacaacaggagcattaagcaggagcccgttgatccgctgacacaggccgaacctgtacccagggatgctggtaaaatgggaaagaccccactgagtgaagtgtcgcagaacggtggtcctagtcacctctggggacagtactcaggaggtccaagtatgagtcccaaacgcaccaatggggtggggggctcatggggcgtcttctcaagcggggaatctcctgccatcgttccggataaactttcctcttttggagcttcttgtcttgctccctcccacttcacagacggccagtggggcctcttccctggagaaggccagcaagctgccagtcactctggcggtagactgcgtggaaagccctggtcaccatgtaagtttggaaactccacctccgctctggcgggccctagcctgactgagaaaccctgggctctgggcgcgggggactttaacagcgcactaaagggctcacccgggtttcaggataaactgtggaaccccatgaagggtgaagaagggcgcatccccgccgctggagctagccagcttgatagagcttggcagtcttttgggctgcccctgggatcttccgagaaactgtttggggccttaaagtccgaagaaaagctctgggatccttttagcctcgaggaaggacccgcggaggagcccccctcaaagggtgccgtgaaggaggagaaaggagggggaggcgctgaggaggaggaggaggaactctggagcgactcagaacacaattttctggatgagaatatcgggggcgtggccgtggctcctgctcacggctctattctgattgagtgcgctaggagggagctccacgctaccactccactaaagaaacccaataggtgtcatccaaccaggatatccttagtcttttaccagcataagaaccttaaccaacccaaccacggattagcactttgggaagctaagatgaagcaattagccgagcgagccagagcacgccaggaggaggcagcaagactcggccttgggcagcaggaagctaagctgtatggtaagaagcgaaagtgggggggtaccgtcgtggccgagccacaacagaaagagaagaagggcgtggtgccaactcgacaggctcttgctgtcccgacggattctgcagtgacagtttctagctatgcatataccaaggtgacaggaccgtactcccgttggatttag

SEQ ID NO: 326942 - DNA, 4983 bp, Artificial Sequence
  derived and/or modified sequence
atggattctggccctgtgtaccacggggacagccggcagctgagcgccagcggcgtgcctgtgaatggagcccgggagcccgccggccccagcctgctgggcactggaggcccctggagggtggaccagaagccagactgggaggccgcccctggccctgcccacacagcccggctggaggatgcccatgacctggtggccttctctgctgtggccgaggccgtgtcctcctatggagccctgagcacccggctgtatgagaccttcaaccgggagatgagccgggaggccggcaacaacagccggggcccccggcccggccctgagggctgcagcgctggcagcgaggacctggacaccctgcagacagccctggccctggcccggcacggcatgaagccacccaactgcaactgtgatggcccagaatgtcctgactacctggagtggctggagggcaagatcaagtctgtggtgatggagggcggggaggagcggccccggctgcccggccccctgcccccaggagaggccggcctgcctgcccccagcacccggcccctgctgagcagcgaggtgccccagatcagcccccaggagggcctgcccctgagccagagcgccctgagcatcgccaaggagaagaacatcagcctgcagacagccatcgccatcgaggccctgacccagctgagcagcgccctgccccagcccagccacagcaccccccaggccagctgccccctgcctgaggccctgagccccccagcccccttccgcagcccccagagctacctgcgggcccccagctggcctgtggtgcccccagaggagcacagcagctttgccccagacagcagcgccttccccccagccacccccaggacagagttccctgaggcctggggcacagacaccccaccagccacccccaggagctcctggcccatgccccggcccagcccagaccccatggccgagctggagcagctgctgggcagcgccagtgactacatccagagcgtcttcaagaggcctgaggccctgcccaccaagcccaaggtgaaggtggaggcccccagcagcagccctgccccagcccccagccctgtgctgcagcgggaggcccccacccccagcagcgagccagacacccaccagaaggcccagacagccctgcagcagcacctgcaccacaagaggagcctcttcctggagcaggtgcatgacaccagcttccctgcccccagcgagcccagcgcccctggctggtggcccccacccagcagccctgtgccccggctgcctgacaggcctcccaaggagaagaagaagaagctgcccaccccagctgggggccctgtgggcacagagaaggccgcccctggcatcaagcccagcgtgaggaagcccatccagatcaagaagagccggccccgggaggcccagcccctcttcccccctgtgcggcagatcgtgctggagggcctgcggagccctgccagccaggaggtgcaggcccaccccccagcccccctgcctgccagccagggcagcgctgtgcccctgcccccagagcccagcctggccctgtttgcccccagccccagccgggacagcctgctgccccccacccaggagatgaggagccccagccccatgacagccctgcagcccggcagcacaggccccctgcccccagcagatgacaagctggaggagctgatccggcagtttgaagctgagtttggagacagctttggcctgcccggcccccccagcgtgcccatccaggaccctgagaaccagcagacctgcctgcctgcccctgagagcccctttgccaccaggagccccaagcagatcaagattgagagcagtggagctgtgacagtgctgagcaccacctgcttccacagcgaggagggcggccaggaggccacccccaccaaggccgagaaccccctgacccccaccctgagcggcttcctggagagccccctgaagtacctggacacccccaccaagagcctgctggacaccccagccaagagggcccaggccgagttccccacctgtgactgtgtggagcagatcgtggagaaggatgagggcccctactacacccacctgggcagcggccccaccgtggccagcatccgggagctgatggaggagcgctacggggagaagggcaaggccatcagaattgagaaggtgatctacacaggcaaggagggcaagagcagccggggctgccccatcgccaagtgggtgatcagaagacacaccctggaggagaagctgctgtgcctggtgcgccacagagctggccaccactgccagaatgctgtgattgtcatcctgatcctggcctgggagggcatccccaggagcctgggggacaccctgtaccaggagctgacagacaccctgaggaaatatggcaaccccaccagcagaagatgtggcctgaatgatgacaggacctgtgcctgccagggcaaggaccccaacacctgtggggccagcttctcctttggctgctcctggagcatgtacttcaacggctgcaagtatgcccggagcaagacccccaggaagttccggctggccggggacaaccccaaggaggaggaggtgctgaggaagagcttccaggacctggccacagaggtggcccccctgtacaagaggctggccccccaggcctaccagaaccaggtgaccaatgaggagatcgccatcgactgccgcctgggcctgaaggagggccggccctttgctggggtgacagcctgcatggacttctgtgcccacgcccacaaggaccagcacaacctgtacaacggctgcaccgtggtgtgcaccctgaccaaggaggacaacagatgtgtgggcaagatcccagaagatgagcagctgcacgtgctgcccctgtacaagatggccaacacagatgaatttggaagtgaggagaaccagaatgccaaggtgggcagcggggccatccaggtgctgacagccttcccccgggaggtgcggcggctgcctgagcccgccaagagctgccggcagaggcagctggaggccaggaaggctgctgctgagaagaagaagatccagaaggagaagctgagcaccccagagaagatcaagcaggaggccctggagctggccggcatcaccagtgaccccggcctgagcctgaagggcggcctgagccagcagggcctgaagcccagcctgaaggtggagccccagaaccacttcagcagcttcaagtacagcggaaatgctgtggtggagagctacagcgtgctgggcaactgccggcccagcgacccctacagcatgaacagcgtgtacagctaccacagctactatgcccagcccagcctgacctctgtgaatggcttccacagcaaatatgccctgcccagcttctcctactacggcttccccagcagcaaccctgtgttccccagccagttcctgggccctggggcctggggccacagcggcagcagcggcagctttgagaagaagccagacctgcacgccctgcacaacagcctgagccctgcctatggaggagctgagtttgctgagctgcccagccaggccgtgcccacagatgcccaccaccccaccccccaccaccagcagcctgcctacccaggccccaaggagtacctgctgcccaaggcccccctgctgcacagcgtgtcccgggaccccagcccctttgcccagagcagcaactgctacaacagaagcatcaagcaggagcctgtggaccccctgacccaggccgagcctgtgcccagagatgctgggaagatgggcaagacccccctgtctgaggtgtcccagaatggaggccccagccacctgtggggccagtacagcggcggccccagcatgagccccaagaggaccaatggagtgggcggctcctggggcgtcttcagcagcggggagagccctgccatcgtgcctgacaagctgagcagctttggagccagctgcctggcccccagccacttcacagatggccagtggggcctcttccctggagagggccagcaggccgccagccacagcggcggccgcctgcggggcaagccctggagcccctgcaagtttggaaacagcaccagcgccctggccggccccagcctgacagagaagccctgggccctgggcgctggggacttcaacagcgccctgaagggcagccctggcttccaggacaagctgtggaaccccatgaagggggaggagggccgcatcccagctgctggggccagccagctggaccgggcctggcagagctttggcctgcccctgggcagcagcgagaagctgtttggagccctgaagtctgaggagaagctgtgggaccccttcagcctggaggagggccctgctgaggagccccccagcaaaggagctgtgaaggaggagaagggcggcggcggcgctgaggaggaggaggaggagctgtggagcgacagcgagcacaacttcctggatgagaacatcggcggcgtggccgtggccccagcccacggcagcatcctgattgaatgtgcccggcgggagctgcacgccaccacccccctgaagaagcccaaccgctgccaccccacccgcatcagcctggtgttctaccagcacaagaacctgaaccagcccaaccacggcctggccctgtgggaggccaagatgaagcagctggccgagcgggcccgggcccggcaggaggaggccgcccggctgggcctgggccagcaggaggccaagctgtatggcaagaagaggaagtggggcggcaccgtggtggccgagccccagcagaaggagaagaagggcgtggtgcccacccggcaggccctggccgtgcccacagacagcgctgtgacagtgagcagctatgcctacaccaaggtgacaggcccctacagccgctggatctag

SEQ ID NO: 326943 - DNA, 4983 bp, Artificial Sequence
  derived and/or modified sequence
atggacagcggccccgtgtaccacggcgacagccggcagctgagcgcctcaggtgtgccagtcaatggcgcgagggaacccgcaggcccctctctcctcggcactggaggcccttggcgcgttgaccagaagcccgactgggaggcggctcccggccccgcccataccgcccgtcttgaggacgcccacgatctggtcgctttcagtgcagtggcagaggcagtgtctagctatggcgccctgtcaacacgcctgtacgaaacttttaaccgggagatgagcagggaggcggggaataacagtcgaggccctcggcctggccctgagggctgtagcgcagggtctgaggatcttgacaccttgcagactgctctagctctggctcgtcatggcatgaagcctcccaactgcaattgcgatggcccagagtgcccagactaccttgagtggctggaggggaagatcaagtcagttgtcatggagggcggggaggaaagaccgcgtctgccaggtccgctgccgccaggggaagccggccttcctgcaccctctaccagaccccttttaagctcagaagtgccacagatatctcctcaggaggggctgccattgagtcaatctgcactcagtatcgcaaaagaaaagaacatttctctacagacggctattgccatcgaagcactgactcaattgtctagcgccctcccacagcctagccactcaaccccccaagcttcttgccccctacccgaggcactctcgcctccagccccattcagatctccacaatcttacctcagagctccctcctggcctgtagtccccccggaagagcacagtagttttgcacccgactcgagcgccttcccacctgctacacccagaactgagttccccgaggcgtgggggaccgataccccccccgcgacacccaggtcatcttggccaatgccccggccttctcccgatccgatggcagagctcgaacaattactcggatctgcttccgattatattcaatctgtcttcaaacgaccagaagccctgcctaccaagcccaaggtgaaagtcgaggctcctagcagctccccagcccctgcaccatctcccgtcctgcaaagagaagctcctacacccagctccgaacctgacacacaccagaaggctcagacagcgctgcagcagcatttgcatcacaagcgttcactcttcctagaacaggtacacgacacgagcttccctgctcctagtgagcctagtgctcctggatggtggccacctccttcgagtccggttcccagactacccgacaggccacctaaagagaagaaaaagaaattacctactcccgccggaggacccgttggaacggaaaaagccgcgccaggaatcaagccatctgttcggaagccaatacagataaagaaatcccgccctcgagaggctcaacccctctttccaccagtgcgtcaaattgtgctggagggcttacgcagccccgctagccaggaggttcaggcccaccccccagcccccctacccgcttcccagggtagcgcagtaccactgcctcccgagccttccctggcgttgttcgctccctccccaagccgggattcccttctgccgcccactcaagaaatgcgcagccctagtccaatgacagccctgcaacctggatctactggtcctctaccccctgccgatgacaagctcgaggaactcatcaggcaattcgaagctgaattcggcgactccttcggcctccctggccctccatcagtccccatccaagaccctgagaaccagcagacgtgcctgccagccccagagagcccctttgccaccagatcacctaagcagattaagatcgagagctccggcgcagtgacagtgctgagtaccacatgcttccattctgaagagggtggtcaggaggcgactcccaccaaagccgaaaaccccttgactcccactttgtcgggatttctggagtcccccctgaaatacctcgacacgcccaccaagagcttgttagacacaccagctaagagggcacaagctgagttcccaacatgcgactgcgtcgagcagatcgtggagaaggatgaaggcccttactatacgcatcttggatccggtcctacagttgcttccatccgggaattaatggaagagagatatggcgaaaagggtaaagctatccgcatcgagaaagttatatacacggggaaggaaggaaaaagctctcgcggatgtcctattgcaaagtgggtaatacgcaggcatactctggaagagaaactgctgtgtctggtgagacatcgggcggggcatcattgccagaacgccgttattgtgatcttaatactggcatgggagggcatccccaggagcctgggtgacactttgtaccaggaacttacagacacactgcgaaaatatgggaaccctacatctaggagatgcggactcaacgacgatagaacgtgtgcctgtcaggggaaggatcctaacacctgtggggcttcgttcagtttcggttgctcatggtcgatgtactttaacgggtgcaagtacgctaggtcaaagacgccccgcaagttccgtctcgccggtgataaccccaaggaagaggaggttttgaggaaaagcttccaggacctggcaacagaagtggctccactttacaagagacttgcccctcaagcttatcagaaccaggtgactaacgaggagatcgccatcgattgtcggcttggtctgaaggagggaaggcccttcgcaggtgttacagcctgcatggacttttgcgcccacgcgcacaaggatcagcataatctgtataacggttgcactgtcgtatgcacactgactaaggaagacaatagatgtgtgggcaagataccagaagacgagcagctgcacgtacttccactatataagatggccaatactgatgagtttggatctgaggaaaatcaaaacgcgaaagtcggttctggggcaatacaggttctgactgctttcccccgcgaggtgcgaagactgccggaacctgccaagagctgtcgacaaaggcaactcgaggcccgaaaagccgccgccgaaaaaaagaagatccaaaaggagaagcttagtacccccgagaaaattaagcaagaggctctggaactcgccggaatcaccagtgaccccggattgagccttaagggaggactcagccagcaaggcctgaaaccaagcctaaaggtggaaccccaaaaccatttcagtagcttcaaatactcgggcaacgccgtggttgaatcctatagcgttcttggtaactgcaggcctagtgatccgtactcgatgaattctgtgtatagttatcattcttattatgcccagcctagcctgacctccgttaacgggttccactcaaaatacgcactccccagcttcagttattacggtttcccttcttcgaatcctgtgttccctagccagttcctgggtcctggcgcttgggggcacagcgggagctcagggagctttgaaaagaaacctgatctccacgccttgcataactcactctctcccgcttatggcggcgcggaattcgcggaattaccatcacaagcggtcccaaccgacgctcatcaccccacgccccaccaccaacaaccggcttaccctggcccgaaggaatacctgcttcctaaggcaccccttcttcattcagtcagtagggatccctcgcccttcgcacagtcatccaattgctataataggtctatcaaacaggagccagtggatccactgacacaggctgagcccgtgccccgggacgccgggaaaatgggtaagacccccctcagtgaggtgtcacaaaatggcgggccctcccatctgtggggccagtattctgggggcccatcaatgtctcccaagaggacaaacggggtaggcgggagctggggagttttcagttccggagaaagcccagcaatcgtacctgacaaactgagctcctttggcgcttcatgcctggctccaagccactttactgatggtcagtggggcctgtttcccggtgaaggccagcaggccgccagtcattccggtggtcggctgcggggcaaaccctggtcgccttgtaaatttgggaatagcacttcggctctggcgggtccatcgctgaccgagaagccttgggcgcttggcgcgggtgatttcaactctgctctaaaaggatctcccggattccaggacaaactgtggaacccgatgaaaggagaagagggccgcattcctgcagccggtgcttcccaactggaccgggcctggcaaagttttggactgccactggggtcctctgagaagttgttcggggccctaaaaagtgaagaaaagctttgggaccccttttccttggaagagggacctgcggaggagccgccatccaagggcgctgtcaaagaggagaaaggaggcggcggagccgaagaagaagaagaagagctgtggagcgacagcgaacataattttctggacgagaatattggaggcgtcgccgtggccccagcgcatgggtccatcctgatcgagtgcgcgcgccgagagctccatgctaccacacccctaaaaaagccgaataggtgccaccccacacgaatctccctggtcttctaccaacataagaacctgaatcagcccaaccatggactggccctgtgggaagctaagatgaaacaactggccgagagagcccgggctcgacaggaggaagccgccagactcggcctgggacaacaggaggctaagttgtacggcaagaaacggaaatggggagggacggtggtcgccgaacctcagcagaaagagaagaagggcgtcgtccctacacgccaggccctggcggtgccgaccgactctgcagtcacagtttcaagctacgcttacaccaaggtgacaggcccttacagtcgctggatctag

SEQ ID NO: 326944 - DNA, 4983 bp, Artificial Sequence
  derived and/or modified sequence
atggactccggtccagtatatcacggcgattcacggcagctcagtgccagcggcgtgccagtgaatggggcacgggaacccgcaggaccttcactgttaggcacagggggaccatggcgggtggatcaaaagccagactgggaggccgctcccggtcctgcacataccgcccgtctggaggatgcacatgacctggttgccttcagcgcagtggcagaagcagtctcttcctacggcgctctgagcactagactttatgagacttttaacagggagatgtcacgggaggcaggcaacaatagcaggggtccgcgtccgggtcctgaaggatgctccgcagggagcgaggacctggatactctacaaactgcgctagccctggcacgtcatggtatgaaaccccctaactgcaactgcgacgggcctgaatgtcctgactatttggaatggctggaaggaaaaatcaaaagcgtggtgatggagggcggagaggaacgtccgagactgccgggaccccttcctcccggagaggctggcctgcccgctcccagtacaagaccattactatcaagtgaggtgccacagattagccctcaagagggcctgccactatcccagtctgctctgtccatcgctaaggagaaaaatatatctttacagaccgcaatagccattgaggccttaactcagttgtccagtgccctgccgcagccatcgcattcaacaccccaggcctcttgtccacttccggaagctctgtcaccccctgcgcctttcagatccccacagtcctatcttcgtgctccgagttggccggtggtgccaccggaagaacatagcagctttgcgcctgactctagcgcctttccaccagcaacgccaagaactgagtttcccgaagcctggggcaccgacaccccgcctgcaacacctcgcagcagctggccgatgcctcgcccttcacctgatcccatggccgagctggagcagctgctgggttctgcctctgattacatccaatccgtctttaagcgtcctgaggccctcccaactaaaccgaaggtgaaggtggaggccccaagcagcagccccgctcctgccccatctccagtgttgcaaagggaggctcccacaccctcatccgagccagatactcatcaaaaggcacagaccgcgctccagcaacacctccaccacaagaggtcactgttcctggagcaggtgcatgacacaagctttcccgctccgagtgaaccatcagctcctggatggtggccacctcctagctcccccgtaccacggctgccggaccggccaccaaaagaaaagaaaaaaaagttacccacccctgcaggagggccagttgggacggagaaagctgcccctggaattaagccttcagtccggaagcctatccagattaagaaatctagacctagggaagctcagcccctctttccgccagtgcggcagattgttctcgaagggttgagatcgccagcttcccaggaagtccaggctcatccgccagcaccgctgccggcatctcagggcagtgccgtccccctccctcctgagccctctctggcactgtttgccccttcgccaagccgggacagcctattgccccctacccaagagatgcggagccccagtccaatgacagcactgcagccaggaagcaccgggcctttaccacctgcggacgacaaactcgaggaactcataagacaatttgaggccgaattcggcgattctttcggactgccaggtccaccatctgtcccaatccaagacccagagaatcagcagacttgcctgccagctccagaaagtcccttcgccacccggagcccaaagcagataaaaatcgagagctctggcgctgtcactgtcctgagcaccacctgtttccactccgaggaagggggacaagaggcaacaccaactaaggctgaaaatcctttgacgcccaccttatccggatttctggagtccccactcaagtatctggatacccctaccaaatcactactggatacacccgcaaagagagctcaagcagaattccccacttgcgattgcgtggagcagatagtggaaaaggatgaaggtccatattatacgcacttggggtccggacccactgtggcatccattagagagctgatggaggagagatatggggagaaaggcaaagcgatccgcatcgagaaagtgatctacacgggcaaggaggggaaatcctctcgcggttgtccaatagccaaatgggtgattcgcagacacacactggaagagaaactcctgtgcttagtacggcatcgggctgggcatcattgtcagaatgctgtgatcgtcattttgatcctggcatgggaagggatccctaggtccctcggcgataccctgtaccaggaactgacagacacactcagaaaatacggtaacccgacgtcacgtagatgtgggctgaatgatgacaggacgtgcgcttgtcagggcaaagatcccaatacctgcggcgcatccttctcttttggatgctcttggtcgatgtacttcaacggctgcaaatatgcccgaagtaagaccccccgaaaattccggttggccggagacaaccccaaagaagaagaggtgctgaggaaatccttccaggatctagccaccgaggtggctccactgtataaacggcttgctcctcaggcttaccaaaaccaagtgaccaacgaagaaatagcgatcgactgcaggctgggattgaaggagggtagacctttcgcaggcgtaacagcttgcatggacttctgcgcccacgcccacaaagaccaacataatctgtataatgggtgtacagtggtgtgtacactgacaaaggaagacaatcgatgtgtagggaaaatccctgaggatgagcagctgcacgttctgcccctgtataaaatggcaaataccgatgagtttggaagtgaggaaaatcagaacgcaaaagttggcagcggggcaatccaagtgctgactgcttttccgagggaggtgaggcgcctgcccgaaccagcaaaatcctgtcgacagaggcagctcgaggccagaaaagctgcagcggagaaaaagaaaatccagaaggagaaactctcaacacctgagaagatcaagcaagaggcccttgagcttgccggaatcacatccgaccccggtctgagtttgaaaggtggactgagccagcagggactgaaaccctctttaaaggtggaaccacagaatcatttctccagcttcaaatacagtgggaatgccgtggtggagagctatagcgttctgggtaattgcagacccagcgatccatactccatgaattctgtatactcgtaccattcctattatgctcagccatccctgacatccgtgaatggctttcattctaaatacgcacttccgtccttcagctactacggatttccttcatcaaaccccgtgttccctagccagttccttgggccaggcgcttgggggcactctggcagctcaggatcttttgaaaagaaacctgacctgcatgctctccacaacagcctatccccagcgtatgggggagcagagttcgccgagctgccaagtcaggcagtccccaccgacgcacatcatcccacacctcatcatcagcaaccggcttatcctggcccaaaagagtatctgcttcctaaggcacctcttctgcactccgtgtcacgggacccgagcccattcgctcagtcttcaaactgctacaacaggagtatcaaacaggagccggtggatcccctaacccaggccgagccagtaccgcgagatgccggaaagatgggtaaaacaccactctcagaggtttcacagaatgggggtccgtcccatctgtggggccagtactccggcggaccctctatgtcacctaagaggaccaatggcgtgggaggaagctggggcgtattctcttctggggaatcgcctgctattgtccccgacaagctgtcctcatttggagcctcatgtctggcaccttcccatttcaccgacggacaatgggggttgttccccggtgaggggcagcaggccgcttcccattcaggagggcgactccgagggaagccctggtcgccttgtaaattcggtaattccaccagcgcactagcaggccctagcctcacagaaaaaccttgggcactgggagcaggagactttaattccgcgctcaaggggtcgccaggattccaggacaaactctggaatcccatgaaaggagaagaaggccgtattccagccgctggtgctagccagttagaccgggcttggcagagcttcggactgccgcttgggtcctctgaaaagttgtttggggctctgaaatcagaagaaaagctttgggatccgttttcactggaagagggacccgctgaagagccgccttcaaagggagccgttaaagaggaaaaaggaggcggtggtgctgaggaggaggaagaggagctgtggtccgatagtgagcacaattttctagacgaaaacatcggcggagtggccgttgcacctgcccacggcagcattctgatcgaatgtgccagaagagagcttcatgccacgaccccactgaagaagcccaatagatgccacccaacgcgaatctccttagttttctatcagcacaaaaatttaaatcagcctaaccacggtctcgccctttgggaggctaagatgaaacagctggcagaacgggctcgagccagacaggaagaggccgcacgtctggggctgggccagcaggaagccaaactttacgggaagaaacgcaaatgggggggaactgtggtggccgagccccagcagaaagagaaaaaaggggtggtgcctacccggcaggctctcgctgttcctacggacagcgcagtaactgtgtcctcttatgcatacaccaaagtgactggaccctatagccggtggatttag

SEQ ID NO: 326945 - DNA, 4635 bp, Artificial Sequence
  derived and/or modified sequence
atggactcagggccagtgtaccatggggactcacggcagctaagcgcctcaggggtgccggtcaatggtgctagagagcccgctggacccagtctgctggggactgggggtccttggcgggtagaccaaaagcccgactgggaggctgccccaggcccagctcatactgctcgcctggaagatgcccacgatctggtggccttttcggctgtggccgaagctgtgtcctcttatggggcccttagcacccggctctatgaaaccttcaaccgtgagatgagtcgtgaggctgggaacaacagcaggggaccccggccagggcctgagggctgctctgctggcagcgaagaccttgacacactgcagacggccctggccctcgcgcggcatggtatgaaaccacccaactgcaactgcgatggcccagaatgccctgactacctcgagtggctggaggggaagatcaagtctgtggtcatggaaggaggggaggagcggcccaggctcccagggcctctgcctcctggtgaggccggcctcccagcaccaagcaccaggccactcctcagctcagaggtgccccagatctctccccaagagggcctgcccctgtcccagagtgccctgagcattgccaaggaaaaaaacatcagcttgcagaccgccattgccattgaggccctcacacagctctcctctgccctcccgcagccttctcattccaccccccaggcttcttgcccccttcctgaggccttgtcacctcctgcccctttcagatctccccagtcttacctccgggctccctcatggcctgtggttcctcctgaagagcactcatcttttgctcctgatagctctgccttccctccagcaactcctagaactgagttccctgaagcctggggcactgacacccctccagcaacgccccggagctcctggcccatgcctcgcccaagccccgatcccatggctgaactggagcagttgttgggcagcgccagtgattacatccagtcagtattcaagcggcctgaggccctgcctaccaagcccaaggtcaaggtggaggcaccctcttcctccccggccccggccccatcccctgtacttcagagggaggctcccacgccatcctcggagcccgacacccaccagaaggcccagaccgccctgcagcagcacctccaccacaagcgcagcctcttcctagaacaggtgcacgacacctccttccctgctccttcagagccttctgctcctggctggtggcccccaccaagttcacctgtcccacggcttccagacagaccacccaaggagaagaagaagaagctcccaacaccagctggaggtcccgtgggaacggagaaagctgcccctgggatcaagcccagtgtccgaaagcccattcagatcaagaagtccaggccccgggaagcacagcccctcttcccacctgtccgacagattgtcctggaagggcttaggtccccagcctcccaggaagtgcaggctcatccaccggcccctctgcctgcctcacagggctctgctgtgcccctgcccccagaaccttctcttgcgctatttgcacctagtccctccagggacagcctgctgccccctactcaggaaatgaggtcccccagccccatgacagccttgcagccaggctccactggccctcttccccctgccgatgacaagctggaagagctcatccggcagtttgaggctgaatttggagatagctttgggcttcccggccccccttctgtgcccattcaggaccccgagaaccagcaaacatgtctcccagcccctgagagcccctttgctacccgttcccccaagcaaatcaagattgagtcttcgggggctgtgactgtgctctcaaccacctgcttccattcagaggagggaggacaggaggccacacccaccaaggctgagaacccactcacacccaccctcagtggcttcttggagtcacctcttaagtacctggacacacccaccaagagtctgctggacacacctgccaagagagcccaggccgagttccccacctgcgattgcgtcgaacaaatagtggagaaagatgaaggtccatattatactcacttgggatctggccccacggtcgcctctatccgggaactcatggaggagcggtatggagagaaggggaaagccatccggatcgagaaggtcatctacacggggaaggagggaaagagctcccgcggttgccccattgcaaagtgggtgatccgcaggcacacgctggaggagaagctactctgcctggtgcggcaccgggcaggccaccactgccagaacgctgtgatcgtcatcctcatcctggcctgggagggcattccccgtagcctcggagacaccctctaccaggagctcaccgacaccctccggaagtatgggaaccccaccagccggagatgcggcctcaacgatgaccggacctgcgcttgccaaggcaaagaccccaacacctgtggtgcctccttctcctttggttgttcctggagcatgtacttcaacggctgcaagtatgctcggagcaagacacctcgcaagttccgcctcgcaggggacaatcccaaagaggaagaagtgctccggaagagtttccaggacctggccaccgaagtcgctcccctgtacaagcgactggcccctcaggcctatcagaaccaggtgaccaacgaggaaatagcgattgactgccgtctggggctgaaggaaggacggcccttcgcgggggtcacggcctgcatggacttctgtgcccacgcccacaaggaccagcataacctctacaatgggtgcaccgtggtctgcaccctgaccaaggaagacaatcgctgcgtgggcaagattcccgaggatgagcagctgcatgttctccccctgtacaagatggccaacacggatgagtttggtagcgaggagaaccagaatgcaaaggtgggcagcggagccatccaggtgctcaccgccttcccccgcgaggtccgacgcctgcccgagcctgccaagtcctgccgccagcggcagctggaagccagaaaggcagcagccgagaagaagaagattcagaaggagaagctgagcactccggagaagatcaagcaggaggccctggagctggcgggcattacgtcggacccaggcctgtctctgaagggtggattgtcccagcaaggcctgaagccctccctcaaggtggagccgcagaaccacttcagctccttcaagtacagcggcaacgcggtggtggagagctactcggtgctgggcaactgccggccctccgacccttacagcatgaacagcgtgtactcctaccactcctactatgcacagcccagcctgacctccgtcaatggcttccactccaagtacgctctcccgtcttttagctactatggctttccatccagcaaccccgtcttcccctctcagttcctgggtcctggtgcctgggggcacagtggcagcagtggcagttttgagaagaagccagacctccacgctctgcacaacagcctgagcccggcctacggtggtgctgagtttgccgagctgcccagccaggctgttcccacagacgcccaccaccccactcctcaccaccagcagcctgcgtacccaggccccaaggagtatctgcttcccaaggcccccctactccactcagtgtccagggacccctccccctttgcccagagctccaactgctacaacagatccatcaagcaagagccagtagacccgctgacccaggctgagcctgtgcccagagacgctggcaagatgggcaagacacctctgtccgaggtgtctcagaatggaggacccagtcacctttggggacagtactcaggaggcccaagcatgtcccccaagaggactaacggtgtgggtggcagctggggtgtgttctcgtctggggagagtcctgccatcgtccctgacaagctcagttcctttggggccagctgcctggccccttcccacttcacagatggccagtgggggctgttccccggtgaggggcagcaggcagcttcccactctggaggacggctgcgaggcaaaccgtggagcccctgcaagtttgggaacagcacctcggccttggctgggcccagcctgactgagaagccgtgggcgctgggggcaggggatttcaactcggccctgaaaggtagtcctgggttccaagacaagctgtggaaccccatgaaaggagaggagggcaggattccagccgcaggggccagccagctggtcttctaccagcacaagaacctcaaccagcccaaccacgggctggccctctgggaagccaagatgaagcagctggcggagagggcacgggcacggcaggaggaggctgcccggctgggcctgggccagcaggaggccaagctctacgggaagaagcgcaagtgggggggcactgtggttgctgagccccagcagaaagagaagaagggggtcgtccccacccggcaggcactggctgtgcccacagactcggcggtcaccgtgtcctcctatgcctacacgaaggtcactggcccctacagccgctggatctag

SEQ ID NO: 326946 - DNA, 5378 bp, Artificial Sequence
  derived and/or modified sequence
atggactcagggccagtgtaccatggggactcacggcagctaagcgcctcaggggtgccggtcaatggtgctagagagcccgctggacccagtctgctggggactgggggtccttggcgggtagaccaaaagcccgactgggaggctgccccaggcccagctcatactgctcgcctggaagatgcccacgatctggtggccttttcggctgtggccgaagctgtgtcctcttatggggcccttagcacccggctctatgaaaccttcaaccgtgagatgagtcgtgaggctgggaacaacagcaggggaccccggccagggcctgagggctgctctgctggcagcgaagaccttgacacactgcagacggccctggccctcgcgcggcatggtatgaaaccacccaactgcaactgcgatggcccagaatgccctgactacctcgagtggctggaggggaagatcaagtctgtggtcatggaaggaggggaggagcggcccaggctcccagggcctctgcctcctggtgaggccggcctcccagcaccaagcaccaggccactcctcagctcagaggtgccccagatctctccccaagagggcctgcccctgtcccagagtgccctgagcattgccaaggaaaaaaacatcagcttgcagaccgccattgccattgaggccctcacacagctctcctctgccctcccgcagccttctcattccaccccccaggcttcttgcccccttcctgaggccttgtcacctcctgcccctttcagatctccccagtcttacctccgggctccctcatggcctgtggttcctcctgaagagcactcatcttttgctcctgatagctctgccttccctccagcaactcctagaactgagttccctgaagcctggggcactgacacccctccagcaacgccccggagctcctggcccatgcctcgcccaagccccgatcccatggctgaactggagcagttgttgggcagcgccagtgattacatccagtcagtattcaagcggcctgaggccctgcctaccaagcccaaggtcaaggtggaggcaccctcttcctccccggccccggccccatcccctgtacttcagagggaggctcccacgccatcctcggagcccgacacccaccagaaggcccagaccgccctgcagcagcacctccaccacaagcgcagcctcttcctagaacaggtgcacgacacctccttccctgctccttcagagccttctgctcctggctggtggcccccaccaagttcacctgtcccacggcttccagacagaccacccaaggagaagaagaagaagctcccaacaccagctggaggtcccgtgggaacggagaaagctgcccctgggatcaagcccagtgtccgaaagcccattcagatcaagaagtccaggccccgggaagcacagcccctcttcccacctgtccgacagattgtcctggaagggcttaggtccccagcctcccaggaagtgcaggctcatccaccggcccctctgcctgcctcacagggctctgctgtgcccctgcccccagaaccttctcttgcgctatttgcacctagtccctccagggacagcctgctgccccctactcaggaaatgaggtcccccagccccatgacagccttgcagccaggctccactggccctcttccccctgccgatgacaagctggaagagctcatccggcagtttgaggctgaatttggagatagctttgggcttcccggccccccttctgtgcccattcaggaccccgagaaccagcaaacatgtctcccagcccctgagagcccctttgctacccgttcccccaagcaaatcaagattgagtcttcgggggctgtgactgtgctctcaaccacctgcttccattcagaggagggaggacaggaggccacacccaccaaggctgagaacccactcacacccaccctcagtggcttcttggagtcacctcttaagtacctggacacacccaccaagagtctgctggacacacctgccaagagagcccaggccgagttccccacctgcgattgcgtcgaacaaatagtggagaaagatgaaggtccatattatactcacttgggatctggccccacggtcgcctctatccgggaactcatggaggagcggtatggagagaaggggaaagccatccggatcgagaaggtcatctacacggggaaggagggaaagagctcccgcggttgccccattgcaaagtgggtgatccgcaggcacacgctggaggagaagctactctgcctggtgcggcaccgggcaggccaccactgccagaacgctgtgatcgtcatcctcatcctggcctgggagggcattccccgtagcctcggagacaccctctaccaggagctcaccgacaccctccggaagtatgggaaccccaccagccggagatgcggcctcaacgatgaccggacctgcgcttgccaaggcaaagaccccaacacctgtggtgcctccttctcctttggttgttcctggagcatgtacttcaacggctgcaagtatgctcggagcaagacacctcgcaagttccgcctcgcaggggacaatcccaaagaggaagaagtgctccggaagagtttccaggacctggccaccgaagtcgctcccctgtacaagcgactggcccctcaggcctatcagaaccaggtgaccaacgaggaaatagcgattgactgccgtctggggctgaaggaaggacggcccttcgcgggggtcacggcctgcatggacttctgtgcccacgcccacaaggaccagcataacctctacaatgggtgcaccgtggtctgcaccctgaccaaggaagacaatcgctgcgtgggcaagattcccgaggatgagcagctgcatgttctccccctgtacaagatggccaacacggatgagtttggtagcgaggagaaccagaatgcaaaggtgggcagcggagccatccaggtgctcaccgccttcccccgcgaggtccgacgcctgcccgagcctgccaagtcctgccgccagcggcagctggaagccagaaaggcagcagccgagaagaagaagattcagaaggagaagctgagcactccggagaagatcaagcaggaggccctggagctggcgggcattacgtcggacccaggcctgtctctgaagggtggattgtcccagcaaggcctgaagccctccctcaaggtggagccgcagaaccacttcagctccttcaagtacagcggcaacgcggtggtggagagctactcggtgctgggcaactgccggccctccgacccttacagcatgaacagcgtgtactcctaccactcctactatgcacagcccagcctgacctccgtcaatggcttccactccaagtacgctctcccgtcttttagctactatggctttccatccagcaaccccgtcttcccctctcagttcctgggtcctggtgcctgggggcacagtggcagcagtggcagttttgagaagaagccagacctccacgctctgcacaacagcctgagcccggcctacggtggtgctgagtttgccgagctgcccagccaggctgttcccacagacgcccaccaccccactcctcaccaccagcagcctgcgtacccaggccccaaggagtatctgcttcccaaggcccccctactccactcagtgtccagggacccctccccctttgcccagagctccaactgctacaacagatccatcaagcaagagccagtagacccgctgacccaggctgagcctgtgcccagagacgctggcaagatgggcaagacacctctgtccgaggtgtctcagaatggaggacccagtcacctttggggacagtactcaggaggcccaagcatgtcccccaagaggactaacggtgtgggtggcagctggggtgtgttctcgtctggggagagtcctgccatcgtccctgacaagctcagttcctttggggccagctgcctggccccttcccacttcacagatggccagtgggggctgttccccggtgaggggcagcaggcagcttcccactctggaggacggctgcgaggcaaaccgtggagcccctgcaagtttgggaacagcacctcggccttggctgggcccagcctgactgagaagccgtgggcgctgggggcaggggatttcaactcggccctgaaaggtagtcctgggttccaagacaagctgtggaaccccatgaaaggagaggagggcaggattccagccgcaggggccagccagctggacagggcctggcagtcctttggtctgcccctgggatccagcgagaagctgtttggggctctgaagtcagaggagaagctgtgggaccccttcagcctggaggaggggccggctgaggagccccccagcaagggagcggtgaaggaggagaagggcggtggtggtgcggaggaggaagaggaggagctgtggtcggacagtgaacacaacttcctggacgagaacatcggcggcgtggccgtggccccagcccacggctccatcctcatcgagtgtgcccggcgggagctgcacgccaccacgccgcttaagaagcccaaccgctgccaccccacccgcatctcgctggtcttctaccagcacaagaacctcaaccagcccaaccacgggctggccctctgggaagccaagatgaagcagctggcggagagggcacgggcacggcaggaggaggctgcccggctgggcctgggccagcaggaggccaagctctacgggaagaagcgcaagtgggggggcactgtggttgctgagccccagcagaaagagaagaagggggtcgtccccacccggcaggcactggctgtgcccacagactcggcggtcaccgtgtcctcctatgcctacacgaaggtcactggcccctacagccgctggatctaggtgccagggagccagcgtacctcagcgtcgggcctggcccgagctgtctctgtggtgcttttgccctcatacctgggggcgggttgggggtgcagaagtctttttatctctatatacatatatagatgcgcatatcatatatatgtatttatggtccaaacctcagaactgacccgcccctcccttacccccacttccccagcactttgaagaagaaactacggctgtcgggtgatttttccgtgatcttaatatttatatctccaagttgtcccccccccttgtctggggggtttttatttttattttctctttgtttttaaaactctatccttgtatatcacaataatggaaagaaagtttatagtatcctttcacaaaggagtagttttaaa

SEQ ID NO: 326947 - DNA, 4635 bp, Artificial Sequence
  derived and/or modified sequence
atggatagtggaccagtgtatcacggtgatagcagacagttgagtgcctctggtgtccctgtaaacggagcaagggaacctgcgggcccctcactgctgggaacgggaggaccatggcgagtcgatcagaaacccgattgggaagccgctccaggaccagcccacacagccagactcgaggatgcccatgatctggtagctttctccgcagtggcagaagctgtcagttcgtacggtgccctgagtacccggctatacgaaacatttaatcgagagatgagccgtgaagctgggaacaattccagaggaccccgccctggacccgagggctgctccgcaggcagtgaggatctcgatactctgcaaaccgctctagcgctggccagacatggaatgaagcctccaaattgcaactgcgacgggccagaatgtccagactacctagaatggttggaagggaaaatcaaatctgtcgtgatggagggtggagaagagcgcccccgactgccaggaccattaccaccaggtgaagccgggctccctgctccctcaacacgaccactgttgagcagcgaggttcctcagatctcaccacaggaggggctccccttgtcccagtcagccttgagcattgctaaggaaaagaatatttcactacagactgcgatcgccatcgaagcactgacgcagctgagctcagctttgcctcagcctagccatagcaccccgcaagcatcttgcccccttccagaggccctctctccacccgcaccatttcgttcaccccaatcctacctgcgcgccccgagttggcctgttgttcccccagaagaacacagcagttttgccccggacagtagcgcatttccccccgctacccctcggacagagtttccggaggcctggggaaccgatactcctccggccactcctcgaagctcttggccgatgcctcggccctctccagaccctatggccgagctggaacaactcctaggcagtgcttccgactacatccagtcggtcttcaagagacctgaggccctcccgaccaagcctaaggtaaaggttgaggccccatcaagctcccctgctcccgccccatcccccgttctgcagagagaggctcctactccctctagcgagccagacacccatcagaaggcccagaccgcactgcagcagcacctacaccacaagcggtccctattcctggaacaggtccacgacaccagctttcctgctccctccgagccgtccgcgcctggatggtggccgccacctagtagcccagtcccaagattgccagacagaccccccaaggaaaaaaagaagaaacttcccacccctgcagggggaccagtgggcacggaaaaagctgccccgggcataaagccctcggtccgcaaacctatccaaatcaaaaaaagtcgccctagggaggcacagccactctttcctcctgttcgtcagatcgtcctcgaagggcttagatctcccgcctcccaggaggtacaagctcacccccctgcccctctgcccgctagtcaggggtccgctgttcccttacctcctgagcctagtttggcacttttcgcaccctcgccaagccgtgatagcctgctgccccccactcaggagatgcgtagcccttcccctatgaccgccctacagccagggtcaacggggcccctgccccccgcagacgataagttggaggaattaatccgtcaatttgaggcagagtttggcgatagcttcggcttacctgggcctccttctgtccccatccaagatccggaaaaccagcaaacttgccttcctgcccccgaatctccatttgccacccgcagccccaaacagataaaaattgaatcaagtggtgccgtgacagtactatctacaacttgcttccacagtgaggagggcggccaggaggcaacccctactaaggccgaaaaccctctgacacctaccctgagtggctttttggagtcgcctctgaagtatttggatactcctaccaagtcattgctggacacacctgcgaagagggcccaggctgagtttccgacatgtgattgtgtggagcagattgtagaaaaggacgaaggaccatattatacgcatctgggttcgggacccactgttgccagcatccgggaactcatggaggaacggtatggcgaaaaaggcaaagcaatcagaattgagaaagtgatctatactggcaaagagggcaagtcgagtcgaggttgccccatcgccaaatgggttatcagacgacacaccctggaggagaagcttctctgcttggtccgacacagggctggccaccactgccagaatgccgttattgttatcctgattctggcatgggaaggcatcccaagaagcctcggagataccttgtatcaggaattaaccgacacacttcgaaagtacggaaatcccacttcccgcagatgtgggctgaacgacgatcgtacatgtgcttgtcaaggcaaagatcccaatacttgtggcgcatccttcagcttcggatgctcctggagtatgtacttcaatggctgtaagtatgcccggtccaagacacctaggaaattcaggctcgccggggacaacccaaaagaggaagaggtgctcagaaaatcattccaagacctggcaacagaggtagctcctctctataagagactggccccccaggcctatcagaaccaggtgaccaatgaggagattgctatcgactgcagattgggactcaaggagggtagaccctttgctggcgtcacggcatgcatggatttttgtgcccacgctcacaaagatcagcataatctgtacaatggctgtacagtggtgtgcacccttaccaaggaggataatcgatgtgttggaaagatcccagaggacgagcagttacatgtccttcctctgtacaaaatggcaaacaccgacgaattcgggagcgaagagaaccagaatgccaaggtagggtctggggcaatccaggtacttactgctttcccgcgcgaagtcagacgcctgcccgagccagcgaaatcctgccgccagcgacaactagaggctaggaaggctgccgccgagaagaaaaaaatccagaaggaaaaactgtcaacccccgagaagattaagcaggaggcactggagctggcggggattacgtctgacccaggcctttccttgaagggcggtttatcacaacaggggctgaagccatcccttaaggtcgagccacagaatcacttcagttcattcaaatattccggcaacgctgtcgtcgaaagctacagtgttctgggcaactgtaggccctctgacccttactccatgaatagtgtttactcctaccattcttactatgctcaaccctcccttacatccgtcaacggattccatagtaagtatgcccttccgtcattttcttactatgggtttcccagtagcaatcctgttttcccgtcacagttcctgggacctggcgcctgggggcatagtggctcgtccggcagctttgagaaaaaaccagatctgcacgcgctccataactccctgtcacctgcttatggtggggctgagttcgccgaattaccttcacaggccgttccaacggacgcacatcaccccactccccatcaccagcagcccgcttatccaggccccaaggaatacctgttaccgaaggcccctctactgcattccgtgtcgagagatccctctccctttgctcagtcgagtaattgttacaacagaagtatcaagcaggagcccgtagatcccctgacacaagccgaacctgtcccacgtgacgcgggaaagatgggaaagaccccactctccgaagtgtcccagaatggaggaccgtcccatctttggggacagtattcgggcggcccgagcatgtctccaaaacgcacaaatggtgtgggcggaagctggggcgtcttctcaagcggcgagagcccagctattgttcctgacaagctcagctcctttggtgcttcttgtctggctccttctcatttcaccgacggacagtggggcctgtttcccggcgaaggtcagcaggccgcctcccactcagggggccggctgcggggcaagccctggagtccctgcaagttcggaaactccacaagcgccctggctggcccctctctgactgaaaagccttgggccttaggagccggggattttaatagcgcgttgaaggggtccccgggcttccaagataagctgtggaaccccatgaaaggagaggagggtcggattcctgccgctggcgcctctcaattggtcttctatcagcacaagaacttaaatcagcctaatcacggactcgccctgtgggaagctaaaatgaaacagcttgccgaacgcgcacgcgctcgacaggaagaggctgcgaggctcggcttaggccagcaggaggctaaactgtacgggaaaaagcggaagtggggggggaccgttgttgcagagccccagcaaaaggaaaagaagggggtggtacctacccgccaggccctagcggtgcctactgattcagctgtaacagtgagttcctacgcttacacaaaagtgaccgggccatactcccggtggatttag

SEQ ID NO: 326948 - DNA, 4635 bp, Artificial Sequence
  derived and/or modified sequence
atggattctggccctgtgtaccacggggacagccggcagctgagcgccagcggcgtgcctgtgaatggagcccgggagcccgccggccccagcctgctgggcactggaggcccctggagggtggaccagaagccagactgggaggccgcccctggccctgcccacacagcccggctggaggatgcccatgacctggtggccttctctgctgtggccgaggccgtgtcctcctatggagccctgagcacccggctgtatgagaccttcaaccgggagatgagccgggaggccggcaacaacagccggggcccccggcccggccctgagggctgcagcgctggcagcgaggacctggacaccctgcagacagccctggccctggcccggcacggcatgaagccacccaactgcaactgtgatggcccagaatgtcctgactacctggagtggctggagggcaagatcaagtctgtggtgatggagggcggggaggagcggccccggctgcccggccccctgcccccaggagaggccggcctgcctgcccccagcacccggcccctgctgagcagcgaggtgccccagatcagcccccaggagggcctgcccctgagccagagcgccctgagcatcgccaaggagaagaacatcagcctgcagacagccatcgccatcgaggccctgacccagctgagcagcgccctgccccagcccagccacagcaccccccaggccagctgccccctgcctgaggccctgagccccccagcccccttccgcagcccccagagctacctgcgggcccccagctggcctgtggtgcccccagaggagcacagcagctttgccccagacagcagcgccttccccccagccacccccaggacagagttccctgaggcctggggcacagacaccccaccagccacccccaggagctcctggcccatgccccggcccagcccagaccccatggccgagctggagcagctgctgggcagcgccagtgactacatccagagcgtcttcaagaggcctgaggccctgcccaccaagcccaaggtgaaggtggaggcccccagcagcagccctgccccagcccccagccctgtgctgcagcgggaggcccccacccccagcagcgagccagacacccaccagaaggcccagacagccctgcagcagcacctgcaccacaagaggagcctcttcctggagcaggtgcatgacaccagcttccctgcccccagcgagcccagcgcccctggctggtggcccccacccagcagccctgtgccccggctgcctgacaggcctcccaaggagaagaagaagaagctgcccaccccagctgggggccctgtgggcacagagaaggccgcccctggcatcaagcccagcgtgaggaagcccatccagatcaagaagagccggccccgggaggcccagcccctcttcccccctgtgcggcagatcgtgctggagggcctgcggagccctgccagccaggaggtgcaggcccaccccccagcccccctgcctgccagccagggcagcgctgtgcccctgcccccagagcccagcctggccctgtttgcccccagccccagccgggacagcctgctgccccccacccaggagatgaggagccccagccccatgacagccctgcagcccggcagcacaggccccctgcccccagcagatgacaagctggaggagctgatccggcagtttgaagctgagtttggagacagctttggcctgcccggcccccccagcgtgcccatccaggaccctgagaaccagcagacctgcctgcctgcccctgagagcccctttgccaccaggagccccaagcagatcaagattgagagcagtggagctgtgacagtgctgagcaccacctgcttccacagcgaggagggcggccaggaggccacccccaccaaggccgagaaccccctgacccccaccctgagcggcttcctggagagccccctgaagtacctggacacccccaccaagagcctgctggacaccccagccaagagggcccaggccgagttccccacctgtgactgtgtggagcagatcgtggagaaggatgagggcccctactacacccacctgggcagcggccccaccgtggccagcatccgggagctgatggaggagcgctacggggagaagggcaaggccatcagaattgagaaggtgatctacacaggcaaggagggcaagagcagccggggctgccccatcgccaagtgggtgatcagaagacacaccctggaggagaagctgctgtgcctggtgcgccacagagctggccaccactgccagaatgctgtgattgtcatcctgatcctggcctgggagggcatccccaggagcctgggggacaccctgtaccaggagctgacagacaccctgaggaaatatggcaaccccaccagcagaagatgtggcctgaatgatgacaggacctgtgcctgccagggcaaggaccccaacacctgtggggccagcttctcctttggctgctcctggagcatgtacttcaacggctgcaagtatgcccggagcaagacccccaggaagttccggctggccggggacaaccccaaggaggaggaggtgctgaggaagagcttccaggacctggccacagaggtggcccccctgtacaagaggctggccccccaggcctaccagaaccaggtgaccaatgaggagatcgccatcgactgccgcctgggcctgaaggagggccggccctttgctggggtgacagcctgcatggacttctgtgcccacgcccacaaggaccagcacaacctgtacaacggctgcaccgtggtgtgcaccctgaccaaggaggacaacagatgtgtgggcaagatcccagaagatgagcagctgcacgtgctgcccctgtacaagatggccaacacagatgaatttggaagtgaggagaaccagaatgccaaggtgggcagcggggccatccaggtgctgacagccttcccccgggaggtgcggcggctgcctgagcccgccaagagctgccggcagaggcagctggaggccaggaaggctgctgctgagaagaagaagatccagaaggagaagctgagcaccccagagaagatcaagcaggaggccctggagctggccggcatcaccagtgaccccggcctgagcctgaagggcggcctgagccagcagggcctgaagcccagcctgaaggtggagccccagaaccacttcagcagcttcaagtacagcggaaatgctgtggtggagagctacagcgtgctgggcaactgccggcccagcgacccctacagcatgaacagcgtgtacagctaccacagctactatgcccagcccagcctgacctctgtgaatggcttccacagcaaatatgccctgcccagcttctcctactacggcttccccagcagcaaccctgtgttccccagccagttcctgggccctggggcctggggccacagcggcagcagcggcagctttgagaagaagccagacctgcacgccctgcacaacagcctgagccctgcctatggaggagctgagtttgctgagctgcccagccaggccgtgcccacagatgcccaccaccccaccccccaccaccagcagcctgcctacccaggccccaaggagtacctgctgcccaaggcccccctgctgcacagcgtgtcccgggaccccagcccctttgcccagagcagcaactgctacaacagaagcatcaagcaggagcctgtggaccccctgacccaggccgagcctgtgcccagagatgctgggaagatgggcaagacccccctgtctgaggtgtcccagaatggaggccccagccacctgtggggccagtacagcggcggccccagcatgagccccaagaggaccaatggagtgggcggctcctggggcgtcttcagcagcggggagagccctgccatcgtgcctgacaagctgagcagctttggagccagctgcctggcccccagccacttcacagatggccagtggggcctcttccctggagagggccagcaggccgccagccacagcggcggccgcctgcggggcaagccctggagcccctgcaagtttggaaacagcaccagcgccctggccggccccagcctgacagagaagccctgggccctgggcgctggggacttcaacagcgccctgaagggcagccctggcttccaggacaagctgtggaaccccatgaagggggaggagggccgcatcccagctgctggggccagccagctggtgttctaccagcacaagaacctgaaccagcccaaccacggcctggccctgtgggaggccaagatgaagcagctggccgagcgggcccgggcccggcaggaggaggccgcccggctgggcctgggccagcaggaggccaagctgtatggcaagaagaggaagtggggcggcaccgtggtggccgagccccagcagaaggagaagaagggcgtggtgcccacccggcaggccctggccgtgcccacagacagcgctgtgacagtgagcagctatgcctacaccaaggtgacaggcccctacagccgctggatctag

SEQ ID NO: 326949 - DNA, 4635 bp, Artificial Sequence
  derived and/or modified sequence
atggacagcggccccgtgtaccacggcgacagccggcagctgagcgcctctggcgtccccgtgaatggagccagagaacccgccggcccatctctgctcggaactgggggtccctggcgtgtcgaccaaaagcctgactgggaagccgctcctggacctgcccatactgcccgccttgaggacgctcacgacctcgtggctttcagtgcagtcgcagaagctgtgagctcctatggagctctgtcaactcgcctgtatgaaacgtttaatcgcgagatgtcgagggaggctgggaacaacagccggggcccccgccctggccctgaaggatgctctgccggtagcgaagatctagacacactacaaaccgcactggctttggccaggcacggtatgaaacctcccaattgtaactgcgacgggcccgagtgccccgattaccttgaatggttggaaggcaagattaagtctgtggtaatggaaggcggcgaggaaaggccgagactgcctgggccacttcctccaggagaggctgggttgcccgcaccatcaacacgcccgctgctctctagtgaagttccgcagatttcccctcaggagggactccctctgtctcagtccgccttgagcattgcaaaagaaaagaatattagcctgcagacagcaattgccatcgaagcgctgacgcagttatcttcagccctccctcagcccagtcatagcacccctcaggcgagctgtccattaccagaagccttgtcgccgccggcaccctttcggtctccgcagagctatcttcgggcaccatcttggcctgtggtccctcctgaagaacacagctccttcgcccctgacagctcagccttccctccagctactcccaggactgagtttccagaagcatggggcactgatacccctccagctactcctaggtcatcctggcctatgccccgacctagtccagatcccatggctgaactggagcaattacttggcagcgcctcagattacatccagtccgtattcaaaagacccgaggcgctcccaactaagcccaaagtcaaggttgaagcgccaagttcaagccccgccccagctccgtccccagtgttacagcgggaagcccccacccccagcagtgaacctgacactcaccagaaggcccagacggccctacaacagcacctccaccacaagaggagtctgttcctggagcaggtccacgatacttccttccccgcaccctcagagccttccgcccccggatggtggccacccccatcctcccctgtgccccgtttgcccgaccggccgccgaaggagaaaaaaaaaaaactgcctacacccgcagggggtccagtgggaacagaaaaagccgctccagggattaagccctccgttaggaaacccattcagatcaagaagagccggccaagggaggcccagcctctgttccccccagtccgccagattgtgctggaaggtttgaggagccccgcgtcccaagaagttcaggcgcaccctccggcccctctcccggcatcccaagggtccgcagtgccactgcctcctgagccctcactcgccctattcgctccatcgccctcccgtgattcccttctgccgccaacccaggagatgagatctccctctcctatgaccgccctccagcctggcagcactggccccctgccaccggccgatgataaactggaagaattgatcagacagtttgaggccgaattcggagactctttcggtcttccaggccctcccagcgtccctatacaggatccagagaaccagcagacatgtctgccagctccagaaagcccattcgccactcggtctccaaaacaaatcaagatagagtcatctggtgcagttaccgtcctctccacaacatgtttccattccgaggaagggggccaggaagctacgcccacaaaggctgagaaccccctcacccccacgctttcaggcttccttgagtcaccgctgaagtatctcgatacacccacaaagtccctcttagatacaccagccaagcgcgcccaggcagagtttcccacttgcgactgcgtggagcagatcgtggaaaaagacgaaggtccctactacacccaccttggttccggccctacagttgcatcgatcagggagctaatggaggagcggtacggcgagaaagggaaagcaatcagaatagagaaggtcatatataccggcaaagaggggaaaagttcccggggctgccccatcgccaaatgggtgatacgccgacacacattggaagagaagttactctgcttggtcagacatagggccggacaccactgtcaaaacgcagtaatcgtcattctcatcttggcatgggagggcattccccggtctctgggagataccttgtatcaggaactgaccgacacccttaggaaatacggaaacccaaccagtcgaaggtgcggcctgaacgatgatagaacatgcgcatgtcagggaaaggaccccaatacctgtggggcttcctttagcttcggatgcagctggagcatgtactttaacgggtgtaagtacgcacggagtaagacacctcggaagttccgtcttgcgggagacaacccgaaggaggaagaggtgctgcgtaagtcattccaggatctcgccactgaagtcgcccccttgtacaaacggctcgccccacaagcatatcaaaaccaggtcactaatgaggaaattgccattgattgtcggcttggcctcaaggaagggcgccctttcgccggcgttacagcgtgtatggatttttgcgcacacgctcataaggaccagcacaacctgtacaacggttgcacagttgtttgcacactgaccaaagaggataacaggtgcgtgggaaaaattccggaagacgaacaactgcatgtcctgcccctgtataagatggccaatactgacgaatttggaagcgaggagaatcaaaatgccaaggttggcagtggtgctatccaagttctgaccgcattcccgcgcgaagtgaggaggctcccagagccagccaagagttgtcgacaacgccagcttgaggctaggaaggccgccgcagagaaaaaaaagattcagaaggaaaagctctctactccagagaaaatcaagcaggaagctcttgagctagccggcataacatctgatccaggactgtctctcaagggaggtctgagccagcaagggctcaagcctagtctgaaggtggaacctcagaaccacttttcaagcttcaagtacagtggaaacgctgtagttgagagttattccgtcttgggcaactgtcgacccagcgacccttattctatgaattccgtctacagttatcattcctactacgcacagccttcgctgaccagtgtgaatgggtttcattcgaagtacgcgctgccgtccttcagctactatggctttccttcatccaatcctgtcttcccctcacaatttctcggaccgggagcttgggggcattccgggtcaagcggctcttttgagaagaagccagatctgcatgcactgcataattctctgtcacccgcgtacggcggggcggagtttgcagagctcccctcacaggccgttcctacggacgcgcaccaccctaccccccaccaccaacagccagcatatccaggtccgaaggagtatctcctcccaaaggcccctctgctgcactctgtgagtagggatccatcccccttcgcccaatccagtaattgttataatcggagcatcaagcaagagcctgtcgacccactgacccaggccgaacctgtacccagagacgccggtaagatgggaaagacaccactgtctgaagtgtcgcaaaacggggggcccagtcatctgtggggccagtattcaggaggaccttccatgtccccgaagcggactaatggagttggaggatcctggggagtgttttcctcgggggagtcccccgcaatcgtgcccgacaaactgagctcttttggtgcctcttgcctcgcaccaagccacttcaccgacggccagtggggcctgttcccaggtgagggccagcaggcggcatctcattctggaggccggttaaggggtaagccctggagcccatgcaagttcggaaactccaccagtgctctcgctggaccgtctcttacggaaaaaccttgggcactcggcgccggggactttaattctgcactaaaagggagcccagggttccaggacaaactgtggaaccccatgaaaggggaagagggccgaatccccgccgctggcgcctctcagttggttttctaccaacataaaaacctgaaccagccaaatcacggtctggcgctctgggaggcaaagatgaagcagcttgccgagagggcccgcgcacggcaggaggaggccgccagactgggcctcggtcaacaggaagcgaaattgtatggcaaaaaacgcaagtggggcgggaccgttgtggcagaaccgcagcagaaagaaaagaagggggtagtgcctacacgccaagccttagctgtaccaactgactccgcagtcactgtgtcatcttacgcctatacgaaggtgactggtccgtatagtcgatggatctag

SEQ ID NO: 326950 - DNA, 4635 bp, Artificial Sequence
  derived and/or modified sequence
atggatagcggacctgtgtatcatggagactccagacagttatctgcctccggggtgcccgtcaatggtgcacgtgagcctgccggaccctcactgttgggaacaggagggccttggagagtggatcagaaaccagattgggaagcagcgcctggcccagctcacacggctcgtttggaggatgcccatgatttagtggccttttcagctgtggctgaggctgtgtctagctacggagcattgtcaacgcgcctgtatgagactttcaatagagagatgtctagagaagcagggaacaacagcaggggccctcggccagggccagagggatgtagcgcgggaagtgaggatctcgataccctccagacagccctcgccttggcaaggcacggcatgaaacccccaaattgtaattgtgatggacccgagtgccccgattacctggagtggctggaaggcaagatcaaaagtgtagtgatggaggggggtgaagagaggccaaggctgcccggacctctgcctccaggagaagctggcctgcctgctcctagcaccagaccccttctatcaagtgaggtaccccagattagcccacaggagggcttacccctgagccagtccgctctctctatagcaaaagagaaaaatatctctctgcagaccgctatcgctattgaggctctgacccagctgagcagcgctctaccccagccaagtcattccactccacaggctagctgccctctccccgaggctctgagccctccagctccattccgctctccccaaagttacttgagagccccatcttggccagtggtgccgccagaggagcacagtagttttgcgccagactcttctgcctttcctcccgctacgccccgaacagagtttccagaggcatggggtaccgatactcctcccgctaccccacgcagtagctggccgatgcctcgcccttctcccgaccccatggccgagttggagcaactccttgggtctgcctctgattacatccaaagcgtatttaaacgccctgaagccctgccaacgaagccaaaagtaaaggtggaagctccaagctcatccccagccccagccccatcccccgtactgcaaagggaagcccctaccccaagctccgagccagatacccaccagaaagcgcaaaccgccctgcagcagcatttacaccacaagcggagcttgttcttagaacaggttcatgatacgtccttccccgcaccctccgaacccagcgcacctggctggtggccccctcctagctctcccgtgcctcgacttccagaccggccacctaaggaaaagaagaagaaactcccaactccggctggcggacctgtcggaacagagaaggcagccccaggaatcaaacccagcgtgcgcaaacccatccagatcaagaagtctaggccccgagaggctcagcccctttttcccccagtgaggcaaatcgtgctcgaaggcctgcggagtcctgcgtctcaggaagttcaagcccaccccccagcccctctgcccgcatctcagggatcagccgtgcccctccccccagagccctctcttgctctgtttgcccctagcccatcccgggactcacttctcccacctactcaagaaatgaggagccctagccctatgacggcattacagcccggatcaaccggaccgttacccccagccgatgacaagctcgaagagctgattagacagtttgaggcagaattcggggattccttcggcctcccaggacctccaagtgttccgatacaggatcccgaaaatcagcagacctgtctgcctgcacccgaaagcccattcgctacgaggtccccaaaacaaatcaagattgaatcatctggcgctgttactgtgctgtcaactacatgctttcactccgaagaaggcggacaggaggctactccgaccaaggccgaaaatcctctgacgcctaccttatctgggtttctcgaatccccattgaagtacctggatactcctaccaagagcctgctggatacaccagcaaaaagggcacaagctgaattccccacatgtgactgtgttgagcagatagtcgaaaaggacgagggcccttactacacccacctcggatccggtcccaccgtggcatctatacgggaactgatggaggagcgatacggtgaaaagggcaaggctattcggattgaaaaggttatatacacagggaaggaagggaaatcttcccgcggttgtcccattgctaagtgggtgatccgcagacacaccctggaggaaaaactcctgtgcctggtgcgccacagagctgggcaccattgtcagaatgcagtgatcgtcatcctgattttggcctgggaaggaatacctcggtccttgggcgacacactgtatcaggaattaacagacactctgcgaaagtatgggaatccgacatcacggagatgcggcctcaatgatgaccggacatgcgcctgtcaagggaaagatcctaatacctgcggagccagtttttcctttgggtgtagttggtcgatgtactttaatggctgcaaatacgcgcgtagcaagacaccccgaaaattccgacttgcaggtgacaacccaaaagaagaggaggtgctccggaagtcttttcaagacctggctaccgaagtagctccgctgtacaaacgcttggccccacaggcatatcagaaccaggttactaacgaagagatagccatagactgtcggcttggcttaaaagagggccgtcccttcgccggagttacagcgtgtatggacttttgcgcccacgcccacaaggaccagcacaacctatataacggttgcacagtcgtatgtactcttaccaaggaggacaacagatgcgtgggaaaaattccagaggatgagcaactacacgttctgcccctgtacaagatggcaaacaccgacgaattcggcagcgaggaaaaccaaaatgcaaaggttggctccggggcaattcaagtcctgactgcgtttcccagggaagtacgaagactcccggagcccgctaaatcatgtaggcagcgccagttggaggccaggaaggccgctgctgagaaaaaaaaaatccagaaggaaaaattgtctacaccagagaaaatcaaacaggaggctctcgagttggctgggattacctcggatcctgggctgtccctcaaggggggtttgagtcaacagggtctcaagccatccctgaaggttgagcctcagaatcattttagctcgttcaaatattcgggaaacgccgttgtggagagttacagtgttttaggaaactgtagaccttccgacccttacagcatgaattcagtgtattcctaccattcttattatgctcagcctagcctgacttcagtaaatggttttcactctaagtacgccctgcctagctttagctactacgggttccctagcagcaatcccgttttcccctctcaatttctcgggcctggggcatgggggcacagcggctccagcggcagctttgaaaagaagcccgatctccacgccctgcataatagtttgtctcctgcttacgggggtgccgaattcgctgagctaccttcccaggcagtgcccacggatgctcatcaccccacaccccaccaccaacagcccgcttaccccggaccaaaggaatatcttctgccgaaggcacccctgttgcactctgttagccgggaccctagcccattcgcgcaaagctctaactgctataaccggtcaatcaagcaggagcctgttgatccactgacgcaggccgagcccgtgccacgtgacgccggaaaaatggggaagacaccactatctgaagtttcacagaacgggggaccctcacacctctggggccagtactccggaggaccaagcatgagcccaaagcggaccaacggggtaggagggtcctggggagtgttttcatcaggagaatcacctgctatcgtgcccgacaaactcagtagctttggtgctagctgcctggcccctagccatttcaccgacggacaatggggactctttcccggagaaggacagcaggctgcctcacattcaggcggaagactccggggaaagccctggagcccttgcaaatttggtaattctacatctgctctggctggccctagcctgacagagaaaccctgggccctcggcgcaggagatttcaacagcgctcttaagggcagccccggtttccaggacaaattgtggaatcccatgaagggggaagagggccgtattccggcagccggagcatcacagctggtattttatcagcataaaaacctgaaccaacctaatcacggacttgccttgtgggaggctaagatgaagcagctggccgagagggctagagcacggcaggaagaggccgcacgcttgggccttggccagcaggaggctaagctgtatggaaaaaagcgtaaatggggtggtaccgtggtggccgaaccacagcaaaaggaaaagaagggggtggtgccaaccagacaagccctggccgtgccaacagattcagccgtaacggtgtcctcttatgcttatacaaaggtcactggcccatattcacggtggatatag

SEQ ID NO: 326951 - DNA, 4635 bp, Artificial Sequence
  derived and/or modified sequence
atggacagcggccccgtgtaccacggcgacagcagacagctgagcgccagcggcgtgcccgtgaacggcgccagagagcccgccggccccagcctgctgggcaccggcggcccctggagagtggaccagaagcccgactgggaggccgcccccggccccgcccacaccgccagactggaggacgcccacgacctggtggccttcagcgccgtggccgaggccgtgagcagctacggcgccctgagcaccagactgtacgagaccttcaacagagagatgagcagagaggccggcaacaacagcagaggccccagacccggccccgagggctgcagcgccggcagcgaggacctggacaccctgcagaccgccctggccctggccagacacggcatgaagccccccaactgcaactgcgacggccccgagtgccccgactacctggagtggctggagggcaagatcaagagcgtggtgatggagggcggcgaggagagacccagactgcccggccccctgccccccggcgaggccggcctgcccgcccccagcaccagacccctgctgagcagcgaggtgccccagatcagcccccaggagggcctgcccctgagccagagcgccctgagcatcgccaaggagaagaacatcagcctgcagaccgccatcgccatcgaggccctgacccagctgagcagcgccctgccccagcccagccacagcaccccccaggccagctgccccctgcccgaggccctgagcccccccgcccccttcagaagcccccagagctacctgagagcccccagctggcccgtggtgccccccgaggagcacagcagcttcgcccccgacagcagcgccttcccccccgccacccccagaaccgagttccccgaggcctggggcaccgacaccccccccgccacccccagaagcagctggcccatgcccagacccagccccgaccccatggccgagctggagcagctgctgggcagcgccagcgactacatccagagcgtgttcaagagacccgaggccctgcccaccaagcccaaggtgaaggtggaggcccccagcagcagccccgcccccgcccccagccccgtgctgcagagagaggcccccacccccagcagcgagcccgacacccaccagaaggcccagaccgccctgcagcagcacctgcaccacaagagaagcctgttcctggagcaggtgcacgacaccagcttccccgcccccagcgagcccagcgcccccggctggtggcccccccccagcagccccgtgcccagactgcccgacagaccccccaaggagaagaagaagaagctgcccacccccgccggcggccccgtgggcaccgagaaggccgcccccggcatcaagcccagcgtgagaaagcccatccagatcaagaagagcagacccagagaggcccagcccctgttcccccccgtgagacagatcgtgctggagggcctgagaagccccgccagccaggaggtgcaggcccacccccccgcccccctgcccgccagccagggcagcgccgtgcccctgccccccgagcccagcctggccctgttcgcccccagccccagcagagacagcctgctgccccccacccaggagatgagaagccccagccccatgaccgccctgcagcccggcagcaccggccccctgccccccgccgacgacaagctggaggagctgatcagacagttcgaggccgagttcggcgacagcttcggcctgcccggcccccccagcgtgcccatccaggaccccgagaaccagcagacctgcctgcccgcccccgagagccccttcgccaccagaagccccaagcagatcaagatcgagagcagcggcgccgtgaccgtgctgagcaccacctgcttccacagcgaggagggcggccaggaggccacccccaccaaggccgagaaccccctgacccccaccctgagcggcttcctggagagccccctgaagtacctggacacccccaccaagagcctgctggacacccccgccaagagagcccaggccgagttccccacctgcgactgcgtggagcagatcgtggagaaggacgagggcccctactacacccacctgggcagcggccccaccgtggccagcatcagagagctgatggaggagagatacggcgagaagggcaaggccatcagaatcgagaaggtgatctacaccggcaaggagggcaagagcagcagaggctgccccatcgccaagtgggtgatcagaagacacaccctggaggagaagctgctgtgcctggtgagacacagagccggccaccactgccagaacgccgtgatcgtgatcctgatcctggcctgggagggcatccccagaagcctgggcgacaccctgtaccaggagctgaccgacaccctgagaaagtacggcaaccccaccagcagaagatgcggcctgaacgacgacagaacctgcgcctgccagggcaaggaccccaacacctgcggcgccagcttcagcttcggctgcagctggagcatgtacttcaacggctgcaagtacgccagaagcaagacccccagaaagttcagactggccggcgacaaccccaaggaggaggaggtgctgagaaagagcttccaggacctggccaccgaggtggcccccctgtacaagagactggccccccaggcctaccagaaccaggtgaccaacgaggagatcgccatcgactgcagactgggcctgaaggagggcagacccttcgccggcgtgaccgcctgcatggacttctgcgcccacgcccacaaggaccagcacaacctgtacaacggctgcaccgtggtgtgcaccctgaccaaggaggacaacagatgcgtgggcaagatccccgaggacgagcagctgcacgtgctgcccctgtacaagatggccaacaccgacgagttcggcagcgaggagaaccagaacgccaaggtgggcagcggcgccatccaggtgctgaccgccttccccagagaggtgagaagactgcccgagcccgccaagagctgcagacagagacagctggaggccagaaaggccgccgccgagaagaagaagatccagaaggagaagctgagcacccccgagaagatcaagcaggaggccctggagctggccggcatcaccagcgaccccggcctgagcctgaagggcggcctgagccagcagggcctgaagcccagcctgaaggtggagccccagaaccacttcagcagcttcaagtacagcggcaacgccgtggtggagagctacagcgtgctgggcaactgcagacccagcgacccctacagcatgaacagcgtgtacagctaccacagctactacgcccagcccagcctgaccagcgtgaacggcttccacagcaagtacgccctgcccagcttcagctactacggcttccccagcagcaaccccgtgttccccagccagttcctgggccccggcgcctggggccacagcggcagcagcggcagcttcgagaagaagcccgacctgcacgccctgcacaacagcctgagccccgcctacggcggcgccgagttcgccgagctgcccagccaggccgtgcccaccgacgcccaccaccccaccccccaccaccagcagcccgcctaccccggccccaaggagtacctgctgcccaaggcccccctgctgcacagcgtgagcagagaccccagccccttcgcccagagcagcaactgctacaacagaagcatcaagcaggagcccgtggaccccctgacccaggccgagcccgtgcccagagacgccggcaagatgggcaagacccccctgagcgaggtgagccagaacggcggccccagccacctgtggggccagtacagcggcggccccagcatgagccccaagagaaccaacggcgtgggcggcagctggggcgtgttcagcagcggcgagagccccgccatcgtgcccgacaagctgagcagcttcggcgccagctgcctggcccccagccacttcaccgacggccagtggggcctgttccccggcgagggccagcaggccgccagccacagcggcggcagactgagaggcaagccctggagcccctgcaagttcggcaacagcaccagcgccctggccggccccagcctgaccgagaagccctgggccctgggcgccggcgacttcaacagcgccctgaagggcagccccggcttccaggacaagctgtggaaccccatgaagggcgaggagggcagaatccccgccgccggcgccagccagctggtgttctaccagcacaagaacctgaaccagcccaaccacggcctggccctgtgggaggccaagatgaagcagctggccgagagagccagagccagacaggaggaggccgccagactgggcctgggccagcaggaggccaagctgtacggcaagaagagaaagtggggcggcaccgtggtggccgagccccagcagaaggagaagaagggcgtggtgcccaccagacaggccctggccgtgcccaccgacagcgccgtgaccgtgagcagctacgcctacaccaaggtgaccggcccctacagcagatggatctag

SEQ ID NO: 326952 - DNA, 345 bp, Artificial Sequence
  derived and/or modified sequence
ctactttattcagatattctccagattcctaaagattagagatcatttctcattctcctaggagtactcacttcaggaagcaaccagataaaagagaggtgcaacggaagccagaacattcctcctggaaattcaacctgtttcgcagtttctcgaggaatcagcattcagtcaatccgggccgggagcagtcatctgtggtctttccactaaagtcggagtatcttcttccaaaatttcacgtcttggtggccgttccaaggagcgcgaggtcggaatggatcttgaaggggaccgcaatggaggagcaaagaagaagaacttttttaaactgaacaataaaag

SEQ ID NO: 326953 - DNA, 285 bp, Artificial Sequence
  derived and/or modified sequence
atgcagcacagcctggtgttcttctttgctgtgatcctgcacctgagccacctgctgcacctggatgccagcatccaccccttccggctgcccttcagcagcaagcccttcctgctgatccccatgagcaacaccaccctgccccacacagcctggcccctgtccttcctgcaccagacagtgtccaccctgaaggctgtggccgtgacccacagcctgtggcacctgcagatccctgtggactgccaggcctgcaacaggaagagcaagaagatctactgctag

SEQ ID NO: 326954 - protein, 266 aa, Artificial Sequence
  derived and/or modified sequence
MAVNVYSTSVTSENLSRHDMLAWVNDSLHLNYTKIEQLCSGAAYCQFMDMLFPGCVHLRKVKFQAKLEHEYIHNFKVLQAAFKKMGVDKIIPVEKLVKGKFQDNFEFIQWFKKFFDANYDGKDYNPLLARQGQDVAPPPNPVPQRTSPTGPKNMQTSGRLSNVAPPCILRKNPPSARNGGHETDAQILELNQQLVDLKLTVDGLEKERDFYFSKLRDIELICQEHESENSPVISGIIGILYATEEGFAPPEDDEIEEHQQEDQDEY

SEQ ID NO: 326955 - DNA, 801 bp, Artificial Sequence
  derived and/or modified sequence
atggctgtgaacgtctactcgaccagcgtcacatcggagaacttgtcgagacacgacatgctcgcttgggtgaacgactccttgcacttgaattatacaaagattgagcagctctgcagtggcgcagcatactgtcaattcatggatatgttgtttccaggctgtgtgcatctgagaaaggttaaatttcaggcaaaactggaacacgagtatatccacaattttaaggtgttacaggctgcgtttaagaaaatgggcgtcgataagatcattccagtggagaagttggtcaagggaaagtttcaggacaatttcgaattcatccagtggttcaagaaattcttcgatgcgaactacgatggcaaggattacaaccccctgctggccaggcagggccaggacgtggccccacctcctaaccctgtcccacaacggacctcacccacgggccccaaaaatatgcaaacatcgggccgtctctcaaatgtggcccccccttgcatcctgcgcaaaaacccaccatctgcgcgcaacggaggccacgaaacagatgctcagatactggagcttaatcagcagctggtcgatttgaagcttacagttgatgggttagagaaagaacgcgacttttacttctctaaactgcgagatattgagctcatatgccaagagcacgagagtgagaacagtcctgtcataagcggtatcatcgggatcctgtatgcaactgaggagggctttgctcccccagaggatgacgagatcgaggaacaccaacaggaagatcaagacgagtattag

SEQ ID NO: 326956 - DNA, 801 bp, Artificial Sequence
  derived and/or modified sequence
atggccgttaatgtctactctacatccgtaacatccgagaacctctcccgacatgacatgctggcctgggtgaatgattccctccatttgaactatacaaaaattgagcagctgtgtagcggggccgcttactgtcagtttatggatatgctatttcccggatgcgtccaccttcggaaagtgaaattccaagccaagctcgaacacgaatacatccacaacttcaaggtgcttcaggctgcatttaaaaaaatgggagttgataaaattataccagttgagaagctagtcaaggggaagtttcaggacaatttcgagtttatacagtggtttaaaaaattctttgacgcaaattatgacggcaaagactataacccattactggctaggcagggccaggatgtggcccccccacccaaccctgtcccacagcgcacgtctcccacaggtcctaaaaatatgcagaccagtggaaggctcagcaacgtcgcaccaccctgcatcctgaggaagaacccgcccagcgcccgcaatggaggacacgagactgatgcccaaatcctagaattaaaccagcagttagtggatctcaagttgactgtggacgggcttgagaaagaacgtgatttctactttagtaaactgagggacatagagctcatctgtcaagagcatgaaagtgagaactccccagtgatatcaggcattataggcattttgtacgctactgaagagggtttcgccccacctgaagatgacgaaatcgaggagcaccagcaggaggatcaggatgaatactag

SEQ ID NO: 326957 - DNA, 801 bp, Artificial Sequence
  derived and/or modified sequence
atggctgtgaatgtgtacagcacctctgtgaccagcgagaacctgagcagacatgacatgctggcctgggtgaatgacagcctgcacctgaactacaccaagattgagcagctgtgcagcggggccgcctactgccagttcatggacatgctgtttcctggctgtgtgcacctgaggaaggtgaagttccaggccaagctggagcacgagtacatccacaacttcaaggtgctgcaggccgccttcaagaagatgggcgtggacaagatcatccctgtggagaagctggtgaagggcaagttccaggacaactttgagttcatccagtggttcaagaagttctttgatgccaactatgatggcaaggactacaaccccctgctggcccggcagggccaggatgtggcccccccacccaaccctgtgccccagaggaccagccccaccggccccaagaacatgcagaccagcggccgcctgagcaatgtggccccaccctgcatcctgaggaagaaccccccatctgccagaaatggaggccatgaaacagatgcccagatcctggagctgaaccagcagctggtggacctgaagctgactgtggatggcctggagaaggagcgggacttctacttcagcaagctgcgggacatcgagctgatctgccaggagcatgaaagtgagaacagccctgtgatcagcggcatcatcggcatcctgtatgccacagaggagggctttgcccccccagaagatgatgaaattgaggagcaccagcaggaggaccaggatgagtactag

SEQ ID NO: 326958 - DNA, 1001 bp, Artificial Sequence
  derived and/or modified sequence
caggggtaggggtagcaattttgcagattttccaaacaggtgacttcagcccccgggcctgggcaggaaggggtagcccagtgacaatgggcatagtcccacttcaggaacgggaaacgtgttggctggctctgtggagttctctctcttctgatcccacagcatctgttccagttgtcttggccgctggggtatggccgtcaatgtgtactccacatctgtgaccagtgaaaatctgagtcgccatgatatgcttgcatgggtcaacgactccctgcacctcaactataccaagatagaacagctttgttcaggggcagcctactgccagttcatggacatgctcttccccggctgtgtgcacttgaggaaagtgaagttccaggccaaactagagcacgaatacatccacaacttcaaggtgctgcaagcagctttcaagaagatgggtgttgacaaaatcattcctgtagagaaattagtgaaaggaaaattccaagataattttgagtttattcagtggtttaagaaattctttgacgcaaactatgatggaaaggattacaaccctctgctggcgcggcagggccaggacgtagcgccacctcctaacccagttccacagaggacgtcccccacaggcccaaaaaacatgcagacctctggccggctgagcaatgtggcccccccctgcattctccggaagaatcctccatcagcccgaaatggcggccatgagactgatgcccaaattcttgaactcaaccaacagctggtggacttgaagctgacagtggatgggctggagaaggaacgtgacttctacttcagcaaacttcgtgacatcgagctcatctgccaggagcatgaaagtgaaaacagccctgttatctcaggcatcattggcatcctctatgccacagaggaaggattcgcaccccctgaggacgatgagattgaagagcatcaacaagaagaccaggacgagtactgagggcggc

SEQ ID NO: 326959 - DNA, 1801 bp, Artificial Sequence
  derived and/or modified sequence
ctctgtgcgttgaagccggagaccgcggcggcctcagcgaggaccctccgccccggagccgccggccggagccgcagcctctgccgcagcgcccccgccacctgtcccctccccctccgcctccgccggagccgcctcgtgcactctggggtatggccgtcaatgtgtactccacatctgtgaccagtgaaaatctgagtcgccatgatatgcttgcatgggtcaacgactccctgcacctcaactataccaagatagaacagctttgttcaggggcagcctactgccagttcatggacatgctcttccccggctgtgtgcacttgaggaaagtgaagttccaggccaaactagagcacgaatacatccacaacttcaaggtgctgcaagcagctttcaagaagatgggtgttgacaaaatcattcctgtagagaaattagtgaaaggaaaattccaagataattttgagtttattcagtggtttaagaaattctttgacgcaaactatgatggaaaggattacaaccctctgctggcgcggcagggccaggacgtagcgccacctcctaacccagttccacagaggacgtcccccacaggcccaaaaaacatgcagacctctggccggctgagcaatgtggcccccccctgcattctccggaagaatcctccatcagcccgaaatggcggccatgagactgatgcccaaattcttgaactcaaccaacagctggtggacttgaagctgacagtggatgggctggagaaggaacgtgacttctacttcagcaaacttcgtgacatcgagctcatctgccaggagcatgaaagtgaaaacagccctgttatctcaggcatcattggcatcctctatgccacagaggaaggattcgcaccccctgaggacgatgagattgaagagcatcaacaagaagaccaggacgagtactgagggcggccgcagccctggctgactgcacagcttccccgtgcctccctccctgctccactcccacattatagtcctttcctaacacggtcggccgggtgctttgtgtcagtgctgcagcactggggagccaggcgaggggggcttgggggcatggggccggaaagcaggcagaagcccgtcctgggtggtgctggcccagttggtgggacccctgtccacacccaccctatttatttccgttgtctctctgctgtgtcgcccaacacttcccagggtgctgctgccacccgccccagccagccacctgctcctgacagccagcagctgtgtatttgacaaagtcattggtatatttttacttactggattctccttgcactttacctgttcttttccagagctgacagcacgggctccggcgcagtgtgcctggcttggcttcccttccccatggctgggggctggggtaggactcacccattctaatttattttgtcttttggcttctcagtagctaaggggaaggctgatgtcaggagagggagagggggctgaggaggtagtgctgtaggcccagggggtcagggaaagggaggggggcatgtgagggatggaaatgacctcctggcaccaggctcacccacccaaggccccctgccccagcactgaatcccagcgctgccctgaggcccccagccactccctccagcagcctggttcaccacacaaactctgcctggaccccattgtctgtctgcttcccacctgccctccccaccccctgcccctcgggcaccagcctgcatatgtgttcacttttatttaaataaacttgtgtggtaaaagta

SEQ ID NO: 326960 - DNA, 801 bp, Artificial Sequence
  derived and/or modified sequence
atggccgtgaacgtgtacagcaccagcgtgaccagcgagaacctgtcaaggcatgatatgttggcctgggtgaatgattctttacacctgaattacaccaaaatcgaacagttgtgttccggtgcagcttattgccagtttatggacatgctgtttccgggctgcgtacacctgcgcaaagtcaagtttcaagctaagctcgaacacgaatacatacacaactttaaagtactccaggccgcttttaagaagatgggggtcgacaagattattcctgttgagaaattggtgaagggaaagtttcaggacaattttgaatttattcagtggtttaaaaaatttttcgacgccaactacgatgggaaagactacaaccctttactcgcaagacaaggccaggatgtcgcccccccaccaaatccagttcctcaaaggacctctcctaccggccctaagaatatgcaaacttctggccgattatccaacgtggctcctccatgcatcctcaggaagaatcccccttccgcccgcaacggtggtcacgagaccgacgcacagatcctggaactgaaccaacagctggttgacctgaagcttacggtagatggcctcgaaaaggaacgtgacttctacttttctaaattacgggatattgagctgatctgtcaggagcatgagtcagaaaactcgcccgtaatctcaggtatcatcggcatactctatgccactgaagaaggattcgccccaccagaagatgatgaaattgaggaacaccaacaagaggatcaggacgaatactag

SEQ ID NO: 326961 - DNA, 801 bp, Artificial Sequence
  derived and/or modified sequence
atggccgtgaacgtgtacagcaccagcgtgaccagcgagaacctgtctaggcatgatatgctggcctgggtgaacgacagcctgcacttaaactacactaaaattgagcaactttgctcaggtgcagcctactgtcaattcatggacatgttgttccctggctgcgtgcatttaagaaaagtgaaatttcaggccaaattagagcacgaatacatccacaacttcaaagttctgcaggcagcctttaagaagatgggggtagataagattatccctgtcgaaaaacttgtgaaaggtaagtttcaggataacttcgagttcatccagtggttcaaaaaattcttcgatgcaaactatgatggaaaagactacaacccacttctcgcaagacagggccaggatgtcgcgcctccacccaatcctgttccccagcgaacctcccccaccggccccaagaacatgcagacgagtgggcggctcagcaacgtggcaccaccttgtatactgcgcaagaatcctccttctgcgaggaacgggggccacgagacagacgcccagattttggaactcaaccagcagctggtggatctgaaactcaccgtggacggacttgaaaaggaacgcgacttttacttcagcaaattgagagacatcgagctaatctgccaggaacatgagagcgaaaactcaccagtgatttccggtatcataggcatcctctacgcgactgaagagggatttgctccaccagaggatgatgagatcgaagagcaccagcaagaagaccaagacgagtattag

SEQ ID NO: 326962 - DNA, 801 bp, Artificial Sequence
  derived and/or modified sequence
atggcggtgaacgtgtactcaacaagtgtcacttccgagaatctgagccgccacgacatgctggcgtgggtgaatgatagcctgcatttaaactataccaagattgagcagttgtgtagcggcgctgcttattgccagtttatggatatgctcttccccggatgtgttcatttacgcaaggtgaaattccaggcgaaattggagcacgagtatattcataatttcaaagtacttcaggctgcgtttaaaaagatgggcgtggataaaatcatcccagtggagaaactggtgaagggtaaattccaggacaacttcgagttcattcaatggttcaaaaaattcttcgacgctaattacgacggaaaggattataatcccctcttagcccgacagggacaggatgtggcgccaccccctaaccctgtgccccagcgaactagtccaacgggccctaagaacatgcagacttcaggaagactgagcaacgtggccccaccctgtattttgagaaaaaatccaccatctgcacgcaatgggggtcatgagacagacgcccagatcttggaactgaatcagcaactggtagacttgaagcttactgtcgacggactagaaaaggagcgcgacttctatttcagcaaactgagagacatagagctgatctgtcaggagcacgagagcgaaaacagccctgtgatctcaggcatcataggtatcctgtacgctacggaagaaggatttgcccctcccgaggacgacgaaatcgaagagcatcagcaggaggatcaggacgagtattag

SEQ ID NO: 326963 - DNA, 801 bp, Artificial Sequence
  derived and/or modified sequence
atggccgtaaacgtctattcaacctctgtgacctcagagaatctctctcgccatgacatgctggcatgggtcaacgacagtctccatctaaactatacaaaaatcgagcagctttgctcgggtgctgcttactgccagttcatggacatgctttttccaggatgcgttcatctccgcaaggtcaaatttcaggctaaactcgagcacgaatacatacacaatttcaaagtcttgcaggcagcgttcaagaaaatgggcgtggacaagatcattccagtggagaagcttgtgaaagggaagtttcaagataatttcgaatttattcaatggttcaaaaagttcttcgatgccaattacgacggcaaagattataatcccttactggcacggcagggccaagatgtcgcaccgcctccaaacccagtccctcaaaggactagtccaacaggtcccaaaaatatgcagacgagcggtcgcttgtccaacgtggctcctccttgtatactcagaaagaacccaccttccgctaggaacggcggtcatgagactgatgcccagatcctggaactgaaccaacaactggtggacttaaagctgactgtggacggactcgaaaaggagcgcgacttctattttagcaagctgagagatattgagctgatttgccaggagcatgagtctgaaaattcccctgttatctcaggtatcattggtatactttacgcgacagaggagggattcgcacctccagaggatgatgaaattgaggaacaccagcaagaggaccaggatgagtactag

SEQ ID NO: 326964 - DNA, 801 bp, Artificial Sequence
  derived and/or modified sequence
atggccgtgaacgtgtacagcaccagcgtgaccagcgagaacctgagcagacacgacatgctggcctgggtgaacgacagcctgcacctgaactacaccaagatcgagcagctgtgcagcggcgccgcctactgccagttcatggacatgctgttccccggctgcgtgcacctgagaaaggtgaagttccaggccaagctggagcacgagtacatccacaacttcaaggtgctgcaggccgccttcaagaagatgggcgtggacaagatcatccccgtggagaagctggtgaagggcaagttccaggacaacttcgagttcatccagtggttcaagaagttcttcgacgccaactacgacggcaaggactacaaccccctgctggccagacagggccaggacgtggcccccccccccaaccccgtgccccagagaaccagccccaccggccccaagaacatgcagaccagcggcagactgagcaacgtggcccccccctgcatcctgagaaagaacccccccagcgccagaaacggcggccacgagaccgacgcccagatcctggagctgaaccagcagctggtggacctgaagctgaccgtggacggcctggagaaggagagagacttctacttcagcaagctgagagacatcgagctgatctgccaggagcacgagagcgagaacagccccgtgatcagcggcatcatcggcatcctgtacgccaccgaggagggcttcgccccccccgaggacgacgagatcgaggagcaccagcaggaggaccaggacgagtactag

SEQ ID NO: 326965 - protein, 782 aa, Artificial Sequence
  derived and/or modified sequence
MEKLTFYALSAPEKLDRIGAYLSERLIRDVGRHRYGYVCIAMEALDQLLMACHCQSINLFVESFLKMVAKLLESEKPNLQILGTNSFVKFANIEEDTPSYHRSYDFFVSRFSEMCHSSHDDLEIKTKIRMSGIKGLQGVVRKTVNDELQANIWDPQHMDKIVPSLLFNLQHVEEAESRSPSPLQAPEKEKESPAELAERCLRELLGRAAFGNIKNAIKPVLIHLDNHSLWEPKVFAIRCFKIIMYSIQPQHSHLVIQQLLGHLDANSRSAATVRAGIVEVLSEAAVIAATGSVGPTVLEMFNTLLRQLRLSIDYALTGSYDGAVSLGTKIIKEHEERMFQEAVIKTVGSFASTLPTYQRSEVILFIMSKVPRPSLHQAVDTGRTGENRNRLTQIMLLKSLLQVSTGFQCNNMMSALPSNFLDRLLSTALMEDAEIRLFVLEILISFIDRHGNRHKFSTISTLSDISVLKLKVDKCSRQDTVFMKKHSQQLYRHIYLSCKEETNVQKHYEALYGLLALISIELANEEVVVDLIRLVLAVQDVAQVNEENLPVYNRCALYALGAAYLNLISQLTTVPAFCQHIHEVIETRKKEAPYMLPEDVFVERPRLSQNLDGVVIELLFRQSKISEVLGGSGYNSDRLCLPYIPQLTDEDRLSKRRSIGETISLQVEVESRNSPEKEERVPAEEITYETLKKAIVDSVAVEEQERERRRQVVEKFQKAPFEEIAAHCGARASLLQSKLNQIFEITIRPPPSPSGTITAAYGQPQNHSIPVYEMKFPDLCVY

SEQ ID NO: 326966 - DNA, 885 bp, Artificial Sequence
  derived and/or modified sequence
atgggcctggccagctggagccagctggccagcacccccagagcccccggcagcagagacgccagatgggagagaagagagcccgccctgagaggcgccaaggacagactgaccatcggcaagcacctggacatgggcagcccccagctgagaaccagagacagaggctggcccagccccagacccgagagagagaagagaaccagccagagcgccagaagacccacctgcaccgagagcagatggaagagcgaggaggaggtggagagcgacgacgagtacctggccctgcccgccagactgacccaggtgagcagcctggtgagctacctgggcagcatcagcaccctggtgaccctgcccaccggcgacatcaagggccagagccccctggaggtgagcgacagcgacggccccgccagcttccccagcagcagcagccagagccagctgccccccggcgccgccctgcagggcagcggcgaccccgagggccagaacccctgcttcctgagaagcttcgtgagagcccacgacagcgccggcgagggcagcctgggcagcagccaggccctgggcgtgagcagcggcctgctgaagaccagacccagcctgcccgccagactggacagatggcccttcagcgaccccgacgtggagggccagctgcccagaaagggcggcgagcagggcaaggagagcctggtgcagtgcgtgaaggtgatgaccctgaacgtgagaaagctgtgcgtgcaggtgagctgcctgttcccccagagcaccaacatcatcatcaagcacgtgcacgtggaccaggccctgttcatgtgccaggccctgtgctgcaccctgagctacagcgtgctgaccaccttcaccagatag

SEQ ID NO: 326967 - DNA, 2013 bp, Artificial Sequence
  derived and/or modified sequence
atggccctgggcgaggagaaggccgaggccgaggccagcgaggacaccaaggcccagagctacggcagaggcagctgcagagagagagagctggacatccccggccccatgagcggcgagcagccccccagactggaggccgagggcggcctgatcagccccgtgtggggcgccgagggcatccccgcccccacctgctggatcggcaccgaccccggcggccccagcagagcccaccagccccaggccagcgacgccaacagagagcccgtggccgagagaagcgagcccgccctgagcggcctgccccccgccaccatgggcagcggcgacctgctgctgagcggcgagagccaggtggagaagaccaagctgagcagcagcgaggagttcccccagaccctgagcctgcccagaaccaccaccatctgcagcggccacgacgccgacaccgaggacgaccccagcctggccgacctgccccaggccctggacctgagccagcagccccacagcagcggcctgagctgcctgagccagtggaagagcgtgctgagccccggcagcgccgcccagcccagcagctgcagcatcagcgccagcagcaccggcagcagcctgcagggccaccaggagagagccgagcccagaggcggcagcctggccaaggtgagcagcagcctggagcccgtggtgccccaggagcccagcagcgtggtgggcctgggccccagaccccagtggagcccccagcccgtgttcagcggcggcgacgccagcggcctgggcagaagaagactgagcttccaggccgagtactgggcctgcgtgctgcccgacagcctgccccccagccccgacagacacagccccctgtggaaccccaacaaggagtacgaggacctgctggactacacctaccccctgagacccggcccccagctgcccaagcacctggacagcagagtgcccgccgaccccgtgctgcaggacagcggcgtggacctggacagcttcagcgtgagccccgccagcaccctgaagagccccaccaacgtgagccccaactgcccccccgccgaggccaccgccctgcccttcagcggccccagagagcccagcctgaagcagtggcccagcagagtgccccagaagcagggcggcatgggcctggccagctggagccagctggccagcacccccagagcccccggcagcagagacgccagatgggagagaagagagcccgccctgagaggcgccaaggacagactgaccatcggcaagcacctggacatgggcagcccccagctgagaaccagagacagaggctggcccagccccagacccgagagagagaagagaaccagccagagcgccagaagacccacctgcaccgagagcagatggaagagcgaggaggaggtggagagcgacgacgagtacctggccctgcccgccagactgacccaggtgagcagcctggtgagctacctgggcagcatcagcaccctggtgaccctgcccaccggcgacatcaagggccagagccccctggaggtgagcgacagcgacggccccgccagcttccccagcagcagcagccagagccagctgccccccggcgccgccctgcagggcagcggcgaccccgagggccagaacccctgcttcctgagaagcttcgtgagagcccacgacagcgccggcgagggcagcctgggcagcagccaggccctgggcgtgagcagcggcctgctgaagaccagacccagcctgcccgccagactggacagatggcccttcagcgaccccgacgtggagggccagctgcccagaaagggcggcgagcagggcaaggagagcctggtgcagtgcgtgaagaccttctgctgccagctggaggagctgatctgctggctgtacaacgtggccgacgtgaccgaccacggcaccgccgccagaagcaacctgaccagcctgaagagcagcctgcagctgtacagattctag

SEQ ID NO: 326968 - DNA, 885 bp, Artificial Sequence
  derived and/or modified sequence
atgggacttgcaagctggtcccaactggcttccactccacgcgccccagggagcagagacgctagatgggaacggcgcgagcccgcactgcgtggggcgaaagaccgactcacaattggcaagcacctggacatgggatcccctcagctcagaacccgggacaggggctggccatcacctaggccggagcgcgagaaacgaacgtctcagagcgccaggaggcctacttgtacggagtcccgttggaagtctgaagaagaggtcgagagtgatgatgagtacctcgctctgcccgcccggctcacccaagtcagtagtctcgtgtcctacctgggatccatttccactctggtgacgctgcccacaggcgacattaaggggcaaagccctctggaagtatccgattcggacgggcctgcaagcttcccaagcagcagttcgcagagccagctaccccccggcgccgcattgcaagggtccggagacccagagggccagaacccatgttttctgaggagcttcgtgcgggcccacgatagcgcaggcgaagggagccttggctccagtcaggcgctcggcgttagttctgggctgctcaagaccagacccagcttgcctgcccgcctggaccgatggccattttcagatccggacgtagaggggcagctgcctcggaaaggaggtgaacagggaaaggagtcactggtgcagtgtgttaaagtcatgactttaaacgtgaggaagctttgtgtgcaggtgtcctgcctgttccctcagagcaccaacattatcattaaacatgtgcatgtggatcaagctctgtttatgtgccaggccctctgttgcactctctcgtacagtgttctcaccactttcactagatag

SEQ ID NO: 326969 - DNA, 2013 bp, Artificial Sequence
  derived and/or modified sequence
atggcgctcggcgaagagaaggccgaggccgaggcatccgaggatacaaaagcgcagagttatgggcgggggtcttgtcgtgaacgcgaactcgacatcccaggacctatgagcggtgaacaaccaccaagattagaggctgaaggagggctgatcagcccagtttggggcgctgaggggatacctgccccaacatgctggatcggaaccgatccaggaggaccttcccgggcacatcagccccaagcaagcgacgcgaaccgtgagcctgtagctgaacgctccgagcccgctttaagtggactcccaccggctactatgggaagcggcgacctgttactaagcggtgagagccaggtggaaaagaccaagcttagctcttcggaagagttcccgcagactttatctctgcctcgtacgacaacaatctgtagtggtcacgacgccgacaccgaggatgacccgtccctcgccgacctcccgcaagccttggacctgagccagcagccccactcaagtggacttagctgcctgtcccaatggaaaagcgtactgtctcccggctctgctgcccaaccaagttcatgctctattagcgcgagtagtaccggctcctctcttcaggggcaccaggagcgagccgagcccagggggggaagcctggccaaggtcagctcctctttagaaccagttgttccgcaggagccgtcctcagtagtgggcttgggtcccagaccccaatggtcaccgcaacccgtatttagcgggggcgacgcctctggccttgggaggcggcggcttagctttcaggctgagtattgggcctgcgtgctgcccgatagcctgccaccaagcccagatcgccacagcccactttggaatcccaataaggaatatgaggatctactcgattatacttatcctctcaggcctgggccacagttgccaaaacatctggacagtagggtgccagcagatcccgtgctgcaagattcgggggtggacctagatagtttttcagtctctcctgcgagcactcttaaatcgcctaccaacgtgtcgccaaactgccccccagccgaggctacagccctccccttctccgggcctagagaacccagccttaagcagtggccctctagggtgcctcaaaagcagggtggcatgggactggcttcatggagtcagctcgcttctacacctagagcaccgggaagccgcgacgccagatgggaaagacgcgaaccggccttgcgaggcgccaaggaccgcctgactattggcaagcatctggatatggggagcccccagctgagaacacgcgatcgtgggtggccctcccccagaccggaacgtgagaagaggacttcccagagtgcccgaaggcctacgtgcaccgaaagtagatggaaatcggaagaagaagtggaaagcgatgacgagtacctggctctgcccgcaaggctaactcaggtgagtagcctggtcagctacctcggcagcatctctaccctggtgacattgcccacaggggacatcaagggccagagtccactggaggtgagcgattcggacggaccagccagtttccccagttcatcaagtcagtcacagctgccgccaggagcagcacttcaggggtctggcgacccagaaggtcaaaacccctgttttttacgctcattcgtccgggcccacgattccgcaggagagggctcgctcggctcttcccaagccctgggggtttctagtggcttgttaaaaacccgcccttctctcccagctcggctggacaggtggcctttcagtgatccagacgttgaaggtcagttgccaaggaaaggtggagaacagggtaaggagtccctcgtacagtgcgtcaaaaccttttgttgtcagctggaggagcttatctgctggctttacaacgttgccgacgtgaccgaccacgggaccgcagcacggtcgaatcttactagcctcaaatcttcgctccaactttacaggttctag

SEQ ID NO: 326970 - DNA, 885 bp, Artificial Sequence
  derived and/or modified sequence
atgggcctggcctcctggagccagctggccagcaccccccgggcccctggcagcagagatgcccgctgggagcggcgggagcccgccctgcggggggccaaggaccggctgaccatcggcaagcacctggacatgggcagcccccagctgcggacccgggaccggggctggcccagccccaggcctgagcgggagaagaggaccagccagagcgcccggcggcccacctgcacagagagccgctggaagtctgaggaggaggtggagagtgatgatgagtacctggccctgcctgcccggctgacccaggtgagcagcctggtgtcctacctgggcagcatcagcaccctggtgaccctgcccaccggggacatcaagggccagagccccctggaggtgtctgacagtgatggccctgccagcttccccagcagcagcagccagagccagctgcccccaggagctgccctgcagggcagcggggaccctgagggccagaacccctgcttcctgcggagctttgtgcgggcccatgacagcgctggggagggcagcctgggcagcagccaggccctgggcgtgagcagcggcctgctgaagacccggcccagcctgcctgcccggctggaccgctggcccttcagtgaccctgatgtggagggccagctgcccaggaagggcggggagcagggcaaggagagcctggtgcagtgtgtgaaggtgatgaccctgaatgtgaggaagctgtgtgtgcaggtgtcctgcctcttcccccagagcaccaacatcatcatcaagcacgtgcacgtggaccaggccctcttcatgtgccaggccctgtgctgcaccctgagctacagcgtgctgaccaccttcaccaggtag

SEQ ID NO: 326971 - DNA, 2013 bp, Artificial Sequence
  derived and/or modified sequence
atggccctgggggaggagaaggccgaggccgaggccagcgaggacaccaaggcccagagctatggccggggcagctgccgggagcgggagctggacatccctggccccatgtctggagagcagcccccccggctggaggccgagggcggcctcatcagccctgtgtggggcgctgagggcatcccagcccccacctgctggattggaacagaccccggcggccccagccgggcccaccagccccaggccagtgatgccaaccgggagcctgtggccgagaggtctgagcccgccctgagcggcctgcccccagccaccatgggcagcggggacctgctgctgtctggagagagccaggtggagaagaccaagctgagcagcagcgaggagttcccccagaccctgagcctgcccaggaccaccaccatctgcagcggccatgatgctgacacagaagatgaccccagcctggccgacctgccccaggccctggacctgagccagcagccccacagcagcggcctgagctgcctgagccagtggaagtctgtgctgagccctggcagcgctgcccagcccagcagctgcagcatcagcgccagcagcacaggcagcagcctgcagggccaccaggagcgggcagagccccggggcggcagcctggccaaggtgagcagcagcctggagcctgtggtgccccaggagcccagctctgtggtgggcctgggcccccggccccagtggagcccccagcccgtcttctctggaggagatgccagcggcctgggcagaagaaggctgtccttccaggccgagtactgggcctgtgtgctgcctgacagcctgccccccagcccagacagacacagccccctgtggaaccccaacaaggagtatgaggacctgctggactacacctaccccctgcggcccggcccccagctgcccaagcacctggacagccgggtgcctgctgaccctgtgctgcaggacagcggcgtggacctggacagcttctctgtgtccccagccagcaccctgaagagccccaccaacgtgagccccaactgccccccagctgaggccacagccctgcccttcagcggcccccgggagcccagcctgaagcagtggcccagccgggtgccccagaagcagggcggcatgggcctggcctcctggagccagctggccagcaccccccgggcccctggcagcagagatgcccgctgggagcggcgggagcccgccctgcggggggccaaggaccggctgaccatcggcaagcacctggacatgggcagcccccagctgcggacccgggaccggggctggcccagccccaggcctgagcgggagaagaggaccagccagagcgcccggcggcccacctgcacagagagccgctggaagtctgaggaggaggtggagagtgatgatgagtacctggccctgcctgcccggctgacccaggtgagcagcctggtgtcctacctgggcagcatcagcaccctggtgaccctgcccaccggggacatcaagggccagagccccctggaggtgtctgacagtgatggccctgccagcttccccagcagcagcagccagagccagctgcccccaggagctgccctgcagggcagcggggaccctgagggccagaacccctgcttcctgcggagctttgtgcgggcccatgacagcgctggggagggcagcctgggcagcagccaggccctgggcgtgagcagcggcctgctgaagacccggcccagcctgcctgcccggctggaccgctggcccttcagtgaccctgatgtggagggccagctgcccaggaagggcggggagcagggcaaggagagcctggtgcagtgtgtgaagaccttctgctgccagctggaggagctgatctgctggctgtacaacgtggctgatgtgacagaccacggcacagctgcccggagcaacctgaccagcctgaagagcagcctgcagctgtaccgcttctag

SEQ ID NO: 326972 - DNA, 885 bp, Artificial Sequence
  derived and/or modified sequence
atgggcctggccagctggagccagctggccagcaccccccgggccccaggatccagggacgctcggtgggagcggagagagcccgcacttagaggtgcaaaggacagacttaccatcggaaagcatctggacatggggtctccccagctacggacccgtgaccgcggctggccatcccccaggcccgaacgcgagaagcgtacatcccaaagcgctagaagacctacgtgcactgagtcccggtggaaatccgaggaagaggtcgaaagcgacgatgagtacctagccctgcccgcccggctgactcaggtaagcagcctggtttcatatctggggagtatctctactctggtcaccctgccaaccggggatatcaagggacagagcccactcgaagtaagcgattccgatgggcctgcatcgttccccagcagttccagccagtcccagctgcccccgggagccgcgcttcagggttccggagaccctgaaggccagaacccctgcttccttcgctctttcgtccgagcccacgattcggccggcgagggatcattgggcagctctcaggcactgggcgtgtcctccggtctgctgaagacaaggccaagtctgccagcccgtctggatcgatggcccttttccgatccggatgtggagggccagctgcctagaaagggcggcgagcaagggaaagaatccttagttcagtgtgtgaaggtgatgacacttaacgttaggaagctgtgtgtacaggtgagctgtctctttccacagtccaccaacatcatcatcaagcacgtgcatgtggaccaagcactttttatgtgccaagccttgtgttgtactctttcttactccgtactgactacattcacgaggtag

SEQ ID NO: 326973 - DNA, 2013 bp, Artificial Sequence
  derived and/or modified sequence
atggccctgggcgaggagaaggccgaggccgaggccagcgaggacaccaaggcccaatcttacggacgcggtagttgtagagagcgggagctcgacattcctggcccgatgtccggggaacaaccgcctaggttggaggccgaaggcggcttgatttctcccgtttggggagccgagggaatacccgcccccacctgctggattgggactgaccctgggggcccaagccgggctcatcaacctcaggcgagtgatgcaaaccgcgagccagttgctgaacgtagcgagcccgctttaagtggactaccccctgccaccatggggtctggggacctcctgctgagcggggagagtcaggtcgagaagactaaattatcgagcagtgaggagtttccacagaccctaagcctcccacgaactaccacaatctgttcgggacacgacgcggatacagaagacgaccctagccttgctgatcttccccaggccctcgatctcagccagcagccccactcctcggggctatcgtgcctctctcagtggaaatctgtcttatcacctggtagcgcagcccagccatccagctgttctatctctgcgagcagtaccggttcttctctccaagggcatcaggagagagccgaaccccgtggaggttcactcgcaaaagtgagctcctctttggagcccgtggtgccccaagagccatcctctgtagtagggctgggccctcgtccccagtggagtccgcaacctgtgttctccggaggggacgcaagcgggctgggacgtcggcgccttagttttcaggccgagtactgggcctgtgtgctgccagactcgctccctccttcaccagaccggcacagtcctctgtggaatcccaacaaggagtatgaggacctcctggactacacctacccattgagacctggacctcaactaccaaaacatctggattcgagagtacccgccgatcccgtgctgcaggactccggggttgaccttgacagcttctctgtctctccagcatccaccctcaaatccccaactaacgtgtcacccaactgcccccctgctgaagccacggcattgcccttcagcgggcccagagagccaagtctaaaacagtggccgtcacgggtaccccaaaagcagggaggaatgggactagcctcctggagtcaattggcctctacccccagggcacccgggagcagagacgcccgctgggagcggagagaaccagcacttcgtggagccaaagaccggctcaccattggtaagcatctagacatgggttcaccccaactccggaccagagacagaggctggccttctccccggcctgagagagagaaacgaaccagccagagcgcgagacgacctacatgcacggaaagcagatggaagagcgaagaagaggtggagtccgacgatgaatatctggctctgcctgctcgactcacacaggtgagctccctggtgagctatctggggtccatttcaacactggtaaccctccccacaggcgacatcaagggccagtctccactggaggtctccgatagcgacggccccgctagtttcccgtctagttcctctcagagccagctccctccgggcgccgccctgcagggctccggagacccggagggccagaacccctgtttcctccgttcctttgttagagctcacgacagcgccggtgaggggagcctgggctcgtcccaggccctcggcgtcagctccgggctgctcaaaacccgcccatctctgccagcgcggctggaccggtggcctttctctgatccagacgtggagggtcaactgccgagaaagggaggggagcagggcaaggagtcgcttgtgcagtgcgtgaagactttttgttgtcaattggaggagctcatctgttggctttataatgtggccgacgttactgaccacgggactgccgctcgctccaacctgacttctctcaagagtagtctgcagctctaccgattttag

SEQ ID NO: 326974 - DNA, 885 bp, Artificial Sequence
  derived and/or modified sequence
atgggcctggccagttggagtcagctggctagtactccaagagccccaggatcccgagatgctcgatgggagaggcgcgagccagccctccgcggagcaaaggacagactgacaatcggcaagcacctagacatgggtagccctcagctgcggacgcgcgaccgtggatggccttccccacgacccgagagagagaagcggacctcacagtccgcacgccgtccaacttgcactgaatctcgttggaagtcggaggaggaggtggaatccgacgatgagtatctggcccttccagctaggctcacacaagtcagtagcttggtctcttacttgggctcgatctctaccctggtcacattgccaactggggatatcaagggccagtcacccctggaagtatctgacagtgacggaccagcgagctttccatcctcaagtagccagtcacagctgcctcctggagccgctctgcaggggtccggggaccccgagggccagaatccttgtttcctaagatctttcgtcagggcacatgactctgcaggggaaggctcgctcggttcaagccaggctctgggggtttcatcgggcctgctaaagaccagaccaagcctgccagctagactcgaccgatggcccttttccgaccctgacgtcgagggccagttgccacggaagggaggagagcagggcaaagagtcacttgtgcaatgtgtgaaggtcatgaccctgaacgtccgcaagctctgtgttcaagtaagttgtctattcccacagtccaccaatatcattattaaacacgttcatgttgaccaggccctgttcatgtgccaagcgctgtgttgcacactaagttactctgtgttaacaaccttcaccagatag

SEQ ID NO: 326975 - DNA, 2013 bp, Artificial Sequence
  derived and/or modified sequence
atggcccttggggaagaaaaagcggaggccgaggccagtgaggatacaaaggcacagagctacggaagaggatcttgcagagagagggaactggatatacccggacctatgtcaggcgagcagccacccagattggaagccgaaggaggcctgatatcccccgtctggggcgctgagggtatccctgcgcctacctgttggatcggaacagacccgggaggcccttccagggcacatcaaccccaagcctctgatgccaatcgggagcccgtggccgaaaggagtgaaccagccctttctgggctgcctcccgctacaatgggcagcggagatcttctgttgtctggtgagagccaggtcgaaaagacaaaattatccagctctgaggaattccctcagactctaagtctaccaagaaccacgacgatatgcagtggacacgacgcggatacagaggacgatccctccctggccgacctgccgcaggcccttgacctgagtcaacaaccgcacagttcaggtctgagctgtctctcccaatggaaaagtgttctgagccccggatcagccgctcagcccagcagttgcagcatttctgctagctcaaccggcagtagcctccagggtcatcaagaacgagctgagccccgaggagggagcctggccaaagtcagctcgagcctggagccagtggtaccacaggagccttcgtcggtcgtgggtctggggccacgacctcagtggagtccacagccagtcttttccggtggagacgcttctggactggggcgacgaaggctgtcctttcaggccgagtattgggcctgcgtattacccgactcactgcccccttctcctgatcgccatagccccttgtggaacccaaacaaagaatatgaagacttgctcgattacacatatccactgaggcctggtccgcaactacccaaacacctggattcccgagtccctgccgaccccgtgctgcaggacagtggggtggatctggattcatttagtgtatcccctgcatcaaccctgaaatcacctaccaatgtctctccaaattgccctccagctgaagccaccgctttgccctttagtggcccacgggagccctcgctgaagcaatggccctctagagtgccgcagaaacaggggggtatgggcctggcctcctggtcacagcttgctagcactcctcgggcaccaggatccagggatgccaggtgggagaggcgcgagcccgcactaaggggcgctaaggacaggctaacaatcggtaaacatttggatatgggttctcctcagctgcggactcgcgataggggctggccatccccaagacccgaaagagagaagaggactagtcagagtgctcgcaggcccacttgcacggagtcgaggtggaagtcagaggaggaggtggagagtgatgacgaatatctggctctcccagcacgcctcactcaggtgtcctcacttgtctcctatctcggttctatcagcaccctggtcacactgcctaccggggacataaagggccagagtcccctggaggtatcagactcggacggaccagccagctttccatctagcagctcacaatctcagcttcctcccggtgcagcactgcagggcagtggagaccccgaaggacagaacccttgtttccttcgctcatttgtgcgtgctcatgatagcgcaggagaaggctcactgggttcctcgcaggccctcggagtgagcagcgggctcctcaaaacacgcccaagtctgccagcacgcttagatcgatggcctttctccgaccccgatgttgagggtcagctcccgaggaaaggcggagagcagggcaaagaaagccttgtgcagtgcgtcaagactttctgctgccaactggaagaacttatctgttggctctataatgtggctgacgtgactgaccacgggacggctgcacgttccaatctgacatcactgaaatctagtcttcagctgtatcgattttag

SEQ ID NO: 326976 - DNA, 3768 bp, Artificial Sequence
  derived and/or modified sequence
agggtccgccagctcggggccagcgcatggggctgctgagaccgctccggacgtgcgaagcgttcgcggtgcggtggagaagaccaagctttcttcctccgaggagttccctcagactctgagccttcccagaacaacaactatttgctcaggacatgatgctgataccgaagatgatccatccctagcagatttgccccaggcactggacctcagccagcagcctcacagctcaggtctctcttgcctgtcacagtggaagtccgtgctgagcccaggttccgcagctcagccttccagctgcagcatctctgcttcctccacaggcagcagtctccagggtcaccaggagagggcggagcctcgtggtggttctctggccaaggtctcctcctccctggagccggtcgtcccccaggaaccttcctctgtggtggggctaggacctcggccccagtggtcaccacagcctgtgttctctgggggtgatgcttctgggctaggcaggagacgcctctccttccaggctgagtactgggcctgtgtgctgccagattccctgcctccatcacccgaccgccactcccctctctggaacccaaataaagagtatgaagatctgcttgactatacttacccactgaggcccgggcctcagctcccaaagcaccttgatagccgtgtgccagctgaccctgtcctgcaggactccggggtagacctggatagcttctctgtctctccagcaagcaccctcaaatcacctactaatgtctcccccaactgcccaccagcagaggccactgccctgccattttctgggcccagagagccaagccttaagcagtggccctccagagtaccccagaaacagggtggcatgggcttggcatcttggagccaacttgcatctacccccagagccccaggcagtagggatgctcgttgggagcgcagagagccagccctgaggggtgcgaaggaccggctgactataggcaagcaccttgatatgggctctccccagctaaggacacgggacagagggtggccctcgcccaggccagagagggagaagaggaccagccagagtgcccggcgccctacctgcacagagtctaggtggaaatcagaagaggaagtggaaagtgatgacgagtatcttgccctccccgctcggctgacacaggtttctagcctggtttcgtatctaggatccatttctaccttggttaccctgcccactggggatatcaaagggcagagccccttggaagtgtcagacagtgatgggccagcttccttcccttcaagctccagccaaagccagcttccccctggagctgccctccaaggatctggggatcctgagggccagaatccctgtttcctgcgctccttcgtccgtgcccacgactccgcaggggaaggcagtctggggagcagccaggccctcggggtctcctctggactgctgaaaacacgcccctccttgccagctaggttggaccggtggccattctcagacccagatgttgaagggcagcttcccaggaaaggaggagaacagggaaaagaatcactggtgcaatgtgtgaaggtaatgacactcaacgttaggaagctttgtgtacaggtgtcttgtctcttcccccaatccactaacatcataataaaacatgttcatgttgaccaggcactttttatgtgccaggcattgtgctgtaccttatcttattcagtcctcacaacttttaccaggtaagcactgttctcattttactttttggaggaaagagcagagagaggttaggtaacgtgcccacttataattagcaagggcttgagccaagaatgagacccaggtagactatttgcagaggctgagctcttagccactacccttggctgcttcctaactcagaggtattctgaacaaaaaaggttttgtgcacagatgcctttaggaaacactgggctaaacaaaggtaagtggctttcttgactgcaggacttctagagcttcatttgccacagtggtttaagtgcaaagttaggggcattggatgtactgttgcctagactttgtggccaccggaccatcttgtgaaccaaatgacttaatatctggaggtataaagaacactgcgtggaatagggttatcggtgtcaggcatctgaatttgaaacatggcactgctgtctttggaatgttggctcagcctcttgagtttgctcatttgtaaaatgtggagccctgccttcttaggatgttgtgtgcattaaataattcatgttgagggcttcggtgcattcccagacatgttgaaggttcaggaatgtgcctgtccaggaacgtgtcctagcgcttgcggggggctttcaccttcccaggaggtgacgtggttattttgtcttgtgaggtaggtaggacacgttatcatggacccctctttactgataaaagattgagatgccatgaggtaaagttgttcttcgctatagcttcaggttagtcatgattttagtcatttattttacgttcacttttccagagaaacatggacgtatctggctccaagatgctgattctagttagtaatggtgctgatccaagaattggtttccatggcaggcacgcctcttctgggctgctccattcctacctgcaaggctgggttttctcagcctgtcatttttgatgtcacaccaggctgtggttttcattgctttggcagagggaggtacagagtcgtggagtcgggacaggtgagcaaggaggagagaggaaactgaagacattttgctgtcagctggaagagctgatctgctggctgtataatgttgcagatgttactgaccacgggactgcagccaggtccaatcttacaagtctcaagtcttctctgcagctttaccgggtaatatgcggtcctggctctggcttgttccctcacaagagtgtggctaaattactcgattacaaagtaaaatctcaaataaccaatgtctggtatgttatagctcagttgactattatacctgaaatctaattagagcttcacattcttaaagcggaacgctttgtaaaatgcatgaattatttcccaggccaaatggagcttgaagatacaatatatttatctcaaatcaaaaatactttaggttttgggctggcaggtgcagtgggacaagtcttttatcccagctactctggaagctgagacaggaagattgcttgagcccaggagttcgagtacagcctgagcaacatagcaagacccccccccctcaaaaaaaagttttttcttaattaaaaacaaaaatactttagggtgatttgcaatataattttccaaatgtctcagggattataaatacagacttgcactattatgacgcctctagttatgtatggctattgaagtaaaattaaagactcagatttttttatttgcactagccacattctgcatgttcaaccatcacatttgtctagtggctaccacgtagaacagtgcagatgtagaacacttccatcaccacataaagtcctattggactgcaccactatttaaagatctgagctgaaattgtactgactccagaatctacaatagggcattttgatggtatttaaatagaaatctaggccaggcaccttggctcacactattaatcccagcactttgggatgctgaggctggaggatcgcttgagcccgggagttccagaccagcctgggcaatatagtgagacctcgtctct

SEQ ID NO: 326977 - DNA, 2308 bp, Artificial Sequence
  derived and/or modified sequence
gttttgggctgcggttggagggccgcagttgcagtcagggtccgccagctcggggccagcgcatggggctgctgagaccgctccggacgtgcgaagcgttcgcggtgcggtaggaagctgaagtcttcagcagaaccctgacctaggtagggagtctcaatggccctgggtgaagaaaaggcagaagcggaagcatctgaagacacaaaggcccagtcctatgggagagggagctgcagggagcgggagctggacatcccagggcccatgagtggggagcagcccccacgcctggaagctgagggagggctcatctcccctgtatggggggcagaagggatacctgcccctacttgctggattgggactgaccctggcggcccctctagagcccaccagccacaggccagtgatgccaacagagagcccgtagctgagaggtctgagcctgcactcagtggcctgcctcctgccaccatggggtctggagaccttctgctctccggggaaagccaggtggagaagaccaagctttcttcctccgaggagttccctcagactctgagccttcccagaacaacaactatttgctcaggacatgatgctgataccgaagatgatccatccctagcagatttgccccaggcactggacctcagccagcagcctcacagctcaggtctctcttgcctgtcacagtggaagtccgtgctgagcccaggttccgcagctcagccttccagctgcagcatctctgcttcctccacaggcagcagtctccagggtcaccaggagagggcggagcctcgtggtggttctctggccaaggtctcctcctccctggagccggtcgtcccccaggaaccttcctctgtggtggggctaggacctcggccccagtggtcaccacagcctgtgttctctgggggtgatgcttctgggctaggcaggagacgcctctccttccaggctgagtactgggcctgtgtgctgccagattccctgcctccatcacccgaccgccactcccctctctggaacccaaataaagagtatgaagatctgcttgactatacttacccactgaggcccgggcctcagctcccaaagcaccttgatagccgtgtgccagctgaccctgtcctgcaggactccggggtagacctggatagcttctctgtctctccagcaagcaccctcaaatcacctactaatgtctcccccaactgcccaccagcagaggccactgccctgccattttctgggcccagagagccaagccttaagcagtggccctccagagtaccccagaaacagggtggcatgggcttggcatcttggagccaacttgcatctacccccagagccccaggcagtagggatgctcgttgggagcgcagagagccagccctgaggggtgcgaaggaccggctgactataggcaagcaccttgatatgggctctccccagctaaggacacgggacagagggtggccctcgcccaggccagagagggagaagaggaccagccagagtgcccggcgccctacctgcacagagtctaggtggaaatcagaagaggaagtggaaagtgatgacgagtatcttgccctccccgctcggctgacacaggtttctagcctggtttcgtatctaggatccatttctaccttggttaccctgcccactggggatatcaaagggcagagccccttggaagtgtcagacagtgatgggccagcttccttcccttcaagctccagccaaagccagcttccccctggagctgccctccaaggatctggggatcctgagggccagaatccctgtttcctgcgctccttcgtccgtgcccacgactccgcaggggaaggcagtctggggagcagccaggccctcggggtctcctctggactgctgaaaacacgcccctccttgccagctaggttggaccggtggccattctcagacccagatgttgaagggcagcttcccaggaaaggaggagaacagggaaaagaatcactggtgcaatgtgtgaagacattttgctgtcagctggaagagctgatctgctggctgtataatgttgcagatgttactgaccacgggactgcagccaggtccaatcttacaagtctcaagtcttctctgcagctttaccggttttagaggatgtccttgggaggatcgcaaagcagtctggtgagctggagagccacgcagatcgcctgtatgactctatcttggcctctctggacatgctggctggctgcacccttatccctgacaaaaagcccatggcggc

SEQ ID NO: 326978 - protein, 1231 aa, Artificial Sequence
  derived and/or modified sequence
MASVWKRLQRVGKHASKFQFVASYQELMVECTKKWQPDKLVVVWTRRSRRKSSKAHSWQPGIKNPYRGVVVWPVPENIEITVTLFKDPHAEEFEDKEWTFVIENESPSGRRKALATSSINMKQYASPMPTQTDVKLKFKPLSKKVVSAALQFSLSCIFLREGKATDEDMQSLASLMSMKQADIGNLDDFEEDNEDDDENRVNQEEKAAKITEIVNQLNALSSLDEDQDDCIKQANMRSAKSASSSEELINKLNFLDEAEKDLATVNSNPFDDPDAAELNPFGDPDSEEPITETASPRKTEDSFYNNSYNPFKEVQTPQYLNPFDEPEAFVTIKDSPPQSTKRKNIRPVDMSKYLYADSSKTEEEELDESNPFYEPKSTPPPNNLVNPVQELETERRVKRKAPAPPVLSPKTGVLNENTVSAGKDLSTSPKPSPIPSPVLGRKPNASQSLLVWCKEVTKNYRGVKITNFTTSWRNGLSFCAILHHFRPDLIDYKSLNPQDIKENNKKAYDGFASIGISRLLEPSDMVLLAIPDKLTVMTYLYQIRAHFSGQELNVVQIEENSSKSTYKVGNYETDTNSSVDQEKFYAELSDLKREPELQQPISGAVDFLSQDDSVFVNDSGVGESESEHQTPDDHLSPSTASPYCRRTKSDTEPQKSQQSSGRTSGSDDPGICSNTDSTQAQVLLGKKRLLKAETLELSDLYVSDKKKDMSPPFICEETDEQKLQTLDIGSNLEKEKLENSRSLECRSDPESPIKKTSLSPTSKLGYSYSRDLDLAKKKHASLRQTESDPDADRTTLNHADHSSKIVQHRLLSRQEELKERARVLLEQARRDAALKAGNKHNTNTATPFCNRQLSDQQDEERRRQLRERARQLIAEARSGVKMSELPSYGEMAAEKLKERSKASGDENDNIEIDTNEEIPEGFVVGGGDELTNLENDLDTPEQNSKLVDLKLKKLLEVQPQVANSPSSAAQKAVTESSEQDMKSGTEDLRTERLQKTTERFRNPVVFSKDSTVRKTQLQSFSQYIENRPEMKRQRSIQEDTKKGNEEKAAITETQRKPSEDEVLNKGFKDTSQYVVGELAALENEQKQIDTRAALVEKRLRYLMDTGRNTEEEEAMMQEWFMLVNKKNALIRRMNQLSLLEKEHDLERRYELLNRELRAMLAIEDWQKTEAQKRREQLLLDELVALVNKRDALVRDLDAQEKQAEEEDEHLERTLEQNKGKMAKKEEKCVLQ

SEQ ID NO: 326979 - DNA, 3696 bp, Artificial Sequence
  derived and/or modified sequence
atggccagcgtgtggaagagactgcagagagtgggcaagcacgccagcaagttccagttcgtggccagctaccaggagctgatggtggagtgcaccaagaagtggcagcccgacaagctggtggtggtgtggaccagaagaagcagaagaaagagcagcaaggcccacagctggcagcccggcatcaagaacccctacagaggcgtggtggtgtggcccgtgcccgagaacatcgagatcaccgtgaccctgttcaaggacccccacgccgaggagttcgaggacaaggagtggaccttcgtgatcgagaacgagagccccagcggcagaagaaaggccctggccaccagcagcatcaacatgaagcagtacgccagccccatgcccacccagaccgacgtgaagctgaagttcaagcccctgagcaagaaggtggtgagcgccgccctgcagttcagcctgagctgcatcttcctgagagagggcaaggccaccgacgaggacatgcagagcctggccagcctgatgagcatgaagcaggccgacatcggcaacctggacgacttcgaggaggacaacgaggacgacgacgagaacagagtgaaccaggaggagaaggccgccaagatcaccgagatcgtgaaccagctgaacgccctgagcagcctggacgaggaccaggacgactgcatcaagcaggccaacatgagaagcgccaagagcgccagcagcagcgaggagctgatcaacaagctgaacttcctggacgaggccgagaaggacctggccaccgtgaacagcaaccccttcgacgaccccgacgccgccgagctgaaccccttcggcgaccccgacagcgaggagcccatcaccgagaccgccagccccagaaagaccgaggacagcttctacaacaacagctacaaccccttcaaggaggtgcagaccccccagtacctgaaccccttcgacgagcccgaggccttcgtgaccatcaaggacagccccccccagagcaccaagagaaagaacatcagacccgtggacatgagcaagtacctgtacgccgacagcagcaagaccgaggaggaggagctggacgagagcaaccccttctacgagcccaagagcacccccccccccaacaacctggtgaaccccgtgcaggagctggagaccgagagaagagtgaagagaaaggcccccgccccccccgtgctgagccccaagaccggcgtgctgaacgagaacaccgtgagcgccggcaaggacctgagcaccagccccaagcccagccccatccccagccccgtgctgggcagaaagcccaacgccagccagagcctgctggtgtggtgcaaggaggtgaccaagaactacagaggcgtgaagatcaccaacttcaccaccagctggagaaacggcctgagcttctgcgccatcctgcaccacttcagacccgacctgatcgactacaagagcctgaacccccaggacatcaaggagaacaacaagaaggcctacgacggcttcgccagcatcggcatcagcagactgctggagcccagcgacatggtgctgctggccatccccgacaagctgaccgtgatgacctacctgtaccagatcagagcccacttcagcggccaggagctgaacgtggtgcagatcgaggagaacagcagcaagagcacctacaaggtgggcaactacgagaccgacaccaacagcagcgtggaccaggagaagttctacgccgagctgagcgacctgaagagagagcccgagctgcagcagcccatcagcggcgccgtggacttcctgagccaggacgacagcgtgttcgtgaacgacagcggcgtgggcgagagcgagagcgagcaccagacccccgacgaccacctgagccccagcaccgccagcccctactgcagaagaaccaagagcgacaccgagccccagaagagccagcagagcagcggcagaaccagcggcagcgacgaccccggcatctgcagcaacaccgacagcacccaggcccaggtgctgctgggcaagaagagactgctgaaggccgagaccctggagctgagcgacctgtacgtgagcgacaagaagaaggacatgagcccccccttcatctgcgaggagaccgacgagcagaagctgcagaccctggacatcggcagcaacctggagaaggagaagctggagaacagcagaagcctggagtgcagaagcgaccccgagagccccatcaagaagaccagcctgagccccaccagcaagctgggctacagctacagcagagacctggacctggccaagaagaagcacgccagcctgagacagaccgagagcgaccccgacgccgacagaaccaccctgaaccacgccgaccacagcagcaagatcgtgcagcacagactgctgagcagacaggaggagctgaaggagagagccagagtgctgctggagcaggccagaagagacgccgccctgaaggccggcaacaagcacaacaccaacaccgccacccccttctgcaacagacagctgagcgaccagcaggacgaggagagaagaagacagctgagagagagagccagacagctgatcgccgaggccagaagcggcgtgaagatgagcgagctgcccagctacggcgagatggccgccgagaagctgaaggagagaagcaaggccagcggcgacgagaacgacaacatcgagatcgacaccaacgaggagatccccgagggcttcgtggtgggcggcggcgacgagctgaccaacctggagaacgacctggacacccccgagcagaacagcaagctggtggacctgaagctgaagaagctgctggaggtgcagccccaggtggccaacagccccagcagcgccgcccagaaggccgtgaccgagagcagcgagcaggacatgaagagcggcaccgaggacctgagaaccgagagactgcagaagaccaccgagagattcagaaaccccgtggtgttcagcaaggacagcaccgtgagaaagacccagctgcagagcttcagccagtacatcgagaacagacccgagatgaagagacagagaagcatccaggaggacaccaagaagggcaacgaggagaaggccgccatcaccgagacccagagaaagcccagcgaggacgaggtgctgaacaagggcttcaaggacaccagccagtacgtggtgggcgagctggccgccctggagaacgagcagaagcagatcgacaccagagccgccctggtggagaagagactgagatacctgatggacaccggcagaaacaccgaggaggaggaggccatgatgcaggagtggttcatgctggtgaacaagaagaacgccctgatcagaagaatgaaccagctgagcctgctggagaaggagcacgacctggagagaagatacgagctgctgaacagagagctgagagccatgctggccatcgaggactggcagaagaccgaggcccagaagagaagagagcagctgctgctggacgagctggtggccctggtgaacaagagagacgccctggtgagagacctggacgcccaggagaagcaggccgaggaggaggacgagcacctggagagaaccctggagcagaacaagggcaagatggccaagaaggaggagaagtgcgtgctgcagtag

SEQ ID NO: 326980 - DNA, 5165 bp, Artificial Sequence
  derived and/or modified sequence
gggcgccgtccgcctgaggggctgcagatcccggctaccgcgagcgccgtggctggcttggctgttccatgtggctccggcggggatggaggactcggtggcggcggcggctgctgctgcggcggcgacggaggagcggctatgagaagggaacggggccagactcagcccgacagcgggattagagccctccagaatacccatcatatagcccctgaggtggcatggtgatgtctccatgagggaaccccttcccactcatcctgtcacgtatatcatagtgttcttgactgggccattcatctaagatgggatttaccctgtgaaacagggagaagacttatggaccccaagcatcatttcgagttgtagttgagtttttaaaagacatacatgcaaagttcctttgctttggaccctctgcattattaaagctgctgtattgctaacccagaactgctccagtgtcttgactgatcatcatggcttcagtttggaagagactgcagcgtgtgggaaaacatgcatccaagttccagtttgtggcctcctaccaggagctcatggttgagtgtacgaagaaatggcaaccagataaactggtggtagtttggaccagaagaagccgaaggaagtcttctaaggcacatagctggcaacctggaataaaaaatccctatcgtggtgttgttgtgtggcctgttcctgaaaacattgaaatcactgtaacactttttaaggatcctcatgcggaagaatttgaagacaaagagtggacatttgtcatagaaaatgaatccccttctggtcgaaggaaagctcttgctactagcagcatcaatatgaaacagtatgcaagccctatgccaactcagactgatgtcaagttaaaattcaagccattatctaaaaaagttgtatctgccgctcttcagttttcattatcttgcatttttctgagggaaggaaaagccacagatgaagacatgcaaagtttggctagtttgatgagtatgaagcaggctgacattggcaatttagatgacttcgaagaagataatgaagatgatgatgagaacagagtgaaccaagaagaaaaggcagctaaaattacagaaattgtaaaccagttgaatgctctgagcagcttagatgaagatcaagatgactgcataaagcaagcaaatatgcgttcagctaaatcagccagttcctctgaagagcttatcaacaaacttaactttttggatgaagcagaaaaggacttggccaccgtgaattcaaatccatttgatgatcctgatgctgcagaattaaatccatttggagatcctgactcagaagaacctatcactgaaacagcttcacctagaaaaacagaagactctttttataataacagctataatccctttaaagaggtgcagactccacagtatttgaacccattcgatgagccagaagcatttgtgaccataaaggattctcctccccagtctacaaaaagaaaaaatataagacctgtggatatgagcaagtacctctatgctgatagttctaaaactgaagaagaagaattggatgaatcaaatcctttttatgaacctaaatcaactcctcctccaaataatttggtaaatcctgttcaagaactagaaactgaaaggcgagtgaaaagaaaggccccggctccaccagtcctctcaccaaaaacaggagtattaaatgaaaacacagtttctgcaggaaaagatctctctacttctcctaagccaagccctataccaagtcctgttttggggcgaaagccaaatgctagtcagtctttgcttgtatggtgtaaagaagttacaaagaactaccgaggagtaaaaatcaccaattttactacatcgtggagaaatggtttatctttttgtgcaatattacaccactttagaccagatttaattgactacaagtctctgaatcctcaagatattaaagagaacaacaaaaaggcatacgatggatttgccagcataggaatttcccgattattggaaccttctgatatggtattattagcaattcctgataaactgactgttatgacttatctctatcaaataagggcacatttcagtggccaagaactaaatgtcgttcagatagaggaaaacagcagtaaaagcacatataaagttggaaactatgaaacagatacaaacagttctgttgatcaagaaaaattctatgcagagcttagtgatctgaagcgggagcctgaactacaacagcctatcagcggagcagtagacttcttatcacaggatgactctgtatttgtaaatgatagcggggttggagagtcagaaagtgagcatcaaactcctgatgatcaccttagtccaagcacagcctccccttactgtcgcaggactaaaagtgacacagaaccccagaagtctcagcagagctctggaaggacttcaggatctgatgaccctggaatatgttccaatacagattcaacccaagcacaggttttgttaggcaaaaagagactattgaaagctgagactttagaattgagtgacttatatgttagtgataagaagaaggatatgtctccaccctttatttgtgaggagacagatgaacaaaagcttcaaactctagacatcggtagtaacttggagaaagaaaaattagagaattccagatccttagaatgcagatcagatccagaatctcctatcaaaaaaacaagtttatctcctacttctaaacttggatactcatatagtagagatctagaccttgctaagaaaaaacatgcttccctgaggcagacggagtctgatccagatgctgatagaaccactttaaatcatgcagatcattcatcaaaaatagtccagcatcgattgttatctagacaagaagaacttaaggaaagagcaagagttctgcttgagcaagcaagaagagatgcagccttaaaggcggggaataagcacaataccaacacagccaccccattctgcaacaggcagctaagtgatcagcaagatgaagagcgacgtcggcagctgagagagagagctcgtcagctaatagcagaagctcgatctggagtgaagatgtcagaacttcccagctatggtgaaatggctgcagaaaagttgaaagaaaggtcaaaggcatctggagatgaaaatgataatattgagatagatactaacgaggagatccctgaaggctttgttgtaggaggtggagatgaacttactaacttagaaaatgaccttgatactcccgaacaaaacagtaagttggtggacttgaagctgaagaagctcctagaagttcagccacaggtggcaaattcaccctccagtgctgcccagaaagctgtaactgagagctcagagcaggacatgaaaagtggcacagaagatctccggactgaacgattacaaaaaacaacagaacgttttagaaatcctgttgtgttcagcaaagattctacagtcagaaaaactcaacttcagtctttcagccaatatattgagaatagaccagagatgaaaaggcagagatcaatacaggaagatacaaagaaaggaaatgaggagaaggcagcgataactgaaactcagaggaagccatcagaagatgaagtgcttaataaagggttcaaagacaccagtcagtatgtagtaggagaattggcagcactagagaatgagcaaaagcaaattgacacccgtgccgcgctggtggagaagcgccttcgctatctcatggacacaggaaggaacacagaagaagaagaagctatgatgcaggaatggtttatgttagttaataagaaaaatgccttaataaggagaatgaatcagctctctcttctggaaaaagaacatgatttagaacgacggtatgagctgctgaaccgggaattgagggcaatgctagccattgaagactggcagaagaccgaggcccagaagcgacgcgaacagcttctgctagatgagctggtggccctggtgaacaagcgcgatgcgctcgtcagggacctggacgcgcaggagaagcaggccgaagaagaagatgagcatttggagcgaactctggagcaaaacaaaggcaagatggccaagaaagaggagaaatgtgttcttcagtagccatcagatcagaaagaatctctcccaacattttagagtcttgcttcccaaaccagaaaaagtcagactcattgttgatttaaaacttttaacattttgtttggctggattgtactactttacctctactttaccaccaccacccttttcctccctcctttccaaataatatacagaactccaaaatagcttcatttaaggatttttttgtgagttaacaatttccttgaaatcctgtgaaatagatttgcacagacaccttgtgagtgattggtattggaggtgttcaagaaactgttcgaaaaagaacaaaaacacttccctcgttattttctctcattttttgatgagaggaaaatttgaaacattattcttgttgttgttggtaatagcataatgacagtgggaggggtacaaggggataagaaaaatgtcatgatttttttccggtcctgccacatgtaacacttactctgttacctaaattttatagttagatcatatccaatctacttattaaactgtgttctatttaccagtggagtttttctgcagtggttgcgtttcactgtaaggataatggagttcctctcctctgctttcctcagaggatggtcctttaacatagccagaaacaagccctgtggtttgaaggtgagctgtgaggatgggactaattgatatgcaccagtttacaaagacagtcttatcatccgagaatacaccatctttttctctggataattatttcttacatcatgcttgattcctacattttgttgggtctcaacattggctcacgaatgctgttaatatttattctgtattgataaaaagtctgtcttgccactacaagtaaatcccccatttaatattttcttctttagcatagcactgtcattttttgtgaaaatggttatgtttatttattacaatactgagtcatatataaattttcaataaaagcagaaactttcttaccttaaa

SEQ ID NO: 326981 - DNA, 3696 bp, Artificial Sequence
  derived and/or modified sequence
atggctagcgtgtggaagagacttcagcgtgtcgggaaacacgctagtaagttccagtttgtagcttcataccaggagctgatggtggagtgcaccaagaagtggcagcccgacaaattggtggtggtctggacgcggcggtctcggcgcaagtcctctaaggcccactcctggcagcccgggatcaagaatccatatcggggcgtcgtggtttggccggtgcctgagaacatcgagatcacagtgacactgtttaaggatcctcacgcggaggaatttgaagacaaggagtggacgtttgttattgaaaatgagtcaccttccgggagaagaaaagccctggccaccagcagcatcaatatgaaacaatacgcatccccaatgccaacacaaaccgacgtgaagctgaagtttaaacccttatctaagaaggtggtgtccgcggcacttcagttctccctgtcctgtattttcttgagggaggggaaggctacagacgaagatatgcagagtctggcgtctctgatgagcatgaagcaggcggatatcggtaacctggatgactttgaggaagacaatgaggacgatgacgaaaaccgcgtgaaccaggaggaaaaggccgccaagataacagaaatcgtgaatcagctcaatgcgctcagtagcctggacgaggaccaggatgactgcataaagcaggccaacatgcggagcgcaaagtctgcttcctcatcggaggaattgattaacaagcttaatttcttggatgaggctgagaaggatctggcaactgttaacagcaatcctttcgatgacccagacgccgctgagctgaatcccttcggtgaccctgatagtgaagaacccatcaccgaaactgccagcccgcgcaagactgaagattctttttacaacaattcatataacccattcaaggaggttcagactccccaatacttgaacccattcgacgagcccgaggcctttgttaccatcaaggactccccaccgcagtcaacaaagaggaaaaatattagaccagtggatatgtcgaaatacctgtacgctgactcctcgaagacggaggaagaggaacttgatgaaagtaaccccttttatgaacctaagtcgaccccgcctcctaacaacttagttaacccagtgcaggaactggagactgaaagacgcgttaagagaaaagcccccgcaccgccagtcctgtctcccaagacaggagtcctcaacgaaaatacggtgtctgctggtaaggatctgagcacctcaccgaaaccatcacctataccaagccctgtgctgggcagaaagcctaacgcgagccagtcattgctcgtgtggtgtaaggaagtgaccaagaattacaggggcgtgaagattacgaacttcacaacaagttggcgcaacggtttatcgttctgcgctatactgcatcatttcaggccagatctcattgattacaagtctctaaacccccaggacatcaaggagaataacaagaaagcttacgacgggtttgcctcaattggcattagtagattgctggagccatctgacatggtccttttagcaatccccgacaaactgactgtcatgacatatctttatcagattcgtgcacatttctccggacaggagttaaacgtggttcaaatagaggagaactccagcaagagcacatacaaggtgggcaactacgagacagacaccaactccagcgtggaccaggaaaagttctacgccgagctctcggacttaaagcgagaacctgaacttcagcagcctatcagcggcgccgtcgacttcctgagtcaggacgattccgtgtttgtgaatgactccggagtcggagaaagcgagagtgagcaccaaaccccggatgatcacttgagcccgagcacagcaagcccctactgtcgccggacgaaaagtgacaccgaaccccagaaatcccaacaaagctcaggccggaccagtgggagcgacgatccggggatttgctcgaacacagacagcacccaggcccaagttctgttgggtaagaaacgattgctgaaagccgaaacactggaactcagcgatctctatgtttccgacaaaaagaaggacatgtcaccgcctttcatttgtgaagaaaccgatgagcagaagcttcagactctcgacatcggatctaacctggaaaaagaaaagctggaaaactcacggtccctcgaatgccgctctgacccagagtccccaatcaagaaaacttcgctgtctccaacttctaagcttggttactcatattcccgcgatctggacctggcaaagaagaagcacgcgagtttgcggcagaccgaatctgaccccgatgcagatcggactacactgaaccacgctgatcactcgtccaagatagttcaacaccggcttttgtcccgacaggaagagcttaaagaacgggcaagagtgctcttggaacaggcacggagagatgctgccctcaaggcaggcaacaaacataatactaacaccgccacacccttctgcaataggcagctgtcagatcagcaagatgaagagcgaagacgccaactaagagagagagctcgccagctgatcgcagaggcgaggagcggggtgaaaatgtccgagctgccttcgtatggcgaaatggccgccgagaagctgaaagagaggtctaaggccagcggagatgagaacgacaacatcgagatagacaccaacgaggagatccctgagggctttgtggtgggaggaggggacgagctgactaaccttgagaacgacttggacacccccgaacagaactcaaagctggtagacctgaagctaaagaagctgttggaggtccagccacaggtggcgaactccccatcatccgctgctcagaaggccgtcaccgagtcaagtgaacaggatatgaaaagtgggacagaagacctgaggaccgagagactgcagaaaacaactgagaggttccgcaaccctgtcgtgttctctaaagacagcacggtccggaagacccagctgcaatctttctctcagtacatcgaaaaccggcccgagatgaaaaggcaaaggagcatacaggaagataccaagaagggaaatgaggaaaaagcagccattacggaaacacaaaggaaaccttcagaggacgaagtgttaaataaaggattcaaggatacttcccagtacgtggtcggagagttagcagcactggaaaacgagcaaaagcagatcgatacacgcgctgccctagtggagaaacggttacgctaccttatggatactggaaggaatactgaggaggaggaagccatgatgcaggagtggtttatgcttgttaataaaaaaaacgcacttatcaggcgaatgaatcagctctctctcttagagaaggaacacgatctggagagacgatacgaattactcaacagagagctccgtgctatgctcgccatagaggattggcaaaaaaccgaggcgcagaaacgccgggaacagctgctactcgacgagcttgtggccctagtgaataagcgggatgcgctggtgcgggatctagacgcacaagagaaacaggccgaagaggaagacgaacacttggagcgcactctcgaacagaataaaggcaaaatggctaaaaaagaagaaaaatgtgtactgcagtag

SEQ ID NO: 326982 - DNA, 3696 bp, Artificial Sequence
  derived and/or modified sequence
atggcctctgtgtggaagaggctgcagagggtgggcaagcacgccagcaagttccagtttgtggccagctaccaggagctgatggtggagtgcaccaagaagtggcagcctgacaagctggtggtggtgtggacccggcgcagcaggaggaagagcagcaaggcccacagctggcagcccggcatcaagaacccctaccggggcgtggtggtgtggcctgtgcctgagaacatcgagatcaccgtgaccctcttcaaggacccccacgccgaggagtttgaggacaaggagtggacctttgtgattgaaaatgaaagccccagcggccgcaggaaggccctggccaccagcagcatcaacatgaagcagtatgccagccccatgcccacccagacagatgtgaagctgaagttcaagcccctgagcaagaaggtggtgtctgctgccctgcagttcagcctgagctgcatcttcctgcgggagggcaaggccacagatgaggacatgcagagcctggccagcctgatgtccatgaagcaggccgacatcggcaacctggatgactttgaagaagataatgaagatgatgatgagaacagagtgaaccaggaggagaaggccgccaagatcacagaaattgtgaaccagctgaatgccctgagcagcctggatgaggaccaggatgactgcatcaagcaggccaacatgaggtctgccaagagcgccagcagcagcgaggagctgatcaacaagctgaacttcctggatgaggccgagaaggacctggccaccgtgaacagcaacccctttgatgatcctgatgctgctgagctgaacccctttggagaccctgacagcgaggagcccatcacagaaacagccagccccaggaagacagaggacagcttctacaacaacagctacaaccccttcaaggaggtgcagaccccccagtacctgaacccctttgatgagcctgaggcctttgtgaccatcaaggacagccccccccagagcaccaagaggaagaacatccggcctgtggacatgagcaagtacctgtatgctgacagcagcaagacagaggaggaggagctggatgagagcaaccccttctatgagcccaagagcaccccaccacccaacaacctggtgaaccctgtgcaggagctggagacagaaagaagagtgaagaggaaggccccagcccctcctgtgctgagccccaagacaggagtgctgaatgaaaatacagtgtctgctgggaaggacctgagcaccagccccaagcccagccccatccccagccctgtgctgggcaggaagcccaatgccagccagagcctgctggtgtggtgcaaggaggtgaccaagaactaccggggcgtgaagatcaccaacttcaccacctcctggagaaatggcctgtccttctgtgccatcctgcaccacttccggccagacctgattgactacaagagcctgaacccccaggacatcaaggagaacaacaagaaggcctatgatggctttgccagcatcggcatcagccggctgctggagcccagcgacatggtgctgctggccatcccagacaagctgactgtgatgacctacctgtaccagatccgggcccacttcagcggccaggagctgaatgtggtgcagatcgaggagaacagcagcaagagcacctacaaggtgggcaactatgaaacagacaccaacagctctgtggaccaggagaagttctacgccgagctgagtgacctgaagcgggagcctgagctgcagcagcccatcagcggggctgtggacttcctgagccaggatgattctgtgtttgtgaatgattctggagtgggggagagcgagagcgagcaccagaccccagatgaccacctgagccccagcacagccagcccctactgcaggaggaccaagagtgacacagagccccagaagagccagcagagcagcggccgcaccagcggcagtgatgatcctggcatctgcagcaacacagacagcacccaggcccaggtgctgctgggcaagaagaggctgctgaaggccgagaccctggagctgagtgacctgtatgtgtctgacaagaagaaggacatgagcccccccttcatctgtgaggagacagatgagcagaagctgcagaccctggacatcggcagcaacctggagaaggagaagctggagaacagccgcagcctggagtgccgcagtgaccctgagagccccatcaagaagaccagcctgagccccaccagcaagctgggctacagctacagccgggacctggacctggccaagaagaagcacgccagcctgcggcagacagaaagtgaccctgatgctgacaggaccaccctgaaccacgccgaccacagcagcaagatcgtgcagcaccggctgctgagccggcaggaggagctgaaggagcgggcccgggtgctgctggagcaggccaggagagatgctgccctgaaggccggcaacaagcacaacaccaacacagccacccccttctgcaaccggcagctgagtgaccagcaggatgaggagcggcggcggcagctgcgggagcgggcccggcagctgattgctgaggcccggtctggagtgaagatgtctgagctgcccagctatggagagatggctgctgagaagctgaaggagaggagcaaggccagcggagatgaaaatgacaacatcgagattgacaccaatgaggagatccctgagggctttgtggtgggcggcggagatgagctgaccaacctggagaatgacctggacaccccagagcagaacagcaagctggtggacctgaagctgaagaagctgctggaggtgcagccccaggtggccaacagccccagcagcgctgcccagaaggctgtgacagagagcagcgagcaggacatgaagtctggaacagaggacctgaggacagagcggctgcagaagaccacagagcgcttcagaaatcctgtggtgttcagcaaggacagcacagtgaggaagacccagctgcagagcttcagccagtacattgaaaatagacctgagatgaagaggcagaggagcatccaggaggacaccaagaagggaaatgaggagaaggccgccatcacagagacccagaggaagcccagtgaagatgaggtgctgaacaagggcttcaaggacaccagccagtatgtggtgggggagctggccgccctggagaatgagcagaagcagattgacacccgggccgccctggtggagaagaggctgcgctacctgatggacacaggaagaaacacagaggaggaggaggccatgatgcaggagtggttcatgctggtgaacaagaagaatgccctgatccggaggatgaaccagctgagcctgctggagaaggagcatgacctggagaggagatatgagctgctgaaccgggagctgcgggccatgctggccatcgaggactggcagaagacagaggcccagaagagaagagagcagctgctgctggatgagctggtggccctggtgaacaagagagatgccctggtgcgggacctggatgcccaggagaagcaggccgaggaggaggatgagcacctggagaggaccctggagcagaacaagggcaagatggccaagaaggaggagaagtgtgtgctgcagtag

SEQ ID NO: 326983 - DNA, 3696 bp, Artificial Sequence
  derived and/or modified sequence
atggccagcgtgtggaagcggctgcagcgggtgggcaagcacgcctctaagtttcagttcgttgcttcctaccaggagcttatggtagaatgtacaaaaaagtggcagcctgacaaactggtcgtcgtttggacgcgccgcagccgcagaaagtcatctaaagcccacagctggcagccaggcatcaaaaacccttaccgcggagtggtggtttggccagttcctgaaaatattgagatcaccgtcaccctctttaaagatccgcatgcagaagaatttgaagacaaggaatggacctttgtgatcgagaatgagagcccttccgggagaaggaaagcactggccactagtagtatcaatatgaagcagtacgccagccccatgcccacccagactgacgtgaagctgaagtttaagccactgtccaagaaagtcgtgtccgctgctttgcagttctcactgagctgtatatttctccgcgagggcaaagccactgacgaagacatgcagagcctggccagcctcatgtccatgaagcaggccgatattggcaacctcgacgactttgaggaggacaatgaggacgatgatgagaaccgggtgaaccaggaggaaaaggccgctaaaattacggaaatcgtgaaccagttaaacgccttgtcctcactggatgaggatcaggatgattgcatcaagcaggcaaatatgagaagtgccaagtccgcttcgtcttccgaggagcttatcaacaagctgaacttcttggacgaagctgagaaggatttggcaacagtcaattctaaccccttcgatgaccccgacgccgccgagctgaacccgtttggcgaccctgactccgaagaaccaatcacagagactgcttctccgagaaagacagaagacagcttctacaacaactcttacaacccctttaaggaagtccagacaccacagtatctaaatccatttgacgagcccgaggcttttgtcacaattaaggactcacctccacaaagtaccaaaaggaaaaatatacgccccgttgatatgagcaagtacctttatgccgactcaagtaagactgaggaggaggagttggacgagtccaatcccttttacgaaccaaagagtacccctcccccgaataacctcgtcaaccccgtgcaagaattggaaacagaacgcagagtaaagcggaaagcacctgccccaccagtgttgtctcctaagaccggcgtgctgaatgaaaatacagtatctgccgggaaagacctttctaccagccccaaaccaagtcctattcctagccccgtattgggacgcaagcctaacgccagtcagagtctcctggtctggtgcaaagaggtcacaaagaactaccgtggcgtgaagattacaaactttacgacatcatggcggaatggcctgtctttttgcgccatccttcaccactttaggcctgatctcatagactacaaaagcctgaacccacaagacattaaagagaacaataagaaagcatatgatggattcgctagtattggaatctctcgcctcctggagccctcagacatggtactgttggccatccctgacaaactaacagtgatgacgtatttataccagatacgcgcccatttctcaggccaggagctgaatgtcgtgcagatcgaagagaattcgtcaaagtccacgtataaggtcgggaattacgaaaccgacacaaactcatctgtggatcaggagaagttctatgccgagctttctgatctcaagagggagcccgaattacagcagcccatctccggcgccgtcgatttcttgtcccaagatgatagcgtgtttgttaacgacagcggcgttggcgagagtgagtctgagcaccagactcctgacgatcatttatcccctagcaccgcctctccttactgccgccggacgaagtccgacacagagcctcaaaaaagtcaacagtcatccggccgcactagcggaagtgacgaccccggaatttgcagcaacacagatagcacccaggcccaggtgctgttggggaagaagcgcctcctgaaggctgagactctggaactgtctgacctgtacgtgagcgacaaaaagaaagatatgtcaccgccttttatctgcgaagaaactgatgagcagaaacttcaaactctggatatcggttccaaccttgagaaggaaaaattagaaaactcccgtagtctggaatgtaggtctgacccagaaagcccgatcaagaagacatccctgagccccaccagcaagcttgggtacagctactctcgagacctggatctcgccaagaagaaacacgcctctttaaggcagactgaatctgatccagacgcagacaggactactcttaaccatgcagatcactcctccaagatcgtccagcatagactgctcagcaggcaggaggagcttaaggaaagagccagggttctgctggagcaggccaggcgagacgccgcactgaaagcaggcaataagcacaacacaaacactgccacccctttctgcaaccgtcagctatcagatcaacaggacgaggaaaggaggcggcaactcagggagagggcccgacaactgatcgcagaggccagatccggagtaaaaatgtcggaactgccatcatatggagagatggccgctgaaaagctcaaggagcgatccaaggcgagcggtgatgagaatgataatatcgagattgacacgaatgaggagatacccgaggggttcgtggttggcgggggtgacgagctgactaacctagaaaacgatctggatacgcctgaacaaaattctaagctggttgacctaaagctgaaaaagctgctcgaggtgcagccccaagtcgcaaactctcctagcagcgcggcccagaaagcagtaactgagagctcagagcaggatatgaaatccgggaccgaagacttacgaacggagcgtctgcaaaaaactacggaacggttccgcaacccggtcgttttcagcaaggattccacagtccgaaaaacacagctacaatcattctctcagtatatcgaaaaccgccccgaaatgaagcgtcagaggagtatccaggaggacaccaagaagggcaatgaagagaaggcagccataaccgagactcagaggaaaccttccgaggacgaggtgctgaacaaggggttcaaggacacaagccagtacgttgtgggggagcttgctgccttggaaaatgagcagaagcagatagacactcgcgccgcactggtcgaaaaaagactgcgctatctgatggacaccggcaggaacaccgaggaggaggaagccatgatgcaggagtggtttatgctggtcaacaagaaaaatgctctcatccgccgaatgaatcagctgtcacttctggagaaggagcacgacctcgagcgcaggtacgagctgctgaatagggaattacgggcgatgctggccatagaggattggcagaagacagaggcacagaagagacgtgaacaactcctgttggacgaattggtggccttggttaacaagcgggatgctcttgtcagggacctggatgcacaggagaagcaggccgaggaggaagacgagcaccttgaaagaacattagaacaaaataaagggaaaatggccaagaaggaggagaaatgcgtactgcagtag

SEQ ID NO: 326984 - DNA, 3696 bp, Artificial Sequence
  derived and/or modified sequence
atggcttcagtatggaagcggctccaacgggttggaaaacacgccagcaaattccaattcgtggcctcataccaggaacttatggttgagtgtacaaaaaaatggcagccggataagctggttgtcgtttggaccaggaggtctcggaggaaaagtagcaaggcccacagttggcaacccggtattaagaatccctaccgtggcgtggtcgtgtggcctgtgcctgagaacatcgaaattacggtgactttgtttaaggatccgcacgctgaggaattcgaggacaaagaatggacctttgtgatcgagaatgaaagccctagcggtcggagaaaagctttggccacctcatccattaacatgaagcagtatgcgtccccgatgcccacacagaccgatgtgaagctgaagtttaagcccctctctaaaaaggtcgtatctgctgctcttcagttcagtttgagctgcatctttttgagagagggcaaggctaccgacgaggatatgcagtccttagcctcccttatgtccatgaagcaggcggatatcggaaacctggatgattttgaggaggacaatgaggacgacgatgaaaatcgcgtgaaccaggaggagaaggctgcaaaaatcacagaaatagtgaaccaattaaacgctttatcttcactagatgaggatcaggacgactgcatcaaacaggcaaacatgagaagcgctaagagtgctagctcctcagaggagttgattaacaaattaaactttctggacgaagctgagaaggacctcgcaacagtcaactctaaccccttcgatgaccctgacgccgcagagctgaaccctttcggggatcctgatagcgaggaacccatcacagaaactgcctccccgaggaagactgaggacagcttctataacaatagttacaatcctttcaaggaggtccagaccccacagtatctaaaccccttcgacgagcctgaggctttcgtgaccatcaaggatagtccccctcaatccaccaaaaggaagaatattcgccctgtggatatgtccaaatatctgtacgcagattctagcaaaacggaggaggaagaattagacgaaagtaaccctttctatgaacctaaatccacccctcccccaaataacttggtgaatcctgtacaggaactggagactgaacgcagggtgaaaaggaaggctcccgctccccctgtgctctcccccaagacgggggtgctgaacgagaacaccgtgagtgccggtaaggatctgtctacctcgcccaagccctctcccataccctcccctgtcttggggagaaaaccaaatgcgtcacagagcttgcttgtttggtgtaaagaggtaacaaagaattatcgaggggtcaaaataaccaattttacgacctcctggcggaacggactcagtttttgtgcaattctgcaccattttaggccagatctcattgactataagagcttaaaccctcaggacatcaaagaaaataataagaaggcctacgacggctttgcctcaattgggatttctaggctgctcgagcccagcgacatggtgctccttgccatccccgataaattaaccgttatgacatacctgtaccaaatcagggctcattttagcggccaagaactgaacgtcgtgcaaattgaagaaaattcttctaagagcacatataaggtaggaaattacgagacagatacaaacagctctgtggatcaagaaaaattctacgccgagctatcagacctgaagcgggagcccgaactgcagcagcctatttcgggcgcagtggactttcttagccaggatgattccgttttcgttaatgatagcggggtaggagagtctgagagtgaacatcagactccagacgatcacctttcaccaagtaccgccagcccatattgcagacggactaaaagcgacaccgaaccacaaaagagccagcaatcctccgggagaaccagtgggagcgatgaccctggcatctgtagtaatactgattctacgcaggcacaagtgcttctcggcaagaagcgattgttgaaggccgagactctagaactcagtgatttatacgtcagcgacaagaaaaaagacatgagtccccctttcatttgtgaagagacggacgaacaaaagctgcagaccctggatattggaagcaatctcgaaaaggaaaaactcgaaaatagccgcagccttgagtgtcgtagcgatcctgaatcacccatcaagaagactagtctgtcacctactagcaagctcgggtactcttacagccgcgatttggatctggctaagaagaaacatgcctcactgcgccaaacagaaagcgaccccgacgccgacaggactactctgaatcacgccgatcattcaagcaagattgtacagcataggctgctgagccggcaggaagaacttaaggaaagggccagagtcttgctggagcaggctagaagggatgctgcccttaaggctgggaataagcacaatacgaacacggcgaccccattctgtaacaggcaactgagcgatcagcaggacgaggaaagaaggaggcagctccgggagcgagcacgccagctgatcgcagaggcacgctcaggcgtgaagatgagcgaactccctagctatggggaaatggccgctgaaaaattgaaagagagatctaaagcctccggggatgagaacgacaatattgaaattgatacaaacgaagagatccctgaaggcttcgtggtaggcggtggcgatgaactcacaaacctggagaacgatctggacacccctgagcagaacagcaaattggtggacctgaaactcaagaagctgctggaagtgcagccccaggttgccaatagcccctcaagtgctgcccagaaggccgtgacagagagctccgaacaggatatgaaatccggcacggaggatctgagaactgagaggcttcagaagactacagaaaggttccggaatcctgtggtgttctctaaggattccaccgtccgcaaaactcagctccagagcttttcacagtacatcgaaaacagaccggaaatgaagcgtcagcggagtatccaagaggacaccaagaaggggaacgaagagaaggcggctattaccgaaacacaaaggaaaccctctgaggatgaggtgctgaataaggggtttaaggataccagccagtatgttgtgggcgaactggctgcgctggaaaacgagcagaagcagatagacactagggcggcactggtggagaaacggctccgctatttgatggacaccggcaggaatacagaggaagaagaagctatgatgcaagaatggttcatgcttgtgaataaaaaaaatgccctgatccgtcgtatgaaccagctgagtctgttagaaaaagaacatgacctcgagcgaaggtatgagctgttaaacagagagctgagggccatgttggcaatagaggattggcagaagaccgaggctcagaagcgccgagagcaacttctgctggacgaattggtggccttggtcaataaacgcgatgccctggtgagggacctcgacgcacaggaaaaacaggctgaagaggaggacgaacatcttgagagaacgcttgaacaaaataagggaaaaatggccaagaaggaggaaaagtgtgttctccagtag

SEQ ID NO: 326985 - protein, 77 aa, Artificial Sequence
  derived and/or modified sequence
MASVWKRLQRVGKHASKFQFVASYQELMVECTKKWQPDKLVVVWTRRSRRKSSKAHSWQPGIKNPYRGVVVWPVPEN

SEQ ID NO: 326986 - protein, 202 aa, Artificial Sequence
  derived and/or modified sequence
MKRQRSIQEDTKKGNEEKAAITETQRKPSEDEVLNKGFKDTSQYVVGELAALENEQKQIDTRAALVEKRLRYLMDTGRNTEEEEAMMQEWFMLVNKKNALIRRMNQLSLLEKEHDLERRYELLNRELRAMLAIEDWQKTEAQKRREQLLLDELVALVNKRDALVRDLDAQEKQAEEEDEHLERTLEQNKGKMAKKEEKCVLQ

SEQ ID NO: 326987 - protein, 34 aa, Artificial Sequence
  derived and/or modified sequence
MNHDFQALALESRGMGELLPTKKFWEPDDSTKDG

SEQ ID NO: 326988 - protein, 293 aa, Artificial Sequence
  derived and/or modified sequence
MNHDFQALALESRGMGELLPTKKFWEPDDSTKDGQKGIFLGDDEWRETAWGASHHSMSQPIMVQRRSGQGFHGNSEVNAILSPRSESGGLGVSMVEYVLSSSPADKLDSRFRKGNFGTRDAETDGPEKGDQKGKASPFEEDQNRDLKQGDDDDSKINGRGLPNGMDADCKDFNRTPGSRQASPTEVVERLGPNTNPSEGLGPLPNPTANKPLVEEFSNPETQNLDAMEQVGLESLQFDYPGNQVPMDSSGATVGLFDYNSQQQLFQRTNALTVQQLTAAQQQQYALAAAQQPH

SEQ ID NO: 326989 - DNA, 98 bp, Artificial Sequence
  derived and/or modified sequence
ggaataaaacggactcaatagtaatggattgcaatgtaattgattcgatttcgaatggaatcgcatggaatgtaatggaatggaatggaatggaaggc

SEQ ID NO: 326990 - DNA, 882 bp, Artificial Sequence
  derived and/or modified sequence
atgaaccatgacttccaggccctggctctggagtcacggggcatgggggaacttctccccacaaagaaattttgggaaccagatgacagtaccaaggacgggcaaaagggtatcttcctgggtgatgacgagtggcgtgagaccgcttggggggcctcccaccattctatgtcccagcctatcatggttcagcgacggtccggacaaggctttcacggcaatagtgaggtgaatgccattttatcgcccagatctgaaagcggagggctgggggtcagcatggtagagtacgtgttaagttccagtccagccgacaagctagacagccgtttcaggaagggcaactttggcacccgggatgccgaaacagacggccccgagaaaggggaccaaaagggaaaggcctcaccattcgaagaggaccaaaaccgcgatctcaagcagggcgatgatgatgatagcaaaatcaacggacggggcctgccaaatggcatggacgccgattgcaaagactttaatagaacccctggtagtcgccaggcaagtcctacagaggtagttgaaagacttggccccaatacaaatccatccgagggcctcggtcccttacccaaccccaccgccaacaaacccctcgttgaggaattctcaaatcccgagacgcagaaccttgacgctatggagcaggtcggactggagtcactacagtttgactatcctgggaaccaagttcctatggacagttccggggcaacggtcgggctgttcgattataacagccagcaacagctgttccagaggactaacgctctgacagtgcaacagctgaccgcagcacaacagcagcagtatgcactggccgcagctcagcagcctcattag

SEQ ID NO: 326991 - DNA, 882 bp, Artificial Sequence
  derived and/or modified sequence
atgaaccacgacttccaggccctggccctggagagccggggcatgggagagctgctgcccaccaagaagttctgggagccagatgacagcaccaaggatggccagaagggcatcttcctgggagatgatgagtggagggagacagcctggggcgccagccaccacagcatgagccagcccatcatggtgcagaggagaagtggccagggcttccacggcaacagcgaggtgaatgccatcctgagccccaggtctgagagcggcggcctgggcgtgtccatggtggagtatgtgctgagcagcagccctgctgacaagctggacagccgcttcagaaaaggaaactttggcaccagagatgctgagacagatggccctgagaagggggaccagaagggcaaggccagcccctttgaggaggaccagaacagagacctgaagcagggagatgatgatgacagcaagatcaatggccggggcctgcccaacggcatggatgctgactgcaaggacttcaacagaacacctggcagccggcaggccagccccacagaggtggtggagcggctgggccccaacaccaaccccagcgagggcctgggccccctgcccaaccccacagccaacaagcccctggtggaggagttcagcaaccctgagacccagaacctggatgccatggagcaggtgggcctggagagcctgcagtttgactacccaggcaaccaggtgcccatggacagcagcggggccaccgtgggcctgtttgactacaacagccagcagcagctgttccagaggaccaatgccctgactgtgcagcagctgacagctgcccagcagcagcagtatgccctggccgccgcccagcagccccactag

SEQ ID NO: 326992 - DNA, 882 bp, Artificial Sequence
  derived and/or modified sequence
atgaaccacgacttccaggccctggccctggagagccggggcatgggcgaactgctgccgacaaagaagttttgggagccagatgacagcaccaaggatggacaaaagggtatctttttaggagacgatgagtggagagagacggcttggggagcatcccaccactccatgagccagccgatcatggtgcagcgtcggagcggccagggcttccatggcaactcagaagtcaacgccattctctctccaaggtccgagagtggaggcctgggggtgtccatggtggagtacgtcttaagtagcagtcccgccgataagctggacagccgattccggaagggcaatttcggcacaagggacgcagaaacagatggccctgagaaaggagatcagaaagggaaagctagtccctttgaggaggatcagaatcgagatctgaagcagggggatgatgacgatagtaaaatcaatggcagaggcctacctaacggaatggacgcagattgcaaggatttcaaccgaaccccaggcagtaggcaggcaagtccaaccgaggtggtggaaagactggggccgaacactaacccaagcgaaggacttgggcccttaccaaaccctactgcaaataagccgcttgttgaggagttctccaaccccgaaacccaaaacctcgatgctatggaacaggtgggcctggaatctctccagtttgattatcccggaaaccaggttcctatggacagctctggcgcaactgtcggcttgttcgactataattcacaacagcagctgttccagcgtacaaacgctctcacggtgcagcagctcaccgccgcccagcagcagcagtatgcgctggccgccgcccagcagcctcactag

SEQ ID NO: 326993 - DNA, 882 bp, Artificial Sequence
  derived and/or modified sequence
atgaatcacgatttccaggctctcgccctggagtccaggggcatgggcgaactcttaccaaccaaaaagttttgggaacctgatgattcgacaaaggacggtcagaagggcattttccttggcgatgacgaatggcgcgagacagcttggggagcttctcaccacagcatgtcccagcctatcatggtccaaaggcggagcggtcagggattccatggaaacagcgaggtgaatgctattctgagtccccgaagcgagtcaggtggcttgggcgtatccatggttgaatacgtacttagcagtagccccgcagataagctagattccaggttccggaaggggaacttcggtaccagagatgctgagacggacggacccgagaagggcgatcagaaagggaaggcaagtcctttcgaggaggaccagaatagagacctcaagcagggagatgatgacgattccaagatcaatggtagaggcctgcccaatggtatggacgcagactgtaaagatttcaataggacacctggatccagacaggccagcccgaccgaggtcgtggagaggcttggccctaataccaatccgagtgaggggctgggaccccttccaaaccctacagccaacaagcccctggtggaggagttttcaaatcccgaaacacagaacctagacgctatggaacaagtaggacttgagtccctgcaatttgactatcctggcaatcaagttcccatggactccagtggtgccacagtgggcctgttcgactataactcccagcagcaattgttccagcggaccaatgcacttaccgtgcagcagctgaccgctgcccagcagcagcagtacgcactcgccgctgcccagcagccacattag

SEQ ID NO: 326994 - DNA, 546 bp, Artificial Sequence
  derived and/or modified sequence
attgccgccaccgaaggcggaggagggggaggaccgccaagagcgacgccgccgtgtgcccaacggtcggtgtccccggctgaggcagcgcggccgcagcagccctgaaacagtcataacctcaaaaatgactttttaattcaaatataagattatactgggtcttggccaaagaaaagtttctgtcgtatatttctgtgttggtgctttcgtgctacagaggcgtagttgagtagctgcagcagagatcatatggcctgcaaagcctaaaatgttgactcctacactaggggtatgatttatcccaacagtaagaatggattcaaagagctaagagacctctcaaaattatccagaggttctttaacttatgtgacctcatctatttggaccactgataaaaacctgaaagtaagcaaaaaaggtttgatctgtggatgaaatgaatcatgattttcaagctcttgcattagaatctcggggaatgggagagcttttgcctaccaaaaagttttgggaacctgatgattcaacaaaagatggaca

SEQ ID NO: 326995 - DNA, 955 bp, Artificial Sequence
  derived and/or modified sequence
gaggcagaggaagactgtctccagaattacttgggaagtaaaaatctgcgaggcttggtttgatctgtggatgaaatgaatcatgattttcaagctcttgcattagaatctcggggaatgggagagcttttgcctaccaaaaagttttgggaacctgatgattcaacaaaagatggacaaaaaggcatatttcttggggatgatgaatggagagagactgcatggggagcttctcaccattcaatgtcccagcctattatggtacagagaagatctggacagggttttcatggaaacagtgaagtaaatgcaatactgtctccgcgatcagaaagtggaggccttggtgtgagcatggtagaatatgtattaagttcttctcctgctgataaattggattctcgatttaggaagggaaattttggcactagagatgctgaaacagatggacctgagaaaggagatcaaaaaggcaaggcttctccatttgaggaggaccaaaacagagatcttaaacaaggagatgatgatgattctaaaataaatggcagaggtttgccaaatggaatggatgccgattgcaaagattttaatcgtactcctggaagtcgtcaagcctctccaactgaagtagttgagcgcttgggccccaatactaatccctcagaaggactggggcctcttcctaatcctacagctaataaaccacttgttgaagaattttcaaatcctgaaactcagaatctggatgccatggaacaagttggtctggaatccttacagtttgactatcctggtaatcaggtaccaatggactcttcaggagctactgtaggcctttttgactacaattcccagcagcagctctttcagaggactaatgcactaacagttcaacagttaactgcagctcaacagcagcaatatgcattagcagcagctcagcagccacata

SEQ ID NO: 326996 - DNA, 882 bp, Artificial Sequence
  derived and/or modified sequence
atgaaccacgacttccaggccctggccctggagagcagaggcatgggcgagctgctgcccaccaagaagttctgggagcccgacgacagcaccaaggacggccagaagggcatcttcctgggcgacgacgagtggagagagaccgcctggggcgccagccaccacagcatgagccagcccatcatggtgcagagaagaagcggccagggcttccacggcaacagcgaggtgaacgccatcctgagccccagaagcgagagcggcggcctgggcgtgagcatggtggagtacgtgctgagcagcagccccgccgacaagctggacagcagattcagaaagggcaacttcggcaccagagacgccgagaccgacggccccgagaagggcgaccagaagggcaaggccagccccttcgaggaggaccagaacagagacctgaagcagggcgacgacgacgacagcaagatcaacggcagaggcctgcccaacggcatggacgccgactgcaaggacttcaacagaacccccggcagcagacaggccagccccaccgaggtggtggagagactgggccccaacaccaaccccagcgagggcctgggccccctgcccaaccccaccgccaacaagcccctggtggaggagttcagcaaccccgagacccagaacctggacgccatggagcaggtgggcctggagagcctgcagttcgactaccccggcaaccaggtgcccatggacagcagcggcgccaccgtgggcctgttcgactacaacagccagcagcagctgttccagagaaccaacgccctgaccgtgcagcagctgaccgccgcccagcagcagcagtacgccctggccgccgcccagcagccccactag

SEQ ID NO: 326997 - DNA, 1637 bp, Artificial Sequence
  derived and/or modified sequence
gaaacttacgccactatgaaacaatgcaatgttcatttttaaagtcttaatttcattattcagactaaatacacacaaatatgcaaataagcaatgtctgaggtataattttcaatatacataccattatctcttgtagaactttccaaatagtttaacatattgattctttttcagttcaaatggtcattatttgcttttaattaagggaaaacagacaagaagtgcaacctgaaaattcccacaatccaaactctcaggcacaaagtcaaatggctaattattaacagagctgggccaaacacatattttaaagtctaatgccattacctaaggggagggtattatgcacctaccaggggtcaggcaccgagccaggttggtagttacaaaattataaatatttatacttaaccaagttgccaataatggtttcaaaagattctagtaaaactctatcatccagaacagagatcttaacatgccacccgcagaaaagatgccacaacacaaatgcccgaggctaggcaggggactgcgagtacctggggggtagggacagcaggcggggacattcacgtgcaatgccaagttaaaaagcacccgccctgtgacgctccacagaactctcgttccgggctagtcctgcagccacacagaaaggctcactggaagatccaatttttttcttttggctaaagaaatagttttgctttcaaaggagctgagtgcctcaaagagctgtgatcctaaaaagtcatcaaatccatttggataaacggtcaaaagcaaaaaagaggtagctgttatttatatgagaattctaaaaccaaaccttttgtaaagtaaaatagttgtctcaaattatctgaatccacattttccacaaatactccaaacaataacttctaaattctgacttttgaaaatattcatttacctttcataaaatgtaattttaaaaaagaatggttagataaagcagtcttttgctctctagcctatgtggattaaaaataatcatccaaaatgtcttaggaacctccttagttaataatcgtaaaatctcgaaaagaaatctcaatacttgaaccagagtaattagatgaggaaatttttaaaaaggatcaagcaacttggccagccactcccccactggctccaagagctccatgtccaagtgctgtgctcagtctctgaatgtaccacacccctcagagggaagtgaaaatataacacaagactacttagaaaagaattggtacctacagagaaacacacaaaacactgaaatcaaaggacctggcggcaaagtcaacaacccacctcaccccagactcaccttccctggtgtggtaagtgaaccaccagagggagggagggtgccaaaggttctaaaacttgctccatcagcaaagaatttggtaaaagcaacaaaaagtctaacaataccaatgataagtattaagcacccaccaggggtcagactctggagctgggggagacgttttatcacatgactggcactaaaaggcagaaggtgtctaaactatctttggcttcccctttagaacccagtggagtgactgcagacagagtagatgctgcgtaagtctctaaacaaagtatccaaagtt

SEQ ID NO: 326998 - protein, 431 aa, Artificial Sequence
  derived and/or modified sequence
MEASLTYPSHCCAFANWRRQISELHPICNKSILRQEVDYMTQARGQRSSLAEDNESSYSRGFDMTYTEFDYDLCNEVVDVTCSPKPDAFNPCEDIMGYNILRVLIWFISILAITGNIIVLVILTTSQYKLTVPRFLMCNLAFADLCIGIYLLLIASVDIHTKSQYHNYAIDWQTGAGCDAAGFFTVFASELSVYTLTAITLERWHTITHAMQLDCKVQLRHAASVMVMGWIFAFAAALFPIFGISSYMKVSICLPMDIDSPLSQLYVMSLLVLNVLAFVVICGCYIHIYLTVRNPNIVSSSSDTRIAKRMAMLIFTDFLCMAPISFFAISASLKVPLITVSKAKILLVLFHPINSCANPFLYAIFTKNFRRDFFILLSKCGCYEMQAQIYRTETSSTVHNTHPRNGHCSSAPRVTSGSTYILVPLSHLAQN

SEQ ID NO: 326999 - DNA, 1296 bp, Artificial Sequence
  derived and/or modified sequence
atggaggcctcactcacatacccttcccattgctgcgcttttgcgaactggcgccgtcaaatcagcgagttgcaccctatttgcaacaagagtatcctccgacaggaggtggattatatgacgcaggcacgcggtcagagatctagcctggccgaggataacgagtcatcatactctagaggatttgacatgacttacaccgagttcgattacgacctgtgcaacgaagtggtggacgttacctgtagtcctaagcccgacgcctttaacccatgcgaggacattatggggtacaacatcttgcgcgtgctgatttggttcatcagcattcttgcaataaccgggaatattatagtcctggtgatcctcactactagccagtataagttgactgtacctcgatttttgatgtgtaacctggcatttgctgacctatgtataggcatttacctgctgctgatagcttctgtggatatccatactaagtcccagtatcacaactacgcaatagattggcagaccggcgctggatgcgatgccgcaggattcttcacagtgtttgcctccgaactgtctgtttatacactgacggccattactttggagagatggcacaccatcacccatgccatgcagctggattgcaaggtgcaactgcgccacgccgctagtgttatggttatggggtggatcttcgcattcgctgctgccctgtttccaatatttggaatatcatcatacatgaaggtgtccatatgtctcccaatggacatcgactcacccctgagccagctgtacgtcatgagcttgctcgtcctcaatgtactggctttcgtagtaatatgcggatgttacatccatatctatcttacagtccggaaccctaatatcgtgagcagcagctcggatactagaattgcgaaacggatggccatgctcattttcactgatttcttatgtatggccccaatttcattcttcgccatcagtgcatctcttaaagtgccactgattaccgtctctaaggcaaaaatcctactagtgctgttccaccccatcaactcatgtgccaacccttttctgtatgccatcttcacaaaaaattttaggcgcgacttcttcatcctattatccaaatgtggctgttacgaaatgcaggcccaaatttatcggactgaaacaagcagcactgtgcacaatactcacccgcgcaacggacattgctcttccgcccctcgagtgacaagcggctctacctatatcctggtgccgctctctcatctcgctcaaaactag

SEQ ID NO: 327000 - DNA, 1296 bp, Artificial Sequence
  derived and/or modified sequence
atggaggccagcctgacctaccccagccactgctgtgcctttgccaactggaggcggcagatcagcgagctgcaccccatctgcaacaagagcatcctgcggcaggaggtggactacatgacccaggcccggggccagaggagcagcctggccgaggacaatgaaagcagctacagccggggctttgacatgacctacacagaatttgattatgacctgtgcaatgaggtggtggatgtgacctgcagccccaagccagatgccttcaacccctgtgaggacatcatgggctacaacatcctgcgggtgctgatctggttcatcagcatcctggccatcaccggcaacatcatcgtgctggtgatcctgaccaccagccagtacaagctgactgtgccccgcttcctgatgtgcaacctggcctttgctgacctgtgcatcggcatctacctgctgctgattgcctctgtggacatccacaccaagagccagtaccacaactatgccatcgactggcagacaggagctggctgtgatgctgctggcttcttcaccgtgtttgccagcgagctgtctgtgtacaccctgacagccatcaccctggagcgctggcacaccatcacccacgccatgcagctggactgcaaggtgcagctgcggcatgctgcctctgtgatggtgatgggctggatctttgcctttgctgctgccctcttccccatcttcggcatcagcagctacatgaaggtgtccatctgcctgcccatggacatcgacagccccctgagccagctgtatgtgatgagcctgctggtgctgaatgtgctggcctttgtggtgatctgtggctgctacatccacatctacctgactgtgaggaaccccaacatcgtgagcagcagcagtgacacccgcatcgccaagaggatggccatgctgatcttcacagacttcctgtgcatggcccccatctccttctttgccatcagcgccagcctgaaggtgcccctcatcaccgtgtccaaggccaagatcctgctggtgctcttccaccccatcaacagctgtgccaaccccttcctgtatgccatcttcaccaagaacttccggcgggacttcttcatcctgctgagcaaatgtggctgctatgagatgcaggcccagatctacagaacagagaccagcagcacagtgcacaacacccaccccagaaatggccactgcagcagcgccccccgggtgaccagcggcagcacctacatcctggtgcccctgagccacctggcccagaactag

SEQ ID NO: 327001 - DNA, 1296 bp, Artificial Sequence
  derived and/or modified sequence
atggaggccagcctgacctaccccagccactgctgcgccttcgccaattggcggcgacagattagtgagttgcatcctatctgtaacaaaagcatccttcggcaagaggtcgattatatgacccaagccagaggtcagaggagcagcttggcggaagacaacgaaagttcctacagccgcggcttcgacatgacatatacagaatttgattatgatctgtgtaacgaagttgtggatgtgacctgctctccaaagcccgacgcattcaacccatgtgaggatatcatgggctacaatattttgagggtcttgatctggttcatttcaatacttgctattactggaaacatcatcgtgctggtgattttgactacctctcaatacaagctgacggtgccgcggtttctgatgtgtaacttggccttcgcggacctatgcataggcatataccttcttctgattgcctctgtggacatccatactaagtcacagtatcacaactatgcgattgactggcagactggggcaggctgtgatgccgctgggttctttaccgtgttcgcttccgagttgtcagtctatacattaacagcgattacactggaacgatggcacacaatcactcatgcgatgcaacttgactgcaaagtgcaactcagacatgccgccagcgtgatggtgatgggatggatcttcgcgtttgccgctgccctctttccgatttttggtatttctagctacatgaaagttagcatttgcctaccgatggatattgactctccactgtcgcagctctatgttatgagtctgctagtcctcaacgtgttagccttcgtggtaatttgcgggtgctatatccacatctatttgactgtgagaaacccgaacatcgtgtcaagctcatcagatactagaatcgccaaacgtatggccatgctgatctttaccgacttcctctgcatggcccccatttctttcttcgccatttcagcgtcgctgaaggtgcccctcataacagtaagcaaagccaagatccttctggtgctgtttcatcccattaacagctgcgccaacccttttctgtatgcaatctttacgaaaaacttcagaagggattttttcattctgctgagtaagtgcgggtgctacgagatgcaggcgcagatttataggactgaaacctcaagcaccgtgcataatacccacccccgcaatgggcactgttcatccgctccccgggtcacaagtggctccacctatatcctcgtgccactgagccacctagctcagaactag

SEQ ID NO: 327002 - DNA, 1296 bp, Artificial Sequence
  derived and/or modified sequence
atggaagcttcactcacatacccgagtcactgctgtgcatttgccaactggcggcgtcagatttccgagctgcaccctatttgtaataagagcatcctccgacaggaggttgactacatgacgcaagctaggggccagaggtcttccttggcagaagataatgagtcatcatacagtcgcggattcgatatgacttacactgaattcgactacgatctctgtaatgaagtggttgacgttacgtgcagtcctaagccagatgccttcaacccttgcgaggacatcatgggctataacatccttagggtgcttatctggtttatctccattctggccatcacaggcaacatcattgtgctggtgatcttgaccactagtcaatataagctgactgttcccagattccttatgtgtaatcttgcgttcgcggacctgtgcatcggtatttacctattgttgattgcctctgtggatatccacacaaaatcccagtatcacaattacgcgattgattggcagacaggggcaggctgtgacgcagcgggattcttcactgtgtttgcttctgaattgtctgtgtacacccttactgcgattaccctcgagcgctggcacactatcactcacgctatgcagctggactgcaaagtgcagctccgtcatgcggcttcggtcatggtcatggggtggattttcgctttcgctgcagccctgtttcccatcttcgggatctcatcctacatgaaagtctcaatttgtctgcccatggacattgacagtcccctgtcccagttgtacgtcatgtccctgctcgtgttgaacgtgctggcgttcgtggtcatctgcggctgttacatccatatttacctaaccgttagaaatcccaacattgtgtcctcctcatccgacacgcggatcgccaagcgcatggctatgctgattttcaccgatttcttatgcatggcacctatttctttttttgcaatctcagcaagtcttaaagtccccctgattaccgtaagcaaggctaagatcttgcttgtgcttttccatccaataaactcctgtgcaaacccctttctgtacgcaatattcacgaagaatttccggagagatttctttatcctcctgtcaaagtgcggatgttacgagatgcaggcacagatttatcgtacagagacgagtagtaccgtgcacaatactcaccccaggaatggccattgctcttccgcgcctcgagtgacatcaggctctacttatatcctggtgcctctgtcacatctcgcacaaaactag

SEQ ID NO: 327003 - DNA, 1296 bp, Artificial Sequence
  derived and/or modified sequence
atggaggccagcctgacctaccccagccactgctgcgccttcgccaactggagaagacagatcagcgagctgcaccccatctgcaacaagagcatcctgagacaggaggtggactacatgacccaggccagaggccagagaagcagcctggccgaggacaacgagagcagctacagcagaggcttcgacatgacctacaccgagttcgactacgacctgtgcaacgaggtggtggacgtgacctgcagccccaagcccgacgccttcaacccctgcgaggacatcatgggctacaacatcctgagagtgctgatctggttcatcagcatcctggccatcaccggcaacatcatcgtgctggtgatcctgaccaccagccagtacaagctgaccgtgcccagattcctgatgtgcaacctggccttcgccgacctgtgcatcggcatctacctgctgctgatcgccagcgtggacatccacaccaagagccagtaccacaactacgccatcgactggcagaccggcgccggctgcgacgccgccggcttcttcaccgtgttcgccagcgagctgagcgtgtacaccctgaccgccatcaccctggagagatggcacaccatcacccacgccatgcagctggactgcaaggtgcagctgagacacgccgccagcgtgatggtgatgggctggatcttcgccttcgccgccgccctgttccccatcttcggcatcagcagctacatgaaggtgagcatctgcctgcccatggacatcgacagccccctgagccagctgtacgtgatgagcctgctggtgctgaacgtgctggccttcgtggtgatctgcggctgctacatccacatctacctgaccgtgagaaaccccaacatcgtgagcagcagcagcgacaccagaatcgccaagagaatggccatgctgatcttcaccgacttcctgtgcatggcccccatcagcttcttcgccatcagcgccagcctgaaggtgcccctgatcaccgtgagcaaggccaagatcctgctggtgctgttccaccccatcaacagctgcgccaaccccttcctgtacgccatcttcaccaagaacttcagaagagacttcttcatcctgctgagcaagtgcggctgctacgagatgcaggcccagatctacagaaccgagaccagcagcaccgtgcacaacacccaccccagaaacggccactgcagcagcgcccccagagtgaccagcggcagcacctacatcctggtgcccctgagccacctggcccagaactag

SEQ ID NO: 327004 - DNA, 462 bp, Artificial Sequence
  derived and/or modified sequence
atgcattccagagggagggaaatcgttgtccttctgaatccctggagtattaatgaggccgtgagtagttactgcacgtactttatcaaacaggattccaagtctttcggaatcatggtctcttggaaaggaatttacttcatattgacactgttttggggctctttttttgggagcatatttatgctttctccattcttgcccctgatgtttgtaaatccatcttggtacaggtggatcaataatcggctggtagctacctggttgacgctacccgtagcgctactggagaccatgtttggagtgaaggtgataattacaggagatgctttcgtgcccggagagagaagcgtcattattatgaaccatcgaacaaggatggattggatgttcctgtggaattgcctgatgcggtacagctacctccggctggagaaaatttgtctgaaggcaagcctttag

SEQ ID NO: 327005 - DNA, 462 bp, Artificial Sequence
  derived and/or modified sequence
atgcacagccggggccgggagatcgtggtgctgctgaacccctggagcatcaatgaggccgtgtcctcctactgcacctacttcatcaagcaggacagcaagagctttggcatcatggtgtcctggaagggcatctacttcatcctgaccctcttctggggcagcttcttcggcagcatcttcatgctgagccccttcctgcccctgatgtttgtgaaccccagctggtaccgctggatcaacaaccggctggtggccacctggctgaccctgcctgtggccctgctggagaccatgtttggagtgaaggtgatcatcactggagatgcctttgtgcctggagagaggagcgtcatcatcatgaaccacaggaccaggatggactggatgttcctgtggaactgcctgatgagatacagctacctgcggctggagaagatctgcctgaaggccagcctgtag

SEQ ID NO: 327006 - DNA, 658 bp, Artificial Sequence
  derived and/or modified sequence
gaggctggaactatcaggtggggttacggcgcgaggaaaatggcggcggccgggggatctcagaggtgcaggaaggggagctgcagcccgggcttttcctcctgagccatggaccttccccgggccgcgacctcgggctgaaaaacagagtgggtactctcttctgggaagctggcaacaaatggatgatgtgatatatgcattccaggggaagggaaattgtggtgcttctgaacccatggtcaattaacgaggcagtttctagctactgcacgtacttcataaagcaggactctaaaagctttggaatcatggtgtcatggaaagggatttactttatactgactctgttttggggaagcttttttggaagcattttcatgctgagtccctttttacctttgatgtttgtaaacccatcttggtatcgctggatcaacaaccgccttgtggcaacatggctcaccctacctgtggcattattggagaccatgtttggtgtaaaagtgattataactggggatgcatttgttcctggagaaagaagtgtcattatcatgaaccatcggacaagaatggactggatgttcctgtggaattgcctgatgcgatatagctacctcagattggagaaaatttgcctcaaagcgagtctcaa

SEQ ID NO: 327007 - DNA, 462 bp, Artificial Sequence
  derived and/or modified sequence
atgcacagccggggccgggagatcgtggtgctgctgaacccctggtccatcaacgaagccgtgagtagctattgtacatactttattaagcaggactccaagagcttcggcatcatggtgtcttggaagggaatctatttcatattaactttgttttgggggagttttttcggatctatttttatgctaagccccttcctgccgctgatgtttgtgaatccttcgtggtaccgatggattaacaacaggctggtcgccacatggcttacattgccagtggctcttctagaaacaatgtttggcgtaaaagtgatcattacgggtgatgccttcgtaccgggcgagcgatctgtgatcatcatgaaccacaggacccgaatggactggatgtttctttggaattgcctgatgaggtacagctatcttcggctcgagaagatctgcctgaaggcgagtttgtag

SEQ ID NO: 327008 - DNA, 462 bp, Artificial Sequence
  derived and/or modified sequence
atgcactcccgcggtcgcgagattgtggtgctgctgaacccatggagcataaatgaagctgtatcaagttactgcacctactttattaagcaggatagcaagtccttcgggatcatggtatcctggaaagggatatattttattctcaccctcttttggggttctttcttcgggagtatcttcatgctgtcaccttttctacctttgatgttcgtaaacccatcatggtacaggtggatcaacaacagactcgtggcaacctggcttactctacccgtggcgttgttggagacgatgttcggagtaaaggtaataataactggtgatgcatttgtgcccggagagcgctctgtcatcatcatgaaccaccggacacgtatggattggatgttcctttggaattgcctgatgagatatagctatctgaggctggaaaagatatgcctgaaagcctcgctttag

SEQ ID NO: 327009 - DNA, 462 bp, Artificial Sequence
  derived and/or modified sequence
atgcacagcagaggcagagagatcgtggtgctgctgaacccctggagcatcaacgaggccgtgagcagctactgcacctacttcatcaagcaggacagcaagagcttcggcatcatggtgagctggaagggcatctacttcatcctgaccctgttctggggcagcttcttcggcagcatcttcatgctgagccccttcctgcccctgatgttcgtgaaccccagctggtacagatggatcaacaacagactggtggccacctggctgaccctgcccgtggccctgctggagaccatgttcggcgtgaaggtgatcatcaccggcgacgccttcgtgcccggcgagagaagcgtgatcatcatgaaccacagaaccagaatggactggatgttcctgtggaactgcctgatgagatacagctacctgagactggagaagatctgcctgaaggccagcctgtag

SEQ ID NO: 327010 - protein, 690 aa, Artificial Sequence
  derived and/or modified sequence
MGSSGLGKAATLDELLCTCIEMFDDNGELDNSYLPRIVLLMHRWYLSSTELAEKLLCMYRNATGESCNEFRLKICYFMRYWILKFPAEFNLDLGLIRMTEEFREVASQLGYEKHVSLIDISSIPSYDWMRRVTQRKKVSKKGKACLLFDHLEPIELAEHLTFLEHKSFRRISFTDYQSYVIHGCLENNPTLERSIALFNGISKWVQLMVLSKPTPQQRAEVITKFINVAKKLLQLKNFNTLMAVVGGLSHSSISRLKETHSHLSSEVTKNWNEMTELVSSNGNYCNYRKAFADCDGFKIPILGVHLKDLIAVHVIFPDWTEENKVNIVKMHQLSVTLSELVSLQNASHHLEPNMDLINLLTLSLDLYHTEDDIYKLSLVLEPRNSKSQPTSPTTPNKPVVPLEWALGVMPKPDPTVINKHIRKLVESVFRNYDHDHDGYISQEDFESIAANFPFLDSFCVLDKDQDGLISKDEMMAYFLRAKSQLHCKMGPGFIHNFQEMTYLKPTFCEHCAGFLWGIIKQGYKCKDCGANCHKQCKDLLVLACRRFARAPSLSSGHGSLPGSPSLPPAQDEVFEFPGVTAGHRDLDSRAITLVTGSSRKISVRLQRATTSQATQTEPVWSEAGWGDSGSHTFPKMKSKFHDKAAKDKGFAKWENEKPRVHAGVDVVDRGTEFELDQDEGEETRQDGEDG

SEQ ID NO: 327011 - protein, 113 aa, Artificial Sequence
  derived and/or modified sequence
MGSSGLGKAATLDELLCTCIEMFDDNGELDNSYLPRIVLLMHRWYLSSTELAEKLLCMYRNATGESCNEFRLKICYFMRYWILKFPAEFNLDLGLIRMTEEFREVASQLGYEK

SEQ ID NO: 327012 - protein, 34 aa, Artificial Sequence
  derived and/or modified sequence
MGSSGLGKAATLDELLCTCIEMFDDNGELDNSYL

SEQ ID NO: 327013 - protein, 172 aa, Artificial Sequence
  derived and/or modified sequence
MGSSGLGKAATLDELLCTCIEMFDDNGELDNSYLPRIVLLMHRWYLSSTELAEKLLCMYRNATGESCNEFRLKICYFMRYWILKFPAEFNLDLGLIRMTEEFREVASQLGYEKHVSLIDISSIPSYDWMRRVTQRKKVSKKGKACLLFDHLEPIELAEHLTFLEHKSFRRIS

SEQ ID NO: 327014 - protein, 77 aa, Artificial Sequence
  derived and/or modified sequence
MGSSGLGKAATLDELLCTCIEMFDDNGELDNSYLPRIVLLMHRWYLSSTELAEKLLCMYRNATGESCNEFRLKICYF

SEQ ID NO: 327015 - DNA, 2073 bp, Artificial Sequence
  derived and/or modified sequence
atgggcagcagcggcctgggcaaggccgccaccctggacgagctgctgtgcacctgcatcgagatgttcgacgacaacggcgagctggacaacagctacctgcccagaatcgtgctgctgatgcacagatggtacctgagcagcaccgagctggccgagaagctgctgtgcatgtacagaaacgccaccggcgagagctgcaacgagttcagactgaagatctgctacttcatgagatactggatcctgaagttccccgccgagttcaacctggacctgggcctgatcagaatgaccgaggagttcagagaggtggccagccagctgggctacgagaagcacgtgagcctgatcgacatcagcagcatccccagctacgactggatgagaagagtgacccagagaaagaaggtgagcaagaagggcaaggcctgcctgctgttcgaccacctggagcccatcgagctggccgagcacctgaccttcctggagcacaagagcttcagaagaatcagcttcaccgactaccagagctacgtgatccacggctgcctggagaacaaccccaccctggagagaagcatcgccctgttcaacggcatcagcaagtgggtgcagctgatggtgctgagcaagcccaccccccagcagagagccgaggtgatcaccaagttcatcaacgtggccaagaagctgctgcagctgaagaacttcaacaccctgatggccgtggtgggcggcctgagccacagcagcatcagcagactgaaggagacccacagccacctgagcagcgaggtgaccaagaactggaacgagatgaccgagctggtgagcagcaacggcaactactgcaactacagaaaggccttcgccgactgcgacggcttcaagatccccatcctgggcgtgcacctgaaggacctgatcgccgtgcacgtgatcttccccgactggaccgaggagaacaaggtgaacatcgtgaagatgcaccagctgagcgtgaccctgagcgagctggtgagcctgcagaacgccagccaccacctggagcccaacatggacctgatcaacctgctgaccctgagcctggacctgtaccacaccgaggacgacatctacaagctgagcctggtgctggagcccagaaacagcaagagccagcccaccagccccaccacccccaacaagcccgtggtgcccctggagtgggccctgggcgtgatgcccaagcccgaccccaccgtgatcaacaagcacatcagaaagctggtggagagcgtgttcagaaactacgaccacgaccacgacggctacatcagccaggaggacttcgagagcatcgccgccaacttccccttcctggacagcttctgcgtgctggacaaggaccaggacggcctgatcagcaaggacgagatgatggcctacttcctgagagccaagagccagctgcactgcaagatgggccccggcttcatccacaacttccaggagatgacctacctgaagcccaccttctgcgagcactgcgccggcttcctgtggggcatcatcaagcagggctacaagtgcaaggactgcggcgccaactgccacaagcagtgcaaggacctgctggtgctggcctgcagaagattcgccagagcccccagcctgagcagcggccacggcagcctgcccggcagccccagcctgccccccgcccaggacgaggtgttcgagttccccggcgtgaccgccggccacagagacctggacagcagagccatcaccctggtgaccggcagcagcagaaagatcagcgtgagactgcagagagccaccaccagccaggccacccagaccgagcccgtgtggagcgaggccggctggggcgacagcggcagccacaccttccccaagatgaagagcaagttccacgacaaggccgccaaggacaagggcttcgccaagtgggagaacgagaagcccagagtgcacgccggcgtggacgtggtggacagaggcaccgagttcgagctggaccaggacgagggcgaggagaccagacaggacggcgaggacggctag

SEQ ID NO: 327016 - DNA, 105 bp, Artificial Sequence
  derived and/or modified sequence
atgggcagcagcggcctgggcaaggccgccaccctggacgagctgctgtgcacctgcatcgagatgttcgacgacaacggcgagctggacaacagctacctgtag

SEQ ID NO: 327017 - DNA, 2073 bp, Artificial Sequence
  derived and/or modified sequence
atggggtcgtccgggctgggcaaagctgccacccttgatgaactgctgtgcacatgtatcgagatgttcgatgacaatggggagctcgacaattcctatctgccgaggatagtcctcctgatgcatcgctggtatctcagctcgacagaactcgcggaaaagctgctgtgcatgtatcgcaatgccaccggggaatcctgtaacgagtttcgactaaagatctgttactttatgcgttattggatactgaaattccccgccgagttcaacctggatctcgggctaattcggatgaccgaagaattccgcgaggtggccagccaactcggatacgagaagcacgttagcctcatcgacatctcctctattccatcatacgactggatgcggagagtgacccagcggaaaaaggtctctaagaagggcaaggcctgcttgttattcgatcatctggagcctatcgaattagccgaacacctgaccttccttgagcataaaagttttcgtagaatctctttcacggattatcagagctacgtgatccacgggtgtctggagaacaatcctacactggaaaggagtatcgcactgtttaacggaataagcaaatgggttcagctaatggtgctttctaagcctaccccacaacagcgagctgaggtcatcaccaaattcattaacgtcgctaagaaactccttcagctgaaaaattttaatacactgatggcagtcgtaggcggattaagtcattcatcaatcagtagactcaaagaaacccactcacatctgtcctccgaagttaccaaaaactggaacgagatgacggagctggtgagcagcaacggcaattactgcaactatagaaaagctttcgctgattgtgatggcttcaaaatccctattctcggggtgcaccttaaggacctgattgccgttcacgtgattttccctgactggaccgaggaaaataaagttaacatagtcaagatgcatcagttatcagtgaccctgtcagagctggtatccctccaaaacgccagccaccacctcgagcctaatatggatctcattaatctcctcacactgagtctggacctgtatcatacagaggatgacatttacaaactttctctggtgctggagccacgcaatagtaaaagccagccgacgagccccaccacgcctaacaagccagtcgtccctctggagtgggcactgggggtgatgcctaagccagatcccaccgtgatcaacaaacacatcaggaagctggtggaaagcgtcttccggaattacgaccatgaccacgacggctatatttcacaggaggactttgaatctattgctgcaaacttccccttcttggactctttttgtgtgctggataaggatcaagatggtctcatttctaaagacgaaatgatggcctactttctccgagcaaagtcccagctgcattgcaagatgggcccagggtttattcacaacttccaggaaatgacttatctcaagccaacattttgcgaacactgcgctggtttcttatggggcatcattaagcaggggtacaagtgtaaggactgcggtgcaaattgccataagcagtgcaaggacctgctagtcctcgcttgcagacgatttgcgcgcgcccccagtctgagcagtgggcatggctcactgcccggaagtccatcactgcctcctgcccaagacgaggtgttcgagtttccaggcgtcacggccgggcaccgggacctggactccagagctattaccctcgtgaccggctcttctcggaaaataagcgtaagactgcagagggcgacaaccagccaggccacgcaaactgagccggtctggtccgaggctggatggggcgattcaggttctcatacatttccgaagatgaagtcgaaattccatgacaaggcagctaaggacaaaggattcgccaaatgggaaaacgagaaacctagggtgcacgcaggggtggacgtggtggatcgaggcacagagtttgaattggaccaggatgagggtgaggaaacccgacaggatggcgaggatgggtag

SEQ ID NO: 327018 - DNA, 2073 bp, Artificial Sequence
  derived and/or modified sequence
atggggagtagcggactcgggaaggcagcaaccctggacgagttactctgcacatgtatcgagatgttcgacgacaatggggaactggacaatagctatctcccccgaatagtgttgctaatgcatcgctggtatctgtccagcacagagctggctgagaagcttctatgcatgtatcgcaatgctaccggcgaaagttgtaacgaattcaggttgaagatttgctattttatgcgctactggatcctcaaattccctgcggaatttaatcttgaccttggattgattcgcatgaccgaagagtttcgggaggttgcttcccagcttggatacgagaagcatgtgtcacttatcgatatctctagcatcccttcatacgactggatgaggcgggttactcagagaaagaaggtgagcaaaaagggcaaggcctgtctgctgttcgaccacctcgagccaattgaactagcagagcacttgacatttctggagcacaagtcctttcgccgtatcagtttcaccgattaccagagctacgttattcatgggtgcctggagaataaccctacactagagcggtcgattgccttattcaatgggatctccaaatgggtgcagctgatggtgctgagcaaacccacccctcagcagagagccgaggtgatcacaaaatttataaacgtggctaagaaactgcttcagctgaagaattttaacaccctgatggccgtggtaggaggcctgtcgcactcctcaatatctcggttgaaggaaacccacagccacctgagctctgaggtgactaaaaactggaatgagatgactgagctggtttcttccaacgggaactactgcaactatagaaaagcctttgcagactgcgatggcttcaagattcctatcttaggtgtgcacctaaaagatctgatagccgtacacgtaattttccccgactggactgaagagaacaaagtcaacattgttaagatgcaccagctgagcgtgaccctttccgagctggtgagtctgcagaatgcaagccatcatttggagccaaatatggacctcataaatctgctgaccttgtccctcgatctgtaccatacagaggatgacatctacaaattatccttggtactggagccccgcaattctaagagtcagccgacctcgcctacaacgccaaacaaacccgtggtacccctggaatgggcactgggcgtgatgcctaaaccagacccaacggtcatcaacaagcatattaggaagctggttgaaagcgtttttcgtaactacgaccacgatcacgacggctacatctcccaggaagactttgagagcatcgccgctaattttccatttctcgacagtttctgcgtcctcgataaagaccaggacggtttgatctccaaagacgagatgatggcgtactttctccgcgccaaatcccaactgcactgtaaaatgggcccaggatttatccacaacttccaggagatgacctatttaaaaccaactttctgcgagcactgtgcaggattcttgtggggtataattaagcaggggtacaaatgcaaagattgcggggcaaattgtcacaaacaatgtaaggacctgcttgtgctggcctgtcgacggtttgcacgcgcccccagtctgtcttcagggcacggctcactgcctgggtcaccttcattgccccccgcccaagatgaggtgttcgagttcccaggagtgacagcagggcatcgcgacctcgatagccgtgccatcacactcgtcacggggtcaagccgaaaaataagcgtgcggcttcagagggccaccaccagccaagcaactcagactgaaccagtctggtcagaggctggctggggtgatagcggcagccatacctttcctaaaatgaagtctaaatttcacgataaagccgctaaagataaagggtttgcaaagtgggaaaacgagaaacccagggtgcatgccggcgtggacgtcgtggatcgtggtacagaattcgaacttgatcaagatgaaggcgaggagactcggcaggatggggaagacgggtag

SEQ ID NO: 327019 - DNA, 105 bp, Artificial Sequence
  derived and/or modified sequence
atgggctccagtggcttaggaaaggctgccacactggacgagctgctctgcacttgtatcgagatgttcgacgacaatggagaacttgataactcctacctgtag

SEQ ID NO: 327020 - DNA, 2073 bp, Artificial Sequence
  derived and/or modified sequence
atgggcagcagcggcctgggcaaggccgccaccctggatgagctgctgtgcacctgcatcgagatgtttgatgacaacggggagctggacaacagctacctgcccagaattgtgctgctgatgcaccgctggtacctgagcagcacagagctggccgagaagctgctgtgcatgtacagaaatgccactggagagagctgcaatgagttccggctgaagatctgctacttcatgagatactggatcctgaagtttcctgctgagttcaacctggacctgggcctcatccgcatgacagaggagttccgggaggtggccagccagctgggctatgagaagcacgtgtccctgattgacatcagcagcatccccagctatgactggatgagaagagtgacccagaggaagaaggtgtccaagaagggcaaggcctgcctgctgtttgaccacctggagcccatcgagctggccgagcacctgaccttcctggagcacaagagcttccgccgcatctccttcacagactaccagagctatgtgatccacggctgcctggagaacaaccccaccctggagaggagcatcgccctcttcaacggcatcagcaagtgggtgcagctgatggtgctgagcaagcccaccccccagcagagagctgaggtgatcaccaagttcatcaacgtggccaagaagctgctgcagctgaagaacttcaacaccctgatggctgtggtgggcggcctgagccacagcagcatcagccggctgaaggagacccacagccacctgagcagcgaggtgaccaagaactggaatgagatgacagagctggtgagcagcaatggaaactactgcaactacaggaaggcctttgctgactgtgatggcttcaagatccccatcctgggcgtgcacctgaaggacctgattgctgtgcacgtgatcttcccagactggacagaggagaacaaggtgaacatcgtgaagatgcaccagctgtctgtgaccctgtctgagctggtgtccctgcagaatgccagccaccacctggagcccaacatggacctgatcaacctgctgaccctgagcctggacctgtaccacacagaagatgacatctacaagctgagcctggtgctggagcccaggaacagcaagagccagcccaccagccccaccacccccaacaagcctgtggtgcccctggagtgggccctgggcgtgatgcccaagccagaccccaccgtcatcaacaagcacatcaggaagctggtggagagcgtcttcaggaactatgaccatgaccatgatggctacatcagccaggaggactttgagagcattgctgccaacttccccttcctggacagcttctgtgtgctggacaaggaccaggacggcctcatcagcaaggatgagatgatggcctacttcctgcgggccaagagccagctgcactgcaagatgggccctggcttcatccacaacttccaggagatgacctacctgaagcccaccttctgtgagcactgtgccggcttcctgtggggcatcatcaagcagggctacaagtgcaaggactgtggggccaactgccacaagcagtgcaaggacctgctggtgctggcctgcagaagatttgcccgggcccccagcctgagcagcggccacggcagcctgcccggcagccccagcctgcccccagcccaggatgaggtgtttgagttccctggggtgacagctggccaccgggacctggacagccgggccatcaccctggtgacaggcagcagcaggaagatctctgtgcggctgcagagggccaccaccagccaggccacccagacagagcctgtgtggagcgaggccggctggggagacagcggcagccacaccttccccaagatgaagagcaagttccatgacaaggccgccaaggacaagggctttgccaagtgggagaatgagaagccccgggtgcacgccggcgtggatgtggtggaccggggcacagaatttgagctggaccaggatgaaggagaggagacccggcaggatggagaagatggatag

SEQ ID NO: 327021 - DNA, 105 bp, Artificial Sequence
  derived and/or modified sequence
atgggcagcagcggcctgggcaaggccgccaccctggatgagctgctgtgcacctgcatcgagatgtttgatgacaacggggagctggacaacagctacctgtag

SEQ ID NO: 327022 - DNA, 2073 bp, Artificial Sequence
  derived and/or modified sequence
atgggcagcagcggcctgggcaaggccgccaccctggacgagctgctctgtacttgcattgagatgtttgatgacaatggtgagttggacaactcctacctgcctcgcattgtgcttcttatgcacaggtggtaccttagttcaaccgaattggcagagaagctgctgtgcatgtatcgaaatgcaactggtgaatcttgtaacgaatttagattaaagatctgttacttcatgcgctattggattctgaaatttcccgccgagttcaatttagacctagggctcatcaggatgactgaggaatttcgggaggttgccagtcagctgggttacgagaaacacgtaagtctgatcgacatttcttccattccctcttacgattggatgaggcgggttacccagcgcaagaaggtcagcaagaaaggcaaagcttgcttgctgttcgaccacctcgagccaatcgaactagcagaacatctgacgtttctggagcataaaagcttccggagaattagttttacagactatcagagctatgtcatccacggctgcctggagaacaaccctaccctggagaggtccattgctcttttcaatggtatttctaagtgggtgcagctgatggtcctgtctaagcctactcctcagcagcgggccgaagtcatcactaagttcatcaatgttgccaagaagttactccagttgaaaaactttaacaccctcatggccgttgtcgggggtctctcccactctagtatttcccgattgaaagaaacgcattctcacctgtcctctgaggttacaaagaactggaatgagatgacagagctggtgtcctctaacggaaactattgtaattatcggaaagccttcgccgactgtgatgggtttaaaattccgatcttgggggtgcatctgaaggatttgattgctgttcatgtgattttcccagattggacagaagaaaataaagttaatatagtgaagatgcatcaactcagtgtcaccctgtccgagctcgtctcactgcaaaacgcctcccaccacctggaacctaatatggatctcattaacttactgactttatcactggatctgtatcacacagaagacgacatctacaagctgtcactcgtgctggaacctaggaactccaaatcgcaacccacgtccccaacgacccctaacaagcctgtggttccgttggagtgggccctgggtgtgatgcccaaaccagaccccacagttatcaataagcacatccgcaagttagtggagtctgtgtttaggaattatgaccacgaccatgatggctatatctctcaggaggactttgagagtatcgccgcaaactttccattcctagattcattctgtgtgctggataaggaccaggatggcctgatttccaaggatgagatgatggcatatttcctcagagccaagagtcagctgcactgcaagatggggcctgggttcatccataatttccaagagatgacatatctgaagcctactttctgcgagcactgtgcgggcttcctgtggggcatcatcaagcagggctataagtgtaaggattgtggcgccaattgccacaagcagtgcaaagatctgttagttctggcctgccggcggttcgcaagagctccctccctgtcaagcggtcacggatcacttcctggctcccctagcctgccacccgcacaggacgaagtgttcgagttccctggggtgactgccggccatagggatctggactccagagccattacactcgtgaccggctcctcccgaaaaataagcgtgcgactgcagcgggctacaacaagccaggccacccagaccgagccggtgtggtcagaggcgggatggggcgactctggatcccataccttcccgaagatgaagtccaaattccacgataaggcagcgaaggataaaggctttgctaaatgggagaacgagaagccaagggtacatgctggtgtcgacgtggttgatcgaggcaccgagtttgagcttgaccaggacgagggcgaggagacccggcaggacggcgaggacggatag

SEQ ID NO: 327023 - DNA, 2073 bp, Artificial Sequence
  derived and/or modified sequence
atgggcagcagcggcctgggcaaggccgccaccctggacgagctgctgtgtacctgcatagaaatgttcgacgacaacggtgaacttgataattcatacctgccgagaattgtgctcctcatgcacagatggtacctgtcttccaccgagttggcggagaagttgttgtgcatgtaccggaatgcaacaggggagagctgtaacgagttccgactgaagatctgctatttcatgcgctactggatcctgaagttccctgcagagtttaacctcgatctcggattgatccgaatgaccgaggagttcagagaagttgcatctcagctcggatatgagaagcacgttagtctgatcgatatcagctctatcccttcctacgattggatgcgccgagttactcaaaggaagaaagttagtaagaaggggaaggcttgtctgctgtttgaccacctggaacccatcgaactggcagagcacctcacattcctggagcacaagtcctttcggagaatctctttcacggactaccaaagttatgtaatccatggatgcctggagaacaacccgacgttggaaagatcaattgctttgttcaacggaatttctaagtgggtccagctgatggtgctgagcaaacctacacctcaacagcgagccgaggtgattacgaagtttattaatgtcgccaagaagttgctgcaactcaaaaattttaataccttaatggctgttgtcggggggcttagccactcttcaatttcaagacttaaagaaacccattcccatctctcatccgaggtcacgaagaattggaacgagatgaccgaactcgtctccagtaacggcaactattgcaattatagaaaggcctttgccgattgtgatgggtttaaaataccaatattaggggtgcacctcaaggacctgattgcagttcatgttatattccccgactggaccgaggaaaacaaggtcaacatcgtcaaaatgcaccagctatccgtgactctttccgagctggtcagcctgcagaacgcctcccaccatctggaacccaacatggatttgattaaccttctgacactgtcacttgacttataccacaccgaagatgatatttataagctcagcttagtactggagccccgtaattcgaagtctcagcccacaagccccacgacccctaataaaccagtcgttcccttagaatgggctctcggagtcatgcctaaacccgaccccaccgtgataaacaagcacatacgcaaactggtggagtccgtgtttaggaattacgatcacgaccacgacggatacatctctcaggaggatttcgagtctatagccgcgaattttcccttcctggattcattttgtgtactcgataaagaccaggatggattgattagcaaagacgaaatgatggcctacttcttgcgagctaagtcgcagctccattgtaaaatgggccccgggtttattcataatttccaggaaatgacctacttaaaaccgacattttgtgagcattgcgctgggttcctttggggaatcataaaacagggatacaaatgtaaagattgtggcgcaaattgccacaagcagtgcaaagatttattggttttagcatgccgaaggttcgctagggctccgtcactgagttccggccacggttccctgcccgggtcccctagtctgcctcccgctcaggacgaagttttcgagttccccggggtcaccgccgggcatcgggatctcgactcccgtgcaattacactcgtgaccggatccagtcgcaaaatctctgtgcgtttacaacgggcaactacgagtcaggcaacccagacagagccagtctggagtgaagccggctggggcgatagtggctcacataccttccccaaaatgaagagtaaattccacgacaaagctgcaaaggacaaaggttttgctaaatgggagaacgagaaacctcgggtgcacgctggggttgacgtcgtcgatcgcggaactgaatttgaactagaccaggatgagggtgaggaaactcgccaggacggggaggatgggtag

SEQ ID NO: 327024 - DNA, 105 bp, Artificial Sequence
  derived and/or modified sequence
atgggcagcagcggcctgggcaaggccgccaccctggacgagctgctctgcacttgtatagaaatgttcgatgacaatggcgaactggataactcctatttgtag

SEQ ID NO: 327025 - DNA, 2073 bp, Artificial Sequence
  derived and/or modified sequence
atggggtcctctgggttgggtaaggcagcgacactggatgagctcctctgcacctgcatcgaaatgttcgacgataacggtgaattagacaatagctacttgccgaggattgtgctcctcatgcataggtggtacctttcttccaccgagctcgctgagaaactactgtgcatgtatcggaacgccaccggggagagctgtaacgagttcaggctgaaaatctgttactttatgcggtactggatcctcaaattccctgccgaatttaatctggacttgggactaattaggatgaccgaagaattccgagaagttgcctctcagctgggttacgagaagcatgtctcccttatcgacatctctagcattccctcttatgactggatgcgcagagtcacacagcgaaagaaagtcagcaagaagggtaaagcctgtctcctgtttgatcacctcgagcctatcgagctcgccgaacaccttactttccttgagcacaaaagctttcgcagaatcagctttacggactatcagtcctacgttatccacggttgtctggagaacaatcctacccttgaacggtctattgccctcttcaatggtatttcaaaatgggtacagttgatggtactgagtaaacctacacctcaacagcgcgctgaagttatcacaaagttcattaatgtggccaagaaactgctccaattgaagaactttaacactctgatggcagtggtcggtgggttatcgcactcatcaataagccgtctgaaggaaacgcacagtcatctgtcgagcgaggtcacaaaaaattggaacgagatgacagaacttgtcagttcgaatggcaattactgcaactatcggaaagcttttgcggattgtgacggatttaaaattcccatcctgggagtacacctcaaggacctgatagctgtacacgttattttccccgactggaccgaggagaacaaggtgaatatcgtgaaaatgcaccagttgtctgtgacactgagtgagctagtctccctgcagaatgcaagccatcacctggagccgaacatggatctgatcaatttgctaaccttgtccctggatttgtatcataccgaggatgacatttacaagctctctttggtgctggagccccgaaactctaaatcacagcccacctctcccacgacacccaacaaaccagtggtcccactggagtgggccttaggggtgatgcccaagcccgacccaactgtgattaataagcatatccggaagcttgttgaatcagtgtttcgcaattatgatcacgatcatgatgggtacatcagtcaggaagactttgagtccattgcagccaatttccccttcctcgactcattctgcgttctagataaagatcaagatggactgatctcaaaggatgagatgatggcctatttcttgagggctaaaagtcagctgcactgtaagatgggacctggatttattcataactttcaggaaatgacgtatttgaagcctaccttctgtgaacactgcgctggcttcctgtgggggattatcaaacagggctataagtgtaaggactgcggggctaactgccacaaacagtgtaaggaccttcttgtgctcgcctgcaggcgctttgcacgagctccgagcctgtcttccggccacggctccctgcccggttcaccatcccttccccctgctcaggatgaggtgttcgagttccctggggtgacagctggccatcgcgaccttgattcacgcgctataaccctggtgaccggtagcagccgaaagattagcgtccgcctgcagcgcgcaacaactagccaggcaacacagactgagcccgtgtggtctgaggccggttggggagactccggatctcatactttcccaaaaatgaaatcaaaatttcacgataaggccgctaaggataaaggctttgcgaagtgggaaaatgaaaaaccccgagttcatgcgggagtggatgtggtcgatcgcggaactgagttcgagctcgaccaggacgaaggggaggagactaggcaagacggagaggacggatag

SEQ ID NO: 327026 - DNA, 2073 bp, Artificial Sequence
  derived and/or modified sequence
atgggctcttctggcttggggaaagccgctaccttagacgaactcctttgcacctgcattgaaatgttcgacgataatggcgagctggacaatagctatctacctaggattgtgctgcttatgcatcgctggtatctgtcatccacagagctcgcagagaaacttctgtgcatgtacaggaacgctaccggggagagttgtaacgaatttagattgaaaatctgctacttcatgagatattggatcctgaagttcccagccgagttcaaccttgacttaggccttatccgaatgacagaagagttcagagaggtggcgtcccagctcggctacgagaaacatgtcagcctgatcgacatcagtagcatcccatcttatgactggatgcgtcgagtgactcagagaaagaaggtgtccaaaaaaggtaaggcctgcctattattcgaccaccttgagcctatcgagcttgccgagcacttgacattcctcgaacacaaatcttttagaaggatctctttcactgattaccagagctacgtcatacacgggtgcctggagaacaatccgaccctggagcgatcgattgccctgtttaacgggatatctaaatgggtccagctcatggtgctgagtaagcccacgccgcagcagcgggctgaagtgattactaagttcattaacgttgccaaaaagcttctccaattgaaaaatttcaacaccctgatggctgtcgtaggagggttgtcacacagctcaatcagccggttaaaagagacccattcacatctctcttctgaagtcacaaagaattggaacgaaatgactgagctggtgagctccaacggaaattattgcaattaccgaaaggcctttgcagactgcgacggattcaagattccaatcttgggtgtgcatttaaaagatctcatcgccgtgcacgtaatctttcccgactggaccgaggaaaataaggtgaacattgtcaaaatgcaccagctgagcgtgaccttgtcagagcttgtgtcccttcaaaacgcgagtcaccatttggagcccaacatggaccttatcaaccttctcacactcagtctggatttgtaccacactgaagatgatatctacaagctgagccttgttctggaaccaaggaactctaagagccaacccacttcaccgacaacacctaataaaccagtggtcccactggaatgggccctgggtgtgatgcctaagccagatcccacagtgataaataaacatatccgcaaactggttgagagcgtttttagaaactatgatcatgaccacgatgggtacatctcccaggaagatttcgaaagcattgcggcaaacttcccatttcttgactccttctgtgtgctggacaaggatcaagatgggttgatttccaaggacgagatgatggcatatttcctgcgggcaaaatcccagctgcactgtaaaatggggcctggttttattcataatttccaagaaatgacgtatctgaagcctactttctgtgagcattgtgctggctttctctggggcatcattaaacagggctataagtgcaaagattgcggcgcaaattgccataagcagtgtaaagatttgctggttctagcatgccggaggttcgcgagggcccctagcctctcctcaggccacgggtcgctccccggttcaccctccctgcccccagctcaggacgaagtgtttgaattccccggagtgaccgccggacacagagacctggactcccgagccatcacactcgtgacaggaagttccagaaagatttccgtgagactgcagagggccactacgagccaagccactcagactgagcctgtttggtccgaggcgggatggggagattctggcagccacacattcccaaagatgaagtcaaaattccacgacaaggctgccaaggacaaggggttcgcaaagtgggagaatgaaaagccacgcgtgcacgccggtgtggacgtggtggaccggggtactgaattcgaactggaccaggacgaaggagaagagaccaggcaggatggggaagatgggtag

SEQ ID NO: 327027 - DNA, 105 bp, Artificial Sequence
  derived and/or modified sequence
atgggatctagcgggctcggcaaagcggctacactggatgagctgttgtgcacgtgtatcgaaatgttcgacgataacggtgagctggataatagttacctgtag

SEQ ID NO: 327028 - DNA, 4738 bp, Artificial Sequence
  derived and/or modified sequence
atttagccaaacaacctttaattcattgagctcaaagcttagcagcttcaatgttgttgttaggcataaacagcttgcaaatttcaattttttttctctcctcacttttgaactagatttgggcaatggaggtgatgacagcattttagaagacagaacaggaattctaggtgtttaggcacgttgaagagaaacttgctagaggtgatgaagtggaaagaaaaagacaattcactatagggatcaacattattgcagttctgcaaaggatattttcttttaaaacatccatatctcttctttgccatggaaactacacccaatctacctgaacctgcggcacccctctgatgacccatttggattctctgatttcactgccaagattctcagttctccaaaatacttatcattcaggttgaataaaccagttctacagactgcttcttccatgcatttcccaatgatgctagctgcccttaaaattctttcagatttggaactgtatctgtatggaaacaacagagttttcttgaagtacaactaaggacaggtcaccactaggcactaacatcgctgacttgcatgattatggagatggtctatctgatgctgaaaatgtctctagttttttgacaacggctaaataaccatgggatcaagtggccttgggaaagcagcaacattagatgaactgctgtgcacttgcattgagatgtttgatgacaatggagagctggataatagttatttgccaagaatagttctactgatgcaccgatggtatttatcttccactgaattggcagaaaaacttctctgcatgtatcgaaatgccactggagaaagctgcaatgaatttcgattaaagatctgctacttcatgaggtactggattctgaagtttcctgcagagtttaatttggatcttggtttgattcgtatgactgaggaatttcgggaagtagctagtcaactaggatatgaaaaacacgtcagcctcatcgacatatccagcattccttcctatgactggatgagaagagtcacacagaggaaaaaagtatccaagaagggaaaagcctgtctgctgtttgaccatctggagcccattgaattggctgagcacctcacttttctggagcataaatcttttagaaggatctcattcactgattaccaaagctatgtcatccatggctgcctggagaataatccaaccttggaaagatcgattgctttatttaatggaatctctaagtgggtccagttgatggttcttagcaaaccaaccccccagcaaagggcagaagtcatcacaaagtttatcaatgttgcaaagaagctccttcagctcaaaaattttaacaccctgatggcagtggtgggaggcctcagtcatagttccatttcacgcctcaaagagacccattctcatctttcttcagaagttacaaagaactggaatgaaatgacagagttggtctcctccaacggcaattactgcaattaccgcaaggcctttgccgactgcgatggcttcaaaatccccatccttggagtacacttgaaagacttgatagctgtccatgtcattttcccagactggacagaggagaacaaagtgaacattgtgaaaatgcaccagctctccgttaccctgagtgaactagtctccctgcagaatgcctctcaccacttagaacccaacatggatttgatcaacctgctcacgctttccctggacctctatcacactgaagatgatatttacaaactgtcactggtgctggagcctagaaattctaaatcgcagcctacctcccctacgacgcccaacaagcctgtggtacccctggagtgggcattaggggtgatgccaaagccagaccccacggtcatcaacaagcacataaggaaattagtggagtctgtatttagaaactatgatcacgaccatgatgggtacatttcccaagaggactttgaaagtatagctgccaattttcccttcttggattccttctgtgttctggacaaagatcaggatggcctaattagtaaagatgaaatgatggcttacttcctgagagctaaatcccaactacactgtaaaatgggaccaggatttatccataattttcaggagatgacctatctcaagccaaccttctgcgaacactgtgcgggatttctctggggcataatcaagcaaggatacaaatgcaaagactgtggagccaattgtcacaaacagtgcaaagacctcctggttctggcctgcaggagatttgcccgggcgccctccttgagcagtggtcatgggtcactgcctggaagcccctcgctgcccccagcgcaggatgaggtgtttgagttccctggagtcactgctggacacagggatttagacagcagagccatcacactggttacaggctcttctcgcaagatctctgtgaggctacagagggccaccaccagccaggccacccagactgaacctgtctggtcagaggctggctggggggactcggggtcccacaccttccctaaaatgaaatccaagttccatgacaaagcagcaaaggacaaaggctttgccaaatgggaaaatgagaagcccagggtgcatgctggtgtggatgttgtagaccggggcacggagtttgaacttgaccaggatgaaggagaagagaccagacaggatggtgaggatggctgacttcaggctgcggaaactgaaggcaataatgttggcttttggaaggggcaagacgagaaactctgaagaaagctctgactctcaggaagttatctggaaagatacctggatgtttactgccttgggacactgtgggatctccatgtttggactatgggacagagaattgaccctaactaactaactatgaactatttatttcctcctcccctacccctagttaagtgccacaaagactgtgttatgtagtcagtacttttttctcatgtatctttctctagaccatttatatacgggtgaaatgaaagcttttttgcatgtacttgatactcagtctgtaaactcagacttcgctttttttgtgagactatcctttcaatatttttataaacttttgtgtgtgctgtggcagggaacagttaacaaggagtttatttagaggggtttttttcattttttgtttttcttgttttgttttgttttgttttgttcttcttggtgtgctttttggatgggaccagaacttaacattttcctgaggactaggaagctcatcagacactggaatgcagtgattcttctaatgatggtcaactgcaaggagaaactgtttacatccttcccactacacagttgctatgatatgtaacaagtcacacatgtatatatcacacaagtcttaccaattctgcgtcactaggaagctatagcatggtcgtgaaagctctcctaatacttacttaaatagccatggaagaaaattatgcttgtcccttctgactgggttaagccatctttcttaagattcctgaagtagaaatagcaattaagaaattaattcaagttttgacggttaacatttagcagaaaaacaaaccattgaataagctactaggtgaaatgcaaaacaaccatcaatttttttaaactcaataattttgtgaaaaaaaaaaccaccaccaaacttttggttgtaaaagagaacccttgttcccttcctaagaaactgccttccacaattaaagaatactcatagaaagaaaataatcataaatcatatttgattaacatttcatttaagcttttaaaatatcaattttttaaatagctcccatttacccaaaataactagttatgggtctatttcttccatgattagaggagagagaacttgattcaagatactgaaaaatagagctgggactgagcctgtgaatgacaggaatgatctattaccaggtgactagtcggaaactacacagacgtgcactggtctgcatttgggggctaaagtgtatatattccatttaaaatggaatttgtttgtatttggggcagtcttcagtaaagcctttctcctttcttttctccattgaggacagttctgctcagcaaaattgttgagtacctgttctgggcaggtcccacgctatatgcacaaagttaagaaaaacttggtcttagcccttgggagctgacagcccatgggcattaaggcaaagtagttccagtgatttaaaatacggttccaaatacgctaaaaccaacttgtgccaaccagatttacagattggaaatactgcagatgatgtgaagttatcagttggaggagctgtgattaagctggataataagagaacgtgccatctgtaaagcactcagaaggcagccatccctagatgttggtttcatgtatattacactatctactactatccataaatgcaataatatgcatgttaacaacattaaaaacagcaaacagcaatctaagtacagaaaagctttttgtgtgtttaaaaaaattgaagaaaattcaggaagaaacgtgttaataaacattgtactgttcttttgcttctcaaaggaattattcacttgccactttggttatttttgagttttcgtacataggaagttttatattgccagccttcctgtgataaagatattaaatgtaacttgagtaaaaaataaaaaagaataactatgtatatacatatataaattaca

SEQ ID NO: 327029 - DNA, 4807 bp, Artificial Sequence
  derived and/or modified sequence
acagagcaacttccacctgctgtgcgagttggtgatcctctctcttgccgttcgagagccccagtgaaacttgagtgagatgagagagcatggagcctgccagtctccccctctgcgcacacacacacgcaaacacatttaactttccacttgcagtgacctgcccttcagtgtgacttatcagctgtttggcttttgtcactaaaggaaaacaaattgtggaatatcccgctctgcatgctcatgagatggctgagccaactcaggggttatgaggtggtttgcgagtgaggagaagaatgatcttcagtttctgacctcctggcacggtggcgggcggtatttatcaggaggtacatgtgactggttaagactcagagccccagcttgaaggaaacagctgctctcggcgtgctccggcacttggcagctggacaggcagagtgctgatgtgaaaaataccacgacaaaaccaccctagttctccaaaatacttatcattcaggttgaataaaccagttctacagactgcttcttccatgcatttcccaatgatgctagctgcccttaaaattctttcagatttggaactgtatctgtatggaaacaacagagttttcttgaagtacaactaaggacaggtcaccactaggcactaacatcgctgacttgcatgattatggagatggtctatctgatgctgaaaatgtctctagttttttgacaacggctaaataaccatgggatcaagtggccttgggaaagcagcaacattagatgaactgctgtgcacttgcattgagatgtttgatgacaatggagagctggataatagttatttgccaagaatagttctactgatgcaccgatggtatttatcttccactgaattggcagaaaaacttctctgcatgtatcgaaatgccactggagaaagctgcaatgaatttcgattaaagatctgctacttcatgaggtactggattctgaagtttcctgcagagtttaatttggatcttggtttgattcgtatgactgaggaatttcgggaagtagctagtcaactaggatatgaaaaacacgtcagcctcatcgacatatccagcattccttcctatgactggatgagaagagtcacacagaggaaaaaagtatccaagaagggaaaagcctgtctgctgtttgaccatctggagcccattgaattggctgagcacctcacttttctggagcataaatcttttagaaggatctcattcactgattaccaaagctatgtcatccatggctgcctggagaataatccaaccttggaaagatcgattgctttatttaatggaatctctaagtgggtccagttgatggttcttagcaaaccaaccccccagcaaagggcagaagtcatcacaaagtttatcaatgttgcaaagaagctccttcagctcaaaaattttaacaccctgatggcagtggtgggaggcctcagtcatagttccatttcacgcctcaaagagacccattctcatctttcttcagaagttacaaagaactggaatgaaatgacagagttggtctcctccaacggcaattactgcaattaccgcaaggcctttgccgactgcgatggcttcaaaatccccatccttggagtacacttgaaagacttgatagctgtccatgtcattttcccagactggacagaggagaacaaagtgaacattgtgaaaatgcaccagctctccgttaccctgagtgaactagtctccctgcagaatgcctctcaccacttagaacccaacatggatttgatcaacctgctcacgctttccctggacctctatcacactgaagatgatatttacaaactgtcactggtgctggagcctagaaattctaaatcgcagcctacctcccctacgacgcccaacaagcctgtggtacccctggagtgggcattaggggtgatgccaaagccagaccccacggtcatcaacaagcacataaggaaattagtggagtctgtatttagaaactatgatcacgaccatgatgggtacatttcccaagaggactttgaaagtatagctgccaattttcccttcttggattccttctgtgttctggacaaagatcaggatggcctaattagtaaagatgaaatgatggcttacttcctgagagctaaatcccaactacactgtaaaatgggaccaggatttatccataattttcaggagatgacctatctcaagccaaccttctgcgaacactgtgcgggatttctctggggcataatcaagcaaggatacaaatgcaaagactgtggagccaattgtcacaaacagtgcaaagacctcctggttctggcctgcaggagatttgcccgggcgccctccttgagcagtggtcatgggtcactgcctggaagcccctcgctgcccccagcgcaggatgaggtgtttgagttccctggagtcactgctggacacagggatttagacagcagagccatcacactggttacaggctcttctcgcaagatctctgtgaggctacagagggccaccaccagccaggccacccagactgaacctgtctggtcagaggctggctggggggactcggggtcccacaccttccctaaaatgaaatccaagttccatgacaaagcagcaaaggacaaaggctttgccaaatgggaaaatgagaagcccagggtgcatgctggtgtggatgttgtagaccggggcacggagtttgaacttgaccaggatgaaggagaagagaccagacaggatggtgaggatggctgacttcaggctgcggaaactgaaggcaataatgttggcttttggaaggggcaagacgagaaactctgaagaaagctctgactctcaggaagttatctggaaagatacctggatgtttactgccttgggacactgtgggatctccatgtttggactatgggacagagaattgaccctaactaactaactatgaactatttatttcctcctcccctacccctagttaagtgccacaaagactgtgttatgtagtcagtacttttttctcatgtatctttctctagaccatttatatacgggtgaaatgaaagcttttttgcatgtacttgatactcagtctgtaaactcagacttcgctttttttgtgagactatcctttcaatatttttataaacttttgtgtgtgctgtggcagggaacagttaacaaggagtttatttagaggggtttttttcattttttgtttttcttgttttgttttgttttgttttgttcttcttggtgtgctttttggatgggaccagaacttaacattttcctgaggactaggaagctcatcagacactggaatgcagtgattcttctaatgatggtcaactgcaaggagaaactgtttacatccttcccactacacagttgctatgatatgtaacaagtcacacatgtatatatcacacaagtcttaccaattctgcgtcactaggaagctatagcatggtcgtgaaagctctcctaatacttacttaaatagccatggaagaaaattatgcttgtcccttctgactgggttaagccatctttcttaagattcctgaagtagaaatagcaattaagaaattaattcaagttttgacggttaacatttagcagaaaaacaaaccattgaataagctactaggtgaaatgcaaaacaaccatcaatttttttaaactcaataattttgtgaaaaaaaaaaccaccaccaaacttttggttgtaaaagagaacccttgttcccttcctaagaaactgccttccacaattaaagaatactcatagaaagaaaataatcataaatcatatttgattaacatttcatttaagcttttaaaatatcaattttttaaatagctcccatttacccaaaataactagttatgggtctatttcttccatgattagaggagagagaacttgattcaagatactgaaaaatagagctgggactgagcctgtgaatgacaggaatgatctattaccaggtgactagtcggaaactacacagacgtgcactggtctgcatttgggggctaaagtgtatatattccatttaaaatggaatttgtttgtatttggggcagtcttcagtaaagcctttctcctttcttttctccattgaggacagttctgctcagcaaaattgttgagtacctgttctgggcaggtcccacgctatatgcacaaagttaagaaaaacttggtcttagcccttgggagctgacagcccatgggcattaaggcaaagtagttccagtgatttaaaatacggttccaaatacgctaaaaccaacttgtgccaaccagatttacagattggaaatactgcagatgatgtgaagttatcagttggaggagctgtgattaagctggataataagagaacgtgccatctgtaaagcactcagaaggcagccatccctagatgttggtttcatgtatattacactatctactactatccataaatgcaataatatgcatgttaacaacattaaaaacagcaaacagcaatctaagtacagaaaagctttttgtgtgtttaaaaaaattgaagaaaattcaggaagaaacgtgttaataaacattgtactgttcttttgcttctcaaaggaattattcacttgccactttggttatttttgagttttcgtacataggaagttttatattgccagccttcctgtgataaagatattaaatgtaacttgagtaaaaaataaaaaagaataactatgta

SEQ ID NO: 327030 - DNA, 1308 bp, Artificial Sequence
  derived and/or modified sequence
atggattgctgcatgaataataccgcagtgttcctgcctgtgcttgttgggtttaatccagtgtcaatggcccgcaacgatcccatcgaagattggtccagtacattccgccaggtggccgagagaatgcagaaaatgcaggaaaaacagaaggccttcgtgctgaacccggcaataggacccgagggcttgtcagggagcagccggatgaaaggaggcagcgcgacaaagattttgctggaaacactgctcttggctgcacacaagactgtagatcaaggcatcgcagctagccaacgttgcctgctagagatcctccgcacgtttgagagggcccatcaagtgacttattcccagagccctaagattgccacactaatgaagagcgtttcaacctcactcgagaaaaagggccacgtgtaccttgtggggtggcagacactgggcattatcgccataatggatggagtggaatgcatccacacatttggggctgactttcgtgatgtccgcggttttctcatcggcgaccacagcgatatgtttaatcagaaggcggaactgaccaatcaggggccccagttcaccttctcccaggaggattttttaacatctatcctgccgagtctgactgaaattgataccgtcgtgttcatttttacactcgacgataatcttacagaggtgcagaccatagtggagcaagtgaaagaaaagacgaaccatatccaggccctggcacattcaaccgtggggcagacgcttctgattccactcaaaaagttattcccaagtatcattagtattacctggcctttgttattctttgagtacgagggcaactttatccagaagttccagagagaactgagtacaaaatgggtgcttaatacagtctcaacaggggcgcacgtgttgctgggcaaaatcctgcagaaccacatgcttgatctgcgcatttctaactcaaaactgttctggagggccctagccatgctgcaaaggttcagcggtcagagcaaagccaggtgtattgagtccctgctgagagccatccacttccctcagcccctgtctgacgacatacgggcggctccaatttcctgtcacgtccaagtggcacacgagaaggaacaggtgataccgatagcactactgtcgctactctttcggtgttctatcacagaggcccaggcccatctggccgccgccccatctgtgtgtgaagctgtgcgatcagccctcgcgggtcctggtcagaagcggacggctgaccctctcgagatcctggagcctgatgttcagtag

SEQ ID NO: 327031 - DNA, 1308 bp, Artificial Sequence
  derived and/or modified sequence
atggactgctgcatgaacaacacagctgtgttcctgcctgtgctggtgggcttcaaccctgtgtccatggccagaaatgaccccatcgaggactggagcagcaccttccggcaggtggccgagaggatgcagaagatgcaggagaagcagaaggcctttgtgctgaacccagccatcggccctgagggcctgagcggcagcagcaggatgaagggcggcagcgccaccaagatcctgctggagaccctgctgctggccgcccacaagacagtggaccagggcattgctgccagccagcgctgcctgctggagatcctgcggacctttgagcgggcccaccaggtgacctacagccagagccccaagatcgccaccctgatgaagtctgtgtccaccagcctggagaagaagggccacgtgtacctggtgggctggcagaccctgggcatcatcgccatcatggatggagtggagtgcatccacacctttggagctgacttcagagatgtgcggggcttcctgattggagaccacagcgacatgttcaaccagaaggccgagctgaccaaccagggcccccagttcaccttcagccaggaggacttcctgaccagcatcctgcccagcctgacagaaattgacacagtggtgttcatcttcaccctggatgacaacctgacagaggtgcagaccatcgtggagcaggtgaaggagaagaccaaccacatccaggccctggcccacagcacagtgggccagaccctgctgatccccctgaagaagctgttccccagcatcatcagcatcacctggcccctgctcttctttgaatatgagggcaacttcatccagaagttccagcgggagctgagcaccaagtgggtgctgaacacagtgtccactggagcccacgtgctgctgggcaagatcctgcagaaccacatgctggacctgcgcatcagcaacagcaagctgttctggagggccctggccatgctgcagcgcttcagcggccagagcaaggcccgctgcatcgagagcctgctgcgggccatccacttcccccagcccctgagtgatgacatccgggccgcccccatcagctgccacgtgcaggtggcccacgagaaggagcaggtgatccccatcgccctgctgagcctgctcttccgctgcagcatcacagaggcccaggcccacctggccgccgcccccagcgtgtgtgaggccgtgcgcagcgccctggccggccctggccagaagaggacagctgaccccctggagatcctggagccagatgtgcagtag

SEQ ID NO: 327032 - DNA, 1308 bp, Artificial Sequence
  derived and/or modified sequence
atggactgctgcatgaacaacaccgccgtgttcctgcccgtgctggtcgggttcaatccagtaagcatggcgagaaacgatcccatagaggactggtcatcgacattccgtcaggtagccgagcggatgcagaagatgcaggaaaagcaaaaggcctttgtcctaaaccctgccataggacctgaggggctaagcggaagttcacggatgaagggcgggtctgccaccaagattctgctggaaacactgctgctagcggcccataaaactgttgatcaaggtatcgctgcaagccagcggtgtctcctggagatcctcagaacttttgagagggctcaccaggtgacctactcacagtcaccaaagattgccaccctcatgaaatcagtgagcaccagcctcgaaaagaagggccacgtgtatctggttggctggcagacacttggaattatcgccatcatggatggtgtggagtgcatccacaccttcggggccgatttccgggacgttagaggcttcctcatcggcgaccattctgacatgtttaaccaaaaagccgagctgacaaaccaaggcccgcagtttacattctcccaggaagattttctcacaagtattctgccgtcactgaccgaaattgacaccgttgtgtttatattcacgttggacgataacttgactgaggtccagactatcgtggaacaggtaaaggagaagacaaatcacattcaggcactggcccattccaccgtaggtcagaccctgctgattcccctcaagaaactttttccttcgataatctctatcacgtggccgctgctattttttgagtacgagggtaacttcatacagaagttccagagagaactgtcaaccaagtgggtgctgaacacggtgtctacaggtgcacacgttcttctcgggaaaatcctgcagaaccacatgctggaccttcgcatttcaaacagtaaactgttttggcgtgcactggctatgctgcagagattctcaggccagtccaaagcccgatgcatcgagagcttgctgagggctatacacttccctcaaccactgtccgatgatataagggcggcccccatcagttgtcatgtgcaggtcgcccatgagaaggaacaggtaatccccatagccctcttatccttactctttaggtgctccattactgaagcccaagctcatttggctgccgcgccttctgtgtgtgaagccgtgcgttccgcgctggccggtccaggccagaagcggacagctgatcctctggagatactagagccagacgttcaatag

SEQ ID NO: 327033 - DNA, 1308 bp, Artificial Sequence
  derived and/or modified sequence
atggattgctgtatgaataataccgcggtttttctccccgtgttggtaggtttcaatcccgtgagcatggccagaaatgatcctatcgaagattggtcatccacgttcaggcaggtcgcagagcgcatgcagaaaatgcaggagaagcagaaggccttcgtgctaaaccctgcaatcggacctgagggtttgtctgggagtagcaggatgaagggtggatctgccacaaagattttattggagaccttgctgttggccgcacacaagactgtcgaccaaggcattgcggcaagccagagatgcctcctggaaatcctacgcaccttcgaaagagcgcatcaggtgacctattcacaatcaccaaaaatcgcgacgctaatgaagagtgtgtccacttccctggagaaaaaaggtcatgtttatctggtcggatggcaaaccctggggattattgcaatcatggacggggtcgaatgtattcacactttcggcgcagattttagagacgtccggggtttcctgattggagatcattccgatatgtttaatcagaaggccgagctgactaaccagggccctcagttcacgttctcgcaggaggattttctcacttcaattcttccaagcctcaccgagattgatactgtggtcttcatctttacactcgatgataacctgaccgaagtgcaaaccatcgtggaacaggtgaaagaaaagacgaaccacattcaggccctagcacattccactgtagggcagaccttgctgatccctctgaagaaactgtttcctagtatcatcagcattacatggccgctgctgttctttgagtatgagggtaacttcattcagaaattccagcgcgagttgtccactaaatgggtcctaaacacagtatcgacgggggcacacgtgctgctcggaaaaattctgcagaatcatatgctcgatctcaggataagcaacagcaagttattctggagggccctggccatgcttcagaggttttctggtcagtctaaggccaggtgtatagagtccctgctgcgcgctattcactttccccaacccctgagtgatgacattcgcgcagcccctatctcatgtcacgtgcaggtggcccacgagaaggaacaggttattcccatagcccttctctccctcctctttcgctgcagcatcaccgaggcccaggcccaccttgcggctgctcccagtgtatgcgaggccgtgagatccgccttggcaggcccagggcagaaacgcaccgccgatccactggagatcctagaaccggacgtccagtag

SEQ ID NO: 327034 - DNA, 1308 bp, Artificial Sequence
  derived and/or modified sequence
atggactgctgcatgaacaacaccgccgtgttcctgcccgtgctggtgggcttcaaccccgtgagcatggccagaaacgaccccatcgaggactggagcagcaccttcagacaggtggccgagagaatgcagaagatgcaggagaagcagaaggccttcgtgctgaaccccgccatcggccccgagggcctgagcggcagcagcagaatgaagggcggcagcgccaccaagatcctgctggagaccctgctgctggccgcccacaagaccgtggaccagggcatcgccgccagccagagatgcctgctggagatcctgagaaccttcgagagagcccaccaggtgacctacagccagagccccaagatcgccaccctgatgaagagcgtgagcaccagcctggagaagaagggccacgtgtacctggtgggctggcagaccctgggcatcatcgccatcatggacggcgtggagtgcatccacaccttcggcgccgacttcagagacgtgagaggcttcctgatcggcgaccacagcgacatgttcaaccagaaggccgagctgaccaaccagggcccccagttcaccttcagccaggaggacttcctgaccagcatcctgcccagcctgaccgagatcgacaccgtggtgttcatcttcaccctggacgacaacctgaccgaggtgcagaccatcgtggagcaggtgaaggagaagaccaaccacatccaggccctggcccacagcaccgtgggccagaccctgctgatccccctgaagaagctgttccccagcatcatcagcatcacctggcccctgctgttcttcgagtacgagggcaacttcatccagaagttccagagagagctgagcaccaagtgggtgctgaacaccgtgagcaccggcgcccacgtgctgctgggcaagatcctgcagaaccacatgctggacctgagaatcagcaacagcaagctgttctggagagccctggccatgctgcagagattcagcggccagagcaaggccagatgcatcgagagcctgctgagagccatccacttcccccagcccctgagcgacgacatcagagccgcccccatcagctgccacgtgcaggtggcccacgagaaggagcaggtgatccccatcgccctgctgagcctgctgttcagatgcagcatcaccgaggcccaggcccacctggccgccgcccccagcgtgtgcgaggccgtgagaagcgccctggccggccccggccagaagagaaccgccgaccccctggagatcctggagcccgacgtgcagtag

SEQ ID NO: 327035 - protein, 474 aa, Artificial Sequence
  derived and/or modified sequence
MTILTYPFKNLPTASKWALRFSIRPLSCSSQLRAAPAVQTKTKKTLAKPNIRNVVVVDGVRTPFLLSGTSYKDLMPHDLARAALTGLLHRTSVPKEVVDYIIFGTVIQEVKTSNVAREAALGAGFSDKTPAHTVTMACISANQAMTTGVGLIASGQCDVIVAGGVELMSDVPIRHSRKMRKLMLDLNKAKSMGQRLSLISKFRFNFLAPELPAVSEFSTSETMGHSADRLAAAFAVSRLEQDEYALRSHSLAKKAQDEGLLSDVVPFKVPGKDTVTKDNGIRPSSLEQMAKLKPAFIKPYGTVTAANSSFLTDGASAMLIMAEEKALAMGYKPKAYLRDFMYVSQDPKDQLLLGPTYATPKVLEKAGLTMNDIDAFEFHEAFSGQILANFKAMDSDWFAENYMGRKTKVGLPPLEKFNNWGGSLSLGHPFGATGCRLVMAAANRLRKEGGQYGLVAACAAGGQGHAMIVEAYPK

SEQ ID NO: 327036 - protein, 85 aa, Artificial Sequence
  derived and/or modified sequence
MTILTYPFKNLPTASKWALRFSIRPLSCSSQLRAAPAVQTKTKKTLAKPNIRNVVVVDGVRTPFLLSGTSYKDLMPHDLARAALT

SEQ ID NO: 327037 - protein, 176 aa, Artificial Sequence
  derived and/or modified sequence
MTILTYPFKNLPTASKWALRFSIRPLSCSSQLRAAPAVQTKTKKTLAKPNIRNVVVVDGVRTPFLLSGTSYKDLMPHDLARAALTGLLHRTSVPKEVVDYIIFGTVIQEVKTSNVAREAALGAGFSDKTPAHTVTMACISANQAMTTGVGLIASGQCDVIVAGGVELMSDVPIRHS

SEQ ID NO: 327038 - protein, 150 aa, Artificial Sequence
  derived and/or modified sequence
MTILTYPFKNLPTASKWALRFSIRPLSCSSQLRAAPAVQTKTKKTLAKPNIRNVVVVDGVRTPFLLSGTSYKDLMPHDLARAALTGLLHRTSVPKEVVDYIIFGTVIQEVKTSNVAREAALGAGFSDKTPAHTVTMACISANQAMTTGVG

SEQ ID NO: 327039 - DNA, 1425 bp, Artificial Sequence
  derived and/or modified sequence
atgacgattctaacctatccattcaaaaacttgccaaccgcatccaagtgggctctgcgtttttcgataaggccactgtcatgttctagccaattaagagctgctccggccgtccagacaaaaacgaagaaaactctcgccaagcccaacattcgtaatgtggtcgtagtggatggagtcaggaccccattcctgctgtctggaacctcctacaaggacctcatgccacacgacttggcccgcgctgcactgactgggttactgcaccggaccagcgtgcctaaggaggtggttgattacattatcttcgggacagtcatccaggaagttaagacctccaacgtggcaagggaagccgcactgggggccggtttctccgacaagacaccggcccacactgttacaatggcatgtatatccgcgaaccaggccatgactacgggagtgggcttaattgccagtggccagtgtgacgtcatagttgccgggggggtggaacttatgagcgacgttccaatccgccatagtagaaagatgcgaaagctgatgttggacctgaacaaggccaaatcaatgggacagcggctttccctaatttctaagtttcggtttaacttcctcgccccagagctcccagcagtgtctgaattctcaacgtctgaaacgatgggtcactccgcagatagactggccgctgctttcgcagtgtcaaggttagaacaggacgagtatgctttaagaagtcattctcttgccaagaaagcccaggacgagggcctgttgagcgacgttgtgccgtttaaggttccgggaaaagatactgtgactaaggacaacggcatcaggccatcttctttagagcagatggccaaactgaagccggcctttataaagccatatggtacagtgacagcggccaattcatctttcttgactgatggagcttcagccatgttaataatggccgaagagaaagcgctcgctatggggtataagcctaaggcatatttacgcgattttatgtatgtgagccaagatcccaaagaccagttattgctaggccccacctacgcaactcccaaagttctggagaaggccggactgacaatgaacgacattgatgcctttgaattccatgaggccttctccggacagattctggcgaatttcaaggccatggatagcgattggttcgctgaaaactatatgggaaggaagaccaaggtggggctgcctccactggagaaatttaataattggggtggctcactgtcattgggccacccatttggtgccactgggtgtagactcgtgatggccgcagcgaatcgactgaggaaggagggcggccagtacggactggttgccgcttgtgctgctggcggccagggccacgccatgattgtggaagcatacccaaagtag

SEQ ID NO: 327040 - DNA, 258 bp, Artificial Sequence
  derived and/or modified sequence
atgaccatactcacctacccttttaaaaacttgcctaccgcttccaaatgggcattgaggttttcgatcaggccactctcctgctcctcccagttgcgagctgcacccgctgttcagacgaagaccaaaaagacgctcgccaaaccgaatataagaaacgttgtggtggtggacggcgttcgcactccgtttttacttagcggaacttcctataaggatctcatgcctcacgatctggcgagagcagccttaacttag

SEQ ID NO: 327041 - DNA, 531 bp, Artificial Sequence
  derived and/or modified sequence
atgacaatcttgacatacccgttcaaaaacctgcctaccgcatcaaagtgggccttaagattttccattcgccctctgtcctgctcgagccagctccgtgcagctcccgcggtgcagacaaaaactaaaaaaacacttgcgaaaccgaacatcaggaacgtggtagtagtggatggcgtgagaacccctttcctgttatcaggaactagctataaggatttgatgccgcacgaccttgcgcgggccgctctgactggtcttttacaccgtaccagtgtgccaaaggaggtcgtggattatattatcttcggaacagtgatccaggaagttaaaacctcaaacgtcgcccgggaggcggctctcggggcagggttcagcgataagactcccgcgcacacggtcaccatggcgtgcatttctgccaatcaggctatgactactggcgtggggctgattgccagtggccagtgcgacgtcatcgttgctgggggggtcgaactgatgagtgacgttccaatccgacacagttag

SEQ ID NO: 327042 - DNA, 453 bp, Artificial Sequence
  derived and/or modified sequence
atgacaatcttaacgtacccattcaagaaccttcccactgcctctaagtgggccctgaggttctcaatccgtcctctttcctgcagctctcagctccgcgctgccccggccgtgcaaaccaaaacaaagaagactctggccaaaccaaacatcaggaatgtggtagtggttgatggcgtgcgcactcctttcctcttaagtgggacctcctataaggacctcatgccgcacgatctggcaagagcggccttgactggacttttgcacaggacctccgtccccaaggaggttgtggactacatcatcttcggcactgtcatccaggaggtgaagacctccaatgttgcccgtgaagctgcgcttggtgcaggcttctccgacaagacccccgcacacacagtgaccatggcctgcatttcagccaatcaggctatgaccaccggggtgggttag

SEQ ID NO: 327043 - DNA, 2044 bp, Artificial Sequence
  derived and/or modified sequence
cctttctgggcaggacccgccccttggtcccgcagagccttggtacttggacctgaaccttgctccgagagggagtcctcgcggacgtcagccaagattccagaatgactatcttgacttacccctttaaaaatcttcccactgcatcaaaatgggccctcagattttccataagacctctgagctgttcctcccagctacgagctgccccagctgtccagaccaaaacgaagaagacgttagccaaacccaatataaggaatgttgtggtggtggatggtgttcgcactccatttttgctgtctggcacttcatataaagacctgatgccacatgatttggctagagcagcgcttacgggtttgttgcatcggaccagtgtccctaaggaagtagttgattatatcatctttggtacagttattcaggaagtgaaaacaagcaatgtggctagagaggctgcccttggagctggcttctctgacaagactcctgctcacactgtcaccatggcttgtatctctgccaaccaagccatgaccacaggtgttggcttgattgcttctggccagtgtgatgtgatcgtggcaggtggtgttgagttgatgtccgatgtccctattcgtcactcaaggaaaatgagaaaactgatgcttgatctcaataaggccaaatctatgggccagcgactgtctttaatctctaaattccgatttaatttcctagcacctgagctccctgcggtttctgagttctccaccagtgagaccatgggccactctgcagaccgactggccgctgcctttgctgtttctcggctggaacaggatgaatatgcactgcgctctcacagtctagccaagaaggcacaggatgaaggactcctttctgatgtggtacccttcaaagtaccaggaaaagatacagttaccaaagataatggcatccgtccttcctcactggagcagatggccaaactaaaacctgcattcatcaagccctacggcacagtgacagctgcaaattcttctttcttgactgatggtgcatctgcaatgttaatcatggcggaggaaaaggctctggccatgggttataagccgaaggcatatttgagggattttatgtatgtgtctcaggatccaaaagatcaactattacttggaccaacatatgctactccaaaagttctagaaaaggcaggattgaccatgaatgatattgatgcttttgaatttcatgaagctttctcgggtcagattttggcaaattttaaagccatggattctgattggtttgcagaaaactacatgggtagaaaaaccaaggttggattgcctcctttggagaagtttaataactggggtggatctctgtccctgggacacccatttggagccactggctgcaggttggtcatggctgctgccaacagattacggaaagaaggaggccagtatggcttagtggctgcgtgtgcagctggagggcagggccatgctatgatagtggaagcttatccaaaataatagatccagaagaagtgacctgaagtttctgtgcaacactcacactaggcaatgccatttcaatgcattactaaatgacatttgtagttcctagctcctcttaggaaaacagttcttgtggccttctattaaatagtttgcacttaagccttgccagtgttctgagcttttcaataatcagtttactgctctttcagggatttctaagccaccagaatctcacatgagatgtgtgggtggttgtttttggtctctgttgtcactaaagactaaatgagggtttgcagttgggaaagaggtcaactgagatttggaaatcatctttgtaatatttgcaaattatacttgttcttatctgtgtcctaaagatgtgttctctataaaatacaaaccaacgtgcctaattaattatggaaaaataattcagaatctaaacaccactgaaaacttataaaaaatgtttagatacataaatatggtggtcagcgttaataaagtggagaaatattggagaa

SEQ ID NO: 327044 - DNA, 574 bp, Artificial Sequence
  derived and/or modified sequence
ctcggacaaggtcggcagtgctagctgcagttaggacagtgacttggactagcgttccagctgaagttcgggacagtagtgtcacctgcgccctaatttatcatcacaagttaacgaagtctgggggtgtgggggtgtgtgtgtgtgtgtgggtgtgtgtgggcgtgtgtgggcgtcggccttaatgtaaccctggtctgcgtagaagtgtgtgttgtttcgcctgcttcccctgtacccaggtcggcggctatagagattgtggacggcgccatgggtttgcccgatttctgctgtaaagaataagactagattccagaatgactatcttgacttacccctttaaaaatcttcccactgcatcaaaatgggccctcagattttccataagacctctgagctgttcctcccagctacgagctgccccagctgtccagaccaaaacgaagaagacgttagccaaacccaatataaggaatgttgtggtggtggatggtgttcgcactccatttttgctgtctggcacttcatataaagacctgatgccacatgatttggctagagcagcgcttac

SEQ ID NO: 327045 - DNA, 696 bp, Artificial Sequence
  derived and/or modified sequence
acgtcagccaaggtgagacggcgagccctcagctctccgcccgggctttcccaaaggcgagattccacttccttccccgcaactgtcgccggtgcccccggccccctcccctccctgggaaagtgggagttgagggagcggaaggaaactcctcggacaagattccagaatgactatcttgacttacccctttaaaaatcttcccactgcatcaaaatgggccctcagattttccataagacctctgagctgttcctcccagctacgagctgccccagctgtccagaccaaaacgaagaagacgttagccaaacccaatataaggaatgttgtggtggtggatggtgttcgcactccatttttgctgtctggcacttcatataaagacctgatgccacatgatttggctagagcagcgcttacgggtttgttgcatcggaccagtgtccctaaggaagtagttgattatatcatctttggtacagttattcaggaagtgaaaacaagcaatgtggctagagaggctgcccttggagctggcttctctgacaagactcctgctcacactgtcaccatggcttgtatctctgccaaccaagccatgaccacaggtgttggcttgattgcttctggccagtgtgatgtgatcgtggcaggtggtgttgagttgatgtccgatgtccctattcgtcactc

SEQ ID NO: 327046 - DNA, 557 bp, Artificial Sequence
  derived and/or modified sequence
aaagtaacacagctagtgactagaaccacgtgccctggctaccacttccgagtgacatcagctgccgatccataagaaataccttcaaaccaatgcagggattccagaatgactatcttgacttacccctttaaaaatcttcccactgcatcaaaatgggccctcagattttccataagacctctgagctgttcctcccagctacgagctgccccagctgtccagaccaaaacgaagaagacgttagccaaacccaatataaggaatgttgtggtggtggatggtgttcgcactccatttttgctgtctggcacttcatataaagacctgatgccacatgatttggctagagcagcgcttacgggtttgttgcatcggaccagtgtccctaaggaagtagttgattatatcatctttggtacagttattcaggaagtgaaaacaagcaatgtggctagagaggctgcccttggagctggcttctctgacaagactcctgctcacactgtcaccatggcttgtatctctgccaaccaagccatgaccacaggtgttgg

SEQ ID NO: 327047 - DNA, 1425 bp, Artificial Sequence
  derived and/or modified sequence
atgaccatcctgacctaccccttcaagaacctgcccacagccagcaagtgggccctgcgcttcagcatccggcccctgagctgcagcagccagctgcgggccgccccagctgtgcagaccaagaccaagaagaccctggccaagcccaacatcagaaatgtggtggtggtggatggagtgaggacccccttcctgctgagcggcaccagctacaaggacctgatgcctcatgacctggcccgggccgccctgaccggcctgctgcacaggacctctgtgcccaaggaggtggtggactacatcatctttggaacagtcatccaggaggtgaagaccagcaatgtggcccgggaggccgccctgggcgccggcttcagtgacaagaccccagcccacacagtgaccatggcctgcatcagcgccaaccaggccatgaccactggagtgggcctcatcgccagcggccagtgtgatgtgattgtggccggcggcgtggagctgatgtctgatgtgcccatccgccacagcaggaagatgaggaagctgatgctggacctgaacaaggccaagtccatgggccagaggctgagcctcatcagcaagttccgcttcaacttcctggcccctgagctgcctgctgtgtctgagttcagcaccagcgagaccatgggccacagcgctgaccggctggccgccgcctttgctgtgtcccggctggagcaggatgaatatgccctgcggagccacagcctggccaagaaggcccaggatgagggcctgctgagtgatgtggtgcccttcaaggtgcctgggaaggacacagtgaccaaggacaatggcatccggcccagcagcctggagcagatggccaagctgaagccagccttcatcaagccctacggcaccgtgacagctgccaacagcagcttcctgacagatggagccagcgccatgctgatcatggccgaggagaaggccctggccatgggctacaagcccaaggcctacctgcgggacttcatgtatgtgtcccaggaccccaaggaccagctgctgctgggccccacctacgccacccccaaggtgctggagaaggccggcctgaccatgaatgacattgatgcctttgagttccacgaggccttcagcggccagatcctggccaacttcaaggccatggacagcgactggtttgctgagaactacatgggcaggaagaccaaggtgggcctgccccccctggagaagttcaacaactggggcggcagcctgagcctgggccacccctttggagccaccggctgccgcctggtgatggctgctgccaaccggctgaggaaggagggcggccagtatggcctggtggccgcctgtgccgccggcggccagggccacgccatgattgtggaggcctaccccaagtag

SEQ ID NO: 327048 - DNA, 258 bp, Artificial Sequence
  derived and/or modified sequence
atgaccatcctgacctaccccttcaagaacctgcccacagccagcaagtgggccctgcgcttcagcatccggcccctgagctgcagcagccagctgcgggccgccccagctgtgcagaccaagaccaagaagaccctggccaagcccaacatcagaaatgtggtggtggtggatggagtgaggacccccttcctgctgagcggcaccagctacaaggacctgatgcctcatgacctggcccgggccgccctgacctag

SEQ ID NO: 327049 - DNA, 531 bp, Artificial Sequence
  derived and/or modified sequence
atgaccatcctgacctaccccttcaagaacctgcccacagccagcaagtgggccctgcgcttcagcatccggcccctgagctgcagcagccagctgcgggccgccccagctgtgcagaccaagaccaagaagaccctggccaagcccaacatcagaaatgtggtggtggtggatggagtgaggacccccttcctgctgagcggcaccagctacaaggacctgatgcctcatgacctggcccgggccgccctgaccggcctgctgcacaggacctctgtgcccaaggaggtggtggactacatcatctttggaacagtcatccaggaggtgaagaccagcaatgtggcccgggaggccgccctgggcgccggcttcagtgacaagaccccagcccacacagtgaccatggcctgcatcagcgccaaccaggccatgaccactggagtgggcctcatcgccagcggccagtgtgatgtgattgtggccggcggcgtggagctgatgtctgatgtgcccatccgccacagctag

SEQ ID NO: 327050 - DNA, 453 bp, Artificial Sequence
  derived and/or modified sequence
atgaccatcctgacctaccccttcaagaacctgcccacagccagcaagtgggccctgcgcttcagcatccggcccctgagctgcagcagccagctgcgggccgccccagctgtgcagaccaagaccaagaagaccctggccaagcccaacatcagaaatgtggtggtggtggatggagtgaggacccccttcctgctgagcggcaccagctacaaggacctgatgcctcatgacctggcccgggccgccctgaccggcctgctgcacaggacctctgtgcccaaggaggtggtggactacatcatctttggaacagtcatccaggaggtgaagaccagcaatgtggcccgggaggccgccctgggcgccggcttcagtgacaagaccccagcccacacagtgaccatggcctgcatcagcgccaaccaggccatgaccactggagtgggctag

SEQ ID NO: 327051 - DNA, 1425 bp, Artificial Sequence
  derived and/or modified sequence
atgaccatcctgacctaccccttcaagaacctgcccaccgccagcaaatgggcactgagattttctatcaggcccctgtcttgctcttcacagctgagagctgcccccgctgttcagacgaagacaaaaaagacactagctaagccaaatattaggaatgtggtcgtcgtggacggagtacgcacaccgttcctgctcagcggaacctcctataaggacctgatgccccatgacctagcccgtgctgccctgacaggactgctccatcgaacctccgttcctaaagaggtcgtggattatatcatttttggcacagtaatccaggaagttaagacgtcaaacgtagcccgtgaggctgcactgggcgccgggttttccgataaaacacctgcccacacagtcactatggcatgcatctctgctaatcaggcaatgactactggcgtcggactcatcgctagtggacagtgtgatgtcatcgttgcaggtggcgtggaactgatgtcggatgtgccgatccgtcacagccggaagatgagaaagctcatgctggaccttaacaaggccaaatccatgggacaacgtctctctctgatctctaaattccgattcaattttctggctcccgagttgcctgctgtcagcgagtttagtaccagcgagactatgggtcattctgctgataggttagcagcagcatttgccgtgagtaggttagaacaggatgagtatgcactgcggtcccactccctggccaagaaggcccaggacgagggccttctgtcagacgttgttccatttaaggtgccggggaaagacaccgtgacaaaggacaatggaatccgccccagtagtctggagcagatggcaaagcttaaacccgcgtttataaaaccatacggcactgtaacagccgccaacagctcctttctgactgacggagcgtccgctatgctgattatggcggaggaaaaggctctggcaatgggctataagcctaaagcctatcttcgggattttatgtatgtgagccaggatcctaaagatcagctgctgttggggccaacatatgcgactccgaaagttctggagaaggccggcctcaccatgaacgacatcgacgccttcgaattccatgaagcatttagtggtcaaatcctggctaacttcaaagcaatggattctgactggttcgcagagaattacatgggaaggaagaccaaagtcggcctgcccccgctcgaaaaatttaacaactggggtggctctctatctctgggccacccatttggtgcaaccggttgtagactggtcatggctgctgccaaccgcttaagaaaagaaggcgggcagtatggcctcgtggcagcttgtgcagccggagggcagggacatgccatgatcgtagaggcctatcccaagtag

SEQ ID NO: 327052 - DNA, 258 bp, Artificial Sequence
  derived and/or modified sequence
atgaccatcctgacctaccccttcaagaacctgcccaccgccagcaagtgggcgcttaggttttcaataagacctttaagctgtagctcccagctgcgcgccgcaccagccgtccaaaccaagaccaagaagaccctcgcaaagccaaatattcgcaatgtcgttgtggtcgacggtgttcgcacccctttcttgctatctgggacctcttacaaggatctgatgccgcacgacctagctcgcgccgctctcacgtag

SEQ ID NO: 327053 - DNA, 531 bp, Artificial Sequence
  derived and/or modified sequence
atgaccatcctgacctaccccttcaagaacctgcccaccgccagcaaatgggcgctgagattttccatccggccactgtcctgctcttctcagctccgcgctgcaccagcagtgcagactaaaactaagaagaccctcgccaagcctaatatccgaaacgtggtggtggtcgatggcgtgcgcaccccgtttctgttgtctggaactagctataaagatcttatgcctcacgatctggcgcgtgcagcactgaccgggttacttcatagaacatccgttcctaaagaggtcgttgattacattatcttcggaaccgtgatccaggaggtaaagacgtcaaacgtcgcaagggaagcagccctgggcgcaggctttagcgataaaactcccgcccacactgttacaatggcctgcatctcagccaatcaggcaatgacaaccggggtgggcttgatcgcctctgggcagtgcgatgtcattgtggccggaggtgtggaattgatgtctgatgtccccatccgccactcttag

SEQ ID NO: 327054 - DNA, 453 bp, Artificial Sequence
  derived and/or modified sequence
atgaccatcctgacctaccccttcaagaacctgcccaccgccagcaagtgggccctacggttctccatacgacccctgagttgcagtagccaactcagggcggctcccgccgtacagaccaagacgaaaaagacccttgctaagcccaacattaggaacgtggtggtagtcgacggcgtaaggacccctttcctcctgtcaggcacatcatacaaggatctaatgcctcacgatctagctagggccgccctcacaggattgctccaccgcacaagcgtacccaaggaagtggtggactacattattttcggaaccgtgatccaggaggtgaagacgtccaatgtcgccagggaggcggcactgggcgctgggtttagcgacaaaacacctgcccacactgtgacaatggcatgtatatccgccaaccaggccatgacaactggtgtggggtag

SEQ ID NO: 327055 - DNA, 1425 bp, Artificial Sequence
  derived and/or modified sequence
atgaccattctcacctacccattcaagaacttgccgacagcgtctaagtgggccctgagattttccattcgccctctgtcttgttcctcccagcttcgggctgcccctgccgtgcagacaaaaacaaagaaaacactggcgaagccaaatatccgcaatgtcgtggttgtcgacggggtgcgcactcccttcttactaagcggaaccagttataaagacctcatgccccacgatctggctcgggcagcactcaccggcctcttgcaccggacatccgttcccaaggaagtcgtggactatataatttttggaaccgtgattcaggaggtgaagacatctaatgtggcccgagaagcagccctgggagcgggttttagcgacaagacgcccgctcacaccgtgacaatggcctgtatctccgccaaccaagctatgaccaccggcgtgggtcttatcgcctctggccagtgcgatgtgatagtggctggcggagtcgagcttatgtcagacgtgccgatcagacactcacgtaaaatgcggaaactgatgctggacttgaataaagcaaagtcaatgggccagcggctatcattgatttctaaatttcgtttcaattttctggctcccgaattgccagccgtgtccgagtttagcacttccgaaaccatgggccattctgcagaccgccttgcagctgcatttgccgtttcaaggctggaacaggacgaatacgcccttcgttcacatagcctagccaaaaaggctcaggacgaaggcttgttgtccgacgttgtcccatttaaagtacccggtaaggatactgtgacgaaagataatgggatcaggccgtcatccctggagcagatggccaagcttaagcctgcctttatcaagccttacggtactgttactgccgcaaacagctccttcctgaccgatggcgcttcagcaatgttaataatggctgaagagaaagcactggccatgggctataaacctaaggcctatctgcgtgacttcatgtatgtgtcccaggatccaaaagatcagttactgctgggacccacttacgccacacctaaggtgctcgaaaaggctggcctgacaatgaacgacatcgacgccttcgagtttcacgaagctttctctgggcaaatcttggctaacttcaaggctatggactccgattggtttgccgagaattatatggggcgtaaaaccaaagtaggtcttcctccgctggaaaaattcaacaactgggggggatcactgagtttagggcaccccttcggcgctactggatgccgcttggtcatggcagccgctaataggctccgcaaggaggggggacagtatggattggtagctgcgtgcgccgctggaggccagggacacgccatgatcgtggaggcttatcccaaatag

SEQ ID NO: 327056 - DNA, 258 bp, Artificial Sequence
  derived and/or modified sequence
atgacaattctcacttacccctttaaaaacttgccgaccgccagcaaatgggccctgcgattctccatccgtccgctgagctgtagctcacagctgcgtgccgcacccgctgtgcagaccaagacaaaaaagacactcgccaagcctaacattcggaacgttgttgtcgttgacggcgttcgaaccccctttctcctgtccggaacatcctacaaagacctgatgccacatgatcttgctcgagctgctctcacgtag

SEQ ID NO: 327057 - DNA, 531 bp, Artificial Sequence
  derived and/or modified sequence
atgaccatactcacatatccctttaaaaatctgcccacggccagcaaatgggcgctcaggttttccatcagaccactctcatgctcaagccagcttagggcagccccagccgtccaaacaaagactaagaagacgctggccaagcccaatatacgaaatgtggtggtcgtggatggtgtgcgcacgccctttctgctgtccggcactagttataaggacctaatgccccatgatctggcgagggctgctttgactggattactgcatcggacatcagttcccaaggaagtagttgactatatcatctttggaacagtgatacaggaggtgaaaacgtcaaacgtcgccagagaggctgccctgggagccggtttctcggacaagaccccggcacacacagttaccatggcttgcatatccgctaatcaggccatgaccactggagtgggcctgattgcatcaggccaatgtgacgtgattgtcgcagggggagtggagctgatgtcggacgtgcctatccgccattcctag

SEQ ID NO: 327058 - DNA, 453 bp, Artificial Sequence
  derived and/or modified sequence
atgacgatcctcacatacccctttaaaaacttacccactgccagcaaatgggccctccggttcagcattcgccctctcagttgcagttctcagcttagagcagcccctgccgtgcagactaaaaccaaaaaaacactggctaaaccaaacatccggaacgttgtggtagtggacggagtgcggaccccattcctcctaagcggcacatcttacaaagatctgatgccccatgacctcgctcgtgccgctctgacaggtctgctgcatcgaaccagtgtgcccaaagaggtggtggactatatcatattcggcacagtgattcaggaagtgaaaacctccaatgtggcgagggaggccgctttgggggcaggcttttcagataagacgccagcccacacagtgaccatggcttgcatctcagctaatcaggcaatgacaacaggagtcggatag

SEQ ID NO: 327059 - DNA, 1425 bp, Artificial Sequence
  derived and/or modified sequence
atgaccatcctgacctaccccttcaagaacctgcccaccgccagcaagtgggccctgagattcagcatcagacccctgagctgcagcagccagctgagagccgcccccgccgtgcagaccaagaccaagaagaccctggccaagcccaacatcagaaacgtggtggtggtggacggcgtgagaacccccttcctgctgagcggcaccagctacaaggacctgatgccccacgacctggccagagccgccctgaccggcctgctgcacagaaccagcgtgcccaaggaggtggtggactacatcatcttcggcaccgtgatccaggaggtgaagaccagcaacgtggccagagaggccgccctgggcgccggcttcagcgacaagacccccgcccacaccgtgaccatggcctgcatcagcgccaaccaggccatgaccaccggcgtgggcctgatcgccagcggccagtgcgacgtgatcgtggccggcggcgtggagctgatgagcgacgtgcccatcagacacagcagaaagatgagaaagctgatgctggacctgaacaaggccaagagcatgggccagagactgagcctgatcagcaagttcagattcaacttcctggcccccgagctgcccgccgtgagcgagttcagcaccagcgagaccatgggccacagcgccgacagactggccgccgccttcgccgtgagcagactggagcaggacgagtacgccctgagaagccacagcctggccaagaaggcccaggacgagggcctgctgagcgacgtggtgcccttcaaggtgcccggcaaggacaccgtgaccaaggacaacggcatcagacccagcagcctggagcagatggccaagctgaagcccgccttcatcaagccctacggcaccgtgaccgccgccaacagcagcttcctgaccgacggcgccagcgccatgctgatcatggccgaggagaaggccctggccatgggctacaagcccaaggcctacctgagagacttcatgtacgtgagccaggaccccaaggaccagctgctgctgggccccacctacgccacccccaaggtgctggagaaggccggcctgaccatgaacgacatcgacgccttcgagttccacgaggccttcagcggccagatcctggccaacttcaaggccatggacagcgactggttcgccgagaactacatgggcagaaagaccaaggtgggcctgccccccctggagaagttcaacaactggggcggcagcctgagcctgggccaccccttcggcgccaccggctgcagactggtgatggccgccgccaacagactgagaaaggagggcggccagtacggcctggtggccgcctgcgccgccggcggccagggccacgccatgatcgtggaggcctaccccaagtag

SEQ ID NO: 327060 - DNA, 258 bp, Artificial Sequence
  derived and/or modified sequence
atgaccatcctgacctaccccttcaagaacctgcccaccgccagcaagtgggccctgagattcagcatcagacccctgagctgcagcagccagctgagagccgcccccgccgtgcagaccaagaccaagaagaccctggccaagcccaacatcagaaacgtggtggtggtggacggcgtgagaacccccttcctgctgagcggcaccagctacaaggacctgatgccccacgacctggccagagccgccctgacctag

SEQ ID NO: 327061 - DNA, 531 bp, Artificial Sequence
  derived and/or modified sequence
atgaccatcctgacctaccccttcaagaacctgcccaccgccagcaagtgggccctgagattcagcatcagacccctgagctgcagcagccagctgagagccgcccccgccgtgcagaccaagaccaagaagaccctggccaagcccaacatcagaaacgtggtggtggtggacggcgtgagaacccccttcctgctgagcggcaccagctacaaggacctgatgccccacgacctggccagagccgccctgaccggcctgctgcacagaaccagcgtgcccaaggaggtggtggactacatcatcttcggcaccgtgatccaggaggtgaagaccagcaacgtggccagagaggccgccctgggcgccggcttcagcgacaagacccccgcccacaccgtgaccatggcctgcatcagcgccaaccaggccatgaccaccggcgtgggcctgatcgccagcggccagtgcgacgtgatcgtggccggcggcgtggagctgatgagcgacgtgcccatcagacacagctag

SEQ ID NO: 327062 - DNA, 453 bp, Artificial Sequence
  derived and/or modified sequence
atgaccatcctgacctaccccttcaagaacctgcccaccgccagcaagtgggccctgagattcagcatcagacccctgagctgcagcagccagctgagagccgcccccgccgtgcagaccaagaccaagaagaccctggccaagcccaacatcagaaacgtggtggtggtggacggcgtgagaacccccttcctgctgagcggcaccagctacaaggacctgatgccccacgacctggccagagccgccctgaccggcctgctgcacagaaccagcgtgcccaaggaggtggtggactacatcatcttcggcaccgtgatccaggaggtgaagaccagcaacgtggccagagaggccgccctgggcgccggcttcagcgacaagacccccgcccacaccgtgaccatggcctgcatcagcgccaaccaggccatgaccaccggcgtgggctag

SEQ ID NO: 327063 - protein, 452 aa, Artificial Sequence
  derived and/or modified sequence
MTLVSGWLLYGWIIAVQTKTKKTLAKPNIRNVVVVDGVRTPFLLSGTSYKDLMPHDLARAALTGLLHRTSVPKEVVDYIIFGTVIQEVKTSNVAREAALGAGFSDKTPAHTVTMACISANQAMTTGVGLIASGQCDVIVAGGVELMSDVPIRHSRKMRKLMLDLNKAKSMGQRLSLISKFRFNFLAPELPAVSEFSTSETMGHSADRLAAAFAVSRLEQDEYALRSHSLAKKAQDEGLLSDVVPFKVPGKDTVTKDNGIRPSSLEQMAKLKPAFIKPYGTVTAANSSFLTDGASAMLIMAEEKALAMGYKPKAYLRDFMYVSQDPKDQLLLGPTYATPKVLEKAGLTMNDIDAFEFHEAFSGQILANFKAMDSDWFAENYMGRKTKVGLPPLEKFNNWGGSLSLGHPFGATGCRLVMAAANRLRKEGGQYGLVAACAAGGQGHAMIVEAYPK

SEQ ID NO: 327064 - DNA, 1359 bp, Artificial Sequence
  derived and/or modified sequence
atgactttggtcagcggctggttactctacggatggatcatagcagttcagacaaagaccaagaagacactagccaagccaaacatccgcaacgttgtcgtggttgacggggttcgaacccctttccttctcagtggaacatcttacaaagacctaatgccgcacgatttggcccgtgctgcgttgacaggcctgctgcataggaccagcgtgcctaaagaggtggtggattatattatatttggaacagtcatccaggaggtgaagacatccaacgtggctagagaagccgccctgggagcagggttctctgataagacgccagcccacaccgtgacaatggcttgtatctctgcgaatcaggccatgacaacaggggtgggattgatagcgagcggacagtgcgatgtgatagttgccggaggagttgagctgatgtccgatgtccccattcgacactctagaaaaatgaggaagctgatgctggatttaaataaggccaaatccatgggacagaggctatccctgatttccaaatttaggtttaacttcttagctccagagctgcccgcggtgagtgagttcagcacctctgagactatgggtcactccgcagaccgcttagccgcagcatttgccgtctcacgactggaacaggacgagtatgcactccgttcccatagcctcgccaagaaggctcaggatgagggcctgctatctgatgtggtccccttcaaggttccagggaaggatactgtgacaaaggataacggtatccgcccctcctccctggaacaaatggctaaactgaaacctgcttttatcaaaccttatggaaccgtgaccgccgccaattccagctttttgactgacggggcctctgccatgttaatcatggcggaagaaaaggcattggcaatgggctataagcccaaggcgtatctgcgcgacttcatgtatgtgtctcaggacccgaaggaccagctcctgctcggcccgacatatgccaccccaaaagtactggaaaaggctgggctgactatgaacgatattgatgcatttgagttccacgaagctttttctggccaaattctggctaactttaaagcaatggatagcgattggttcgctgaaaattacatggggaggaaaacgaaggtgggactccctccgttggaaaagtttaataattggggaggcagcttgtcccttgggcatccgttcggtgctacggggtgccgccttgtgatggccgcagctaaccggctgaggaaggagggcggtcagtacggcctggtggcagcctgcgccgctgggggccaaggccatgccatgatcgtggaagcatacccaaagtag

SEQ ID NO: 327065 - DNA, 1895 bp, Artificial Sequence
  derived and/or modified sequence
agagggagtcctcgcggacgtcagccaagattccagaatgactatcttgacttacccctttaaaaatcttcccactgcatcaaaatgggccctcagattttccataagacctctgagctgttcctcccagctacgagctgccccagagagagaatctgaccaacacagttgatcacttgtaggtagatgacactggtttctggttggctcctatatggatggatcattgctgtccagaccaaaacgaagaagacgttagccaaacccaatataaggaatgttgtggtggtggatggtgttcgcactccatttttgctgtctggcacttcatataaagacctgatgccacatgatttggctagagcagcgcttacgggtttgttgcatcggaccagtgtccctaaggaagtagttgattatatcatctttggtacagttattcaggaagtgaaaacaagcaatgtggctagagaggctgcccttggagctggcttctctgacaagactcctgctcacactgtcaccatggcttgtatctctgccaaccaagccatgaccacaggtgttggcttgattgcttctggccagtgtgatgtgatcgtggcaggtggtgttgagttgatgtccgatgtccctattcgtcactcaaggaaaatgagaaaactgatgcttgatctcaataaggccaaatctatgggccagcgactgtctttaatctctaaattccgatttaatttcctagcacctgagctccctgcggtttctgagttctccaccagtgagaccatgggccactctgcagaccgactggccgctgcctttgctgtttctcggctggaacaggatgaatatgcactgcgctctcacagtctagccaagaaggcacaggatgaaggactcctttctgatgtggtacccttcaaagtaccaggaaaagatacagttaccaaagataatggcatccgtccttcctcactggagcagatggccaaactaaaacctgcattcatcaagccctacggcacagtgacagctgcaaattcttctttcttgactgatggtgcatctgcaatgttaatcatggcggaggaaaaggctctggccatgggttataagccgaaggcatatttgagggattttatgtatgtgtctcaggatccaaaagatcaactattacttggaccaacatatgctactccaaaagttctagaaaaggcaggattgaccatgaatgatattgatgcttttgaatttcatgaagctttctcgggtcagattttggcaaattttaaagccatggattctgattggtttgcagaaaactacatgggtagaaaaaccaaggttggattgcctcctttggagaagtttaataactggggtggatctctgtccctgggacacccatttggagccactggctgcaggttggtcatggctgctgccaacagattacggaaagaaggaggccagtatggcttagtggctgcgtgtgcagctggagggcagggccatgctatgatagtggaagcttatccaaaataatagatccagaagaagtgacctgaagtttctgtgcaacactcacactaggcaatgccatttcaatgcattactaaatgacatttgtagttcctagctcctcttaggaaaacagttcttgtggccttctattaaatagtttgcacttaagccttgccagtgttctgagcttttcaataatcagtttactgctctttcagggatttctaagccaccagaatctcacatgagatgtgtgggtggttgtttttggtctctgttgtcactaaagactaaatgagggtttgcagttgggaaagaggtcaactgagatttggaaatcatctttgtaatatttgcaaattatacttgtt

SEQ ID NO: 327066 - DNA, 1359 bp, Artificial Sequence
  derived and/or modified sequence
atgaccctggtgtctggctggctgctgtatggctggatcatcgctgtgcagaccaagaccaagaagaccctggccaagcccaacatcagaaatgtggtggtggtggatggagtgaggacccccttcctgctgagcggcaccagctacaaggacctgatgcctcatgacctggcccgggccgccctgaccggcctgctgcacaggacctctgtgcccaaggaggtggtggactacatcatctttggaacagtcatccaggaggtgaagaccagcaatgtggcccgggaggccgccctgggcgccggcttcagtgacaagaccccagcccacacagtgaccatggcctgcatcagcgccaaccaggccatgaccactggagtgggcctcatcgccagcggccagtgtgatgtgattgtggccggcggcgtggagctgatgtctgatgtgcccatccgccacagcaggaagatgaggaagctgatgctggacctgaacaaggccaagtccatgggccagaggctgagcctcatcagcaagttccgcttcaacttcctggcccctgagctgcctgctgtgtctgagttcagcaccagcgagaccatgggccacagcgctgaccggctggccgccgcctttgctgtgtcccggctggagcaggatgaatatgccctgcggagccacagcctggccaagaaggcccaggatgagggcctgctgagtgatgtggtgcccttcaaggtgcctgggaaggacacagtgaccaaggacaatggcatccggcccagcagcctggagcagatggccaagctgaagccagccttcatcaagccctacggcaccgtgacagctgccaacagcagcttcctgacagatggagccagcgccatgctgatcatggccgaggagaaggccctggccatgggctacaagcccaaggcctacctgcgggacttcatgtatgtgtcccaggaccccaaggaccagctgctgctgggccccacctacgccacccccaaggtgctggagaaggccggcctgaccatgaatgacattgatgcctttgagttccacgaggccttcagcggccagatcctggccaacttcaaggccatggacagcgactggtttgctgagaactacatgggcaggaagaccaaggtgggcctgccccccctggagaagttcaacaactggggcggcagcctgagcctgggccacccctttggagccaccggctgccgcctggtgatggctgctgccaaccggctgaggaaggagggcggccagtatggcctggtggccgcctgtgccgccggcggccagggccacgccatgattgtggaggcctaccccaagtag

SEQ ID NO: 327067 - DNA, 1359 bp, Artificial Sequence
  derived and/or modified sequence
atgaccctggtgagcggctggctgctgtacggctggatcatcgccgtgcagactaaaacaaaaaaaaccctcgccaagcccaacatcaggaatgtggtggttgtggacggagttcgcactccctttctgttgtcaggcacgtcctacaaggaccttatgccgcacgacctggcaagggctgctcttactgggcttcttcatcggacatccgtgccgaaggaagttgtcgattacatcattttcgggacagtcatccaggaagtcaaaacttccaacgttgctcgggaagccgccctcggcgccggcttctctgataaaacccctgctcataccgtaaccatggcttgcattagtgccaaccaggccatgaccacaggtgtgggactgatagccagtggacagtgcgacgtgatagtcgcaggcggcgtcgagctcatgtctgacgtgccaattcgccattccagaaagatgaggaagcttatgctcgatctgaacaaagccaagtcaatgggccaaagattgtcccttatcagtaagttcaggtttaattttctggcaccagaattgcccgcggtgtccgagttctctacaagcgagaccatggggcatagtgccgaccggctcgccgccgccttcgccgtgtcacggctagagcaagacgagtatgcactccggagccattccctggccaagaaagctcaagacgaaggattactttccgacgtcgtccccttcaaggtgccgggcaaagatacagtgaccaaagacaatggcatacgacccagcagcctggagcaaatggcaaaacttaagcccgccttcataaagccttacggaacagtgacggctgcaaatagctcatttctgaccgacggcgcatcagctatgttgattatggccgaggagaaagccctggctatgggctacaagccgaaggcctacctgcgagattttatgtatgtctcccaggatcccaaggaccagcttctgctgggccccacttatgccactcccaaggttttggaaaaagcaggcctgacaatgaatgatatcgacgccttcgaatttcacgaagccttttcaggtcagatcctggcgaactttaaagccatggattcagattggttcgccgagaattacatgggccgcaaaacaaaagtgggcttgccacctctcgagaagttcaataattggggggggagcctgtcgcttggccaccctttcggtgctaccgggtgccgattagtcatggcagcggctaataggctgcgcaaagaaggcgggcagtacggccttgtggctgcatgcgctgccggaggccagggtcacgcgatgattgttgaggcctatcccaagtag

SEQ ID NO: 327068 - DNA, 1359 bp, Artificial Sequence
  derived and/or modified sequence
atgacccttgtgtccggctggctgctgtatggatggattatcgctgttcaaacgaagacaaaaaaaactctcgccaaaccaaatatccggaatgtggtagtggtggacggtgtaaggacaccatttcttctatcgggcacgtcgtataaagacctaatgccccatgatctcgctcgtgccgctctcacaggtttactgcaccgaacttccgtacctaaagaagtcgtggactacatcatcttcggaactgttatccaggaagtcaagaccagcaatgtggctcgcgaagctgcactaggagccggttttagcgataagacacctgcccacacagttactatggcctgcatcagtgcaaaccaggccatgactactggcgtggggcttattgcttcagggcaatgcgatgtgattgtggcgggaggggtggaactgatgtccgacgtgccaattcggcatagcagaaagatgagaaaattaatgttagacctgaataaagctaagagcatggggcagcggctctctctcatcagcaagttcagattcaatttcctggcccctgagctcccagctgtgtccgaattttcaacatctgagaccatggggcactctgcagatcggctggctgccgcattcgcagtgtctagactcgaacaggacgagtatgccctgcggtctcacagcctggctaagaaggctcaagacgaaggtctattgagtgatgtcgtgccgttcaaagtgcctggcaaagacacggtgactaaggacaacggtatcaggccctcttcattggagcagatggccaaactgaagcccgcattcattaagccctatggcaccgtgaccgctgcaaatagcagcttcttaacggacggggcttccgccatgctaattatggccgaagaaaaggcgcttgccatgggatacaaacccaaggcgtacctacgcgacttcatgtatgtttctcaggaccctaaggatcagttactcttgggccctacctacgccacaccaaaggtgctcgagaaggctggacttaccatgaatgatattgacgcgtttgaattccacgaggccttcagtggtcaaattttagcaaatttcaaggcgatggatagcgactggtttgccgaaaactacatgggaagaaagacaaaggtagggttacctcctctggagaaatttaacaattggggaggaagcctgtccctcggccatcccttcggggcaacagggtgccgactggtcatggctgctgcaaataggcttagaaaggagggaggacagtacggcctggtcgctgcatgtgcggcagggggacagggtcacgcgatgatcgtcgaagcataccctaagtag

SEQ ID NO: 327069 - DNA, 1359 bp, Artificial Sequence
  derived and/or modified sequence
atgaccctggtgagcggctggctgctgtacggctggatcatcgccgtgcagaccaagaccaagaagaccctggccaagcccaacatcagaaacgtggtggtggtggacggcgtgagaacccccttcctgctgagcggcaccagctacaaggacctgatgccccacgacctggccagagccgccctgaccggcctgctgcacagaaccagcgtgcccaaggaggtggtggactacatcatcttcggcaccgtgatccaggaggtgaagaccagcaacgtggccagagaggccgccctgggcgccggcttcagcgacaagacccccgcccacaccgtgaccatggcctgcatcagcgccaaccaggccatgaccaccggcgtgggcctgatcgccagcggccagtgcgacgtgatcgtggccggcggcgtggagctgatgagcgacgtgcccatcagacacagcagaaagatgagaaagctgatgctggacctgaacaaggccaagagcatgggccagagactgagcctgatcagcaagttcagattcaacttcctggcccccgagctgcccgccgtgagcgagttcagcaccagcgagaccatgggccacagcgccgacagactggccgccgccttcgccgtgagcagactggagcaggacgagtacgccctgagaagccacagcctggccaagaaggcccaggacgagggcctgctgagcgacgtggtgcccttcaaggtgcccggcaaggacaccgtgaccaaggacaacggcatcagacccagcagcctggagcagatggccaagctgaagcccgccttcatcaagccctacggcaccgtgaccgccgccaacagcagcttcctgaccgacggcgccagcgccatgctgatcatggccgaggagaaggccctggccatgggctacaagcccaaggcctacctgagagacttcatgtacgtgagccaggaccccaaggaccagctgctgctgggccccacctacgccacccccaaggtgctggagaaggccggcctgaccatgaacgacatcgacgccttcgagttccacgaggccttcagcggccagatcctggccaacttcaaggccatggacagcgactggttcgccgagaactacatgggcagaaagaccaaggtgggcctgccccccctggagaagttcaacaactggggcggcagcctgagcctgggccaccccttcggcgccaccggctgcagactggtgatggccgccgccaacagactgagaaaggagggcggccagtacggcctggtggccgcctgcgccgccggcggccagggccacgccatgatcgtggaggcctaccccaagtag

SEQ ID NO: 327070 - protein, 321 aa, Artificial Sequence
  derived and/or modified sequence
MAMATKGGTVKAASGFNAMEDAQTLRKAMKGLGTDEDAIISVLAYRNTAQRQEIRTAYKSTIGRDLIDDLKSELSGNFEQVIVGMMTPTVLYDVQELRRAMKGAGTDEGCLIEILASRTPEEIRRISQTYQQQYGRSLEDDIRSDTSFMFQRVLVSLSAGGRDEGNYLDDALVRQDAQDLYEAGEKKWGTDEVKFLTVLCSRNRNHLLHVFDEYKRISQKDIEQSIKSETSGSFEDALLAIVKCMRNKSAYFAEKLYKSMKGLGTDDNTLIRVMVSRAEIDMLDIRAHFKRLYGKSLYSFIKGDTSGDYRKVLLVLCGGDD

SEQ ID NO: 327071 - protein, 299 aa, Artificial Sequence
  derived and/or modified sequence
MAMATKGGTVKAASGFNAMEDAQTLRKAMKGLGTDEDAIISVLAYRNTAQRQEIRTAYKSTIGRDLIDDLKSELSGNFEQGAGTDEGCLIEILASRTPEEIRRISQTYQQQYGRSLEDDIRSDTSFMFQRVLVSLSAGGRDEGNYLDDALVRQDAQDLYEAGEKKWGTDEVKFLTVLCSRNRNHLLHVFDEYKRISQKDIEQSIKSETSGSFEDALLAIVKCMRNKSAYFAEKLYKSMKGLGTDDNTLIRVMVSRAEIDMLDIRAHFKRLYGKSLYSFIKGDTSGDYRKVLLVLCGGDD

SEQ ID NO: 327072 - protein, 237 aa, Artificial Sequence
  derived and/or modified sequence
MMTPTVLYDVQELRRAMKGAGTDEGCLIEILASRTPEEIRRISQTYQQQYGRSLEDDIRSDTSFMFQRVLVSLSAGGRDEGNYLDDALVRQDAQDLYEAGEKKWGTDEVKFLTVLCSRNRNHLLHVFDEYKRISQKDIEQSIKSETSGSFEDALLAIVKCMRNKSAYFAEKLYKSMKGLGTDDNTLIRVMVSRAEIDMLDIRAHFKRLYGKSLYSFIKGDTSGDYRKVLLVLCGGDD

SEQ ID NO: 327073 - DNA, 966 bp, Artificial Sequence
  derived and/or modified sequence
atggcaatggcaacaaagggaggaacagtgaaggcggcaagcggcttcaatgctatggaggatgcgcagaccttgcggaaagcgatgaagggtctcgggacagatgaagatgctattatttcagttctcgcctatagaaatacggcccagcgtcaggaaattcgaaccgcttacaaatccactatcgggcgagatctcatcgatgacttaaaatctgagctgagcggaaatttcgagcaggtaatagtaggcatgatgacgcccactgttctgtatgatgtccaagaactgagaagggccatgaagggcgctggcacagatgaaggttgtctgatcgaaatcctcgcttcacggactcctgaggagatcaggaggatctcgcagacttatcaacagcagtacggtcgaagcctggaggacgatatccgctctgacactagctttatgttccagagggtgctggtgagcctcagcgctggcggacgagatgagggcaactacttagacgacgcactggttcgtcaggacgctcaggacctgtacgaggctggagaaaaaaaatgggggacagatgaagttaaattcctgacggttctgtgcagccgaaatagaaatcatttactgcacgtgttcgacgaatacaagaggatctcccagaaagatattgaacagtcgattaaatcagagacctcggggtcattcgaggacgcccttctggccatagtcaagtgtatgcgcaacaaaagcgcatactttgccgaaaagttgtacaagtctatgaaaggcctgggaaccgacgacaacactctgattagagtgatggtctcacgcgctgagatagatatgcttgacataagagcacatttcaagaggttatatgggaagtctctatattctttcatcaaaggggatacatccggcgattacaggaaggtcctgctagttctttgcggcggggacgattag

SEQ ID NO: 327074 - DNA, 900 bp, Artificial Sequence
  derived and/or modified sequence
atggctatggccacgaaaggaggaaccgttaaagccgcgtcaggattcaatgctatggaggatgcacagacacttagaaaggcaatgaagggattaggaaccgacgaggacgctatcatctccgttttggcctatcgcaatacagcccaacggcaggaaattcggaccgcctacaagagtacaattgggcgtgatctgatcgacgatctgaagtcagaactctctggcaactttgagcagggcgccggcactgacgaagggtgtttgattgagatcctagcctctcgaaccccggaggaaatacgccggattagtcagacctaccaacagcaatacggtcggagtcttgaggacgacatcagaagtgacacatccttcatgttccaacgcgtgcttgtgagcttgagtgccgggggtcgcgacgaggggaactatctggacgatgcactcgtgcgccaagacgcccaggatctgtacgaagccggggaaaagaagtggggcacagacgaggtgaagtttctcaccgtgctgtgcagtcggaatcgcaaccacctgctgcacgtctttgatgagtacaaaagaataagtcagaaagatatcgagcaaagcattaagagtgagacctcgggctcttttgaggatgcactcctggctatcgttaaatgtatgcgaaacaagtccgcctacttcgccgaaaaattatacaaaagcatgaaaggcttaggcacagacgataacacgctgatacgggtgatggtgtccagagccgagatagacatgcttgatatccgagcgcatttcaagcgcctttatggaaaatcactgtattccttcataaagggagacactagcggcgactacagaaaggttctgttggtgttatgtggcggagacgattag

SEQ ID NO: 327075 - DNA, 714 bp, Artificial Sequence
  derived and/or modified sequence
atgatgacccccactgtgctgtatgacgtgcaggagctgcgacgagcgatgaaaggggctggtactgacgagggctgcctgattgagattctggcctctcgcacccctgaggaaataaggagaatttcccagacgtaccagcaacagtacggacgatcattggaggacgatataaggtccgatacctcattcatgttccagagagtgctagtgtcactatctgctggcgggcgcgatgaggggaattatctagatgacgcgctggtgcgccaagacgctcaggatttgtatgaagcgggcgaaaagaagtggggaacggatgaagtcaagttcctgacagtgctgtgcagccggaacaggaatcatcttcttcacgttttcgacgaatataagcgcatatctcaaaaggacattgagcagtccatcaagagcgagacctcaggaagcttcgaggacgctctgctggcaatcgtgaaatgtatgcgtaataagagcgcctactttgccgagaaactctacaagtcaatgaagggactgggcactgacgataacacgcttattagagtcatggtgtctcgagcggagattgatatgctggatatcagagcccactttaagcggctctatgggaagtctttgtactccttcatcaagggcgatacatctggggactacaggaaggttctgctggtgctgtgcgggggggatgactag

SEQ ID NO: 327076 - DNA, 966 bp, Artificial Sequence
  derived and/or modified sequence
atggccatggccaccaagggcggcaccgtgaaggccgccagcggcttcaatgccatggaggatgcccagaccctgaggaaggccatgaagggcctgggcacagatgaagatgccatcatctctgtgctggcctacagaaacacagcccagaggcaggagatcagaacagcctacaagagcaccatcggccgggacctgattgatgacctgaagtctgagctgagcggcaactttgagcaggtgattgtgggcatgatgacccccaccgtgctgtatgatgtgcaggagctgcggcgggccatgaagggggccggcacagatgagggctgcctgattgagatcctggccagcaggaccccagaggagatccgccgcatcagccagacctaccagcagcagtatggccgcagcctggaggatgacatccgcagtgacaccagcttcatgttccagagggtgctggtgtccctgtctgctgggggcagagatgagggcaactacctggatgatgccctggtgcggcaggatgcccaggacctgtatgaagctggggagaagaagtggggcacagatgaggtgaagttcctgactgtgctgtgcagcaggaacagaaaccacctgctgcacgtgtttgatgagtacaagaggatcagccagaaggacatcgagcagagcatcaagtctgagaccagcggcagctttgaagatgccctgctggccatcgtgaagtgcatgaggaacaagagcgcctactttgctgagaagctgtacaagtccatgaagggcctgggcacagatgacaacaccctcatccgggtgatggtgtccagagctgagattgacatgctggacatccgggcccacttcaagaggctgtatggcaagagcctgtacagcttcatcaagggggacaccagcggggactacaggaaggtgctgctggtgctgtgtggaggagatgactag

SEQ ID NO: 327077 - DNA, 900 bp, Artificial Sequence
  derived and/or modified sequence
atggccatggccaccaagggcggcaccgtgaaggccgccagcggcttcaatgccatggaggatgcccagaccctgaggaaggccatgaagggcctgggcacagatgaagatgccatcatctctgtgctggcctacagaaacacagcccagaggcaggagatcagaacagcctacaagagcaccatcggccgggacctgattgatgacctgaagtctgagctgagcggcaactttgagcagggcgccggcacagatgagggctgcctgattgagatcctggccagcaggaccccagaggagatccgccgcatcagccagacctaccagcagcagtatggccgcagcctggaggatgacatccgcagtgacaccagcttcatgttccagagggtgctggtgtccctgtctgctgggggcagagatgagggcaactacctggatgatgccctggtgcggcaggatgcccaggacctgtatgaagctggggagaagaagtggggcacagatgaggtgaagttcctgactgtgctgtgcagcaggaacagaaaccacctgctgcacgtgtttgatgagtacaagaggatcagccagaaggacatcgagcagagcatcaagtctgagaccagcggcagctttgaagatgccctgctggccatcgtgaagtgcatgaggaacaagagcgcctactttgctgagaagctgtacaagtccatgaagggcctgggcacagatgacaacaccctcatccgggtgatggtgtccagagctgagattgacatgctggacatccgggcccacttcaagaggctgtatggcaagagcctgtacagcttcatcaagggggacaccagcggggactacaggaaggtgctgctggtgctgtgtggaggagatgactag

SEQ ID NO: 327078 - DNA, 714 bp, Artificial Sequence
  derived and/or modified sequence
atgatgacccccaccgtgctgtatgatgtgcaggagctgcggcgggccatgaagggggccggcacagatgagggctgcctgattgagatcctggccagcaggaccccagaggagatccgccgcatcagccagacctaccagcagcagtatggccgcagcctggaggatgacatccgcagtgacaccagcttcatgttccagagggtgctggtgtccctgtctgctgggggcagagatgagggcaactacctggatgatgccctggtgcggcaggatgcccaggacctgtatgaagctggggagaagaagtggggcacagatgaggtgaagttcctgactgtgctgtgcagcaggaacagaaaccacctgctgcacgtgtttgatgagtacaagaggatcagccagaaggacatcgagcagagcatcaagtctgagaccagcggcagctttgaagatgccctgctggccatcgtgaagtgcatgaggaacaagagcgcctactttgctgagaagctgtacaagtccatgaagggcctgggcacagatgacaacaccctcatccgggtgatggtgtccagagctgagattgacatgctggacatccgggcccacttcaagaggctgtatggcaagagcctgtacagcttcatcaagggggacaccagcggggactacaggaaggtgctgctggtgctgtgtggaggagatgactag

SEQ ID NO: 327079 - DNA, 966 bp, Artificial Sequence
  derived and/or modified sequence
atggccatggccaccaagggcggcaccgtgaaggccgccagcggctttaacgccatggaagatgctcagaccctccggaaagccatgaagggtctgggaaccgacgaggatgccataatctctgtgctggcataccgcaatacggcccagagacaggagatccggacagcgtacaaatccaccataggccgagacctgatagacgacctcaagtctgaattaagcgggaacttcgagcaggtgatcgtgggcatgatgacgcctactgtcctgtacgacgtgcaggagttaaggcgggccatgaagggagccgggactgatgagggatgcctgattgagatcctagcaagcaggaccccagaagagatcagaaggattagccagacctatcagcagcaatatggtcgctccctggaagatgacataaggagcgatacgtcttttatgttccagcgagtgttggtctcgctgagtgctggaggcagagacgaaggcaattatctggatgacgcactcgtgcggcaggatgctcaggacctttacgaggctggggaaaagaagtggggcaccgacgaggtgaagtttctgacagtcctgtgctctcggaaccgaaatcatctgctgcatgtgtttgatgagtacaagcgtatttcgcaaaaggatattgagcagtcgattaagtcagagacatccggctcatttgaggacgccctgctagctattgtcaagtgtatgcggaataaaagcgcgtactttgctgagaaactgtataagtcaatgaagggcctgggaactgacgataacacattaatccgtgtcatggtctcccgcgctgagattgatatgttagatatcagggctcactttaagcgcctttatgggaagtccttgtactctttcattaagggagacacctctggagactatcgaaaggttttactggttctgtgcggaggtgatgattag

SEQ ID NO: 327080 - DNA, 900 bp, Artificial Sequence
  derived and/or modified sequence
atggccatggccaccaagggcggcaccgtgaaggccgccagcggctttaacgccatggaagatgcccaaacacttcggaaagcaatgaaagggcttgggacagacgaagacgcgattatctctgtgctcgcataccgtaacactgcacaacggcaggaaattagaacagcctacaagtctacaattggccgggatctgattgacgacttgaagagtgagctgagtggaaacttcgagcaaggtgccggcactgatgagggttgcctaattgagatactggcgtctagaacgcccgaggaaattcgaaggatctctcagacatatcagcaacagtacggacgaagcctggaggacgacatccggtctgacacctcttttatgttccagagagtattggtcagcctgagcgccggcgggagagatgagggcaattacctggacgacgccctggttcgacaagatgcccaagacctctatgaggcgggtgaaaagaagtgggggactgacgaggtgaagtttctgacagtgctatgctcccggaacagaaatcacctactccacgttttcgacgagtataagaggatatcgcagaaagacatcgagcagtccatcaagagcgaaactagcgggtcttttgaagacgccctcttggctatcgtgaagtgcatgcgcaataaaagcgcatacttcgccgagaaactgtacaagtccatgaagggacttggcaccgatgacaatacactgatcagggtgatggtgagccgcgccgagatcgacatgctcgatatccgggcccactttaaacgtctgtacgggaaaagcctctattcttttattaagggcgatacaagtggtgattatcgcaaagtgctgttagttctctgcgggggtgacgactag

SEQ ID NO: 327081 - DNA, 714 bp, Artificial Sequence
  derived and/or modified sequence
atgatgacccccaccgtgctgtacgacgtgcaggagctgcggcgggcaatgaagggggcgggcaccgatgagggatgcctcatcgagattctggctagccgaactccagaggagatcagaaggatttctcagacataccaacagcagtacgggagatcactagaagacgatatcagatccgatacctcctttatgtttcagcgagttcttgtttctctgtcagctgggggtcgagatgaaggaaactacctcgatgacgctctagttagacaagacgcacaggacctctatgaggctggagagaagaaatggggcacggacgaggtgaagtttctgactgtactgtgttcacgcaacagaaatcatctgttgcacgtattcgacgaatacaagaggattagtcagaaagatatcgagcagagcataaaatctgagacgagtgggtcctttgaggatgccttactagccatagtcaaatgtatgaggaacaaatctgcatacttcgcggagaagttgtacaaatcaatgaaggggctggggaccgatgataatactctgattcgcgtcatggtctcccgggcggaaattgacatgcttgatatccgagctcattttaaaagactctacggaaaatctctctatagttttatcaaaggcgacacaagcggcgactatcggaaggtgctcctggtgctctgcggcggggatgattag

SEQ ID NO: 327082 - DNA, 2163 bp, Artificial Sequence
  derived and/or modified sequence
gcgcggccgtcccggcccggggccccaggtgcgcttcccctagagagggattttccggtctcgtgggcagaggaacaaccaggaacttgggctcagtctccaccccacagtggggcggatccgtcccggataagacccgctgtctggccctgagtagggtgtgacctccgcagccgcagaggaggagcgcagcccggcctcgaagaacttctgcttgggtggctgaactctgatcttgacctagagtcatggccatggcaaccaaaggaggtactgtcaaagctgcttcaggattcaatgccatggaagatgcccagaccctgaggaaggccatgaaagggctcggcaccgatgaagacgccattattagcgtccttgcctaccgcaacaccgcccagcgccaggagatcaggacagcctacaagagcaccatcggcagggacttgatagacgacctgaagtcagaactgagtggcaacttcgagcaggtgattgtggggatgatgacgcccacggtgctgtatgacgtgcaagagctgcgaagggccatgaagggagccggcactgatgagggctgcctaattgagatcctggcctcccggacccctgaggagatccggcgcataagccaaacctaccagcagcaatatggacggagccttgaagatgacattcgctctgacacatcgttcatgttccagcgagtgctggtgtctctgtcagctggtgggagggatgaaggaaattatctggacgatgctctcgtgagacaggatgcccaggacctgtatgaggctggagagaagaaatgggggacagatgaggtgaaatttctaactgttctctgttcccggaaccgaaatcacctgttgcatgtgtttgatgaatacaaaaggatatcacagaaggatattgaacagagtattaaatctgaaacatctggtagctttgaagatgctctgctggctatagtaaagtgcatgaggaacaaatctgcatattttgctgaaaagctctataaatcgatgaagggcttgggcaccgatgataacaccctcatcagagtgatggtttctcgagcagaaattgacatgttggatatccgggcacacttcaagagactctatggaaagtctctgtactcgttcatcaagggtgacacatctggagactacaggaaagtactgcttgttctctgtggaggagatgattaaaataaaaatcccagaaggacaggaggattctcaacactttgaatttttttaacttcatttttctacactgctattatcattatctcagaatgcttatttccaattaaaacgcctacagctgcctcctagaatatagactgtctgtattattattcacctataattagtcattatgatgctttaaagctgtacttgcatttcaaagcttataagatataaatggagattttaaagtagaaataaatatgtattccatgtttttaaaagattactttctactttgtgtttcacagacattgaatatattaaattattccatattttcttttcagtgaaaaattttttaaatggaagactgttctaaaatcacttttttccctaatccaatttttagagtggctagtagtttcttcatttgaaattgtaagcatccggtcagtaagaatgcccatccagttttctatatttcatagtcaaagccttgaaagcatctacaaatctctttttttaggttttgtccatagcatcagttgatccttactaagtttttcatgggagacttccttcatcacatcttatgttgaaatcactttctgtagtcaaagtataccaaaaccaatttatctgaactaaattctaaagtatggttatacaaaccatatacatctggttaccaaacataaatgctgaacattccatattattatagttaatgtcttaatccagcttgcaagtgaatggaaaaaaaaataagcttcaaactaggtattctgggaatgatgtaatgctctgaatttagtatgatataaagaaaacttttttgtgctaaaaatactttttaaaatcaattttgttgattgtagtaatttctatttgcactgtgcctttcaactccagaaacattctgaagatgtacttggatttaattaaaaagttcactttgtaagaa

SEQ ID NO: 327083 - DNA, 1414 bp, Artificial Sequence
  derived and/or modified sequence
gcgcggccgtcccggcccggggccccaggtgcgcttcccctagagagggattttccggtctcgtgggcagaggaacaaccaggaacttgggctcagtctccaccccacagtggggcggatccgtcccggataagacccgctgtctggccctgagtagggtgtgacctccgcagccgcagaggaggagcgcagcccggcctcgaagaacttctgcttgggtggctgaactctgatcttgacctagagtcatggccatggcaaccaaaggaggtactgtcaaagctgcttcaggattcaatgccatggaagatgcccagaccctgaggaaggccatgaaagggctcggcaccgatgaagacgccattattagcgtccttgcctaccgcaacaccgcccagcgccaggagatcaggacagcctacaagagcaccatcggcagggacttgatagacgacctgaagtcagaactgagtggcaacttcgagcagggagccggcactgatgagggctgcctaattgagatcctggcctcccggacccctgaggagatccggcgcataagccaaacctaccagcagcaatatggacggagccttgaagatgacattcgctctgacacatcgttcatgttccagcgagtgctggtgtctctgtcagctggtgggagggatgaaggaaattatctggacgatgctctcgtgagacaggatgcccaggacctgtatgaggctggagagaagaaatgggggacagatgaggtgaaatttctaactgttctctgttcccggaaccgaaatcacctgttgcatgtgtttgatgaatacaaaaggatatcacagaaggatattgaacagagtattaaatctgaaacatctggtagctttgaagatgctctgctggctatagtaaagtgcatgaggaacaaatctgcatattttgctgaaaagctctataaatcgatgaagggcttgggcaccgatgataacaccctcatcagagtgatggtttctcgagcagaaattgacatgttggatatccgggcacacttcaagagactctatggaaagtctctgtactcgttcatcaagggtgacacatctggagactacaggaaagtactgcttgttctctgtggaggagatgattaaaataaaaatcccagaaggacaggaggattctcaacactttgaatttttttaacttcatttttctacactgctattatcattatctcagaatgcttatttccaattaaaacgcctacagctgcctcctagaatatagactgtctgtattattattcacctataattagtcattatgatgctttaaagctgtacttgcatttcaaagcttataagatataaatggagattttaaagtagaaataaatatgtattccatgtttttaaaa

SEQ ID NO: 327084 - DNA, 1703 bp, Artificial Sequence
  derived and/or modified sequence
taagacccgctgtctggccctgagtagggtgtgacctccgcagccgcagaggaggagcgcagcccggcctcgaagaacttctgcttgggtggctgaactctgatcttgacctagagtcatggccatgcacaaacaacgaggaaacagaagattcaccaaacatttatgaacagccagctgttataaagacaagggaccaatctgaaaaatcagaataaagtctccttgttaaagctgctgcaagaaacaggcaccgatgaagacgccattattagcgtccttgcctaccgcaacaccgcccagcgccaggagatcaggacagcctacaagagcaccatcggcagggacttgatagacgacctgaagtcagaactgagtggcaacttcgagcaggtgattgtggggatgatgacgcccacggtgctgtatgacgtgcaagagctgcgaagggccatgaagggagccggcactgatgagggctgcctaattgagatcctggcctcccggacccctgaggagatccggcgcataagccaaacctaccagcagcaatatggacggagccttgaagatgacattcgctctgacacatcgttcatgttccagcgagtgctggtgtctctgtcagctggtgggagggatgaaggaaattatctggacgatgctctcgtgagacaggatgcccaggacctgtatgaggctggagagaagaaatgggggacagatgaggtgaaatttctaactgttctctgttcccggaaccgaaatcacctgttgcatgtgtttgatgaatacaaaaggatatcacagaaggatattgaacagagtattaaatctgaaacatctggtagctttgaagatgctctgctggctatagtaaagtgcatgaggaacaaatctgcatattttgctgaaaagctctataaatcgatgaagggcttgggcaccgatgataacaccctcatcagagtgatggtttctcgagcagaaattgacatgttggatatccgggcacacttcaagagactctatggaaagtctctgtactcgttcatcaagggtgacacatctggagactacaggaaagtactgcttgttctctgtggaggagatgattaaaataaaaatcccagaaggacaggaggattctcaacactttgaatttttttaacttcatttttctacactgctattatcattatctcagaatgcttatttccaattaaaacgcctacagctgcctcctagaatatagactgtctgtattattattcacctataattagtcattatgatgctttaaagctgtacttgcatttcaaagcttataagatataaatggagattttaaagtagaaataaatatgtattccatgtttttaaaagattactttctactttgtgtttcacagacattgaatatattaaattattccatattttcttttcagtgaaaaattttttaaatggaagactgttctaaaatcacttttttccctaatccaatttttagagtggctagtagtttcttcatttgaaattgtaagcatccggtcagtaagaatgcccatccagttttctatatttcatagtcaaagccttgaaagcatctacaaatctctttttttaggttttgtccatagcatcagttgatccttactaagtttttcatgggagacttccttcatcacatcttatgttga

SEQ ID NO: 327085 - DNA, 966 bp, Artificial Sequence
  derived and/or modified sequence
atggccatggcgacgaagggaggcacagttaaggctgcgtccgggttcaacgcaatggaggacgcacaaacgttgagaaaagctatgaaggggctgggaacggatgaagacgctatcatctctgtgctggcttatcggaacacagcacagcgacaggagataagaaccgcttacaagtcaacgattggtagagacctcattgacgacctcaaaagcgagctgagcggcaacttcgagcaggtgatagtcggcatgatgacccccaccgtgttgtatgatgtgcaagagcttcggagggctatgaagggggcagggacagatgaaggctgcctgattgagattctggcttcacgcacccccgaggagatccgtcggatcagtcaaacatatcagcagcagtatgggagatcacttgaggatgacatcagatccgatacgtcgttcatgtttcaaagggtgttggtttctctgagcgccggaggaagagatgaagggaactacctggacgacgcgctggtgcgacaagacgctcaggacttatacgaggctggggagaagaaatggggcacggacgaagtgaagtttttaactgtgctctgttctcgaaacagaaatcatctcctgcacgtgtttgatgaatacaaaaggatatcccagaaagacatagaacagtccatcaagagcgagaccagtggctccttcgaagatgcactccttgctatcgttaagtgtatgcggaacaaatctgcctacttcgcggagaagctgtacaaatctatgaaaggacttggtacggacgacaatacgctgatcagggtgatggtcagtcgtgccgaaattgatatgcttgacatcagggcccactttaagcggctgtacggcaagagcctatactctttcatcaaaggcgataccagtggggactacagaaaagtcctgttagtgttgtgcggcggagatgattag

SEQ ID NO: 327086 - DNA, 900 bp, Artificial Sequence
  derived and/or modified sequence
atggcaatggccaccaagggtggcaccgtaaaggcggctagcggtttcaacgcaatggaggacgcccagacactgcgtaaggccatgaaaggactgggaaccgacgaggatgcaatcatttccgtcctcgcctaccgaaacacagcccagagacaggagatcaggacagcttataagtccactatcggaagggatttgatcgatgacctcaagagcgagctgtcagggaattttgaacaaggtgcaggtaccgatgagggctgtttgatcgaaatactggcatctcggacaccggaggaaatccgcagaatttcccagacataccagcagcagtacggtcgtagcctcgaggatgacattcggagcgacacatcattcatgttccaaagggtattggtcagcctatccgccggtggaagggatgagggcaactatcttgatgacgccctcgtccgccaggatgcccaggatctttacgaggctggcgagaaaaagtggggcaccgacgaggtcaaatttctaactgtgttgtgttcaaggaacaggaaccacttgctgcacgtgttcgatgagtacaagagaatttcacaaaaagacattgagcagtctatcaaatccgagactagcgggtccttcgaggatgcgctactggcaattgtgaagtgcatgagaaacaagtcggcatacttcgcggaaaaactgtacaagtctatgaaagggctaggcaccgacgataacacacttattagagtgatggtcagccgagccgaaattgatatgctggacatcagggcacatttcaagcgattatacgggaagtctctgtactctttcattaagggagacacctccggagattatcggaaggtgctactggtcctttgtggcggagacgattag

SEQ ID NO: 327087 - DNA, 714 bp, Artificial Sequence
  derived and/or modified sequence
atgatgacccccactgtcctttacgacgtgcaagaactccgcagagcaatgaagggggctggaactgacgaaggatgccttattgaaatattggcctcgaggaccccagaggaaatacggaggatttctcagacctatcaacagcagtacggacggtcactcgaggacgatatccgaagcgacacaagctttatgttccaaagggtcttagtgtcactgagtgccggtggcagagacgaaggcaattatctggacgatgcgctcgttcggcaggacgcacaagacctatacgaagctggtgagaagaaatggggcaccgatgaagtgaagttcctgactgtgctttgtagccggaataggaaccatcttctccatgtgtttgacgaatataagcgaatctctcagaaggatattgagcagagcatcaaatccgagacatcaggatcatttgaggatgccctgttagcaatcgtcaaatgtatgaggaataaatccgcgtacttcgcagagaagttatacaagtctatgaaaggactcggcactgatgataatactctgatcagagtaatggtgagtagagccgaaatcgatatgcttgatatccgagcgcacttcaagcgcctgtatggtaaatcattgtatagtttcataaaaggcgacacatcaggggactacaggaaggtcttgctggtcctgtgcggcggagacgattag

SEQ ID NO: 327088 - DNA, 966 bp, Artificial Sequence
  derived and/or modified sequence
atggccatggccaccaagggcggcaccgtgaaggccgccagcggcttcaacgccatggaggacgcccagaccctgagaaaggccatgaagggcctgggcaccgacgaggacgccatcatcagcgtgctggcctacagaaacaccgcccagagacaggagatcagaaccgcctacaagagcaccatcggcagagacctgatcgacgacctgaagagcgagctgagcggcaacttcgagcaggtgatcgtgggcatgatgacccccaccgtgctgtacgacgtgcaggagctgagaagagccatgaagggcgccggcaccgacgagggctgcctgatcgagatcctggccagcagaacccccgaggagatcagaagaatcagccagacctaccagcagcagtacggcagaagcctggaggacgacatcagaagcgacaccagcttcatgttccagagagtgctggtgagcctgagcgccggcggcagagacgagggcaactacctggacgacgccctggtgagacaggacgcccaggacctgtacgaggccggcgagaagaagtggggcaccgacgaggtgaagttcctgaccgtgctgtgcagcagaaacagaaaccacctgctgcacgtgttcgacgagtacaagagaatcagccagaaggacatcgagcagagcatcaagagcgagaccagcggcagcttcgaggacgccctgctggccatcgtgaagtgcatgagaaacaagagcgcctacttcgccgagaagctgtacaagagcatgaagggcctgggcaccgacgacaacaccctgatcagagtgatggtgagcagagccgagatcgacatgctggacatcagagcccacttcaagagactgtacggcaagagcctgtacagcttcatcaagggcgacaccagcggcgactacagaaaggtgctgctggtgctgtgcggcggcgacgactag

SEQ ID NO: 327089 - DNA, 900 bp, Artificial Sequence
  derived and/or modified sequence
atggccatggccaccaagggcggcaccgtgaaggccgccagcggcttcaacgccatggaggacgcccagaccctgagaaaggccatgaagggcctgggcaccgacgaggacgccatcatcagcgtgctggcctacagaaacaccgcccagagacaggagatcagaaccgcctacaagagcaccatcggcagagacctgatcgacgacctgaagagcgagctgagcggcaacttcgagcagggcgccggcaccgacgagggctgcctgatcgagatcctggccagcagaacccccgaggagatcagaagaatcagccagacctaccagcagcagtacggcagaagcctggaggacgacatcagaagcgacaccagcttcatgttccagagagtgctggtgagcctgagcgccggcggcagagacgagggcaactacctggacgacgccctggtgagacaggacgcccaggacctgtacgaggccggcgagaagaagtggggcaccgacgaggtgaagttcctgaccgtgctgtgcagcagaaacagaaaccacctgctgcacgtgttcgacgagtacaagagaatcagccagaaggacatcgagcagagcatcaagagcgagaccagcggcagcttcgaggacgccctgctggccatcgtgaagtgcatgagaaacaagagcgcctacttcgccgagaagctgtacaagagcatgaagggcctgggcaccgacgacaacaccctgatcagagtgatggtgagcagagccgagatcgacatgctggacatcagagcccacttcaagagactgtacggcaagagcctgtacagcttcatcaagggcgacaccagcggcgactacagaaaggtgctgctggtgctgtgcggcggcgacgactag

SEQ ID NO: 327090 - DNA, 714 bp, Artificial Sequence
  derived and/or modified sequence
atgatgacccccaccgtgctgtacgacgtgcaggagctgagaagagccatgaagggcgccggcaccgacgagggctgcctgatcgagatcctggccagcagaacccccgaggagatcagaagaatcagccagacctaccagcagcagtacggcagaagcctggaggacgacatcagaagcgacaccagcttcatgttccagagagtgctggtgagcctgagcgccggcggcagagacgagggcaactacctggacgacgccctggtgagacaggacgcccaggacctgtacgaggccggcgagaagaagtggggcaccgacgaggtgaagttcctgaccgtgctgtgcagcagaaacagaaaccacctgctgcacgtgttcgacgagtacaagagaatcagccagaaggacatcgagcagagcatcaagagcgagaccagcggcagcttcgaggacgccctgctggccatcgtgaagtgcatgagaaacaagagcgcctacttcgccgagaagctgtacaagagcatgaagggcctgggcaccgacgacaacaccctgatcagagtgatggtgagcagagccgagatcgacatgctggacatcagagcccacttcaagagactgtacggcaagagcctgtacagcttcatcaagggcgacaccagcggcgactacagaaaggtgctgctggtgctgtgcggcggcgacgactag

SEQ ID NO: 327091 - DNA, 3328 bp, Artificial Sequence
  derived and/or modified sequence
aaacatggcggcgccctgcgcggcttcccgtcgccgcaaccgtggggccggccctgccttgccagtactaggggacttcctctgcgcgccggcttcctgcccagctggcatttaaaccaccgcctggggctgcaggatgctgctgcggatgcagagctgtccgcgggctgggcagcgtcgccgtctcccctgagccgcctcggtccggcaggagcggagccgaagcatcccttgctgcacgcagggcagagcaggcgagggctgggggccgatcggggaccccggcttgggaccccggcatctggcagtttccttgcaggttcaactttaattgccaagatttcacccctcctcctcaagcccagattatttatcctccctccggcctgggctgctggatgcagcagcggctgggcttggtcccaggagcagggagagtgcgctcccggccctcctagccgcgtgcccgggccatggtgcggctgagccccgcgcttgggtgaggcggcggcgcggctcggagcccggcggaccggtcctacgggacatcttcccctgaggaggagtcttcccctggggctgcgtgccgggggcgagcggcggccgcgatgttcagctggctgggtacggacgaccgccggaggaaggaccccgaggttttccagacggtgagtgaggggctcaagaaactctacaagagcaagctgctgcccttggaagagcattaccgcttccacgagttccactcgcccgccctggaggatgccgacttcgacaacaagcccatggttctgctggtgggccagtactccactgggaagaccaccttcatcaggtacctgctggaacaggacttcccaggcatgaggattgggcctgagcccaccacagactccttcattgcggtgatgcagggagacatggaggggatcatccctgggaacgccctggtggtggatcccaagaaacccttcaggaaactcaacgcctttggcaacgccttcttgaacaggttcgtgtgtgcccagctacctaaccctgtgctggagagcatcagcgtcatcgacacaccagggatcctctctggggagaagcagaggatcagccggggaccagctgcaggcccaggactttagcaagttccagccgctgaagagcaagctgctggaggtagtggacgacatgctggcccatgacattgcccagctcatggtgctagtgcgccaggaggagtcacagcggcccatccagatggtgaagggcggagcgttcgagggcaccctgcacggcccctttgggcatggctatggggagggggctggagaaggtatcgatgatgctgagtgggtggtggccagggacaagcccatgtacgacgagatcttctacaccctgtcaccggtggatggcaagatcacaggcgctaatgccaagaaggagatggtgcgctccaagctgcccaacagtgtgctgggcaagatctggaagctggccgacattgacaaggatggcatgctggacgacgacgagtttgcactggccaaccacctcatcaaagtcaagctggaggggcacgagctgcccaacgagctgcctgcccacctcctgcccccgtccaagaggaaagttgccgagtgatggggtggggggacattcagacgggcagtgttagaggaggagatgggagcggtgactacacacacacacacacacacacacacacacacaaacatgcacacacacatatgcatatcttgacattgctctgtaggtgagagaggaccatgacgcccatgtttgcagctgatacttgtttgggcacacctccaagttctcgggattagaaggacaagagcactcccaggccccagagtctaagcctaagtctctatcgctcttcccctctcctcggccactccccagataccagacctgaggcaattcacttgccagcacagatggccaacccacctccagattccccagtgcttccacacccgggctctgagcaaatggaaaagacttttcatttagtagacaattcacttctttttctgtgcttcccctatctgctttggcttcctaataagaaatccattcaagagctaggagatctgagggcaggcgggcagctgcagggaggagaggtgagaaaggaagcgtcttctagagacattggcccaggagctctgttctttcctaatctaagcctctgtcttcttcggcaaaccttgctttgaactctgccagtatttcattttaaagaatcccagagcgggagagagaagagaaaaaaattgataagagtgaggaaattgtcctgtagtctattgaaaaccagtcaaggtggttttagttcatagattttgttagatgttctttccacctggcctatgatgtttagatgttcatacttgactcacatttacccagcccctcctgcgtaccaggagctgtgttaggcactttatatacattattctatgtggccctcactgatgccccagggaagtatgcattagccttcccattttgcagttgaggaggctgagtagcctcagaagggtttaggcgaccttctgaaactcacagaagtcacgtgatggagagaggattcaaagccagggcctcagaccctcacacacttgtctgtgctatgatgtatgcaggatcccagcattgatacccaatgacaaactatggagaacaagcaaagtatgcaggccccctgcagcctcccaggacaggctggcaagggaggagggccggccagcatttggtggcccatcagtctggccatctgtcacgtcacagaagcaaaccgtgccttctggctctgcgccccatattcccagcatcatagacatccaacagcaccagcaggagagtgggctagcctgctggatgctgttcgtgcctgtccctgctctgcctcccacccagttgcctgaatcatcccagctcagatgcagccactgtctcttgtcaagtgggacctcatactattctcagaaggctaacttgagaggtttggggccttgttccccagagggtccccagggactctgcagtgtccttggcaaatccccactgtactcaatgccctacattctcttctgtggtctctcccctggcttgcttcatggccactgaaccaatcactttgtatgctatgctcctactgtgatggaaaacaaaatgagtataacttattttatatccatattcagactatatagagaatattctatgcatctatgacgtgcttactactgcagtgcatttgtcattagtcttcatgttaatacagtacatttattctttggta

SEQ ID NO: 327092 - protein, 491 aa, Artificial Sequence
  derived and/or modified sequence
MVFGEFFHRPGQDEELVNLNVGGFKQSVDQSTLLRFPHTRLGKLLTCHSEEAILELCDDYSVADKEYYFDRNPSLFRYVLNFYYTGKLHVMEELCVFSFCQEIEYWGINELFIDSCCSNRYQERKEENHEKDWDQKSHDVSTDSSFEESSLFEKELEKFDTLRFGQLRKKIWIRMENPAYCLSAKLIAISSLSVVLASIVAMCVHSMSEFQNEDGEVDDPVLEGVEIACIAWFTGELAVRLAAAPCQKKFWKNPLNIIDFVSIIPFYATLAVDTKEEESEDIENMGKVVQILRLMRIFRILKLARHSVGLRSLGATLRHSYHEVGLLLLFLSVGISIFSVLIYSVEKDDHTSSLTSIPICWWWATISMTTVGYGDTHPVTLAGKLIASTCIICGILVVALPITIIFNKFSKYYQKQKDIDVDQCSEDAPEKCHELPYFNIRDIYAQRMHTFITSLSSVGIVVSDPDSTDASSIEDNEDICNTTSLENCTAK

SEQ ID NO: 327093 - protein, 74 aa, Artificial Sequence
  derived and/or modified sequence
MVFGEFFHRPGQDEELVNLNVGGFKQSVDQSTLLRFPHTRLGKLLTCHSEEAILELCDDYSVADKEYYFDRNPS

SEQ ID NO: 327094 - DNA, 1476 bp, Artificial Sequence
  derived and/or modified sequence
atggtgttcggagaattttttcatcggcctggacaagacgaggaactggtgaatctgaacgtcggcggtttcaagcagtcagttgaccagagcacattgctgcgttttccccatacacgcttgggcaagcttttaacgtgccacagtgaagaagcaatactggaactttgtgatgattactccgttgcggacaaggagtattattttgatcggaatccgtcattgttcaggtatgtgcttaatttctattataccggcaaactgcacgtgatggaggaattatgcgtgttctccttttgccaagagatcgagtactgggggattaatgaactgttcatcgatagttgctgttctaatcgttatcaggaaaggaaggaggagaatcatgagaaggattgggatcagaagagccacgacgtgtctactgactcttcatttgaggaaagttccttatttgagaaagaactcgagaaatttgacacacttcgctttggacagcttcgaaagaagatttggattagaatggaaaatcccgcctattgtctctctgccaaactgatcgctatttcgtccctcagcgttgtgctggcctcaatagtcgccatgtgcgtacactcaatgtccgagttccagaatgaggacggcgaggtcgacgaccccgttctggaaggggtggagatcgcctgtatcgcttggtttacaggggagctggccgtccggctggccgctgccccatgccagaagaaattctggaaaaaccccctgaacatcatcgactttgtgagtataatacccttttacgccacgctggccgtggacactaaggaggaggagagcgaggacatcgaaaatatggggaaagtagtgcaaattctacgcttgatgagaatctttcgtatcctgaagttagcccgccattctgtgggtctaagaagtctgggcgcaacccttcgtcattcatatcatgaagtcggccttcttctgctgtttctctcagttgggatttccattttcagcgtgcttatttattcggtcgagaaagacgatcacaccagctcattaacttctattcccatatgttggtggtgggcaaccatctccatgactacagtgggctacggtgacacccaccccgttactctggcaggtaagctgatcgcgagcacttgcatcatatgtggtattcttgtggtggctctgcccatcactataatctttaacaaattcagcaagtactaccagaagcagaaggacatcgatgtcgaccaatgcagcgaggacgccccggagaaatgccacgaactgccttactttaatatccgagatatctacgcccagagaatgcacacgttcatcacctctttgtcttccgtgggcattgtcgtgtccgatcctgattctaccgacgccagcagtattgaggataacgaagacatctgtaatactacttctctcgaaaactgcaccgccaagtag

SEQ ID NO: 327095 - DNA, 1476 bp, Artificial Sequence
  derived and/or modified sequence
atggttttcggtgaatttttccatagacctggacaggacgaagagctggttaatttgaatgtaggtggcttcaagcagtctgtcgaccagtcgacacttctgcggttccctcatacaagattgggtaaactcctcacctgtcatagtgaggaggcaattctcgagctctgcgacgattattcggttgccgacaaggagtattactttgatcgcaatcctagccttttccggtacgtcctgaacttttattatactggcaagctgcacgtgatggaggagctatgtgtcttcagtttctgccaggaaatagagtactggggtattaatgaattgtttatcgattcctgctgctccaatagataccaggagcgcaaggaggaaaatcatgaaaaggattgggatcagaagtcccacgacgtgagcactgactcatcctttgaggagagcagcctatttgagaaagagctggagaagtttgatacactcagattcggtcagctacgaaagaagatatggattcggatggagaacccagcctactgcttatcagcaaaactcatcgcaatctcttctttatctgttgtgcttgcctccattgtggccatgtgcgtgcattctatgtcagaatttcagaacgaggacggggaggtggatgacccagtgctggagggagtggagattgcttgtattgcatggttcacaggagaactggcagtgagactcgccgcagccccgtgtcagaagaaattttggaagaacccccttaacattattgactttgtcagtatcattccattttatgctacactggcggtcgatacaaaggaagaagagtcagaagacattgagaatatggggaaagttgttcagattctgcgtctgatgcgcatctttaggatcctaaagctcgctagacactctgtcggtctccggagcctgggtgctaccctgagacactcttatcacgaggtggggcttcttctcctgttcttatccgtgggaatatcaatcttctccgtattgatatactccgtcgaaaaggatgaccataccagttcccttacctcgatcccaatttgctggtggtgggcaaccatctcaatgacgacagtcggatacggcgacactcacccagtcaccctagctgggaagttgatagcaagtacctgtattatttgtggcattttagttgttgctcttccaatcaccatcatttttaataaattctcgaagtattaccagaagcagaaagacattgatgtggatcagtgttcggaagacgctcccgagaagtgccacgagctcccctattttaatatccgtgatatctatgcgcagaggatgcacacctttatcacctccctgtccagtgtggggatcgtggtgtccgaccccgacagcaccgacgcttcttcaattgaagataatgaggatatttgcaatactacttctctggagaactgcaccgccaagtag

SEQ ID NO: 327096 - DNA, 225 bp, Artificial Sequence
  derived and/or modified sequence
atggtctttggtgaattctttcatcgcccaggtcaggacgaagaactggtgaatctcaatgttgggggctttaagcagtctgtggatcagtcaacccttctccgctttccccacacccgacttggaaagctcttaacctgccacagtgaggaagccatacttgagctgtgcgatgattacagcgttgctgacaaggaatattatttcgatcgtaacccaagctag

SEQ ID NO: 327097 - DNA, 1476 bp, Artificial Sequence
  derived and/or modified sequence
atggtgtttggagagttcttccaccggcccggccaggatgaggagctggtgaacctgaatgtgggcggcttcaagcagagcgtggaccagagcaccctgctgcgcttcccccacacccggctgggcaagctgctgacctgccacagcgaggaggccatcctggagctgtgtgatgactacagcgtggccgacaaggagtactactttgacaggaaccccagcctcttccgctacgtgctgaacttctactacacaggcaagctgcacgtgatggaggagctgtgtgtgttctccttctgccaggagattgagtactggggcatcaatgaactcttcatcgacagctgctgcagcaaccgctaccaggagaggaaggaggagaaccacgagaaggactgggaccagaagagccatgatgtgtccacagacagcagctttgaggagagcagcctgtttgagaaggagctggagaagtttgacaccctgcgcttcggccagctgaggaagaagatctggatccgcatggagaacccagcctactgcctgagcgccaagctgattgccatcagcagcctgtctgtggtgctggccagcatcgtggccatgtgtgtgcacagcatgtctgagttccagaatgaagatggagaggtggatgatcctgtgctggagggcgtggagatcgcctgcatcgcctggttcaccggggagctggccgtgcggctggccgccgccccctgccagaagaagttctggaagaaccccctgaacatcatcgactttgtgtccatcatccccttctacgccaccctggccgtggacaccaaggaggaggagagcgaggacatcgagaacatgggcaaggtggtgcagatcctgcggctgatgaggatcttccgcatcctgaagctggcccggcacagcgtgggcctgcggagcctgggcgccaccctgcggcacagctaccacgaggtgggcctgctgctgctcttcctgtctgtgggcatcagcatcttctctgtgctgatctacagcgtggagaaggatgaccacaccagcagcctgaccagcatccccatctgctggtggtgggccaccatctccatgaccaccgtgggctatggagacacccaccctgtgaccctggccggcaagctgattgccagcacctgcatcatctgtggcatcctggtggtggccctgcccatcaccatcatcttcaacaagttcagcaagtactaccagaagcagaaggacattgatgtggaccagtgcagtgaagatgcccctgagaagtgccacgagctgccctacttcaacatccgggacatctatgcccagaggatgcacaccttcatcaccagcctgagctctgtgggcatcgtggtgtctgaccctgacagcacagatgccagcagcattgaggacaatgaagacatctgcaacaccaccagcctggagaactgcacagccaagtag

SEQ ID NO: 327098 - DNA, 225 bp, Artificial Sequence
  derived and/or modified sequence
atggtgtttggagagttcttccaccggcccggccaggatgaggagctggtgaacctgaatgtgggcggcttcaagcagagcgtggaccagagcaccctgctgcgcttcccccacacccggctgggcaagctgctgacctgccacagcgaggaggccatcctggagctgtgtgatgactacagcgtggccgacaaggagtactactttgacaggaaccccagctag

SEQ ID NO: 327099 - DNA, 1476 bp, Artificial Sequence
  derived and/or modified sequence
atggtgttcggcgagttcttccaccggcccggccaggacgaggagttggtgaacttaaatgtaggcgggtttaaacagtctgtcgatcagagtactctgctaaggtttccccatactcgtttgggcaagcttctgacatgccattccgaagaagccattttggagctctgcgacgactactctgtcgcagacaaagaatattatttcgaccgcaacccttccttgtttcgctatgttctaaatttctactacacgggcaagctgcacgtcatggaagaactatgcgtgttcagtttttgccaggaaattgaatattggggcatcaacgaactgttcatcgactcatgctgtagcaataggtaccaagaacgtaaggaggagaaccacgagaaggactgggatcagaaaagtcacgacgtctctaccgactcctctttcgaggagagttcccttttcgaaaaggagttggagaagttcgataccctccgatttggccaactgcggaagaaaatttggattaggatggaaaaccccgcctattgtttgagtgccaagctgatcgcaatatcaagcctgtctgtagttcttgcctcaatcgttgccatgtgcgttcactccatgtccgaattccagaatgaagatggggaggtggacgaccccgtgctggaaggggtggagatcgcctgcatcgcctggtttacaggagagctggccgttcggttagccgcagctccctgccaaaagaaattttggaaaaacccactgaacatcatcgacttcgtgtcaataattcccttttacgccacacttgccgtggatacaaaagaggaagagagcgaggacattgaaaatatggggaaagtcgtgcagatacttcggctgatgcgcatctttagaattcttaagcttgctcggcacagcgttggcttaaggtctttgggcgcaaccctgcgccatagctaccatgaggtcggactcctcttgttgttccttagcgtggggatttccatcttcagcgttctcatttactccgtagagaaggacgaccacacgtcttctcttacttccattcctatctgttggtggtgggccaccatttccatgactactgtggggtacggtgacacgcatcctgtgactctggccggtaaactaatcgcatccacttgcatcatttgcggtatactggtggtagcgctgcctatcactatcatctttaataagttttccaaatattaccaaaagcaaaaagatatcgacgtggatcagtgctctgaggatgctcctgagaagtgtcacgaactcccctactttaacattagggatatttatgcccagcggatgcacactttcatcacctctttgagcagtgtgggaattgtcgtgagcgatcccgactctactgacgcgagctccattgaagataacgaggatatctgcaataccacctcactggagaactgtacagccaagtag

SEQ ID NO: 327100 - DNA, 1476 bp, Artificial Sequence
  derived and/or modified sequence
atggtgttcggcgagttcttccaccggcccggccaggacgaggagctggtaaacctcaacgtcggcggcttcaagcaatctgtggaccaaagcactctcctaaggttccctcacacccgactgggtaagctgctgacgtgtcatagtgaagaggccattcttgaactgtgtgacgattactccgtggcagataaggagtattatttcgatagaaacccgtctctgtttaggtatgtactaaatttctattacacagggaagctgcacgtcatggaggaactgtgtgtgttttcgttctgccaggagattgaatactggggtattaatgaattattcatcgattcatgctgcagtaacagataccaggaacgaaaagaagaaaaccatgaaaaggattgggaccagaagtcacacgacgtgtctactgactcttcattcgaggaatcttctctttttgagaaagagttggagaaattcgacacacttcgcttcggacaattacggaaaaagatttggataaggatggagaaccctgcctactgcctgagtgcgaagttgatcgctatctcatccctgtccgtggtgcttgcctccattgttgccatgtgtgtgcacagcatgagcgaattccagaacgaggacggagaggtggacgaccccgtcctggagggggttgagattgcctgtattgcgtggttcacaggagagcttgcagtacgcctcgctgccgcaccttgccagaagaaattttggaaaaatccgctaaatatcatcgactttgtttccattatccccttctatgcgacattggccgtagatacaaaagaagaagagtcggaggatattgagaatatgggaaaggtcgtacagatcttgcgcctcatgaggatctttcggatcttaaaactcgcacgccattccgtgggactccggtctctcggagcaaccctcaggcattcctaccacgaggtggggcttctcctgctgttcctgtcggtggggatctccatcttttcagtcctgatatatagcgtagagaaggacgaccacacctcttctttgactagtatcccaatctgttggtggtgggcaaccattagcatgacgaccgtgggctacggcgacactcatccagtgacacttgcagggaagcttatcgccagcacctgtatcatctgcggcatccttgtggtagccttgcctattaccattatatttaacaaattctcgaagtactatcagaagcaaaaggatattgatgtggatcagtgcagtgaggacgcgcccgagaagtgccacgaattaccctattttaacatcagagatatctacgctcagagaatgcatacatttatcacctccctgtcatcagttggaatcgttgtctctgaccccgatagcacagacgccagcagcattgaggataatgaggacatctgtaataccacatccttggaaaattgcactgccaaatag

SEQ ID NO: 327101 - DNA, 225 bp, Artificial Sequence
  derived and/or modified sequence
atggtgttcggcgagttcttccaccggcccggccaggacgaggagcttgttaacctgaacgtgggcggattcaagcagtcagttgaccagagtactctcctccgcttcccacacaccaggctgggcaaactcttgacatgccattccgaggaggcaatactcgagttatgcgacgattactcagtggccgacaaggagtattatttcgatcgaaacccctcatag

SEQ ID NO: 327102 - DNA, 2333 bp, Artificial Sequence
  derived and/or modified sequence
cgcgggccaccccgctctcctcgccgccgcggcggcaggcgcggggccgcgccgcgaggcctgatccctgcagcgcgggcaggcggcgtcgcagagcggagctagctggatgcgtccggactcctgcaggtgagagtgattttccagtgattgctttggcctgtacaaccagagaacaggattcttcccttctttttggccaccaaatgcctatgtgcaccacacattccagtgtgctgagaagggcagagcttcttggatgatgatggacgtcccaccgggcaggatgaaggcagagcgtgtggcatctccacctcaagggtgcagcctgatcttcctcttctcccttgccagccagcactctgccttctgtatccaccatggtgtttggtgagtttttccatcgccctggacaagacgaggaacttgtcaacctgaatgtggggggctttaagcagtctgttgaccaaagcaccctcctgcggtttcctcacaccagactggggaagctgcttacttgccattctgaagaggccattctggagctgtgtgatgattacagtgtggccgataaggagtactactttgatcggaatccctccttgttcagatatgttttgaatttttattacacggggaagctgcatgtcatggaggagctgtgcgtattctcattctgccaggagatcgagtactggggcatcaacgagctcttcattgattcttgctgcagcaatcgctaccaggaacgcaaggaggaaaaccacgagaaggactgggaccagaaaagccatgatgtgagtaccgactcctcgtttgaagagtcgtctctgtttgagaaagagctggagaagtttgacacactgcgatttggtcagctccggaagaaaatctggattagaatggagaatccagcgtactgcctgtccgctaagcttatcgctatctcctccttgagcgtggtgctggcctccatcgtggccatgtgcgttcacagcatgtcggagttccagaatgaggatggagaagtggatgatccggtgctggaaggagtggagatcgcgtgcattgcctggttcaccggggagcttgccgtccggctggctgccgctccttgtcaaaagaaattctggaaaaaccctctgaacatcattgactttgtctctattattcccttctatgccacgttggctgtagacaccaaggaggaagagagtgaggatattgagaacatgggcaaggtggtccagatcctacggcttatgaggattttccgaattctaaagcttgcccggcactcggtaggacttcggtctctaggtgccacactgagacacagctaccatgaagttgggcttctgcttctcttcctctctgtgggcatttccattttctctgtgcttatctactccgtggagaaagatgaccacacatccagcctcaccagcatccccatctgctggtggtgggccaccatcagcatgacaactgtgggctatggagacacccacccggtcaccttggcgggaaagctcatcgccagcacatgcatcatctgtggcatcttggtggtggcccttcccatcaccatcatcttcaacaagttttccaagtactaccagaagcaaaaggacattgatgtggaccagtgcagtgaggatgcaccagagaagtgtcatgagctaccttactttaacattagggatatatatgcacagcggatgcacaccttcattaccagtctctcttctgtaggcattgtggtgagcgatcctgactccacagatgcttcaagcattgaagacaatgaggacatttgtaacaccacctccttggagaattgcacagcaaaatgagcgggggtgtttgtgcctgtttctcttatcctttcccgacattaggttaacacagctttataaacctcagtgggttcgttaaaatcatttaattctcagggtgtacctttcagccatagttggacattcattgctgaattctgaaatgatagaattgtctttatttttctctgtgaggtcaattaaatgccttgttctgaaatttattttttacaagagagagttgtgatatagtttggaatataagataaatggtattgggtggggtttgtggctacagcttatgcatcattctgtgtttgtcatttactcacattgagctaactttaaattactgacaagtagaatcaaaggtgcagctgactgagacgacatgcatgtaagatccacaaaatgagacaatgcatgtaaatccatgctcatgttctaaacatggaaactaggagcctaataaacttcctaattcagtatggagaa

SEQ ID NO: 327103 - DNA, 2397 bp, Artificial Sequence
  derived and/or modified sequence
agtgcagcgaggccagcgatgccttctggaccacacgctgtcctcgccgaggtcctggtttgttcctcaacgtcggctgaaggcatcgtcccctgacttcctcttccattcgtccttccgaaaggggacccgactggttcctcttctacatatgaggcgcatctgcttggtgcaaatgtccaagcacctcttctgactcggtgagagtgattttccagtgattgctttggcctgtacaaccagagaacaggattcttcccttctttttggccaccaaatgcctatgtgcaccacacattccagtgtgctgagaagggcagagcttcttggatgatgatggacgtcccaccgggcaggatgaaggcagagcgtgtggcatctccacctcaagggtgcagcctgatcttcctcttctcccttgccagccagcactctgccttctgtatccaccatggtgtttggtgagtttttccatcgccctggacaagacgaggaacttgtcaacctgaatgtggggggctttaagcagtctgttgaccaaagcaccctcctgcggtttcctcacaccagactggggaagctgcttacttgccattctgaagaggccattctggagctgtgtgatgattacagtgtggccgataaggagtactactttgatcggaatccctccttgttcagatatgttttgaatttttattacacggggaagctgcatgtcatggaggagctgtgcgtattctcattctgccaggagatcgagtactggggcatcaacgagctcttcattgattcttgctgcagcaatcgctaccaggaacgcaaggaggaaaaccacgagaaggactgggaccagaaaagccatgatgtgagtaccgactcctcgtttgaagagtcgtctctgtttgagaaagagctggagaagtttgacacactgcgatttggtcagctccggaagaaaatctggattagaatggagaatccagcgtactgcctgtccgctaagcttatcgctatctcctccttgagcgtggtgctggcctccatcgtggccatgtgcgttcacagcatgtcggagttccagaatgaggatggagaagtggatgatccggtgctggaaggagtggagatcgcgtgcattgcctggttcaccggggagcttgccgtccggctggctgccgctccttgtcaaaagaaattctggaaaaaccctctgaacatcattgactttgtctctattattcccttctatgccacgttggctgtagacaccaaggaggaagagagtgaggatattgagaacatgggcaaggtggtccagatcctacggcttatgaggattttccgaattctaaagcttgcccggcactcggtaggacttcggtctctaggtgccacactgagacacagctaccatgaagttgggcttctgcttctcttcctctctgtgggcatttccattttctctgtgcttatctactccgtggagaaagatgaccacacatccagcctcaccagcatccccatctgctggtggtgggccaccatcagcatgacaactgtgggctatggagacacccacccggtcaccttggcgggaaagctcatcgccagcacatgcatcatctgtggcatcttggtggtggcccttcccatcaccatcatcttcaacaagttttccaagtactaccagaagcaaaaggacattgatgtggaccagtgcagtgaggatgcaccagagaagtgtcatgagctaccttactttaacattagggatatatatgcacagcggatgcacaccttcattaccagtctctcttctgtaggcattgtggtgagcgatcctgactccacagatgcttcaagcattgaagacaatgaggacatttgtaacaccacctccttggagaattgcacagcaaaatgagcgggggtgtttgtgcctgtttctcttatcctttcccgacattaggttaacacagctttataaacctcagtgggttcgttaaaatcatttaattctcagggtgtacctttcagccatagttggacattcattgctgaattctgaaatgatagaattgtctttatttttctctgtgaggtcaattaaatgccttgttctgaaatttattttttacaagagagagttgtgatatagtttggaatataagataaatggtattgggtggggtttgtggctacagcttatgcatcattctgtgtttgtcatttactcacattgagctaactttaaattactgacaagtagaatcaaaggtgcagctgactgagacgacatgcatgtaagatccacaaaatgagacaatgcatgtaaatccatgctcatgttctaaacatggaaactaggagcctaataaacttcctaattcagta

SEQ ID NO: 327104 - DNA, 553 bp, Artificial Sequence
  derived and/or modified sequence
agggaagagcgaacccagggcccttgctctcgtgcagcgctgcgccctgggtggggacggcgtgaggcttgcagcgcaggtgagagtgattttccagtgattgctttggcctgtacaaccagagaacaggattcttcccttctttttggccaccaaatgcctatgtgcaccacacattccagtgtgctgagaagggcagagcttcttggatgatgatggacgtcccaccgggcaggatgaaggcagagcgtgtggcatctccacctcaagggtgcagcctgatcttcctcttctcccttgccagccagcactctgccttctgtatccaccatggtgtttggtgagtttttccatcgccctggacaagacgaggaacttgtcaacctgaatgtggggggctttaagcagtctgttgaccaaagcaccctcctgcggtttcctcacaccagactggggaagctgcttacttgccattctgaagaggccattctggagctgtgtgatgattacagtgtggccgataaggagtactactttgatcggaatccctcct

SEQ ID NO: 327105 - DNA, 1476 bp, Artificial Sequence
  derived and/or modified sequence
atggtgttcggcgagttcttccataggccaggccaggatgaggaactggttaacttgaacgtaggcggttttaaacagtctgtggaccaatccacactgctccggttccctcatacacgcttagggaaattgctcacctgccactcggaggaggccatcctggaactgtgtgacgactattcagtggcagataaggagtactattttgatcggaaccctagcctctttagatatgtgcttaatttctattatacaggaaagttgcacgtgatggaggaactgtgtgttttttccttttgtcaggaaattgagtactgggggatcaatgagctcttcatcgactcctgctgttctaaccgatatcaggagcgaaaagaggagaaccacgagaaagactgggaccagaagagccatgacgtgtctaccgacagctctttcgaggagagctctctttttgaaaaggagctggagaaatttgacacgctccgtttcggacagctgagaaagaaaatttggattcgcatggaaaacccggcttattgcctgtctgcaaagctgatcgcaattagttcccttagcgtggtgctggcaagtatcgtagccatgtgtgttcattctatgtcggaattccaaaatgaggatggagaagtggacgacccggtcttagaaggagtcgagatagcctgcattgcatggtttaccggtgagttggctgtccgcctcgctgcagctccatgtcagaagaaattttggaaaaatcccctcaacatcatagactttgtgagtataatccccttttacgccacactcgcagttgatacaaaggaggaggaaagtgaagatattgaaaatatgggtaaagtggttcagatcttgcgactgatgagaatattccgaatcttgaagctggcccgtcactccgttggccttaggtccctgggggcaacactgcgccactcatatcatgaggtagggttgctcctactgtttcttagcgtcggcatttccatctttagcgttctgatttactccgtggaaaaagacgatcacactagttccctcaccagtattcctatttgttggtggtgggcaacaataagcatgactacggtcggatacggtgacacccaccctgtcactctcgctgggaagctgatagccagtacttgtatcatttgcggcattctggtagttgctctccctataaccattattttcaataagttctctaagtattaccagaagcaaaaagatatcgacgtagaccagtgctctgaagacgcgccagagaagtgccacgaactgccctactttaatatacgggatatctatgcccaaagaatgcataccttcatcacttccttatcttctgttgggatcgtcgtgtccgatccggattctactgacgcatctagtatcgaggataatgaggatatttgtaacaccaccagcctcgagaactgtacagccaagtag

SEQ ID NO: 327106 - DNA, 1476 bp, Artificial Sequence
  derived and/or modified sequence
atggtgtttggcgaatttttccatagacccggtcaagatgaagaacttgtaaacctgaacgtggggggtttcaaacagagtgttgatcagtccacgctgcttcgttttcctcatacacgcctaggcaagcttctgacctgccactccgaggaggcgatcctggagctgtgtgacgactactcagtcgctgacaaggaatattatttcgataggaatccctcactatttaggtatgtcctgaatttttactataccggaaagttgcatgttatggaagagctgtgtgtcttcagcttctgccaggagatcgaatactgggggatcaatgagcttttcatcgattcctgttgctccaacaggtaccaggaacgcaaagaagaaaaccatgagaaggattgggatcagaagtcacacgacgtgtcaactgactcaagtttcgaggaatcttctcttttcgagaaggagctggagaaatttgacactctgcgcttcggtcaattgaggaagaagatctggatcagaatggaaaacccagcatactgtctatcagctaaactgattgccatcagctccttgtcagtggtgctcgcttcaatcgtcgcaatgtgtgtgcactcaatgagtgagttccagaatgaggacggagaagtcgatgatcccgtgctcgagggcgtggagattgcttgtatcgcctggttcacaggtgaattagcggtgaggctggccgctgcaccatgccagaaaaagttttggaagaacccacttaacatcatcgactttgtgtcaataattcccttttacgccacgctcgccgttgacacaaaagaggaagagtctgaggacatcgaaaacatgggcaaggtggtccagatccttcggctcatgcgcatcttccggatcctgaagttagccaggcacagcgtcgggctgcgatccctcggcgcaactttacggcactcctaccatgaggttgggctgctgctcctctttctatctgtgggcatctccattttctccgttcttatttattctgtagagaaggacgaccatacatccagtctcacctctatccccatctgttggtggtgggccacaatcagcatgacaaccgtgggatacggcgacacccaccccgtcactctcgccggaaagctaattgcaagcacatgtataatttgcgggatcctggttgtggcgctgcccattaccattatttttaacaaattttcgaaatattatcagaagcagaaagatattgacgtcgaccagtgttccgaagacgcaccagaaaaatgccacgaacttccatatttcaacatcagggacatttatgcccagcgcatgcacacgttcataacttctctgtcttcagttggcatagtggtgtctgatcccgattccaccgatgcatcaagtatcgaagacaacgaggatatctgcaacaccaccagcttagagaattgcaccgccaagtag

SEQ ID NO: 327107 - DNA, 225 bp, Artificial Sequence
  derived and/or modified sequence
atggttttcggagagttttttcacaggcctggccaggatgaggagcttgtgaatctaaacgtgggtggattcaaacaatctgtagaccagtcaaccttactgcgattcccacacacccgactcggaaagctcttaacatgtcatagcgaggaagcaatcctagagctgtgcgatgattacagtgtcgccgacaaagaatactacttcgaccgcaatcccagttag

SEQ ID NO: 327108 - DNA, 1476 bp, Artificial Sequence
  derived and/or modified sequence
atggtgttcggcgagttcttccacagacccggccaggacgaggagctggtgaacctgaacgtgggcggcttcaagcagagcgtggaccagagcaccctgctgagattcccccacaccagactgggcaagctgctgacctgccacagcgaggaggccatcctggagctgtgcgacgactacagcgtggccgacaaggagtactacttcgacagaaaccccagcctgttcagatacgtgctgaacttctactacaccggcaagctgcacgtgatggaggagctgtgcgtgttcagcttctgccaggagatcgagtactggggcatcaacgagctgttcatcgacagctgctgcagcaacagataccaggagagaaaggaggagaaccacgagaaggactgggaccagaagagccacgacgtgagcaccgacagcagcttcgaggagagcagcctgttcgagaaggagctggagaagttcgacaccctgagattcggccagctgagaaagaagatctggatcagaatggagaaccccgcctactgcctgagcgccaagctgatcgccatcagcagcctgagcgtggtgctggccagcatcgtggccatgtgcgtgcacagcatgagcgagttccagaacgaggacggcgaggtggacgaccccgtgctggagggcgtggagatcgcctgcatcgcctggttcaccggcgagctggccgtgagactggccgccgccccctgccagaagaagttctggaagaaccccctgaacatcatcgacttcgtgagcatcatccccttctacgccaccctggccgtggacaccaaggaggaggagagcgaggacatcgagaacatgggcaaggtggtgcagatcctgagactgatgagaatcttcagaatcctgaagctggccagacacagcgtgggcctgagaagcctgggcgccaccctgagacacagctaccacgaggtgggcctgctgctgctgttcctgagcgtgggcatcagcatcttcagcgtgctgatctacagcgtggagaaggacgaccacaccagcagcctgaccagcatccccatctgctggtggtgggccaccatcagcatgaccaccgtgggctacggcgacacccaccccgtgaccctggccggcaagctgatcgccagcacctgcatcatctgcggcatcctggtggtggccctgcccatcaccatcatcttcaacaagttcagcaagtactaccagaagcagaaggacatcgacgtggaccagtgcagcgaggacgcccccgagaagtgccacgagctgccctacttcaacatcagagacatctacgcccagagaatgcacaccttcatcaccagcctgagcagcgtgggcatcgtggtgagcgaccccgacagcaccgacgccagcagcatcgaggacaacgaggacatctgcaacaccaccagcctggagaactgcaccgccaagtag

SEQ ID NO: 327109 - DNA, 225 bp, Artificial Sequence
  derived and/or modified sequence
atggtgttcggcgagttcttccacagacccggccaggacgaggagctggtgaacctgaacgtgggcggcttcaagcagagcgtggaccagagcaccctgctgagattcccccacaccagactgggcaagctgctgacctgccacagcgaggaggccatcctggagctgtgcgacgactacagcgtggccgacaaggagtactacttcgacagaaaccccagctag

SEQ ID NO: 327110 - protein, 637 aa, Artificial Sequence
  derived and/or modified sequence
MKQRFSALQLLKLLLLLQPPLPRALREALCPEPCNCVPDGALRCPGPTAGLTRLSLAYLPVKVIPSQAFRGLNEVIKIEISQIDSLERIEANAFDNLLNLSEILIQNTKNLRYIEPGAFINLPRLKYLSICNTGIRKFPDVTKVFSSESNFILEICDNLHITTIPGNAFQGMNNESVTLKLYGNGFEEVQSHAFNGTTLTSLELKENVHLEKMHNGAFRGATGPKTLQNFSHSISENFSKQCESTVRKVNNKTLYSSMLAESELSGWDYEYGFCLPKTPRCAPEPDAFNPCEDIMGYDFLRVLIWLINILAIMGNMTVLFVLLTSRYKLTVPRFLMCNLSFADFCMGLYLLLIASVDSQTKGQYYNHAIDWQTGSGCSTAGFFTVFASELSVYTLTVITLERWHTITYAIHLDQKLRLRHAILIMLGGWLFSSLIAMLPLVGVSNYMKVSICFPMDVETTLSQVYILTILILNVVAFFIICACYIKIYFAVRNPELMATNKDTKIAKKMAILIFTDFTCMAPISFFAISAAFKVPLITVTNSKVLLVLFYPINSCANPFLYAIFTKTFQRDFFLLLSKFGCCKRRAELYRRKDFSAYTSNCKNGFTGSNKPSQSTLKLSTLHCQGTALLDKTRYTEC

SEQ ID NO: 327111 - DNA, 1914 bp, Artificial Sequence
  derived and/or modified sequence
atgaagcaacggttctccgctctgcagctgctgaaacttttactgctgctccaacccccacttccacgagccctgagagaggctctgtgtcctgaaccatgcaactgcgtgccggacggagcccttagatgcccggggcctacggctgggctgactcggctgagtttagcctatcttcctgtcaaggttatccccagtcaggctttccgaggattgaacgaggtcatcaagatcgagatcagccagatcgacagtctggagagaattgaggctaacgcatttgacaacctgctcaacctttctgaaattttgatccagaacactaaaaatcttaggtatatcgagccgggagcattcattaaccttccaagacttaagtacttgtctatctgtaacaccgggatccggaaattccccgatgtgacaaaggtcttttcatcagaaagcaacttcatcctggagatctgcgataatctccatataaccaccattcctggaaatgcttttcaggggatgaataatgagtccgtgactcttaagctgtatgggaacggcttcgaggaggtccagagccatgccttcaatggcacgaccctgacaagcctggagctgaaggaaaacgtgcacctagagaaaatgcacaacggggcgtttcgcggtgcaacagggccgaagaccttgcaaaacttttctcatagtatcagcgagaatttttctaagcaatgtgaatctactgtaaggaaggtgaataataagacgttatattccagcatgctggccgaatctgagctgtcaggatgggattatgaatacggattctgtttgcctaagactcctcgctgtgcccctgagccggatgcctttaacccctgtgaggacatcatgggatacgattttctgcgcgtgctgatttggctaatcaatatattagcaattatggggaatatgaccgtcttgttcgtcttgctgacctctaggtataaactcacagttccccggtttctgatgtgtaacttgagctttgctgatttttgcatgggactgtatctcctactgatagcctcagttgatagccagaccaagggtcagtattacaaccatgctattgactggcaaaccggctcgggttgctcaacagcaggcttttttacggtttttgccagtgaactatcagtctatacacttacagtcattacgctggaacgctggcacaccatcacctacgcaattcacctggaccagaagctgagactgcgccacgctatcttaatcatgctcgggggctggctattctcaagtctaattgccatgctcccactggtcggagtcagcaactacatgaaggtgtcgatctgcttccctatggacgtagagacaaccttgtcgcaagtttacatacttactatcctgatactgaatgtggttgcttttttcataatttgcgcatgctatatcaaaatttatttcgccgtgaggaacccagaactcatggccaccaataaggatacaaagatcgcaaagaagatggcaattctgatctttaccgatttcacctgcatggcacctatcagcttctttgcgatcagcgctgcttttaaagtccctctcatcaccgttacaaattccaaggttctactggtgctgttttatcccattaattcttgcgctaacccattcctgtatgccatcttcaccaaaacctttcagcgcgatttcttcctgctcctctctaaatttggttgctgcaaacggcgagcagaactttataggcggaaagatttttcagcttacacctctaactgcaagaacggctttaccggttcaaacaaaccatcacagtcaaccctgaaactgagtacccttcactgtcaggggactgcccttcttgacaagacccggtatactgagtgctag

SEQ ID NO: 327112 - DNA, 1914 bp, Artificial Sequence
  derived and/or modified sequence
atgaagcagcgcttcagcgccctgcagctgctgaagctgctgctgctgctgcagccccccctgccccgggccctgcgggaggccctgtgcccagagccctgcaactgtgtgcctgatggagccctgcgctgccccggccccacagctggcctgacccggctgagcctggcctacctgcctgtgaaggtgatccccagccaggccttccggggcctgaatgaagtcatcaagattgagatcagccagattgacagcctggagagaattgaggccaatgcctttgacaacctgctgaacctgtctgagatcctgatccagaacaccaagaacctgcgctacatcgagcccggggccttcatcaacctgccccggctgaagtacctgagcatctgcaacacaggcatcaggaagttcccagatgtgaccaaggtgttcagcagcgagagcaacttcatcctggagatctgtgacaacctgcacatcaccaccatccctggaaatgccttccagggcatgaacaatgaatctgtgaccctgaagctgtatggaaatggatttgaggaggtgcagagccacgccttcaacggcaccaccctgaccagcctggagctgaaggaaaatgtgcacctggagaagatgcacaatggagccttccggggggccaccggccccaagaccctgcagaacttcagccacagcatcagcgagaacttcagcaagcagtgtgagagcacagtgaggaaggtgaacaacaagaccctgtacagctccatgctggccgagagcgagctgagcggctgggactatgaatatggcttctgcctgcccaagaccccccgctgtgcccctgagccagatgccttcaacccctgtgaggacatcatgggctatgacttcctgcgggtgctgatctggctgatcaacatcctggccatcatgggcaacatgacagtgctgtttgtgctgctgaccagccgctacaagctgactgtgccccgcttcctgatgtgcaacctgagctttgctgacttctgcatgggcctgtacctgctgctgattgcctctgtggacagccagaccaagggccagtactacaaccacgccatcgactggcagacaggcagcggctgcagcacagctggcttcttcaccgtgtttgccagcgagctgtctgtgtacaccctgaccgtcatcaccctggagcgctggcacaccatcacctacgccatccacctggaccagaagctgcggctgcggcatgccatcctgatcatgctgggcggctggctgttcagcagcctgattgccatgctgcccctggtgggcgtgagcaactacatgaaggtgtccatctgcttccccatggatgtggagaccaccctgagccaggtgtacatcctgaccatcctgatcctgaatgtggtggccttcttcatcatctgtgcctgctacatcaagatctactttgctgtgaggaaccctgagctgatggccaccaacaaggacaccaagatcgccaagaagatggccatcctgatcttcacagacttcacctgcatggcccccatctccttctttgccatctctgctgccttcaaggtgcccctcatcaccgtgaccaacagcaaggtgctgctggtgctcttctaccccatcaacagctgtgccaaccccttcctgtatgccatcttcaccaagaccttccagagggacttcttcctgctgctgagcaagtttggctgctgcaagagaagagctgagctgtacagaaggaaggacttcagcgcctacaccagcaactgcaagaatggcttcaccggcagcaacaagcccagccagagcaccctgaagctgagcaccctgcactgccagggcacagccctgctggacaagacccgctacacagagtgctag

SEQ ID NO: 327113 - DNA, 2899 bp, Artificial Sequence
  derived and/or modified sequence
agaggggtgcgggccgcactcagaggccgtccaagacactggcaagccgcagaagcccagttcgccggccatgaagcagcggttctcggcgctgcagctgctgaagctgctgctgctgctgcagccgccgctgccacgagcgctgcgcgaggcgctctgccctgagccctgcaactgcgtgcccgacggcgccctgcgctgccccggccccacggccggtctcactcgactatcacttgcctacctccctgtcaaagtgatcccatctcaagctttcagaggacttaatgaggtcataaaaattgaaatctctcagattgattccctggaaaggatagaagctaatgcctttgacaacctcctcaatttgtctgaaatactgatccagaacaccaaaaatctgagatacattgagcccggagcatttataaatcttccccgattaaaatacttgagcatctgtaacacaggcatcagaaagtttccagatgttacgaaggtcttctcctctgaatcaaatttcattctggaaatttgtgataacttacacataaccaccataccaggaaatgcttttcaagggatgaataatgaatctgtaacactcaaactatatggaaatggatttgaagaagtacaaagtcatgcattcaatgggacgacactgacttcactggagctaaaggaaaacgtacatctggagaagatgcacaatggagccttccgtggggccacagggccgaaaaccttacagaatttttcacattccatttctgaaaacttttccaaacaatgtgaaagcacagtaaggaaagtgaataacaaaacactttattcttccatgcttgctgagagtgaactgagtggctgggactatgaatatggtttctgcttacccaagacaccccgatgtgctcctgaaccagatgcttttaatccctgtgaagatattatgggctatgacttccttagggtcctgatttggctgattaatattctagccatcatgggaaacatgactgttctttttgttctcctgacaagtcgttacaaacttacagtgcctcgttttctcatgtgcaatctctcctttgcagacttttgcatggggctctatctgctgctcatagcctcagttgattcccaaaccaagggccagtactataaccatgccatagactggcagacagggagtgggtgcagcactgctggctttttcactgtattcgcaagtgaactttctgtctacaccctcaccgtcatcactctagaaagatggcacaccatcacctatgctattcacctggaccaaaagctgcgattaagacatgccattctgattatgcttggaggatggctcttttcttctctaattgctatgttgccccttgtcggtgtcagcaattacatgaaggtcagtatttgcttccccatggatgtggaaaccactctctcacaagtctatatattaaccatcctgattctcaatgtggtggccttcttcataatttgtgcttgctacattaaaatttattttgcagttcgaaacccagaattaatggctaccaataaagatacaaagattgctaagaaaatggcaatcctcatcttcaccgatttcacctgcatggcacctatctctttttttgccatctcagctgccttcaaagtacctcttatcacagtaaccaactctaaagttttactggttcttttttatcccatcaattcttgtgccaatccatttctgtatgcaatattcactaagacattccaaagagatttctttcttttgctgagcaaatttggctgctgtaaacgtcgggctgaactttatagaaggaaagatttttcagcttacacctccaactgcaaaaatggcttcactggatcaaataagccttctcaatccaccttgaagttgtccacattgcactgtcaaggtacagctctcctagacaagactcgctacacagagtgttaactgttacatcagtaactgcattattgaattgttcttaaacctgtaaaaaaaaattacctgtaccagtaattttaacataaagggttggatttaggaaattatttatttttaggtacattaggcaagagacctctacctagtagaaagtgtagtctatgaccactgccacactaaaaactatttgtcattgttacatggcataaatactgaagttgagagtgtttagaaatttttatagaaattttgacacagtaattttgtttgatgaatcttttaaaaaactgaggaggtattttgcatatcttttttttcattttcgtaatttgtattgcattctataaaaatattagttcataacagatcagaaatttaaaataactggcctttttcctcaggtagtttgaaaaacacactctagagatgcactgtccaatccggtagccactagccacatgtggctaaattaaaattaaataaaatgagaaatgtagtttctcagttgcactagccacgtttcaagttctcaatggctacgtgtgactagtgcttaccatactggacagcacagacacagaatattttcatcaccacagaaagttctatctgttctattatagagacttttatctatgccctatctggattctacttatttataatttaaggtaaacatctgaaagcacatttcagcctatttgcttagtgaaacattaagctgtagactgtaaactcctcgtgagtaggaaccctgtctcagtgcattttgttttcctgcttcctacctcaagatcttggcaatggtacactacaaatgtgctgagttagaattactctgaagttatgaaacatataatgaaaacaattttttctagagcttatatttttatttgaatgaaataaaatgtttaaatattt

SEQ ID NO: 327114 - DNA, 1914 bp, Artificial Sequence
  derived and/or modified sequence
atgaagcagcggttcagcgccctgcagctgctgaagctgctgctgctgctgcagccccccctgccaagagcacttagagaagcactgtgcccagagccatgcaattgcgtgcccgatggtgccctgagatgcccaggacctacagcaggactcaccaggcttagcctggcatatttgcccgtgaaagtgatcccatcccaggccttccgcggactgaacgaggtgatcaagatcgagatttcccaaatagactccctggagaggattgaggccaacgccttcgacaacctcctcaatctctcagaaattctaatccagaacaccaagaacctgcgctatattgagccgggagcttttattaacttaccacgtctgaagtatttatcaatctgtaacaccggaattcggaagtttcccgacgtcacaaaagtattttcaagtgagagcaattttatcctggaaatatgtgataatttacacatcacaacaatccccggcaacgcttttcaggggatgaacaacgaatctgtgactctgaagctgtacggcaacggatttgaagaggtgcagagccacgctttcaacggaaccacactcacatctttagagctaaaagagaatgtgcatctcgagaagatgcacaacggagcctttagaggggcgactgggcctaagaccctgcaaaatttctcccattctatttcagaaaatttttccaagcagtgtgagagtaccgtgaggaaagttaataacaagacgctgtatagttcaatgctggctgaatccgaactgtctggatgggactatgaatacggattttgtctgcccaagactcccaggtgcgctcccgaacccgatgcattcaacccatgcgaggatattatgggctatgatttcctccgagtactgatttggttgataaacatcctggccattatgggcaacatgactgtactcttcgtactgctgacttccaggtataaactgactgttccacgttttcttatgtgtaacctgtcctttgccgatttttgtatgggactttatctgttacttatcgccagcgtcgattcacagaccaaaggccaatattataatcatgccatcgattggcagaccgggagtggctgttctacggcaggtttctttactgtgttcgcatccgaactgagcgtgtataccctgaccgtgatcaccctggaaaggtggcacactatcacttacgcaatccacctggatcagaagctccgccttcggcatgcgattctgataatgctgggggggtggctgttttcttcccttatcgcgatgttacctctagtgggggtttcaaactatatgaaagtcagcatttgttttccaatggatgttgagaccacactgagtcaggtctatatccttacgattcttattctcaatgtagtggcctttttcattatctgcgcttgttacataaagatctatttcgctgtgaggaaccctgagctgatggcgaccaacaaagacactaagatagccaagaagatggccattctgatctttaccgatttcacctgcatggcccccattagcttcttcgcaatctcagcggcattcaaggttcctctgataactgtgacaaacagtaaggtcctcctggtgctcttctatcctataaacagttgcgcgaacccctttttgtacgccatctttaccaagacattccagcgagacttcttcctattgctctcaaaattcgggtgttgcaagaggagagcagaactgtatcgccgaaaagattttagtgcttacacatcaaattgcaaaaacggctttaccggttcaaataaaccctcccagtccaccctcaaattgtctaccctgcactgccaagggactgccttactggacaaaacgagatacactgagtgctag

SEQ ID NO: 327115 - DNA, 1914 bp, Artificial Sequence
  derived and/or modified sequence
atgaagcaaaggttcagcgcactccaactcctcaagctgctgctgttgctgcaaccgccactgcccagagcgctccgggaggctttatgtcccgagccttgcaattgtgtgcccgacggtgcactacgttgcccgggacccacagctggcctgactcggctatcactggcgtatctccctgtaaaggttattccatcccaggcattccgcggacttaacgaggttattaagatagagatttcacagattgactccctggagcgcatcgaagctaatgcctttgacaacctgttgaacctgtctgaaatccttatacagaacacaaaaaacctccggtacatcgagcctggggcttttataaacctgccacggttgaagtatctttccatttgcaatactggcattagaaagttccccgatgtgactaaggtcttttcatctgagtccaattttatactcgaaatctgcgataatctgcatatcactacaatacccggtaacgctttccagggaatgaacaacgagagcgtaacactgaagttatacggcaatggatttgaggaggtacagtcacacgcattcaacggcacaactttaacgagtcttgaactgaaggagaacgtgcacctcgagaaaatgcacaacggtgcctttcgcggtgccaccgggcctaaaaccctccagaattttagtcacagtatttccgagaatttttccaaacagtgcgaatctactgtgcgaaaggtcaacaataagactctgtactcctcgatgctggccgagtctgaactttccggatgggactacgagtacggcttctgcctgcccaagaccccacgttgtgcgcctgagccagacgcttttaacccctgtgaagacattatgggatacgattttcttagagtccttatttggttgattaacatcctggcaataatgggcaacatgactgtgctgtttgtgctactgacgtctcgatacaaactgaccgtgcccaggtttttgatgtgtaacctgagttttgccgatttttgcatgggtctctacctgctgctaatagcaagcgtggattcccagactaagggccagtattataaccatgccattgattggcagacaggctccggttgtagcaccgctggtttctttaccgtcttcgcctcagagctgagcgtgtacactctcacagtgataactctcgaaagatggcatacgatcacctacgcaatccacctggatcagaagctgcgcctgcggcatgccatacttatcatgctgggaggttggctgttctccagtctgattgctatgctgcccctcgtgggagtgagcaattatatgaaagtcagcatttgcttccccatggacgttgagactactttgagccaagtgtacatcctcacgatcctgatacttaatgttgttgccttctttatcatatgcgcatgctacataaaaatatatttcgcagttaggaacccagaacttatggctactaataaagacacaaaaatcgcaaaaaagatggccatactaatatttaccgattttacttgcatggctccaatttcatttttcgctattagcgctgcttttaaagtgcccctcattaccgtcaccaattcaaaagtgctgttggtgctgttctatccaattaatagctgcgccaacccgtttctgtacgcaatcttcacgaaaacatttcagcgggacttttttttactgctctctaagtttgggtgttgcaagcggcgtgccgagttgtaccgcagaaaagatttctccgcctatacaagcaactgtaaaaacggcttcaccggctccaataagccgagtcagagtacccttaaactgtcaaccctgcattgtcaaggcacggccctcttggataagactagatacaccgaatgctag

SEQ ID NO: 327116 - DNA, 1914 bp, Artificial Sequence
  derived and/or modified sequence
atgaagcagagattcagcgccctgcagctgctgaagctgctgctgctgctgcagccccccctgcccagagccctgagagaggccctgtgccccgagccctgcaactgcgtgcccgacggcgccctgagatgccccggccccaccgccggcctgaccagactgagcctggcctacctgcccgtgaaggtgatccccagccaggccttcagaggcctgaacgaggtgatcaagatcgagatcagccagatcgacagcctggagagaatcgaggccaacgccttcgacaacctgctgaacctgagcgagatcctgatccagaacaccaagaacctgagatacatcgagcccggcgccttcatcaacctgcccagactgaagtacctgagcatctgcaacaccggcatcagaaagttccccgacgtgaccaaggtgttcagcagcgagagcaacttcatcctggagatctgcgacaacctgcacatcaccaccatccccggcaacgccttccagggcatgaacaacgagagcgtgaccctgaagctgtacggcaacggcttcgaggaggtgcagagccacgccttcaacggcaccaccctgaccagcctggagctgaaggagaacgtgcacctggagaagatgcacaacggcgccttcagaggcgccaccggccccaagaccctgcagaacttcagccacagcatcagcgagaacttcagcaagcagtgcgagagcaccgtgagaaaggtgaacaacaagaccctgtacagcagcatgctggccgagagcgagctgagcggctgggactacgagtacggcttctgcctgcccaagacccccagatgcgcccccgagcccgacgccttcaacccctgcgaggacatcatgggctacgacttcctgagagtgctgatctggctgatcaacatcctggccatcatgggcaacatgaccgtgctgttcgtgctgctgaccagcagatacaagctgaccgtgcccagattcctgatgtgcaacctgagcttcgccgacttctgcatgggcctgtacctgctgctgatcgccagcgtggacagccagaccaagggccagtactacaaccacgccatcgactggcagaccggcagcggctgcagcaccgccggcttcttcaccgtgttcgccagcgagctgagcgtgtacaccctgaccgtgatcaccctggagagatggcacaccatcacctacgccatccacctggaccagaagctgagactgagacacgccatcctgatcatgctgggcggctggctgttcagcagcctgatcgccatgctgcccctggtgggcgtgagcaactacatgaaggtgagcatctgcttccccatggacgtggagaccaccctgagccaggtgtacatcctgaccatcctgatcctgaacgtggtggccttcttcatcatctgcgcctgctacatcaagatctacttcgccgtgagaaaccccgagctgatggccaccaacaaggacaccaagatcgccaagaagatggccatcctgatcttcaccgacttcacctgcatggcccccatcagcttcttcgccatcagcgccgccttcaaggtgcccctgatcaccgtgaccaacagcaaggtgctgctggtgctgttctaccccatcaacagctgcgccaaccccttcctgtacgccatcttcaccaagaccttccagagagacttcttcctgctgctgagcaagttcggctgctgcaagagaagagccgagctgtacagaagaaaggacttcagcgcctacaccagcaactgcaagaacggcttcaccggcagcaacaagcccagccagagcaccctgaagctgagcaccctgcactgccagggcaccgccctgctggacaagaccagatacaccgagtgctag

SEQ ID NO: 327117 - protein, 1722 aa, Artificial Sequence
  derived and/or modified sequence
MAGAWLRWGLLLWAGLLASSAHGRLRRITYVVHPGPGLAAGALPLSGPPRSRTFNVALNARYSRSSAAAGAPSRASPGVPSERTRRTSKPGGAALQGLRPPPPPPPEPARPAVPGGQLHPNPGGHPAAAPFTKQGRQVVRSKVPQETQSGGGSRLQVHQKQQLQGVNVCGGRCCHGWSKAPGSQRCTKPSCVPPCQNGGMCLRPQLCVCKPGTKGKACETIAAQDTSSPVFGGQSPGAASSWGPPEQAAKHTSSKKADTLPRVSPVAQMTLTLKPKPSVGLPQQIHSQVTPLSSQSVVIHHGQTQEYVLKPKYFPAQKGISGEQSTEGSFPLRYVQDQVAAPFQLSNHTGRIKVVFTPSICKVTCTKGSCQNSCEKGNTTTLISENGHAADTLTATNFRVVICHLPCMNGGQCSSRDKCQCPPNFTGKLCQIPVHGASVPKLYQHSQQPGKALGTHVIHSTHTLPLTVTSQQGVKVKFPPNIVNIHVKHPPEASVQIHQVSRIDGPTGQKTKEAQPGQSQVSYQGLPVQKTQTIHSTYSHQQVIPHVYPVAAKTQLGRCFQETIGSQCGKALPGLSKQEDCCGTVGTSWGFNKCQKCPKKPSYHGYNQMMECLPGYKRVNNTFCQDINECQLQGVCPNGECLNTMGSYRCTCKIGFGPDPTFSSCVPDPPVISEEKGPCYRLVSSGRQCMHPLSVHLTKQLCCCSVGKAWGPHCEKCPLPGTAAFKEICPGGMGYTVSGVHRRRPIHHHVGKGPVFVKPKNTQPVAKSTHPPPLPAKEEPVEALTFSREHGPGVAEPEVATAPPEKEIPSLDQEKTKLEPGQPQLSPGISTIHLHPQFPGIVIEKTSPPVPVEVAPEASTSSASQVIAPTQVTEINECTVNPDICGAGHCINLPVRYTCICYEGYRFSEQQRKCVDIDECTQVQHLCSQGRCENTEGSFLCICPAGFMASEEGTNCIDVDECLRPDVCGEGHCVNTVGAFRCEYCDSGYRMTQRGRCEDIDECLNPSTCPDEQCVNSPGSYQCVPCTEGFRGWNGQCLDVDECLEPNVCANGDCSNLEGSYMCSCHKGYTRTPDHKHCRDIDECQQGNLCVNGQCKNTEGSFRCTCGQGYQLSAAKDQCEDIDECQHRHLCAHGQCRNTEGSFQCVCDQGYRASGLGDHCEDINECLEDKSVCQRGDCINTAGSYDCTCPDGFQLDDNKTCQDINECEHPGLCGPQGECLNTEGSFHCVCQQGFSISADGRTCEDIDECVNNTVCDSHGFCDNTAGSFRCLCYQGFQAPQDGQGCVDVNECELLSGVCGEAFCENVEGSFLCVCADENQEYSPMTGQCRSRTSTDLDVDVDQPKEEKKECYYNLNDASLCDNVLAPNVTKQECCCTSGVGWGDNCEIFPCPVLGTAEFTEMCPKGKGFVPAGESSSEAGGENYKDADECLLFGQEICKNGFCLNTRPGYECYCKQGTYYDPVKLQCFDMDECQDPSSCIDGQCVNTEGSYNCFCTHPMVLDASEKRCIRPAESNEQIEETDVYQDLCWEHLSDEYVCSRPLVGKQTTYTECCCLYGEAWGMQCALCPLKDSDDYAQLCNIPVTGRRQPYGRDALVDFSEQYTPEADPYFIQDRFLNSFEELQAEECGILNGCENGRCVRVQEGYTCDCFDGYHLDTAKMTCVDVNECDELNNRMSLCKNAKCINTDGSYKCLCLPGYVPSDKPNYCTPLNTALNLEKDSDLE

SEQ ID NO: 327118 - DNA, 5169 bp, Artificial Sequence
  derived and/or modified sequence
atggcaggggcctggctcagatgggggctgctcctctgggcgggccttttagcttcctctgcccacggccgcttaaggaggattacgtacgttgtgcaccccggtccggggctcgcagctggagctcttcccctgagcggaccccctaggagcagaacctttaatgtggcactgaacgcacgatattcccgtagttcagctgctgctggcgccccatctcgcgcctcccccggcgtaccctcggagcggaccagacgcacatccaaacccgggggggccgccttgcagggtctgagacctccccctcccccccctcccgagcccgcaaggcctgcggttcccggcggacagctgcaccccaacccggggggacaccctgcagccgcccccttcactaagcaagggaggcaggttgtcagatccaaggtccctcaagaaacgcagtctggaggcggtagtaggctgcaagtacaccaaaaacagcagcttcaaggtgtcaatgtgtgtggaggccggtgctgccacggatggtctaaggctcctgggtctcagcgatgtaccaagccgtcctgcgtgccaccgtgtcagaatggcggcatgtgtctacgaccgcaattatgtgtctgtaaacctgggacaaaggggaaagcatgcgagaccattgctgcacaggacacaagctctcccgtcttcggtggtcagtcccctggcgctgcaagctcgtgggggccgcccgaacaggcagccaaacacacatcctcaaagaaggccgacacattaccgcgagtgagtcctgtcgcccagatgaccctgacattgaaaccaaaaccgtctgtcggcctgccccagcagatccattcacaggtaactccacttagctcacaatctgtggtgatccatcacggccagacacaggagtatgtgctcaaacctaaatacttccctgcccagaaaggcatcagtggagaacagtcgacagaaggcagcttcccactaagatatgtgcaggaccaggtcgctgcaccctttcagttgtccaaccatactggtcgtattaaggtggtcttcactcctagcatctgcaaggtgacatgcaccaagggcagttgtcagaattcctgtgaaaaaggtaatactacaactctgatcagcgagaatgggcacgcagccgatacacttactgctaccaacttccgggtcgttatttgccacctaccttgtatgaatggcgggcagtgttccagtcgcgacaaatgccaatgccctcctaatttcacaggcaagctgtgccaaattcctgtgcatggggcatcggtccctaagctctaccagcattcgcaacaacccggaaaggctctgggtacccacgtgattcattccacacacacattgccactgactgttacatctcaacaaggagtgaaagtaaaatttccaccaaatattgttaatattcacgtcaagcaccctcctgaagccagtgtgcagatccaccaagtgagtagaatcgatgggcctacagggcagaagacaaaggaggcacagcctggacagtcccaggtgagctaccagggtcttcctgtgcaaaagacacagactatccattccacatactctcatcagcaagtgatcccacatgtttaccctgtggctgcgaagacccagctgggacgatgctttcaggaaacgattggaagccagtgtggaaaagccctgcccggcctgtccaaacaggaggattgctgtgggactgtgggaaccagctggggctttaacaaatgccagaagtgcccgaagaagccttcttaccacggatacaatcagatgatggaatgtctccctggctacaagcgtgtgaacaacacattttgtcaagatattaacgagtgccagcttcagggagtgtgtccaaatggtgaatgcctaaataccatgggctcatacagatgtacatgtaagatcgggttcggtccagacccgacgttttcctcctgtgtccctgatccacctgtaattagtgaggagaaaggaccctgctatcgacttgtctcatcaggtaggcagtgcatgcatcctttgagtgtgcacctgacaaaacagctgtgctgttgtagcgtcggaaaggcctggggaccccattgcgaaaagtgccccctccctggcaccgccgcattcaaggaaatttgccccggtgggatggggtatacagtgagtggggtccataggaggcgcccgatccatcaccatgtcggcaaggggcctgtcttcgttaaaccaaagaacacgcagcctgtggcgaagagcactcacccgccccctctgcccgccaaggaggagcccgtcgaggccctcacattctctcgcgagcacggacccggggtggcagagcccgaggtcgcaacggcaccacccgagaaagaaattccctctctcgaccaggaaaaaaccaagctcgagccaggccaaccgcagttgtctccaggtataagcactattcatctccatcctcaattccccgggatagttatcgaaaaaactagtcccccagtcccagttgaggtggccccggaagcttcaacctccagcgcttcacaggtaattgctcccacacaggtgacggagatcaatgagtgcacggtcaatcctgacatttgtggcgcagggcattgcattaatcttcccgtccggtatacatgcatttgctacgaaggatatagattctctgagcagcagcggaaatgtgtggatattgatgaatgtacccaggtgcagcacttgtgtagccagggaaggtgcgagaacactgaaggatctttcctatgcatttgcccagcgggctttatggcgtccgaggagggtaccaattgcatcgatgtagacgagtgcctgcggcccgatgtgtgtggagaaggccattgtgttaacactgttggagctttcagatgcgagtattgtgattctggctatcgaatgacgcagcgtggaagatgtgaagacatcgacgaatgtctgaatccctccacctgtcctgacgagcagtgcgttaatagccctggcagctaccagtgcgttccctgtacagagggctttcggggctggaatggccagtgcctcgacgtggacgagtgcctggagcctaatgtctgcgcaaatggcgactgttctaaccttgagggctcatatatgtgcagctgccataagggctacacccggacacccgatcataaacattgtcgggacattgacgaatgtcagcagggtaacctctgtgtcaatggtcagtgtaaaaacaccgagggcagttttagatgtacatgtgggcagggctatcagctctcagccgccaaagaccagtgtgaagatattgacgagtgtcagcataggcacctgtgcgcacatggccaatgcagaaatactgagggctcatttcagtgtgtatgcgaccagggatacagggcgagcggattgggagatcactgtgaagatataaatgagtgtcttgaggacaaaagcgtctgccagcggggcgattgcataaatacagctggtagctacgactgtacatgtcctgatgggtttcaattggacgataacaaaacatgccaagatatcaacgagtgcgaacaccccggtctgtgtggcccccagggggaatgcctgaacactgagggatcatttcattgcgtctgtcaacaggggtttagtatcagcgccgatgggcgaacctgtgaggacatcgatgaatgcgtgaataatacagtgtgcgatagccacggcttctgcgacaataccgcaggttcatttaggtgcctctgctaccagggtttccaagcgccccaagatggacaggggtgcgtggacgtcaacgaatgtgagctactctctggagtgtgtggcgaagcattttgtgaaaacgtggaaggctcgtttctgtgtgtctgtgctgacgaaaaccaggagtactctcctatgacgggccagtgcagaagcaggacatctacagatctagacgtcgacgtcgatcaacccaaggaggaaaagaaagaatgctattataacttgaacgatgctagcctgtgcgacaatgtgctcgctcctaacgttactaaacaggagtgttgttgtacttccggagtgggctggggggacaattgcgaaatcttcccatgtccagtcctgggaacagccgagtttacagaaatgtgcccaaaaggaaagggttttgtgcccgcaggagaatctagctctgaggctgggggcgagaactataaagacgcagacgagtgtcttctcttcggccaggaaatttgcaaaaacgggttttgcctgaacaccagacccggttatgaatgttactgcaagcagggtacatactacgatcccgtgaaactccagtgcttcgacatggatgaatgtcaggatccctcaagttgtatcgatggccagtgtgtgaacacagagggatcatacaactgcttctgtacccaccccatggtgctggacgctagtgaaaagcggtgcattcgacctgccgagagtaatgagcagatagaagagacggatgtgtaccaggatctctgctgggagcacttgtctgacgaatacgtgtgtagccggccccttgtcgggaagcagaccacttatactgaatgttgctgcctctacggcgaggcctgggggatgcagtgtgccctttgcccccttaaagacagtgacgactacgctcagttgtgtaacattccggttacagggcgacggcagccgtatggcagagacgctctggtggactttagcgagcaatacacccctgaagccgatccgtacttcatccaagacaggttcctcaactcttttgaggaactgcaggcagaggagtgtggaattctgaatgggtgtgagaatggcaggtgcgtgagggtgcaggagggctatacttgcgactgcttcgatggctaccacctcgatacagccaaaatgacttgcgtggacgtgaacgagtgtgacgaactaaacaaccggatgagtctgtgcaagaatgcgaaatgtattaatacagacgggtcctataaatgtctgtgtctgcccggttacgtgccctcagacaagcctaattactgcacccctttaaatacagctctgaatctggaaaaggactcagatctagagtag

SEQ ID NO: 327119 - DNA, 6153 bp, Artificial Sequence
  derived and/or modified sequence
ggtcgcgcccgctggggcccgcgatggcgggggcctggctcaggtgggggctcctgctctgggcagggctcctcgcgtcctcggcgcacggccggctgcggaggatcacctacgtggtgcacccgggccccggcctggcagccggcgccttgcccctgagcgggcccccgcgttcgcggacattcaacgtcgcgctcaacgccaggtacagccgcagctcggcggctgccggcgcccccagccgtgcctcccccggggtcccctcggagaggacccggcgcacgagcaagccgggcggcgcggccctgcaggggctcagaccgccgccgccgccgccgccggagcctgcgcgtcccgcggtccccggcgggcagctccaccccaatcccggcggccacccggcagccgccccgttcaccaaacaaggcaggcaagttgtgcgctccaaggtgccgcaggagacccagagcggcggaggctctaggctgcaggttcaccagaagcagcagctgcagggggtcaatgtctgtggagggcggtgctgtcatggctggagtaaggcccctggctcccagaggtgcaccaaacctagctgtgttccgccatgtcagaatggagggatgtgtctccggccacaactctgtgtgtgtaaaccagggaccaagggcaaagcctgtgaaacaatagctgcccaggacacctcgtcaccagtctttggagggcagagtcctggggctgcttcctcgtggggccctcctgagcaagcagcaaagcatacttcatctaagaaggcagacactctaccaagagtcagccctgtggcccagatgaccttaaccctcaagccgaagccttcagtgggactcccccagcagatacattctcaagtgactcctctttcttcccagagtgtggtgattcaccatggccagacccaggaatacgtgctcaagcccaagtactttccagcccagaaggggatttcaggagagcagtccactgaaggttctttccctttaagatatgtgcaggatcaagttgcggcaccttttcagctgagtaaccacactggccgcatcaaggtggtctttactccgagcatctgtaaagtgacctgcaccaagggcagctgtcagaacagctgtgagaaggggaacaccaccactctcattagtgagaatggtcatgctgccgacaccctgacggccacgaacttccgagtggtaatttgccatcttccatgtatgaatggtggccagtgcagttcaagggacaaatgtcagtgccctccaaatttcacaggaaaactttgtcagatcccagtccatggtgccagcgtgcctaaactttatcagcattcccagcagccaggcaaggcgttggggacgcatgtcatccattcaacacataccttgcctctgaccgtgactagccagcaaggagtcaaagtgaaatttcctcctaacatagtcaatatccatgtgaaacatcctcctgaagcttccgtccagatacatcaggtttcaagaattgatggcccaacaggccagaagacaaaagaagctcaaccaggccaatcccaagtctcgtaccaagggcttcctgtccagaagacccagaccatacattccacatactcccaccagcaggtcattcctcacgtctaccccgtggctgctaagacacagcttggccggtgcttccaggaaaccattgggtcacagtgtggcaaagcgctccctggcctttcaaagcaagaggactgctgtggaactgtgggtacctcctggggctttaacaaatgccagaaatgccccaagaaaccatcttatcatggatacaaccaaatgatggaatgcctaccgggttataagcgggttaacaacaccttttgccaagatattaatgaatgtcagctacaaggtgtatgccctaatggtgagtgtttgaataccatgggcagctatcgatgtacctgcaaaataggatttgggccggatcctaccttttcaagttgtgttcctgatccccctgtgatctcggaagagaaagggccctgttaccgacttgtcagttctggaagacagtgtatgcaccctctgtctgttcacctcaccaagcagctctgctgttgtagtgtgggcaaggcctggggcccacactgtgagaaatgtccccttccaggcacagctgcttttaaggaaatctgtcctggtggaatgggttatacggtttctggcgttcatagacgcaggccaatccatcaccatgtaggtaaaggacctgtatttgtcaagccaaagaacactcaacctgttgctaaaagtactcatcctccacctctcccagccaaggaagagccagtggaggccctgaccttctcccgggaacacgggccaggagtggcggagccagaagtggcaactgcaccccctgaaaaggaaataccttcattggatcaagagaaaaccaaacttgagcctggtcaaccccagctgtctccaggcatttccactattcatctgcatccacagtttccaggtatagtgattgaaaaaacatcacctcctgtgcctgttgaagtagctcctgaagcttctacgtctagtgccagccaagtgattgctcctactcaagtgacagaaatcaatgaatgtactgtgaaccctgatatctgtggagcaggacactgcattaacctaccagtgagatatacctgtatatgctacgagggctacaggttcagtgaacaacagaggaaatgtgtggatattgatgagtgtactcaggtccaacacctctgctcccagggccgctgtgaaaacaccgagggaagtttcttgtgcatttgcccagcaggatttatggccagtgaggagggtactaactgcatagatgttgacgaatgcctgaggccggacgtctgtggggaggggcactgtgtcaatactgtgggggccttccggtgtgaatactgtgacagcgggtaccgcatgactcagagaggccgttgtgaggatattgatgaatgtttgaatccaagcacttgtccagatgagcagtgtgtgaattctcctggatcttaccagtgcgttccctgcacagaaggattccgaggctggaatggacagtgccttgatgtggacgagtgcctggaaccaaacgtctgcgcaaatggtgattgttccaaccttgaaggctcctacatgtgttcatgccacaaaggctatacccggactccggaccacaagcactgtagagatattgatgaatgtcagcaagggaatctatgtgtaaacgggcagtgcaaaaataccgagggctccttcaggtgcacctgtggacaggggtaccagctgtcggcagctaaagaccagtgtgaagacattgatgaatgccagcaccgtcatctctgtgctcatgggcagtgcaggaacactgagggctcttttcaatgtgtgtgtgaccagggttacagagcatctgggcttggagaccactgtgaagatatcaatgaatgcttggaggacaagagtgtttgccagagaggagactgcattaatactgcagggtcctatgattgtacttgtccggatggatttcagctagatgacaataaaacatgtcaagatattaatgaatgtgaacatccagggctctgtggtccgcaaggggagtgcctaaacacagagggttctttccattgtgtctgccagcagggtttctcaatctctgcagatggccgtacgtgtgaagatattgatgaatgtgtaaacaacactgtttgtgacagtcacgggttttgtgacaatacagctggctccttccgctgcctctgttatcagggctttcaagccccacaggatgggcaagggtgtgtggatgtgaatgaatgtgaactgctcagtggggtgtgtggtgaagccttctgtgaaaacgtggaagggtccttcctgtgcgtgtgtgctgatgaaaaccaagagtacagccccatgactgggcagtgccgctcccggacctccacagatttagatgtagatgtagatcaacccaaagaagaaaagaaagaatgctactataatctcaatgacgccagtctctgtgataatgtgttggcccccaatgtcacgaaacaagaatgctgctgtacatcaggcgtgggatggggagataactgcgaaatcttcccctgcccggtcttgggaactgctgagttcactgaaatgtgtcccaaagggaaaggttttgtgcctgctggagaatcatcttctgaagctggtggtgagaactataaagatgcagatgaatgcctactttttggacaagaaatctgcaaaaatggtttctgtttgaacactcggcctgggtatgaatgctactgtaagcaagggacgtactatgatcctgtgaaactgcagtgctttgatatggatgaatgtcaagaccccagtagttgtattgatggccagtgtgttaatacagagggctcttacaactgcttctgtactcaccccatggtcctggatgcgtcagaaaaaagatgtatacgaccggctgagtcaaacgaacaaatagaagaaactgatgtctaccaagatttgtgctgggaacatctgagtgatgaatacgtgtgtagccggcctcttgtgggcaagcagacaacgtacactgagtgctgctgtctgtatggagaggcctggggcatgcagtgtgccctctgccccctgaaggattcagatgactatgctcagctgtgtaacatccccgtgacgggacgccggcagccatatggacgggacgccttggttgacttcagtgaacagtatactccagaagccgatccctacttcatccaagaccgttttctaaatagctttgaggagttacaggctgaggaatgcggcatcctcaatggatgtgaaaatggtcgctgtgtgagggtccaggaaggttacacctgcgattgctttgatgggtatcacttggatacggccaagatgacctgtgtcgatgtaaatgaatgcgatgagttgaacaaccggatgtctctctgcaagaatgccaagtgcattaacaccgatggttcctacaagtgtttgtgtctgccaggctacgtgccttctgacaagccaaactactgcactccgttgaataccgccttgaatttagagaaagacagtgacctggagtgaaacagaatctacataacctaagcccatatactctgcactgtgtaaaggaaaagggagaaatgtattatacttgagacattgcacctaccccggaaggctggaaatacagaaacagcatggaattgcaagtcctctgaagacaatgagaggatttaggatgagcccgataggtgtggcagaccaaatggacatttctctaaaaaaccagtatatatagtctgttcatatgtaaaattcaatggaagagaggtggaacagtgctgttattttaaacagaaggttgtattattatgttgttttgtttttttactattgcttgattaaatttggcatttaaatagtggtggaaatattttatataattttcattttttggttgtgcagttccttggctactgtttttcttttacttcagttttttaaaaatctcaaatgaaaaagtcttcgatacaatattgttaagctgtattataagtattgttacacagggttatgcaattcccggcctggagcatttttgaaattcaaattgtctgtcctgtggagcaggcagtgattttgttccaaaactttgtatacacatttggagaaaagtactttatattttcagtgttttgtctgattttaatgtccgttcttagccaagctgctagcaggtgttaattggatccctttccttcactgaaatggaagagtttataagcttacgttagtattgtaatatgtaaagtaagcccaacaaaaatttttaaaaatttgatgatccccaatatatctaccattgtatgttaaataaatcaccatttttgtagaaaaaattctacctgagagtaattgtcaatgagtacatgtgtataagttgtatcccactctccccacttttatcttttccagtggtcttctgttaatgtagtgtcttttacaagttaatcattaaatttgttagatcttgttatgggct

SEQ ID NO: 327120 - DNA, 5169 bp, Artificial Sequence
  derived and/or modified sequence
atggccggggcctggctgcgctggggcctgctgctgtgggccggcctgctggccagcagcgcccacggccgcctgcggcgcatcacctacgtggtgcaccctggccctggcctggccgccggggccctgcccctgagcggcccccccaggagcaggaccttcaacgtggccctgaatgcccgctacagccgcagcagcgctgctgctggggcccccagccgggccagccctggggtgcccagcgagaggaccaggaggaccagcaagccaggaggagctgccctgcagggcctgcggcccccacctcctcctcctcctgagcccgcccggcctgctgtgcctgggggccagctgcaccccaaccctgggggccaccctgctgctgcccccttcaccaagcagggccggcaggtggtgcgcagcaaggtgccccaggagacccagagcggcggcggcagccggctgcaggtgcaccagaagcagcagctgcagggcgtgaatgtgtgtggcggccgctgctgccacggctggagcaaggcccctggcagccagcgctgcaccaagcccagctgtgtgcccccctgccagaatggaggcatgtgcctgcggccccagctgtgtgtgtgcaagccaggcaccaagggcaaggcctgtgagaccatcgccgcccaggacaccagcagccctgtgtttggaggccagagccctggggccgccagctcctggggccccccagagcaggccgccaagcacaccagcagcaagaaggctgacaccctgccccgggtgtcccctgtggcccagatgaccctgaccctgaagcccaagcccagcgtgggcctgccccagcagatccacagccaggtgacccccctgagcagccagagcgtggtgatccaccacggccagacccaggagtatgtgctgaagcccaagtacttccctgcccagaagggcatctctggagagcagagcacagagggcagcttccccctgcgctacgtgcaggaccaggtggccgcccccttccagctgagcaaccacacaggccgcatcaaggtggtgttcacccccagcatctgcaaggtgacctgcaccaagggcagctgccagaacagctgtgagaagggcaacaccaccaccctcatcagtgaaaatggacatgctgctgacaccctgacagccaccaacttccgggtggtgatctgccacctgccctgcatgaatggaggccagtgcagcagccgggacaagtgccagtgcccccccaacttcaccgggaagctgtgccagatccctgtgcatggagcctctgtgcccaagctgtaccagcacagccagcagcccgggaaggccctgggcacccacgtgatccacagcacccacaccctgcccctgactgtgaccagccagcagggcgtgaaggtgaagtttcctcccaacatcgtgaacatccacgtgaagcaccccccagaggcctctgtgcagatccaccaggtgtccagaattgatggccccaccggccagaagaccaaggaggcccagcccggccagagccaggtgtcctaccagggcctgcctgtgcagaagacccagaccatccacagcacctacagccaccagcaggtgatcccccacgtgtaccctgtggccgccaagacccagctgggccgctgcttccaggagaccatcggcagccagtgtgggaaggccctgcccggcctgagcaagcaggaggactgctgcggcaccgtgggcacctcctggggcttcaacaagtgccagaagtgccccaagaagcccagctaccacggctacaaccagatgatggagtgcctgcccggctacaagagggtgaacaacaccttctgccaggacatcaatgaatgccagctgcagggcgtgtgccccaacggggagtgcctgaacaccatgggcagctaccgctgcacctgcaagattggcttcggccctgaccccaccttcagcagctgtgtgcctgacccccctgtgatcagcgaggagaagggcccctgctaccgcctggtgagcagcggccggcagtgcatgcaccccctgtctgtgcacctgaccaagcagctgtgctgctgcagcgtgggcaaggcctggggcccccactgtgagaagtgccccctgcccggcacagctgccttcaaggagatctgccctgggggcatgggctacacagtgtctggagtgcacagaagaagacccatccaccaccacgtgggcaagggccctgtgtttgtgaagcccaagaacacccagcctgtggccaagagcacccaccccccacccctgcctgccaaggaggagcctgtggaggccctgaccttcagccgggagcacggccctggggtggccgagcctgaggtggccacagcccctcctgagaaggagatccccagcctggaccaggagaagaccaagctggagcccggccagccccagctgagccctggcatcagcaccatccacctgcacccccagtttcctggcatcgtgattgagaagaccagcccccctgtgcctgtggaggtggcccctgaggccagcaccagcagcgccagccaggtgattgcccccacccaggtgacagagatcaatgaatgtactgtgaacccagacatctgtggggccggccactgcatcaacctgcctgtgcgctacacctgcatctgctatgagggctaccgcttcagcgagcagcagaggaaatgtgtggacattgatgaatgtacccaggtgcagcacctgtgcagccagggccgctgtgaaaatacagagggcagcttcctgtgcatctgcccagctggcttcatggccagcgaggagggcaccaactgcattgatgtggatgaatgtctgcggccagatgtgtgtggggagggccactgtgtgaacacagtgggcgccttccgctgtgagtactgtgacagcggctacaggatgacccagaggggccgctgtgaggacattgatgagtgcctgaaccccagcacctgcccagatgagcagtgtgtgaacagccctggcagctaccagtgtgtgccctgcacagagggcttccggggctggaatggccagtgcctggatgtggatgagtgcctggagcccaacgtgtgtgccaatggagactgcagcaacctggagggcagctacatgtgcagctgccacaagggctacaccaggaccccagaccacaagcactgccgggacattgatgagtgccagcagggcaacctgtgtgtgaatggccagtgcaagaacacagagggcagcttccgctgcacctgtggccagggctaccagctgtctgctgccaaggaccagtgtgaggacattgatgagtgccagcaccgccacctgtgtgcccacggccagtgcaggaacacagagggcagcttccagtgtgtgtgtgaccagggctaccgggccagcggcctgggggaccactgtgaggacatcaatgaatgtctggaggacaagtctgtgtgccagagaggagactgcatcaacacagctggcagctatgactgcacctgcccagatggcttccagctggatgacaacaagacctgccaggacatcaatgaatgtgagcaccctggcctgtgtggcccccagggcgagtgcctgaacacagagggcagcttccactgtgtgtgccagcagggcttcagcatctctgcagatggccgcacctgtgaggacattgatgaatgtgtgaacaacacagtgtgtgacagccacggcttctgtgacaacacagctggcagcttccgctgcctgtgctaccagggcttccaggccccccaggacggccagggctgtgtggatgtgaatgaatgtgagctgctgtctggagtgtgtggggaggccttctgtgaaaatgtggagggcagcttcctgtgtgtgtgtgctgatgagaaccaggagtacagccccatgacaggccagtgccgcagcaggaccagcacagacctggatgtggatgtggaccagcccaaggaggagaagaaggagtgctactacaacctgaatgatgccagcctgtgtgacaacgtgctggccccaaatgtgaccaagcaggagtgctgctgcaccagcggcgtgggctggggagacaactgtgagatcttcccctgccctgtgctgggcacagctgagttcacagagatgtgccccaagggcaagggctttgtgcctgctggggagagcagcagcgaggccggaggagagaactacaaggatgctgatgagtgcctgctgtttggccaggagatctgcaagaatggcttctgcctgaacaccaggcctggctatgagtgctactgcaagcagggcacctactatgaccctgtgaagctgcagtgctttgacatggatgagtgccaggaccccagcagctgcattgatggccagtgtgtgaacacagagggcagctacaactgcttctgcacccaccccatggtgctggatgccagcgagaagcgctgcatccggcctgctgagagcaatgagcagatcgaggagacagatgtgtaccaggacctgtgctgggagcacctgagtgatgaatatgtgtgcagccggcccctggtgggcaagcagaccacctacacagagtgctgctgcctgtatggagaggcctggggcatgcagtgtgccctgtgccccctgaaggacagtgatgattatgcccagctgtgcaacatccctgtgactggaagacggcagccctacggcagagatgccctggtggacttcagcgagcagtacaccccagaggccgacccctacttcatccaggaccgcttcctgaacagctttgaggagctgcaggccgaggagtgtggcatcctgaatggctgtgaaaatggccgctgtgtgcgggtgcaggagggctacacctgtgactgctttgatggctaccacctggacacagccaagatgacctgtgtggatgtgaatgaatgtgatgagctgaacaacaggatgagcctgtgcaagaatgccaagtgcatcaacacagatggcagctacaagtgcctgtgcctgcccggctacgtgcccagcgacaagcccaactactgcacccccctgaacacagccctgaacctggagaaggacagcgacctggagtag

SEQ ID NO: 327121 - DNA, 5169 bp, Artificial Sequence
  derived and/or modified sequence
atggccggcgcctggctgcggtggggcctgctgctgtgggccggccttcttgctagctcagcacacggcaggctccggcgcataacctacgttgtacatcccgggcccggactcgcagcgggcgctctgcccttgagcggtcctcctcgatcaagaacttttaatgtggccctcaacgccaggtactccagatccagtgccgccgcaggagcgcccagccgtgcctctcctggtgttccgagcgagagaacgcggagaacttctaagcccggtggagctgccctgcaggggctcagaccacctcctcccccaccacccgagccagctcggcccgcagtcccaggcggtcagttacatcccaatccgggtgggcatcctgcagccgcccctttcacaaagcagggccggcaggtggttaggagcaaggtccctcaggagacccagtcgggtggcgggtcacgcctgcaggtacaccagaaacagcaactgcagggtgtcaatgtctgtgggggcaggtgctgccatggctggtccaaggcccccggctcccagcggtgtacaaagcccagctgtgttcccccatgccagaacggaggcatgtgcctgcgcccacaactgtgcgtgtgtaaaccgggcacaaagggcaaggcgtgcgagactatcgctgctcaggatacctcctctcctgtattcggcggccagagccctggtgccgccagctcctggggcccccctgagcaggccgctaagcacaccagttctaagaaagccgacaccctgcctcgggtgtcccctgtcgcccagatgacacttacactgaaacccaagccttccgtgggactgccccaacaaattcacagccaggtcactccgctctcatcgcagagtgtggtcattcaccacggccagacacaggagtacgtgctcaagccaaagtactttccggcccaaaagggaatctccggtgaacaatccaccgaggggagtttcccactgcgctacgtgcaagaccaggtagctgcacctttccaactgagtaatcatactggacgaataaaggtggttttcacccccagtatttgtaaagtaacatgcacaaaaggctcatgccagaatagttgcgaaaagggcaatactaccaccctcatctccgaaaatggccacgcggcagacacattgaccgccactaatttccgggtcgtgatttgtcacctgccatgcatgaacggcggccagtgcagcagtcgcgataagtgccagtgcccgccaaacttcacaggaaaactgtgtcagataccagttcacggggcctcggtaccaaagctgtaccagcatagtcaacagcctgggaaggcgcttggaacccacgtgatccactctactcacacactaccacttaccgtgacgtctcaacagggagtgaaagtgaaatttccacctaatatcgttaatatccacgttaaacaccctcccgaggcctctgtgcaaattcatcaagtctcgcgcattgacggcccaaccggccagaaaaccaaagaggcacagcctggacagtctcaggtctcctatcagggcctccccgttcagaagacgcaaaccattcactcaacttactcccatcagcaggttataccacacgtgtaccctgtggcagctaaaactcagcttggcaggtgcttccaggaaactatcgggtcacagtgtgggaaggctctgccgggactgagcaaacaggaagattgctgcggaactgtggggacatcatggggattcaataaatgccagaaatgccccaaaaagccctcttatcatggttacaaccagatgatggaatgtctgcctggctacaaacgcgtgaacaatactttttgccaagatatcaacgagtgtcagctgcagggggtctgtcccaacggagaatgtttgaacacgatgggttcttaccgttgcacctgcaagatcggttttggccccgaccctactttttcctcttgtgtccccgatccccctgtgatttccgaagagaagggaccttgttatcgcttggtgtccagcggcaggcagtgcatgcacccccttagcgtgcatctgactaaacagctttgctgttgctctgttggtaaggcatggggccctcattgcgagaaatgccctctacctggaacagccgccttcaaggaaatttgtccaggtggtatgggttacacagtgtccggggtgcaccgacgcaggcctatccaccaccacgtgggcaagggccctgtcttcgtgaagcccaagaacactcagcccgtcgccaagtccacacaccctccacctctaccagccaaagaggagccagtggaagccctgacattctctagagagcatggcccaggtgtagccgaaccagaagtcgcaacagcccctccagaaaaggagatccccagcttagaccaagagaagacgaaactggagccagggcagccgcagctatccccaggcatttccaccatccacctgcatccccagtttcctggcattgtcatcgagaagacctcgccaccagttcccgtcgaagttgccccggaagcgagcacttcctctgcgagtcaggtaattgcacccacccaggttactgagattaacgagtgcactgtgaacccagatatctgtggcgccggccattgtatcaacctccccgttagatatacctgtatctgttacgaaggatatagattctcagagcaacagcggaagtgcgtagatatcgatgagtgtacgcaggtacaacacctttgctcacaggggcggtgtgagaacacagagggatcattcctgtgcatctgccccgcagggtttatggcatctgaagagggcaccaactgcatcgatgtcgatgaatgcctgcgaccagatgtgtgtggcgaggggcactgcgtaaacactgtgggggccttcagatgtgagtattgtgattcagggtaccggatgacacagcgcggcagatgtgaggatatcgatgagtgcttgaaccccagcacctgccctgacgaacagtgcgtgaactctccaggctcgtatcagtgtgtgccctgtaccgagggcttcagagggtggaacggtcagtgcttggacgtggacgagtgccttgaaccaaacgtttgcgccaacggggactgcagcaatctggagggatcttatatgtgtagctgccacaaggggtacaccagaacccctgatcacaagcactgtcgcgatatcgatgagtgccagcagggcaacctgtgtgtgaacggacagtgtaagaatacagaagggtcctttcggtgtacctgcggccaaggctaccagctcagcgctgcgaaagaccagtgtgaggatatagacgagtgtcagcatcgccacctctgcgctcacgggcaatgcagaaatacagaaggctccttccagtgtgtatgtgaccaggggtaccgagcctctggtctgggggaccattgtgaggacattaacgaatgtctcgaggacaagagcgtctgccagagaggcgattgcataaacacagcaggatcatacgactgtacatgcccggatggctttcaacttgacgacaataagacttgccaagacatcaatgaatgcgaacacccagggctttgcggtccccaaggcgagtgtcttaacactgaaggctcctttcattgcgtgtgtcagcagggtttcagcatttcggccgatgggagaacttgcgaagatatagacgaatgtgttaataacaccgtgtgtgatagccacggcttctgtgataatacagcaggctcatttcgctgcttatgttaccagggattccaggctccccaggacgggcaaggatgcgttgacgtcaatgagtgcgaactgctgagcggagtgtgcggggaggcattctgtgagaatgttgagggatcctttctgtgtgtgtgtgcggacgagaaccaggaatattcgccaatgactggtcaatgccggagccgcacctctacagatctggatgtcgacgtagaccaacccaaggaagagaaaaaggaatgctactataatctgaatgacgcctccctgtgcgacaacgtgctggcaccgaatgtcacaaaacaggagtgctgctgcacaagtggcgtcgggtggggggataattgcgaaatcttcccttgcccagtgcttggtactgccgagtttaccgagatgtgccctaagggaaagggcttcgtgcctgctggcgagtctagcagtgaagccgggggagaaaactacaaagatgctgacgagtgtctccttttcggtcaggaaatttgcaagaacggattctgtctcaatactcgccctggctacgagtgctactgcaagcaagggacctactatgatcccgttaagctgcagtgtttcgacatggatgagtgccaggatcccagtagttgcatcgacggacagtgtgtgaacaccgagggtagctacaattgtttctgcacgcatcctatggtcctggatgcatccgagaagaggtgcatccgccccgctgaatccaacgaacagatcgaggagaccgacgtttaccaggatctttgctgggagcacctgagcgatgaatacgtctgtagcaggccacttgtcggtaagcaaaccacctacactgagtgctgctgtttgtacggcgaggcttggggaatgcagtgtgcgctgtgtcctttaaaagactctgacgattacgcccagctgtgtaacattccagtgacgggtagacggcagccttatggccgcgacgctctcgttgacttttctgagcagtataccccggaagccgatccttattttattcaggataggtttttaaacagctttgaggagctgcaggctgaagaatgtggcattctcaacggctgcgaaaatggaaggtgcgttcgtgtgcaggagggttatacatgcgattgctttgatgggtatcacctcgacacagcgaagatgacatgcgttgatgtgaatgagtgcgatgaactcaataatcgcatgtctctgtgcaagaacgccaagtgcattaatacggatgggtcctataagtgcctatgcctgccaggatacgtgccctccgataagccgaattactgtacgcccctgaataccgctttaaatctagagaaagactctgatctggagtag

SEQ ID NO: 327122 - DNA, 5168 bp, Artificial Sequence
  derived and/or modified sequence
atggccggagcatggctcaggtggggacttcttttgtgggctggcctattggcttctagtgctcacgggagactgagaagaataacttacgtggtgcacccaggcccaggattagccgcaggtgccctaccactcagcggtccgccaaggagccgaacgttcaatgtagccctgaatgccaggtattcccggagctctgctgccgcaggcgcaccttccagagcttccccaggcgtaccctccgaacgcacgcgcaggacgtccaaacctggcggagcagcactgcagggcttaagacctcccccaccgccacctcccgaaccagcccgacccgctgttcccggaggccagctgcatcctaacccaggtggtcaccctgccgctgcgccttttacaaagcaggggagacaagtcgtccgcagcaaagtgccgcaggagacccaaagcggtggcggaagccgcttacaggtacaccagaaacagcagctccagggagtcaacgtctgtggtggcagatgctgtcacggatggagtaaggctcccggttcacagcgctgtacaaagccatcttgcgtgcctccttgtcaaaatggtgggatgtgtctacgacctcagttgtgtgtatgcaagcccggaacaaaaggcaaagcttgtgagactatcgctgcccaggacacttcctcccccgtctttggagggcagagtcctggagcagcaagctcctggggcccacccgagcaggcggctaagcacacctccagcaagaaagctgacactttgcccagagtgagccccgtcgcacagatgaccttaacactgaagccaaagccatcagtgggactcccacagcagatccacagtcaggtcacacccctctccagtcagagcgtggtaatccatcacggacagacccaggagtatgtcctgaaaccaaagtattttcccgcacagaagggcatctccggtgagcagtccactgaaggctcctttccgttgcggtacgtgcaagaccaggtggccgctcctttccagctttctaaccacaccggacgcatcaaagtggtgtttacaccttctatctgtaaggttacgtgcaccaaaggtagctgccaaaactcatgcgagaagggaaacacaaccacactgatttccgaaaacggacatgctgcagacaccttaacagctacaaacttccgcgtcgtgatctgccacctgccttgcatgaatggaggacaatgttcaagccgcgacaaatgtcagtgcccaccgaatttcaccggtaagttgtgtcagattcccgtgcatggagcttcagttcctaaactgtaccagcactctcagcagccaggaaaagcactaggaacacacgtgatccacagtacccatactcttcctctgaccgtgacgtcacaacagggtgttaaggtaaagtttcctcccaacatagtaaacattcacgtgaaacacccccctgaggcctcagtccaaatccatcaggtgtctcggatcgatggaccaaccgggcagaagactaaggaggctcaacccggacaaagtcaagtgtcctatcagggacttcccgtgcagaagacacaaacgattcattcaacctatagccaccaacaggtcatccctcatgtctatccagtcgctgctaaaacccaactaggccgttgcttccaagagactattgggtcccagtgcggtaaggctttaccaggtctgtccaaacaggaggactgctgcggcactgtggggacaagttggggcttcaacaaatgccagaaatgccctaagaaaccttcttatcacggatacaaccagatgatggagtgtctgccaggatataagagggtgaataacacattctgtcaagatattaacgaatgtcagcttcagggcgtgtgccctaacggggaatgccttaacacaatgggatcctatcggtgtacttgcaaaattggattcggtcctgaccccaccttttcctcgtgtgtgcccgacccaccggtgatcagtgaggagaaaggcccttgctatcgtctggtttcctcaggtaggcaatgcatgcatccgttgagcgtacacttgactaagcagttatgctgctgctccgtggggaaagcgtggggaccgcactgtgagaagtgcccgcttcccggtaccgctgcatttaaagaaatctgcccagggggaatgggatatactgtcagtggtgttcaccgaaggcgccctatacaccaccacgtgggcaaaggcccagtgtttgtgaagcccaaaaatactcagccagttgctaagtctacccaccccccaccgctgcccgcaaaggaagagccagtggaagcactcaccttcagtcgagagcatggccctggtgtggccgagcctgaagttgcaaccgctccacccgaaaaagaaatcccaagtttggatcaggagaaaacgaaactcgagcctggccagccgcagttgtcaccgggtatcagcaccatccacttgcacccacaattcccaggcatagtgatcgagaaaacatccccccctgtccccgtcgaggttgcacctgaggccagtacaagctctgcaagccaggttattgctcccacacaggtaactgaaattaacgagtgcactgtgaatcctgacatctgcggtgctgggcattgtatcaatttgcccgtcagatacacatgtatctgctatgaaggatatcgtttctcagaacagcagaggaagtgcgtagacatcgacgagtgcacacaagttcagcacctgtgtagccaggggcgttgtgaaaatacagagggatccttcctgtgcatttgtcccgctggctttatggccagtgaggaggggaccaactgtattgatgtggatgagtgtcttcgtcccgacgtctgcggagagggacattgtgtgaataccgtgggagcattcaggtgcgagtactgcgattcaggctaccggatgacccagagaggcaggtgtgaggatatagacgaatgcctaaacccatccacttgcccagatgagcaatgcgtcaacagtcccggtagctatcaatgtgtgccatgtacagagggctttagaggttggaatggccagtgcctggacgtcgacgagtgcctggagccaaacgtatgcgcaaacggcgactgctcgaatctggagggctcttatatgtgctcatgccacaaaggttataccaggacgcctgaccataagcattgtcgggatatcgacgaatgtcaacaaggcaacctgtgcgtcaatggacagtgcaaaaacacagagggctcttttaggtgtacctgtggacaaggttatcaactttccgcggctaaggatcagtgtgaggacatcgacgagtgccaacaccgtcatctgtgcgcccacgggcagtgccgcaacacagagggctcttttcaatgtgtctgtgaccagggctatcgcgcttctggtcttggggaccactgtgaggacatcaacgagtgtttagaggataagtcagtttgccaaagaggcgattgcataaacaccgccggtagctacgactgcacttgcccagacggattccaacttgacgacaacaagacttgccaggatataaatgagtgtgagcaccccggtctctgcggccctcagggcgaatgcctcaacaccgaaggctcatttcactgtgtgtgccagcagggtttttccatcagcgctgacgggaggacatgtgaggatatagacgagtgcgtcaacaacaccgtgtgtgactcccacgggttctgtgacaatactgctggcagcttcagatgcctgtgttatcaggggtttcaggcgccacaggatggacaaggctgtgtggatgtgaacgagtgcgaactgctatctggcgtgtgcggggaagcattttgcgagaatgtggaaggatctttcttgtgtgtgtgtgctgacgaaaaccaggagtactctccaatgacaggacagtgccgtagcagaacatccaccgatttggatgtggacgtggaccagcctaaagaggaaaagaaagagtgttactataacctgaatgatgccagtctatgtgacaatgttctggctcctaatgtgacgaagcaagaatgctgctgtacaagtggcgtgggttggggcgacaattgcgaaatctttccttgccctgtcctgggaaccgccgagttcactgagatgtgccccaaaggcaaaggatttgttccagcgggagagtcatcatccgaagccggaggagaaaattataaggacgccgatgaatgtctcttattcgggcaggagatctgcaaaaatggcttctgccttaatacgcgccctgggtatgagtgctactgcaagcaaggcacgtactacgatcccgtgaaactgcagtgttttgacatggatgagtgtcaggatcctagctcctgtattgacggtcagtgcgttaacactgaaggaagttacaactgcttttgcacacatcctatggttctggatgcttctgaaaagcggtgcatccgccctgcagaatctaatgaacaaattgaggagacagatgtgtaccaggatctgtgttgggaacacctctccgacgaatatgtatgtagccgaccactggtaggtaagcagacaacttatacggagtgctgttgcctgtacggcgaagcctgggggatgcagtgtgcattatgccccctcaaggacagtgatgattatgctcagctgtgcaacatcccggtaacgggccgacggcaaccgtatggccgagacgcattggtggatttctcagaacaatacacgcctgaagcggacccttactttattcaagataggttcttaaattcatttgaagaactgcaggctgaggagtgcggtattctcaacggctgtgagaacggccgatgcgtacgcgtgcaggagggctatacatgcgactgtttcgatggataccatttagataccgcaaagatgacatgcgtggatgtgaatgagtgtgatgagctgaataatcgtatgtcattgtgcaagaatgcaaaatgtattaataccgatgggtcttataagtgtctgtgcttgcccggatatgttccatcggataagcccaattactgtacccccctgaacactgctctgaacctcgaaaaggacagcgacctggagta

SEQ ID NO: 327123 - DNA, 5169 bp, Artificial Sequence
  derived and/or modified sequence
atggccggcgcctggctgagatggggcctgctgctgtgggccggcctgctggccagcagcgcccacggcagactgagaagaatcacctacgtggtgcaccccggccccggcctggccgccggcgccctgcccctgagcggcccccccagaagcagaaccttcaacgtggccctgaacgccagatacagcagaagcagcgccgccgccggcgcccccagcagagccagccccggcgtgcccagcgagagaaccagaagaaccagcaagcccggcggcgccgccctgcagggcctgagacccccccccccccccccccccgagcccgccagacccgccgtgcccggcggccagctgcaccccaaccccggcggccaccccgccgccgcccccttcaccaagcagggcagacaggtggtgagaagcaaggtgccccaggagacccagagcggcggcggcagcagactgcaggtgcaccagaagcagcagctgcagggcgtgaacgtgtgcggcggcagatgctgccacggctggagcaaggcccccggcagccagagatgcaccaagcccagctgcgtgcccccctgccagaacggcggcatgtgcctgagaccccagctgtgcgtgtgcaagcccggcaccaagggcaaggcctgcgagaccatcgccgcccaggacaccagcagccccgtgttcggcggccagagccccggcgccgccagcagctggggcccccccgagcaggccgccaagcacaccagcagcaagaaggccgacaccctgcccagagtgagccccgtggcccagatgaccctgaccctgaagcccaagcccagcgtgggcctgccccagcagatccacagccaggtgacccccctgagcagccagagcgtggtgatccaccacggccagacccaggagtacgtgctgaagcccaagtacttccccgcccagaagggcatcagcggcgagcagagcaccgagggcagcttccccctgagatacgtgcaggaccaggtggccgcccccttccagctgagcaaccacaccggcagaatcaaggtggtgttcacccccagcatctgcaaggtgacctgcaccaagggcagctgccagaacagctgcgagaagggcaacaccaccaccctgatcagcgagaacggccacgccgccgacaccctgaccgccaccaacttcagagtggtgatctgccacctgccctgcatgaacggcggccagtgcagcagcagagacaagtgccagtgcccccccaacttcaccggcaagctgtgccagatccccgtgcacggcgccagcgtgcccaagctgtaccagcacagccagcagcccggcaaggccctgggcacccacgtgatccacagcacccacaccctgcccctgaccgtgaccagccagcagggcgtgaaggtgaagttcccccccaacatcgtgaacatccacgtgaagcacccccccgaggccagcgtgcagatccaccaggtgagcagaatcgacggccccaccggccagaagaccaaggaggcccagcccggccagagccaggtgagctaccagggcctgcccgtgcagaagacccagaccatccacagcacctacagccaccagcaggtgatcccccacgtgtaccccgtggccgccaagacccagctgggcagatgcttccaggagaccatcggcagccagtgcggcaaggccctgcccggcctgagcaagcaggaggactgctgcggcaccgtgggcaccagctggggcttcaacaagtgccagaagtgccccaagaagcccagctaccacggctacaaccagatgatggagtgcctgcccggctacaagagagtgaacaacaccttctgccaggacatcaacgagtgccagctgcagggcgtgtgccccaacggcgagtgcctgaacaccatgggcagctacagatgcacctgcaagatcggcttcggccccgaccccaccttcagcagctgcgtgcccgacccccccgtgatcagcgaggagaagggcccctgctacagactggtgagcagcggcagacagtgcatgcaccccctgagcgtgcacctgaccaagcagctgtgctgctgcagcgtgggcaaggcctggggcccccactgcgagaagtgccccctgcccggcaccgccgccttcaaggagatctgccccggcggcatgggctacaccgtgagcggcgtgcacagaagaagacccatccaccaccacgtgggcaagggccccgtgttcgtgaagcccaagaacacccagcccgtggccaagagcacccaccccccccccctgcccgccaaggaggagcccgtggaggccctgaccttcagcagagagcacggccccggcgtggccgagcccgaggtggccaccgccccccccgagaaggagatccccagcctggaccaggagaagaccaagctggagcccggccagccccagctgagccccggcatcagcaccatccacctgcacccccagttccccggcatcgtgatcgagaagaccagcccccccgtgcccgtggaggtggcccccgaggccagcaccagcagcgccagccaggtgatcgcccccacccaggtgaccgagatcaacgagtgcaccgtgaaccccgacatctgcggcgccggccactgcatcaacctgcccgtgagatacacctgcatctgctacgagggctacagattcagcgagcagcagagaaagtgcgtggacatcgacgagtgcacccaggtgcagcacctgtgcagccagggcagatgcgagaacaccgagggcagcttcctgtgcatctgccccgccggcttcatggccagcgaggagggcaccaactgcatcgacgtggacgagtgcctgagacccgacgtgtgcggcgagggccactgcgtgaacaccgtgggcgccttcagatgcgagtactgcgacagcggctacagaatgacccagagaggcagatgcgaggacatcgacgagtgcctgaaccccagcacctgccccgacgagcagtgcgtgaacagccccggcagctaccagtgcgtgccctgcaccgagggcttcagaggctggaacggccagtgcctggacgtggacgagtgcctggagcccaacgtgtgcgccaacggcgactgcagcaacctggagggcagctacatgtgcagctgccacaagggctacaccagaacccccgaccacaagcactgcagagacatcgacgagtgccagcagggcaacctgtgcgtgaacggccagtgcaagaacaccgagggcagcttcagatgcacctgcggccagggctaccagctgagcgccgccaaggaccagtgcgaggacatcgacgagtgccagcacagacacctgtgcgcccacggccagtgcagaaacaccgagggcagcttccagtgcgtgtgcgaccagggctacagagccagcggcctgggcgaccactgcgaggacatcaacgagtgcctggaggacaagagcgtgtgccagagaggcgactgcatcaacaccgccggcagctacgactgcacctgccccgacggcttccagctggacgacaacaagacctgccaggacatcaacgagtgcgagcaccccggcctgtgcggcccccagggcgagtgcctgaacaccgagggcagcttccactgcgtgtgccagcagggcttcagcatcagcgccgacggcagaacctgcgaggacatcgacgagtgcgtgaacaacaccgtgtgcgacagccacggcttctgcgacaacaccgccggcagcttcagatgcctgtgctaccagggcttccaggccccccaggacggccagggctgcgtggacgtgaacgagtgcgagctgctgagcggcgtgtgcggcgaggccttctgcgagaacgtggagggcagcttcctgtgcgtgtgcgccgacgagaaccaggagtacagccccatgaccggccagtgcagaagcagaaccagcaccgacctggacgtggacgtggaccagcccaaggaggagaagaaggagtgctactacaacctgaacgacgccagcctgtgcgacaacgtgctggcccccaacgtgaccaagcaggagtgctgctgcaccagcggcgtgggctggggcgacaactgcgagatcttcccctgccccgtgctgggcaccgccgagttcaccgagatgtgccccaagggcaagggcttcgtgcccgccggcgagagcagcagcgaggccggcggcgagaactacaaggacgccgacgagtgcctgctgttcggccaggagatctgcaagaacggcttctgcctgaacaccagacccggctacgagtgctactgcaagcagggcacctactacgaccccgtgaagctgcagtgcttcgacatggacgagtgccaggaccccagcagctgcatcgacggccagtgcgtgaacaccgagggcagctacaactgcttctgcacccaccccatggtgctggacgccagcgagaagagatgcatcagacccgccgagagcaacgagcagatcgaggagaccgacgtgtaccaggacctgtgctgggagcacctgagcgacgagtacgtgtgcagcagacccctggtgggcaagcagaccacctacaccgagtgctgctgcctgtacggcgaggcctggggcatgcagtgcgccctgtgccccctgaaggacagcgacgactacgcccagctgtgcaacatccccgtgaccggcagaagacagccctacggcagagacgccctggtggacttcagcgagcagtacacccccgaggccgacccctacttcatccaggacagattcctgaacagcttcgaggagctgcaggccgaggagtgcggcatcctgaacggctgcgagaacggcagatgcgtgagagtgcaggagggctacacctgcgactgcttcgacggctaccacctggacaccgccaagatgacctgcgtggacgtgaacgagtgcgacgagctgaacaacagaatgagcctgtgcaagaacgccaagtgcatcaacaccgacggcagctacaagtgcctgtgcctgcccggctacgtgcccagcgacaagcccaactactgcacccccctgaacaccgccctgaacctggagaaggacagcgacctggagtag

SEQ ID NO: 327124 - protein, 619 aa, Artificial Sequence
  derived and/or modified sequence
MCSCHKGYTRTPDHKHCRDIDECQQGNLCVNGQCKNTEGSFRCTCGQGYQLSAAKDQCEDIDECQHRHLCAHGQCRNTEGSFQCVCDQGYRASGLGDHCEDINECLEDKSVCQRGDCINTAGSYDCTCPDGFQLDDNKTCQDINECEHPGLCGPQGECLNTEGSFHCVCQQGFSISADGRTCEDVNECELLSGVCGEAFCENVEGSFLCVCADENQEYSPMTGQCRSRTSTDLDVDVDQPKEEKKECYYNLNDASLCDNVLAPNVTKQECCCTSGVGWGDNCEIFPCPVLGTAEFTEMCPKGKGFVPAGESSSEAGGENYKDADECLLFGQEICKNGFCLNTRPGYECYCKQGTYYDPVKLQCFDMDECQDPSSCIDGQCVNTEGSYNCFCTHPMVLDASEKRCIRPAESNEQIEETDVYQDLCWEHLSDEYVCSRPLVGKQTTYTECCCLYGEAWGMQCALCPLKDSDDYAQLCNIPVTGRRQPYGRDALVDFSEQYTPEADPYFIQDRFLNSFEELQAEECGILNGCENGRCVRVQEGYTCDCFDGYHLDTAKMTCVDVNECDELNNRMSLCKNAKCINTDGSYKCLCLPGYVPSDKPNYCTPLNTALNLEKDSDLE

SEQ ID NO: 327125 - DNA, 1026 bp, Artificial Sequence
  derived and/or modified sequence
atggccgtgcagcccaaggagaccctgcagctggagagcgccgccgaggtgggcttcgtgagattcttccagggcatgcccgagaagcccaccaccaccgtgagactgttcgacagaggcgacttctacaccgcccacggcgaggacgccctgctggccgccagagaggtgttcaagacccagggcgtgatcaagtacatgggccccgccggcgccaagaacctgcagagcgtggtgctgagcaagatgaacttcgagagcttcgtgaaggacctgctgctggtgagacagtacagagtggaggtgtacaagaacagagccggcaacaaggccagcaaggagaacgactggtacctggcctacaaggccagccccggcaacctgagccagttcgaggacatcctgttcggcaacaacgacatgagcgccagcatcggcgtggtgggcgtgaagatgagcgccgtggacggccagagacaggtgggcgtgggctacgtggacagcatccagagaaagctgggcctgtgcgagttccccgacaacgaccagttcagcaacctggaggccctgctgatccagatcggccccaaggagtgcgtgctgcccggcggcgagaccgccggcgacatgggcaagctgagacagatcatccagagaggcggcatcctgatcaccgagagaaagaaggccgacttcagcaccaaggacatctaccaggacctgaacagactgctgaagggcaagaagggcgagcagatgaacagcgccgtgctgcccgagatggagaaccaggtggccgtgagcagcctgagcgccgtgatcaagttcctggagctgctgagcgacgacagcaacttcggccagttcgagctgaccaccttcgacttcagccagtacatgaagctggacatcgccgccgtgagagccctgaacctgttccagggcagcgtggaggacaccaccggcagccagagcctggccgccctgctgaacaagtgcaagaccccccagggccagacctgctag

SEQ ID NO: 327126 - DNA, 2433 bp, Artificial Sequence
  derived and/or modified sequence
atggccgtgcagcccaaggagaccctgcagctggagagcgccgccgaggtgggcttcgtgagattcttccagggcatgcccgagaagcccaccaccaccgtgagactgttcgacagaggcgacttctacaccgcccacggcgaggacgccctgctggccgccagagaggtgttcaagacccagggcgtgatcaagtacatgggccccgccggcgccaagaacctgcagagcgtggtgctgagcaagatgaacttcgagagcttcgtgaaggacctgctgctggtgagacagtacagagtggaggtgtacaagaacagagccggcaacaaggccagcaaggagaacgactggtacctggcctacaaggccagccccggcaacctgagccagttcgaggacatcctgttcggcaacaacgacatgagcgccagcatcggcgtggtgggcgtgaagatgagcgccgtggacggccagagacaggtgggcgtgggctacgtggacagcatccagagaaagctgggcctgtgcgagttccccgacaacgaccagttcagcaacctggaggccctgctgatccagatcggccccaaggagtgcgtgctgcccggcggcgagaccgccggcgacatgggcaagctgagacagatcatccagagaggcggcatcctgatcaccgagagaaagaaggccgacttcagcaccaaggacatctaccaggacctgaacagactgctgaagggcaagaagggcgagcagatgaacagcgccgtgctgcccgagatggagaaccaggtggccgtgagcagcctgagcgccgtgatcaagttcctggagctgctgagcgacgacagcaacttcggccagttcgagctgaccaccttcgacttcagccagtacatgaagctggacatcgccgccgtgagagccctgaacctgttccagggcagcgtggaggacaccaccggcagccagagcctggccgccctgctgaacaagtgcaagaccccccagggccagagactggtgaaccagtggatcaagcagcccctgatggacaagaacagaatcgaggagagactgaacctggtggaggccttcgtggaggacgccgagctgagacagaccctgcaggaggacctgctgagaagattccccgacctgaacagactggccaagaagttccagagacaggccgccaacctgcaggactgctacagactgtaccagggcatcaaccagctgcccaacgtgatccaggccctggagaagcacgagggcaagcaccagaagctgctgctggccgtgttcgtgacccccctgaccgacctgagaagcgacttcagcaagttccaggagatgatcgagaccaccctggacatggaccaggtggagaaccacgagttcctggtgaagcccagcttcgaccccaacctgagcgagctgagagagatcatgaacgacctggagaagaagatgcagagcaccctgatcagcgccgccagagacctgggcctggaccccggcaagcagatcaagctggacagcagcgcccagttcggctactacttcagagtgacctgcaaggaggagaaggtgctgagaaacaacaagaacttcagcaccgtggacatccagaagaacggcgtgaagttcaccaacagcaagctgaccagcctgaacgaggagtacaccaagaacaagaccgagtacgaggaggcccaggacgccatcgtgaaggagatcgtgaacatcagcagcggctacgtggagcccatgcagaccctgaacgacgtgctggcccagctggacgccgtggtgagcttcgcccacgtgagcaacggcgcccccgtgccctacgtgagacccgccatcctggagaagggccagggcagaatcatcctgaaggccagcagacacgcctgcgtggaggtgcaggacgagatcgccttcatccccaacgacgtgtacttcgagaaggacaagcagatgttccacatcatcaccggccccaacatgggcggcaagagcacctacatcagacagaccggcgtgatcgtgctgatggcccagatcggctgcttcgtgccctgcgagagcgccgaggtgagcatcgtggactgcatcctggccagagtgggcgccggcgacagccagctgaagggcgtgagcaccttcatggccgagatgctggagaccgccagcatcctgagaagcgccaccaaggacagcctgatcatcatcgacgagctgggcagaggcaccagcacctacgacggcttcggcctggcctgggccatcagcgagtacatcgccaccaagatcggcgccttctgcatgttcgccaccatcttcatgaacctgctgccctggcccatcagataccagctgctgatcatctacatgagccagcacagccccctgaagagaccctag

SEQ ID NO: 327127 - DNA, 1602 bp, Artificial Sequence
  derived and/or modified sequence
atggccgtgcagcccaaggagaccctgcagctggagagcgccgccgaggtgggcttcgtgagattcttccagggcatgcccgagaagcccaccaccaccgtgagactgttcgacagaggcgacttctacaccgcccacggcgaggacgccctgctggccgccagagaggtgttcaagacccagggcgtgatcaagtacatgggccccgccggcgccaagaacctgcagagcgtggtgctgagcaagatgaacttcgagagcttcgtgaaggacctgctgctggtgagacagtacagagtggaggtgtacaagaacagagccggcaacaaggccagcaaggagaacgactggtacctggcctacaaggccagccccggcaacctgagccagttcgaggacatcctgttcggcaacaacgacatgagcgccagcatcggcgtggtgggcgtgaagatgagcgccgtggacggccagagacaggtgggcgtgggctacgtggacagcatccagagaaagctgggcctgtgcgagttccccgacaacgaccagttcagcaacctggaggccctgctgatccagatcggccccaaggagtgcgtgctgcccggcggcgagaccgccggcgacatgggcaagctgagacagatcatccagagaggcggcatcctgatcaccgagagaaagaaggccgacttcagcaccaaggacatctaccaggacctgaacagactgctgaagggcaagaagggcgagcagatgaacagcgccgtgctgcccgagatggagaaccaggtggccgtgagcagcctgagcgccgtgatcaagttcctggagctgctgagcgacgacagcaacttcggccagttcgagctgaccaccttcgacttcagccagtacatgaagctggacatcgccgccgtgagagccctgaacctgttccagggcagcgtggaggacaccaccggcagccagagcctggccgccctgctgaacaagtgcaagaccccccagggccagagactggtgaaccagtggatcaagcagcccctgatggacaagaacagaatcgaggagagactgaacctggtggaggccttcgtggaggacgccgagctgagacagaccctgcaggaggacctgctgagaagattccccgacctgaacagactggccaagaagttccagagacaggccgccaacctgcaggactgctacagactgtaccagggcatcaaccagctgcccaacgtgatccaggccctggagaagcacgagggcaagcaccagaagctgctgctggccgtgttcgtgacccccctgaccgacctgagaagcgacttcagcaagttccaggagatgatcgagaccaccctggacatggaccaggtggagaaccacgagttcctggtgaagcccagcttcgaccccaacctgagcgagctgagagagatcatgaacgacctggagaagaagatgcagagcaccctgatcagcgccgccagagacctgggcctggaccccggcaagcagatcaagctggacagcagcgcccagttcggctactacttcagagtgacctgcaaggagaagagccccagctag

SEQ ID NO: 327128 - DNA, 1233 bp, Artificial Sequence
  derived and/or modified sequence
atggccgtgcagcccaaggagaccctgcagctggagagcgccgccgaggtgggcttcgtgagattcttccagggcatgcccgagaagcccaccaccaccgtgagactgttcgacagaggcgacttctacaccgcccacggcgaggacgccctgctggccgccagagaggtgttcaagacccagggcgtgatcaagtacatgggccccgccggcgccaagaacctgcagagcgtggtgctgagcaagatgaacttcgagagcttcgtgaaggacctgctgctggtgagacagtacagagtggaggtgtacaagaacagagccggcaacaaggccagcaaggagaacgactggtacctggcctacaaggccagccccggcaacctgagccagttcgaggacatcctgttcggcaacaacgacatgagcgccagcatcggcgtggtgggcgtgaagatgagcgccgtggacggccagagacaggtgggcgtgggctacgtggacagcatccagagaaagctgggcctgtgcgagttccccgacaacgaccagttcagcaacctggaggccctgctgatccagatcggccccaaggagtgcgtgctgcccggcggcgagaccgccggcgacatgggcaagctgagacagatcatccagagaggcggcatcctgatcaccgagagaaagaaggccgacttcagcaccaaggacatctaccaggacctgaacagactgctgaagggcaagaagggcgagcagatgaacagcgccgtgctgcccgagatggagaaccaggtggccgtgagcagcctgagcgccgtgatcaagttcctggagctgctgagcgacgacagcaacttcggccagttcgagctgaccaccttcgacttcagccagtacatgaagctggacatcgccgccgtgagagccctgaacctgttccagggcagcgtggaggacaccaccggcagccagagcctggccgccctgctgaacaagtgcaagaccccccagggccagagactggtgaaccagtggatcaagcagcccctgatggacaagaacagaatcgaggagagactgaacctggtggaggccttcgtggaggacgccgagctgagacagaccctgcaggaggactacttcgtggacagccagatcctgaccgacctgcccagaagcttcaaggacaagcagcagacctacaagatcgtgaccgacagcatcagagtgtag

SEQ ID NO: 327129 - DNA, 1458 bp, Artificial Sequence
  derived and/or modified sequence
atggccgtgcagcccaaggagaccctgcagctggagagcgccgccgaggtgggcttcgtgagattcttccagggcatgcccgagaagcccaccaccaccgtgagactgttcgacagaggcgacttctacaccgcccacggcgaggacgccctgctggccgccagagaggtgttcaagacccagggcgtgatcaagtacatgggccccgccggcgccaagaacctgcagagcgtggtgctgagcaagatgaacttcgagagcttcgtgaaggacctgctgctggtgagacagtacagagtggaggtgtacaagaacagagccggcaacaaggccagcaaggagaacgactggtacctggcctacaaggccagccccggcaacctgagccagttcgaggacatcctgttcggcaacaacgacatgagcgccagcatcggcgtggtgggcgtgaagatgagcgccgtggacggccagagacaggtgggcgtgggctacgtggacagcatccagagaaagctgggcctgtgcgagttccccgacaacgaccagttcagcaacctggaggccctgctgatccagatcggccccaaggagtgcgtgctgcccggcggcgagaccgccggcgacatgggcaagctgagacagatcatccagagaggcggcatcctgatcaccgagagaaagaaggccgacttcagcaccaaggacatctaccaggacctgaacagactgctgaagggcaagaagggcgagcagatgaacagcgccgtgctgcccgagatggagaaccaggtggccgtgagcagcctgagcgccgtgatcaagttcctggagctgctgagcgacgacagcaacttcggccagttcgagctgaccaccttcgacttcagccagtacatgaagctggacatcgccgccgtgagagccctgaacctgttccagggcagcgtggaggacaccaccggcagccagagcctggccgccctgctgaacaagtgcaagaccccccagggccagagactggtgaaccagtggatcaagcagcccctgatggacaagaacagaatcgaggagagactgaacctggtggaggccttcgtggaggacgccgagctgagacagaccctgcaggaggacctgctgagaagattccccgacctgaacagactggccaagaagttccagagacaggccgccaacctgcaggactgctacagactgtaccagggcatcaaccagctgcccaacgtgatccaggccctggagaagcacgagggcaagcaccagaagctgctgctggccgtgttcgtgacccccctgaccgacctgagaagcgacttcagcaagttccaggagatgatcgagaccaccctggacatggaccaggtggagaaccacgagttcctggtgaagcccagcttcgaccccaacctgagcgagctgagaaacaacgagtag

SEQ ID NO: 327130 - DNA, 1026 bp, Artificial Sequence
  derived and/or modified sequence
atggccgtgcagcccaaagagactttacaactcgaaagcgccgctgaagtaggattcgtcagattcttccagggaatgccagagaagcccaccaccaccgtccgcctgttcgaccgcggagacttttataccgcgcacggggaagacgcattgctggctgcccgagaagtttttaagacccaaggtgtgataaaatatatggggccagccggcgctaaaaatttacagtctgtggttttaagcaaaatgaacttcgaatcattcgtaaaggaccttcttttagttcgacagtatagggtggaagtgtataaaaacagggccggtaataaggcttctaaagagaatgattggtatttggcttacaaagcatccccgggcaacctgtcccagttcgaggatattctgttcggcaataatgatatgtctgcctccattggcgtggtgggcgtgaagatgtctgcagtagacggacaaagacaagtaggagtcggctatgttgattctatccaacgcaagctgggactgtgcgagtttcctgacaatgatcagtttagcaacttagaagccctattgattcagatcggtccaaaggagtgcgtcctaccagggggggaaacggccggagacatgggtaaactaaggcaaataattcaacgtggcgggattttgatcacagagcggaagaaggcagacttttcaacaaaagacatttatcaggacctgaaccggctacttaagggaaagaagggtgaacaaatgaactcggccgtcttgccggaaatggaaaatcaggtcgccgtcagtagcctgtccgccgtcatcaagttcttagagctgctgtcagatgacagcaacttcggccagttcgagctgactacctttgatttttctcagtatatgaagctcgacatcgcagctgtgcgcgctctaaatctgttccagggttcagtggaggataccaccgggagccagtccctggccgcactcctcaacaagtgtaaaacaccccagggccagacttgttag

SEQ ID NO: 327131 - DNA, 2433 bp, Artificial Sequence
  derived and/or modified sequence
atggccgtgcagccaaaggagacgctgcagctcgagagcgcggccgaggttggctttgtgcgattttttcaggggatgccagaaaaacccaccacaaccgtgaggctgtttgaccggggggacttttatacggctcacggtgaagacgccctgctggccgctagagaagtcttcaagacgcagggtgtgatcaagtatatgggtcctgcaggtgctaagaaccttcagagcgtggtactttccaagatgaacttcgagtcattcgtcaaagacctgctcttggtgcggcagtaccgggtcgaggtgtacaaaaaccgtgccgggaataaggcttcaaaggagaacgactggtatctggcatacaaggccagtcctggcaatttgtctcagtttgaagatatcctttttggaaacaatgatatgtctgcgtccattggagtggtaggagttaagatgtccgctgtcgatgggcagcgacaagtgggagtcggctacgtggactcaatccaacggaaactgggcctctgcgaatttcccgataatgaccagttttccaatttagaggctctgctcattcagattgggcccaaagaatgtgttttacctggcggcgaaactgctggtgacatgggcaagctacgtcagataatccagcgtggtggaatcctgatcacagagcgtaagaaagcggacttcagcactaaggacatatatcaagacctcaaccggctgctgaaaggcaagaaaggtgagcagatgaattctgctgtgctgcctgagatggagaaccaggtggcggttagttccttgagcgccgtgattaaattcctggaactgttgagcgacgatagcaactttgggcagttcgaactgacgacattcgatttctcacagtatatgaaactggacatcgccgcagtcagggcattgaatttgtttcagggatctgtggaggacactactggatctcagagcctagccgcgctcctgaataaatgcaagacgccccagggtcagcgattggtgaaccagtggatcaaacagccactcatggacaagaacagaatcgaggagagacttaatctggtggaagcgtttgtagaagacgcagaattgagacagacactacaggaagatctgctccgccgcttcccagatctaaatcgccttgcaaaaaaattccagaggcaagcggccaatttgcaggattgctataggctatatcagggcatcaatcagctgcccaacgtgatccaggcactagaaaaacacgaggggaaacatcagaaactgctactcgccgtctttgtgactcccctcaccgatttgcgatccgatttctccaagttccaagagatgattgagactacattggatatggaccaggtggagaaccacgagttcctggtgaagccatcctttgatcctaacctgagcgagctgcgtgagattatgaatgatctggaaaaaaaaatgcagagtacacttatatccgccgctagggacttagggctggacccaggcaaacaaatcaaactggacagctcagcccaattcgggtattactttagggtcacatgtaaggaagaaaaggtcttaaggaacaacaaaaacttttctaccgtggacatccaaaaaaacggagtcaagtttacaaattctaagctgaccagtttaaacgaggagtacaccaagaacaaaaccgagtatgaggaggcccaggatgccatagttaaggagattgttaacattagtagcggctacgtggagcctatgcagacgcttaacgatgtgctagcccagctggacgcggtggtgagcttcgcccacgttagcaacggggcccccgttccctacgtgcgacctgctattttggagaagggccagggacgaattattttgaaggcgagccgccacgcctgcgtggaggtccaggatgagattgccttcatccccaatgacgtttattttgagaaggacaaacagatgtttcatataataacagggcccaacatgggaggtaagagtacatatatcagacagacaggcgtgattgtgctcatggcgcaaattgggtgtttcgtaccatgcgaaagcgctgaagtcagtattgttgattgcatactggcaagggtgggcgctggagatagccagctcaaaggtgtgtccacctttatggccgaaatgcttgagaccgcctctattttgcgctcagccacaaaggattcactgatcatcattgacgagctgggacgtggcactagtacctacgatgggttcggcctggcttgggctataagcgagtatattgcgactaagatcggagcattttgtatgtttgccaccatcttcatgaacttactcccctggcctatcagatatcagctccttattatttacatgagtcagcactcaccactgaaaaggccctag

SEQ ID NO: 327132 - DNA, 1602 bp, Artificial Sequence
  derived and/or modified sequence
atggcagttcagccaaaagagaccttgcagctagagtcagccgctgaagtcggattcgtaaggtttttccaaggaatgcccgagaagccaaccactacagtaaggctatttgaccgtggagacttctatacggcccacggagaggatgcactgctggcagctcgcgaagtgttcaaaacccagggcgttatcaagtatatgggccctgccggcgccaaaaacctacagagtgtggtgctttctaaaatgaatttcgagagctttgtgaaggatttgctgctcgtccggcagtaccgggtcgaagtttacaaaaatagagcaggcaacaaggcctccaaggagaacgactggtacctggcttacaaggctagcccagggaatctttcccagtttgaggacatattgtttggaaataatgatatgtctgcctctatcggggtggtaggcgtgaaaatgagcgccgtggatggtcagcgccaggtcggagtgggatacgtggacagtattcaacgcaagctcgggctctgcgaattccctgacaatgatcagtttagcaatctggaggccctgctgattcaaatcggtcccaaggagtgtgtcctgcccgggggcgaaaccgcaggcgacatgggtaagttgcgacagattattcaacgtggaggcatcctgatcaccgagcgaaagaaagcggatttctctaccaaagacatctaccaagatcttaaccggctcctgaagggcaagaagggcgagcaaatgaactctgccgtcctgccagaaatggaaaatcaagtcgctgtgtcttccctctctgccgtcattaagttcctcgaactgctaagcgacgatagtaacttcgggcagttcgagctgactacattcgacttctcacaatacatgaaactggatatagcggccgtgcgggcgctcaacctctttcaaggctctgttgaggatactacaggcagccagagtctcgcagcccttctgaataaatgcaagacaccacagggtcagaggctggtgaaccagtggatcaagcagccactgatggacaagaacagaatcgaggaacgactcaacctggtagaggcatttgtagaagatgctgagctgcgacagactctgcaggaggacttattgagaagattccctgacctcaatagactggccaaaaagttccaaaggcaggcagcaaacctgcaggattgctacagattgtaccagggcatcaatcagttgcccaatgtgatccaggctctggaaaaacatgaaggcaaacaccagaaactcctcttggccgtgtttgttactccactcaccgacctgagaagcgactttagcaaatttcaggaaatgatcgagaccaccttagatatggatcaggtagagaaccatgagttcttggtgaagccaagctttgacccgaacctgtcagagctgagagaaattatgaatgacctcgagaaaaaaatgcagagtaccctaatctcagctgcacgggatctgggccttgatccaggtaagcagattaagttagattcctccgctcaattcggatactattttcgggtgacctgcaaggagaaatcaccttcctag

SEQ ID NO: 327133 - DNA, 1233 bp, Artificial Sequence
  derived and/or modified sequence
atggccgttcaacccaaggaaactctgcagctcgagagcgctgccgaggtaggattcgtgaggttttttcagggcatgcccgaaaagcccacgaccactgttcggctcttcgatagaggagacttctataccgcccatggagaggacgctctgctggccgctagagaggtatttaagacccagggagtgatcaagtatatgggccctgctggcgcaaaaaacctgcagtctgtcgtgctcagcaaaatgaactttgagagctttgtcaaggatctgcttctggttcggcagtatcgagtggaagtgtataagaatagagcgggcaataaggcgagcaaagaaaacgattggtatcttgcctacaaagcatccccaggcaacttgagccagtttgaggacatcctgttcggtaataacgacatgtcggcatcaatcggggtggtgggcgtgaaaatgtcagccgtcgacggacaaagacaagtgggtgttggctacgttgatagtatacagcggaaactcggactgtgtgaattccccgataacgatcagttttccaaccttgaggcactcctgatccagatcggacctaaggaatgcgtgctgccaggtggcgagacggccggtgacatgggcaagcttaggcagataatacagcgcgggggaatcctgatcacagagcgaaagaaagccgacttctccaccaaagacatttaccaagatttgaataggttgttgaaaggtaagaaaggagaacagatgaatagcgccgtcctcccagaaatggaaaaccaggtggctgtgtccagcctgagcgccgtcatcaagttcttggaactgctgtcagatgattcaaattttggacagtttgaactgacaacctttgatttcagccagtacatgaaactggacatagctgctgttagagccctcaaccttttccaggggagtgtggaggatactacgggctcccagtctttggcagcattgctgaacaagtgtaaaaccccccagggtcagagattagttaatcaatggattaagcagccactgatggacaagaatcggatcgaggagcggctgaacttagtcgaggccttcgtggaggatgccgaactgagacagaccctgcaggaggattactttgttgatagccaaattctgacggacctgccacgctccttcaaagataagcagcaaacctacaaaatagtcactgactctattcgcgtttag

SEQ ID NO: 327134 - DNA, 1458 bp, Artificial Sequence
  derived and/or modified sequence
atggcggttcagccaaaagaaaccctgcagctggaatcggctgcggaagtcggattcgtaagattcttccaggggatgccagagaaaccaacaaccacggtgagactgtttgacagaggagatttttatactgcgcatggggaggacgctttactggctgctcgcgaagtgtttaaaacccagggcgttataaagtacatgggccctgctggagcaaagaacctccagtcagtggtgctctccaagatgaacttcgagagctttgttaaggacctacttctcgtgcgtcaatacagagtggaggtgtacaagaaccgggccggcaacaaggcaagcaaggagaatgattggtatctggcttataaagcatctccaggaaatctatcccagtttgaggacatactgttcggcaataacgacatgtccgccagcattggggtggtaggcgtgaagatgtccgccgtcgacggccagagacaggtcggcgtgggatacgtggatagcatccagcgcaagctgggtttgtgcgaatttccagacaacgatcagttcagcaacctggaagccctgctcatacagataggtcccaaagaatgtgtacttccagggggggagactgcaggtgacatggggaagttgaggcaaatcatacagcgtggcggcatcctgatcactgaacgcaagaaggccgacttctccaccaaggatatttaccaggacctgaataggttgttgaaaggtaaaaagggggaacagatgaacagtgccgtgctgcctgagatggagaaccaagtggctgtttcctctctcagtgccgtcataaagtttttggagttactgtcggacgacagcaatttcggacagttcgagttaacaacttttgatttcagccagtacatgaagctggatattgccgctgtgcgggctctgaacctttttcagggttctgtggaggatacaactgggtctcagtctctcgcagctctgctgaataagtgcaaaactccccaggggcaacgcctggtgaatcagtggataaagcagccactgatggacaaaaaccgaatcgaggagagactaaatctggtagaagcctttgttgaagacgctgaattgcgtcagactctgcaagaggacttactacgcaggttccctgaccttaatagactggcaaaaaagttccaaaggcaggccgcgaacttgcaggattgctacagactctatcaggggattaaccagctgcctaacgtgattcaggccctggaaaaacacgagggcaaacaccaaaagttactgctggctgtatttgtaacccctctgaccgatttgcgatcagattttagtaaattccaggagatgattgagacaaccctcgatatggaccaggtagagaatcatgaattcctcgtaaaaccaagtttcgaccccaacttgtccgaattgagaaacaatgaatag

SEQ ID NO: 327135 - DNA, 1026 bp, Artificial Sequence
  derived and/or modified sequence
atggctgtgcagcccaaggagaccctgcagctggagagcgctgctgaggtgggctttgtgcgcttcttccagggcatgcctgagaagcccaccaccaccgtgcggctgtttgacagaggagacttctacacagcccacggggaggatgccctgctggccgcccgggaggtgttcaagacccagggcgtcatcaagtacatgggccctgctggggccaagaacctgcagagcgtggtgctgagcaagatgaactttgagagctttgtgaaggacctgctgctggtgcggcagtacagagtggaggtgtacaagaacagagctggcaacaaggccagcaaagaaaatgactggtacctggcctacaaggccagccctggcaacctgagccagtttgaggacatcctgtttggaaataatgacatgtctgccagcattggagtggtgggcgtgaagatgtctgctgtggatggccagaggcaggtgggcgtgggctacgtggacagcatccagaggaagctgggcctgtgtgagttcccagacaatgaccagttcagcaacctggaggccctgctgatccagatcggccccaaggaatgtgtgctgcccggcggggagacagctggggacatgggcaagctgcggcagatcatccagaggggcggcatcctgatcacagagaggaagaaggctgacttcagcaccaaggacatctaccaggacctgaaccggctgctgaagggcaagaagggggagcagatgaacagcgctgtgctgcctgagatggagaaccaggtggccgtgagcagcctgtctgctgtgatcaagttcctggagctgctgagtgatgacagcaactttggccagtttgagctgaccacctttgacttcagccagtacatgaagctggacattgctgctgtgcgggccctgaacctcttccagggctctgtggaggacaccaccggcagccagagcctggccgccctgctgaacaagtgcaagaccccccagggccagacctgctag

SEQ ID NO: 327136 - DNA, 2433 bp, Artificial Sequence
  derived and/or modified sequence
atggctgtgcagcccaaggagaccctgcagctggagagcgctgctgaggtgggctttgtgcgcttcttccagggcatgcctgagaagcccaccaccaccgtgcggctgtttgacagaggagacttctacacagcccacggggaggatgccctgctggccgcccgggaggtgttcaagacccagggcgtcatcaagtacatgggccctgctggggccaagaacctgcagagcgtggtgctgagcaagatgaactttgagagctttgtgaaggacctgctgctggtgcggcagtacagagtggaggtgtacaagaacagagctggcaacaaggccagcaaagaaaatgactggtacctggcctacaaggccagccctggcaacctgagccagtttgaggacatcctgtttggaaataatgacatgtctgccagcattggagtggtgggcgtgaagatgtctgctgtggatggccagaggcaggtgggcgtgggctacgtggacagcatccagaggaagctgggcctgtgtgagttcccagacaatgaccagttcagcaacctggaggccctgctgatccagatcggccccaaggaatgtgtgctgcccggcggggagacagctggggacatgggcaagctgcggcagatcatccagaggggcggcatcctgatcacagagaggaagaaggctgacttcagcaccaaggacatctaccaggacctgaaccggctgctgaagggcaagaagggggagcagatgaacagcgctgtgctgcctgagatggagaaccaggtggccgtgagcagcctgtctgctgtgatcaagttcctggagctgctgagtgatgacagcaactttggccagtttgagctgaccacctttgacttcagccagtacatgaagctggacattgctgctgtgcgggccctgaacctcttccagggctctgtggaggacaccaccggcagccagagcctggccgccctgctgaacaagtgcaagaccccccagggccagaggctggtgaaccagtggatcaagcagcccctgatggacaagaaccgcatcgaggagcggctgaacctggtggaggcctttgtggaggatgctgagctgcggcagaccctgcaggaggacctgctgcggcgcttcccagacctgaaccggctggccaagaagttccagaggcaggccgccaacctgcaggactgctaccgcctgtaccagggcatcaaccagctgcccaacgtcatccaggccctggagaagcatgagggcaagcaccagaagctgctgctggccgtgtttgtgacccccctgacagacctgcggagtgacttcagcaagttccaggagatgattgagaccaccctggacatggaccaggtggagaaccacgagttcctggtgaagcccagctttgaccccaacctgtctgagctgcgggagatcatgaatgacctggagaagaagatgcagagcaccctcatctctgctgcccgggacctgggcctggaccccgggaagcagatcaagctggacagcagcgcccagtttggctactacttccgggtgacctgcaaggaggagaaggtgctgaggaacaacaagaacttcagcacagtggacatccagaagaatggagtgaagttcaccaacagcaagctgaccagcctgaatgaggagtacaccaagaacaagacagaatatgaggaggcccaggatgccatcgtgaaggagatcgtgaacatcagcagcggctacgtggagcccatgcagaccctgaatgatgtgctggcccagctggatgctgtggtgtcctttgcccacgtgtccaatggagcccctgtgccctacgtgcggcctgccatcctggagaagggccagggccgcatcatcctgaaggccagcagacatgcctgtgtggaggtgcaggatgagatcgccttcatccccaatgatgtgtactttgagaaggacaagcagatgttccacatcatcaccggccccaacatgggcggcaagagcacctacatccggcagacaggagtgattgtgctgatggcccagatcggctgctttgtgccctgtgagagcgctgaggtgtccatcgtggactgcatcctggcccgggtgggcgctggggacagccagctgaagggcgtgtccaccttcatggccgagatgctggagacagccagcatcctgcggagcgccaccaaggacagcctcatcatcattgatgagctgggccggggcaccagcacctatgatggcttcggcctggcctgggccatcagcgagtacatcgccaccaagatcggggccttctgcatgtttgccaccatcttcatgaacctgctgccctggcccatccgctaccagctgctgatcatctacatgagccagcacagccccctgaagaggccctag

SEQ ID NO: 327137 - DNA, 1602 bp, Artificial Sequence
  derived and/or modified sequence
atggctgtgcagcccaaggagaccctgcagctggagagcgctgctgaggtgggctttgtgcgcttcttccagggcatgcctgagaagcccaccaccaccgtgcggctgtttgacagaggagacttctacacagcccacggggaggatgccctgctggccgcccgggaggtgttcaagacccagggcgtcatcaagtacatgggccctgctggggccaagaacctgcagagcgtggtgctgagcaagatgaactttgagagctttgtgaaggacctgctgctggtgcggcagtacagagtggaggtgtacaagaacagagctggcaacaaggccagcaaagaaaatgactggtacctggcctacaaggccagccctggcaacctgagccagtttgaggacatcctgtttggaaataatgacatgtctgccagcattggagtggtgggcgtgaagatgtctgctgtggatggccagaggcaggtgggcgtgggctacgtggacagcatccagaggaagctgggcctgtgtgagttcccagacaatgaccagttcagcaacctggaggccctgctgatccagatcggccccaaggaatgtgtgctgcccggcggggagacagctggggacatgggcaagctgcggcagatcatccagaggggcggcatcctgatcacagagaggaagaaggctgacttcagcaccaaggacatctaccaggacctgaaccggctgctgaagggcaagaagggggagcagatgaacagcgctgtgctgcctgagatggagaaccaggtggccgtgagcagcctgtctgctgtgatcaagttcctggagctgctgagtgatgacagcaactttggccagtttgagctgaccacctttgacttcagccagtacatgaagctggacattgctgctgtgcgggccctgaacctcttccagggctctgtggaggacaccaccggcagccagagcctggccgccctgctgaacaagtgcaagaccccccagggccagaggctggtgaaccagtggatcaagcagcccctgatggacaagaaccgcatcgaggagcggctgaacctggtggaggcctttgtggaggatgctgagctgcggcagaccctgcaggaggacctgctgcggcgcttcccagacctgaaccggctggccaagaagttccagaggcaggccgccaacctgcaggactgctaccgcctgtaccagggcatcaaccagctgcccaacgtcatccaggccctggagaagcatgagggcaagcaccagaagctgctgctggccgtgtttgtgacccccctgacagacctgcggagtgacttcagcaagttccaggagatgattgagaccaccctggacatggaccaggtggagaaccacgagttcctggtgaagcccagctttgaccccaacctgtctgagctgcgggagatcatgaatgacctggagaagaagatgcagagcaccctcatctctgctgcccgggacctgggcctggaccccgggaagcagatcaagctggacagcagcgcccagtttggctactacttccgggtgacctgcaaggagaagagccccagctag

SEQ ID NO: 327138 - DNA, 1233 bp, Artificial Sequence
  derived and/or modified sequence
atggctgtgcagcccaaggagaccctgcagctggagagcgctgctgaggtgggctttgtgcgcttcttccagggcatgcctgagaagcccaccaccaccgtgcggctgtttgacagaggagacttctacacagcccacggggaggatgccctgctggccgcccgggaggtgttcaagacccagggcgtcatcaagtacatgggccctgctggggccaagaacctgcagagcgtggtgctgagcaagatgaactttgagagctttgtgaaggacctgctgctggtgcggcagtacagagtggaggtgtacaagaacagagctggcaacaaggccagcaaagaaaatgactggtacctggcctacaaggccagccctggcaacctgagccagtttgaggacatcctgtttggaaataatgacatgtctgccagcattggagtggtgggcgtgaagatgtctgctgtggatggccagaggcaggtgggcgtgggctacgtggacagcatccagaggaagctgggcctgtgtgagttcccagacaatgaccagttcagcaacctggaggccctgctgatccagatcggccccaaggaatgtgtgctgcccggcggggagacagctggggacatgggcaagctgcggcagatcatccagaggggcggcatcctgatcacagagaggaagaaggctgacttcagcaccaaggacatctaccaggacctgaaccggctgctgaagggcaagaagggggagcagatgaacagcgctgtgctgcctgagatggagaaccaggtggccgtgagcagcctgtctgctgtgatcaagttcctggagctgctgagtgatgacagcaactttggccagtttgagctgaccacctttgacttcagccagtacatgaagctggacattgctgctgtgcgggccctgaacctcttccagggctctgtggaggacaccaccggcagccagagcctggccgccctgctgaacaagtgcaagaccccccagggccagaggctggtgaaccagtggatcaagcagcccctgatggacaagaaccgcatcgaggagcggctgaacctggtggaggcctttgtggaggatgctgagctgcggcagaccctgcaggaggactactttgtggacagccagatcctgacagacctgcccaggagcttcaaggacaagcagcagacctacaagatcgtgacagacagcatccgggtgtag

SEQ ID NO: 327139 - DNA, 1458 bp, Artificial Sequence
  derived and/or modified sequence
atggctgtgcagcccaaggagaccctgcagctggagagcgctgctgaggtgggctttgtgcgcttcttccagggcatgcctgagaagcccaccaccaccgtgcggctgtttgacagaggagacttctacacagcccacggggaggatgccctgctggccgcccgggaggtgttcaagacccagggcgtcatcaagtacatgggccctgctggggccaagaacctgcagagcgtggtgctgagcaagatgaactttgagagctttgtgaaggacctgctgctggtgcggcagtacagagtggaggtgtacaagaacagagctggcaacaaggccagcaaagaaaatgactggtacctggcctacaaggccagccctggcaacctgagccagtttgaggacatcctgtttggaaataatgacatgtctgccagcattggagtggtgggcgtgaagatgtctgctgtggatggccagaggcaggtgggcgtgggctacgtggacagcatccagaggaagctgggcctgtgtgagttcccagacaatgaccagttcagcaacctggaggccctgctgatccagatcggccccaaggaatgtgtgctgcccggcggggagacagctggggacatgggcaagctgcggcagatcatccagaggggcggcatcctgatcacagagaggaagaaggctgacttcagcaccaaggacatctaccaggacctgaaccggctgctgaagggcaagaagggggagcagatgaacagcgctgtgctgcctgagatggagaaccaggtggccgtgagcagcctgtctgctgtgatcaagttcctggagctgctgagtgatgacagcaactttggccagtttgagctgaccacctttgacttcagccagtacatgaagctggacattgctgctgtgcgggccctgaacctcttccagggctctgtggaggacaccaccggcagccagagcctggccgccctgctgaacaagtgcaagaccccccagggccagaggctggtgaaccagtggatcaagcagcccctgatggacaagaaccgcatcgaggagcggctgaacctggtggaggcctttgtggaggatgctgagctgcggcagaccctgcaggaggacctgctgcggcgcttcccagacctgaaccggctggccaagaagttccagaggcaggccgccaacctgcaggactgctaccgcctgtaccagggcatcaaccagctgcccaacgtcatccaggccctggagaagcatgagggcaagcaccagaagctgctgctggccgtgtttgtgacccccctgacagacctgcggagtgacttcagcaagttccaggagatgattgagaccaccctggacatggaccaggtggagaaccacgagttcctggtgaagcccagctttgaccccaacctgtctgagctgaggaacaatgaatag

SEQ ID NO: 327140 - DNA, 1026 bp, Artificial Sequence
  derived and/or modified sequence
atggccgtgcagcccaaggagaccctgcagctggagagcgccgccgaggtgggatttgtccgcttctttcagggcatgccggaaaaaccgacaaccactgtaagactgtttgatagaggagatttttacaccgcacatggggaggatgccctgctggccgcaagggaggtgttcaagactcagggggtcatcaagtacatgggacctgcaggcgcaaagaacctgcaaagtgtggtgttgagcaaaatgaatttcgagtcctttgtgaaagatcttctcctggtgcgtcagtacagagtggaggtttataaaaacagagccgggaacaaggcgtccaaggaaaacgattggtacttggcttataaggcctcgcctggcaacctgtctcagttcgaagacattctgtttggaaataatgacatgagcgcctctattggagtggtaggagtgaaaatgtcggcggtggatggtcagaggcaggtgggggtcggatatgtggatagcattcagcggaaactgggcctttgtgagtttcccgataacgatcagttcagtaacctggaagccctactcatacagattggccctaaggagtgcgtattgccaggaggtgagacagctggggatatgggcaagctacgtcagataattcagcggggtggaatactaattaccgagcggaaaaaagctgacttcagtaccaaagatatctaccaagacctgaaccgtcttctgaagggcaagaagggtgaacaaatgaattccgctgtgctccccgagatggagaatcaggttgctgtaagtagtctgagtgccgttatcaagttcttggaactcctgagtgatgacagtaactttggtcagttcgagcttaccacatttgatttctcccaatatatgaagctggacattgctgcagtcagagctttgaatctctttcagggctcagtggaggatacaacaggatctcagtcgctggctgcgctacttaataaatgtaagaccccacaggggcaaacttgttag

SEQ ID NO: 327141 - DNA, 2433 bp, Artificial Sequence
  derived and/or modified sequence
atggccgtgcagcccaaggagaccctgcagctggagagcgccgccgaagttggattcgtgagattctttcaggggatgcccgaaaagccaactacaactgtccgattgttcgaccgcggggacttctatacagctcacggtgaagatgctttgttggctgcaagagaggtgtttaaaacccagggggtgatcaaatacatgggacccgctggcgccaaaaatctgcagagcgtcgttctgagcaagatgaacttcgaaagctttgtgaaagaccttctcctggtgcggcagtacagggtggaagtctacaagaacagagctggaaataaggctagcaaggaaaacgactggtacttggcatacaaggctagccctggcaatctcagtcagtttgaggacatactgtttggcaataatgatatgtccgcctccataggagtggtcggcgtgaagatgtcagctgtcgacggtcagcgacaggttggtgtcggctacgtggactctattcagcgaaagttgggcctttgcgaattccctgataatgatcagttctcaaatctggaagcactcctgattcagattgggcctaaagagtgtgtcctgcccgggggggaaaccgccggcgacatgggcaagctccggcagattatccagagaggcggcattctgatcaccgaaaggaagaaggccgacttctcgacaaaggatatctatcaggacctcaacagactcttaaagggcaagaaaggggagcagatgaactctgccgttttaccagagatggaaaatcaagtggcagtctcaagcctgtctgccgtaattaaattccttgagctgctgtctgacgatagcaatttcggtcagtttgagctcactacctttgatttcagtcaatatatgaaacttgatattgccgccgtccgcgcgctgaacctgttccaggggagcgttgaggacacgacaggctcccaaagtcttgctgcactgctcaacaagtgcaaaaccccacagggccagaggttggtgaaccagtggattaagcaacccttgatggacaaaaatcgcattgaggaacgcctgaacctggtggaagcctttgtggaggatgctgaattgcgccagacactgcaggaggatctgctgagaaggtttcctgacctcaataggttggctaaaaaatttcagcggcaggctgccaatcttcaagattgttaccggctgtaccagggtattaatcaattacccaatgtgatccaggctttggaaaaacatgaaggcaagcaccaaaagttactgctcgccgtttttgtcaccccacttactgatctccggagcgactttagtaagtttcaggagatgattgagacaaccctggatatggatcaagtcgaaaaccatgaattcctggtaaagccctcctttgaccctaatctcagcgaacttcgcgagatcatgaacgacctggagaagaaaatgcagtctacgctcattagtgctgctcgcgatctgggcttagacccagggaagcaaattaagctggacagctccgctcagttcgggtactatttccgcgtcacgtgcaaagaggagaaggtcctgaggaacaataaaaatttttccaccgtggacattcagaaaaatggcgttaaattcaccaacagtaaattgacctcattgaatgaggagtatactaaaaacaagacggaatacgaagaagcccaggatgccattgtaaaagagatcgtgaatatttcttcaggttacgtggaaccgatgcagacacttaatgacgtacttgcacagctagatgccgttgtttccttcgctcacgtttcaaacggggcaccagttccttatgtcagacctgctatcctcgagaagggacagggcaggattatcctgaaagcatctagacacgcttgcgtcgaagtgcaggacgaaatagctttcataccaaatgacgtttatttcgagaaggataagcagatgttccatataatcacaggacctaacatgggggggaaaagcacgtatatccgccagaccggggttatcgttctgatggcccaaataggctgtttcgtgccctgtgaaagcgcggaagtcagcatcgttgactgtatcctggcccgagtcggagccggtgacagccaattgaagggtgtttccactttcatggcagaaatgcttgagaccgcaagtatactacgttctgccacaaaggattctcttattattatcgatgaacttggtagaggaacttctacgtacgatggatttggcctcgcctgggctattagtgaatatatcgctactaaaattggtgcattctgcatgttcgcgacaattttcatgaacttactgccgtggcctattcgctaccagcttctcatcatctatatgtcccagcattcccccctcaagaggccatag

SEQ ID NO: 327142 - DNA, 1602 bp, Artificial Sequence
  derived and/or modified sequence
atggccgtgcagcccaaggagaccctgcagctggagagcgccgccgaggttgggtttgtgcggttcttccagggtatgcctgaaaagccaactactactgtgcgtctgtttgaccgcggagatttttatactgcccatggtgaggatgcccttctggcagctagggaagtgtttaaaactcagggagtcataaaatacatggggcctgctggtgctaaaaatttacagtctgtagttttgagtaagatgaattttgagtccttcgttaaagatctcctgctggtccgccagtacagagtggaggtctacaaaaatcgggctggcaacaaagcttccaaagagaatgattggtacctggcatataaagcctcacctggcaatctctctcagtttgaggacatcctgttcggaaacaatgacatgtctgcatctatcggagtggtgggagtgaaaatgtctgccgttgatgggcagaggcaagtgggtgtagggtacgtcgactcaatccaaaggaagctgggactgtgtgaattcccagacaacgaccaattcagcaacttagaagccctcttaatccagattggccccaaagaatgcgtcctgcctggcggcgagactgccggcgacatgggtaagttacgacagatcattcagaggggggggattttaattaccgagcgcaaaaaggccgatttttccactaaagatatctatcaggatctgaaccgacttctgaaagggaagaaaggcgaacagatgaactccgccgtacttcctgagatggaaaatcaagtcgcggtctcttctctgagcgccgtaatcaaattcttagagctcctttctgatgattcaaactttggtcaatttgagctcactacgtttgatttttcccagtatatgaaacttgacattgcagctgtaagggcccttaacttgttccaaggatccgtagaagacaccaccgggtcgcagagcttggcagccctgctgaacaagtgcaagactccccaagggcaacggctggttaatcaatggattaaacaacctctgatggataagaatcggatcgaggaacgcctcaatcttgtcgaggcctttgttgaagacgcagaactgaggcagactcttcaggaggacctgctgcgcagattccccgatctcaacaggttagcgaaaaagtttcaacggcaggctgcaaacctgcaagactgctacagattgtatcaagggatcaaccaactgccaaacgtgatccaagcactagaaaaacacgaaggcaagcatcagaaacttctgctggctgtcttcgtgacacccctgactgatctgagatctgatttctccaagtttcaggagatgatcgaaacaaccctcgatatggatcaagtggagaatcatgagttcctcgtaaagcccagctttgatcccaacctgtccgagttgagagagattatgaacgacctggagaaaaagatgcagtccaccttaatttccgcagcacgcgacctcggtttggaccctggcaagcagatcaaattggatagttcagcccagtttgggtattactttcgggtgacatgtaaggagaaaagtccttcctag

SEQ ID NO: 327143 - DNA, 1233 bp, Artificial Sequence
  derived and/or modified sequence
atggccgtgcagcccaaggagaccctgcagctggagagcgccgccgaggtgggatttgttaggttcttccaggggatgcctgagaagccaactaccactgtgaggctgtttgacaggggggacttttatactgctcatggagaagacgctcttctagctgctcgggaagtctttaagacacagggagtcataaaatatatgggtcctgccggggccaagaatttgcagagcgtggtattgtccaagatgaactttgagagctttgtcaaagatctgttgctcgtccgccagtaccgcgtagaggtgtataaaaaccgcgcaggcaataaggccagcaaagagaacgactggtaccttgcctacaaagcatctcccggcaacctgtcccagtttgaagatatcctattcggtaataacgatatgtctgcttccataggagtggtgggggtaaagatgagcgctgtggatggacagagacaggtgggcgttgggtacgtcgattcaatccaacgaaagctcggcttatgtgagttcccagacaatgaccagttttccaatctggaggctttgctaatccagatcggcccaaaggaatgcgttctcccgggcggagagacggcgggtgatatgggcaaactgcgccagatcattcaaagaggcggcattttgattaccgagcgaaaaaaagctgatttttcgaccaaagatatttatcaggacctgaacaggcttttaaaaggaaagaaaggagaacagatgaactctgccgtattaccagaaatggaaaaccaggtagcagtttcatccctatcagccgtgattaagtttctcgaactcctttccgatgactctaatttcggccaatttgaacttaccacgttcgatttcagccagtatatgaaactcgacatcgccgctgtacgtgctctaaacctgttccaggggtctgttgaagacactacaggaagtcagtccctggccgctcttctcaataagtgtaaaactccccaaggacagaggttagtcaaccagtggatcaagcagcccctgatggacaagaatcgtatcgaggaaaggctgaacttagtggaggcttttgtagaggatgctgaactcagacaaaccctgcaagaagactacttcgtcgactctcagatcctgaccgaccttccccgcagcttcaaggacaagcagcagacctataaaattgtaaccgatagcataagggtgtag

SEQ ID NO: 327144 - DNA, 1458 bp, Artificial Sequence
  derived and/or modified sequence
atggccgtgcagcccaaggagaccctgcagctggagagcgccgccgaagtcggcttcgttcggttcttccagggaatgcccgaaaaaccaacaactacagtccgattattcgatcgaggagatttttataccgctcatggagaagacgctctgcttgccgcccgggaggtgtttaagactcagggtgtgattaaatatatgggaccagcaggagccaagaatttgcagagcgttgttctcagtaaaatgaattttgagtctttcgttaaagaccttttactcgttcgtcaataccgagtagaagtgtataagaaccgggcgggcaacaaagccagcaaggagaatgactggtatttggcctataaagcttcccccggcaatctttctcagttcgaggatatcctattcggtaacaatgatatgagtgcaagtatcggcgtagttggagtcaaaatgtccgctgtggacggccagcgtcaggtgggcgtcggctatgtcgacagcattcaacggaagctgggactctgcgagtttccagacaatgatcagttttcgaacctggaggctcttctgattcaaattggccccaaagagtgcgtgctgcctggtggtgagacggctggtgatatgggtaagctgaggcagataatacagcgcggtggaatcttaataactgagcggaagaaggccgacttctccacgaaagacatttatcaggatctgaatagactgctgaagggcaagaaaggcgaacagatgaacagtgctgtgctgcccgagatggaaaaccaagtcgcggtcagttccttaagtgctgttattaaattcctggagttactatctgacgattctaattttggccagtttgaactcactacattcgactttagtcagtacatgaaactggatattgcagcagtgagagccctgaatctctttcagggctcagtggaagataccacagggagccaatcactggcagcgctgctgaacaaatgcaaaaccccccagggccagcggctggtgaatcagtggatcaaacagccgttaatggacaagaatcgcattgaggagcggttaaacctggtggaagcatttgtggaagatgccgagctgcggcaaacactgcaggaagacctcctgagaagattccccgatcttaatcggttggccaagaagtttcagcgccaggcggccaacctacaggactgttaccgtctgtaccagggcataaaccagctaccaaatgtgatccaagcgctggagaagcacgagggcaaacaccagaagctactcctggcggtattcgtgactcctctgaccgatctccgaagcgacttcagcaaatttcaagaaatgatcgagacaacgttggacatggaccaggtggagaaccatgagttcctggtgaagcctagtttcgaccccaatctgtcggaactgcggaacaacgaatag

SEQ ID NO: 327145 - DNA, 2918 bp, Artificial Sequence
  derived and/or modified sequence
tcgcgcattttcttcaaccaggaggtgaggaggtttcgacatggcggtgcagccgaaggagacgctgcagttggagagcgcggccgaggtcggcttcgtgcgcttctttcagggcatgccggagaagccgaccaccacagtgcgccttttcgaccggggcgacttctatacggcgcacggcgaggacgcgctgctggccgcccgggaggtgttcaagacccagggggtgatcaagtacatggggccggcaggagcaaagaatctgcagagtgttgtgcttagtaaaatgaattttgaatcttttgtaaaagatcttcttctggttcgtcagtatagagttgaagtttataagaatagagctggaaataaggcatccaaggagaatgattggtatttggcatataaggcttctcctggcaatctctctcagtttgaagacattctctttggtaacaatgatatgtcagcttccattggtgttgtgggtgttaaaatgtccgcagttgatggccagagacaggttggagttgggtatgtggattccatacagaggaaactaggactgtgtgaattccctgataatgatcagttctccaatcttgaggctctcctcatccagattggaccaaaggaatgtgttttacccggaggagagactgctggagacatggggaaactgagacagataattcaaagaggaggaattctgatcacagaaagaaaaaaagctgacttttccacaaaagacatttatcaggacctcaaccggttgttgaaaggcaaaaagggagagcagatgaatagtgctgtattgccagaaatggagaatcaggttgcagtttcatcactgtctgcggtaatcaagtttttagaactcttatcagatgattccaactttggacagtttgaactgactacttttgacttcagccagtatatgaaattggatattgcagcagtcagagcccttaacctttttcagggttctgttgaagataccactggctctcagtctctggctgccttgctgaataagtgtaaaacccctcaaggacaaagacttgttaaccagtggattaagcagcctctcatggataagaacagaatagaggagagattgaatttagtggaagcttttgtagaagatgcagaattgaggcagactttacaagaagatttacttcgtcgattcccagatcttaaccgacttgccaagaagtttcaaagacaagcagcaaacttacaagattgttaccgactctatcagggtataaatcaactacctaatgttatacaggctctggaaaaacatgaaggaaaacaccagaaattattgttggcagtttttgtgactcctcttactgatcttcgttctgacttctccaagtttcaggaaatgatagaaacaactttagatatggatcaggtggaaaaccatgaattccttgtaaaaccttcatttgatcctaatctcagtgaattaagagaaataatgaatgacttggaaaagaagatgcagtcaacattaataagtgcagccagagatcttggcttggaccctggcaaacagattaaactggattccagtgcacagtttggatattactttcgtgtaacctgtaaggaagaaaaagtccttcgtaacaataaaaactttagtactgtagatatccagaagaatggtgttaaatttaccaacagcaaattgacttctttaaatgaagagtataccaaaaataaaacagaatatgaagaagcccaggatgccattgttaaagaaattgtcaatatttcttcaggctatgtagaaccaatgcagacactcaatgatgtgttagctcagctagatgctgttgtcagctttgctcacgtgtcaaatggagcacctgttccatatgtacgaccagccattttggagaaaggacaaggaagaattatattaaaagcatccaggcatgcttgtgttgaagttcaagatgaaattgcatttattcctaatgacgtatactttgaaaaagataaacagatgttccacatcattactggccccaatatgggaggtaaatcaacatatattcgacaaactggggtgatagtactcatggcccaaattgggtgttttgtgccatgtgagtcagcagaagtgtccattgtggactgcatcttagcccgagtaggggctggtgacagtcaattgaaaggagtctccacgttcatggctgaaatgttggaaactgcttctatcctcaggtctgcaaccaaagattcattaataatcatagatgaattgggaagaggaacttctacctacgatggatttgggttagcatgggctatatcagaatacattgcaacaaagattggtgctttttgcatgtttgcaaccattttcatgaacttactgccttggccaatcagataccaactgttaataatctacatgtcacagcactcaccactgaagagaccttaactatgctttatcaggtgaagaaaggtgtctgtgatcaaagttttgggattcatgttgcagagcttgctaatttccctaagcatgtaatagagtgtgctaaacagaaagccctggaacttgaggagtttcagtatattggagaatcgcaaggatatgatatcatggaaccagcagcaaagaagtgctatctggaaagagagcaaggtgaaaaaattattcaggagttcctgtccaaggtgaaacaaatgccctttactgaaatgtcagaagaaaacatcacaataaagttaaaacagctaaaagctgaagtaatagcaaagaataatagctttgtaaatgaaatcatttcacgaataaaagttactacgtgaaaaatcccagtaatggaatgaaggtaatattgataagctattgtctgtaatagttttatattgttttatattaa

SEQ ID NO: 327146 - DNA, 2917 bp, Artificial Sequence
  derived and/or modified sequence
tcgcgcattttcttcaaccaggaggtgaggaggtttcgacatggcggtgcagccgaaggagacgctgcagttggagagcgcggccgaggtcggcttcgtgcgcttctttcagggcatgccggagaagccgaccaccacagtgcgccttttcgaccggggcgacttctatacggcgcacggcgaggacgcgctgctggccgcccgggaggtgttcaagacccagggggtgatcaagtacatggggccggcaggagcaaagaatctgcagagtgttgtgcttagtaaaatgaattttgaatcttttgtaaaagatcttcttctggttcgtcagtatagagttgaagtttataagaatagagctggaaataaggcatccaaggagaatgattggtatttggcatataaggcttctcctggcaatctctctcagtttgaagacattctctttggtaacaatgatatgtcagcttccattggtgttgtgggtgttaaaatgtccgcagttgatggccagagacaggttggagttgggtatgtggattccatacagaggaaactaggactgtgtgaattccctgataatgatcagttctccaatcttgaggctctcctcatccagattggaccaaaggaatgtgttttacccggaggagagactgctggagacatggggaaactgagacagataattcaaagaggaggaattctgatcacagaaagaaaaaaagctgacttttccacaaaagacatttatcaggacctcaaccggttgttgaaaggcaaaaagggagagcagatgaatagtgctgtattgccagaaatggagaatcaggttgcagtttcatcactgtctgcggtaatcaagtttttagaactcttatcagatgattccaactttggacagtttgaactgactacttttgacttcagccagtatatgaaattggatattgcagcagtcagagcccttaacctttttcagggttctgttgaagataccactggctctcagtctctggctgccttgctgaataagtgtaaaacccctcaaggacaaagacttgttaaccagtggattaagcagcctctcatggataagaacagaatagaggagagattgaatttagtggaagcttttgtagaagatgcagaattgaggcagactttacaagaagatttacttcgtcgattcccagatcttaaccgacttgccaagaagtttcaaagacaagcagcaaacttacaagattgttaccgactctatcagggtataaatcaactacctaatgttatacaggctctggaaaaacatgaaggaaaacaccagaaattattgttggcagtttttgtgactcctcttactgatcttcgttctgacttctccaagtttcaggaaatgatagaaacaactttagatatggatcaggtggaaaaccatgaattccttgtaaaaccttcatttgatcctaatctcagtgaattaagagaaataatgaatgacttggaaaagaagatgcagtcaacattaataagtgcagccagagatcttggcttggaccctggcaaacagattaaactggattccagtgcacagtttggatattactttcgtgtaacctgtaaggaaaaaagtccttcgtaacaataaaaactttagtactgtagatatccagaagaatggtgttaaatttaccaacagcaaattgacttctttaaatgaagagtataccaaaaataaaacagaatatgaagaagcccaggatgccattgttaaagaaattgtcaatatttcttcaggctatgtagaaccaatgcagacactcaatgatgtgttagctcagctagatgctgttgtcagctttgctcacgtgtcaaatggagcacctgttccatatgtacgaccagccattttggagaaaggacaaggaagaattatattaaaagcatccaggcatgcttgtgttgaagttcaagatgaaattgcatttattcctaatgacgtatactttgaaaaagataaacagatgttccacatcattactggccccaatatgggaggtaaatcaacatatattcgacaaactggggtgatagtactcatggcccaaattgggtgttttgtgccatgtgagtcagcagaagtgtccattgtggactgcatcttagcccgagtaggggctggtgacagtcaattgaaaggagtctccacgttcatggctgaaatgttggaaactgcttctatcctcaggtctgcaaccaaagattcattaataatcatagatgaattgggaagaggaacttctacctacgatggatttgggttagcatgggctatatcagaatacattgcaacaaagattggtgctttttgcatgtttgcaacccattttcatgaacttactgccttggccaatcagataccaactgttaataatctacatgtcacagcactcaccactgaagagaccttaactatgctttatcaggtgaagaaaggtgtctgtgatcaaagttttgggattcatgttgcagagcttgctaatttccctaagcatgtaatagagtgtgctaaacagaaagccctggaacttgaggagtttcagtatattggagaatcgcaaggatatgatatcatggaaccagcagcaaagaagtgctatctggaaagagagcaaggtgaaaaaattattcaggagttcctgtccaaggtgaaacaaatgccctttactgaaatgtcagaagaaaacatcacaataaagttaaaacagctaaaagctgaagtaatagcaaagaataatagctttgtaaatgaaatcatttcacgaataaaagttactacgtgaaaaatcccagtaatggaatgaaggtaatattgataagctattgtctgtaatagttttatattgttttatattaa

SEQ ID NO: 327147 - DNA, 2917 bp, Artificial Sequence
  derived and/or modified sequence
tcgcgcattttcttcaaccaggaggtgaggaggtttcgacatggcggtgcagccgaaggagacgctgcagttggagagcgcggccgaggtcggcttcgtgcgcttctttcagggcatgccggagaagccgaccaccacagtgcgccttttcgaccggggcgacttctatacggcgcacggcgaggacgcgctgctggccgcccgggaggtgttcaagacccagggggtgatcaagtacatggggccggcaggagcaaagaatctgcagagtgttgtgcttagtaaaatgaattttgaatcttttgtaaaagatcttcttctggttcgtcagtatagagttgaagtttataagaatagagctggaaataaggcatccaaggagaatgattggtatttggcatataaggcttctcctggcaatctctctcagtttgaagacattctctttggtaacaatgatatgtcagcttccattggtgttgtgggtgttaaaatgtccgcagttgatggccagagacaggttggagttgggtatgtggattccatacagaggaaactaggactgtgtgaattccctgataatgatcagttctccaatcttgaggctctcctcatccagattggaccaaaggaatgtgttttacccggaggagagactgctggagacatggggaaactgagacagataattcaaagaggaggaattctgatcacagaaagaaaaaaagctgacttttccacaaaagacatttatcaggacctcaaccggttgttgaaaggcaaaaagggagagcagatgaatagtgctgtattgccagaaatggagaatcaggttgcagtttcatcactgtctgcggtaatcaagtttttagaactcttatcagatgattccaactttggacagtttgaactgactacttttgacttcagccagtatatgaaattggatattgcagcagtcagagcccttaacctttttcagggttctgttgaagataccactggctctcagtctctggctgccttgctgaataagtgtaaaacccctcaaggacaaagacttgttaaccagtggattaagcagcctctcatggataagaacagaatagaggagagattgaatttagtggaagcttttgtagaagatgcagaattgaggcagactttacaagaagatttacttcgtcgattcccagatcttaaccgacttgccaagaagtttcaaagacaagcagcaaacttacaagattgttaccgactctatcagggtataaatcaactacctaatgttatacaggctctggaaaaacatgaaggaaaacaccagaaattattgttggcagtttttgtgactcctcttactgatcttcgttctgacttctccaagtttcaggaaatgatagaaacaactttagatatggatcaggtggaaaaccatgaattccttgtaaaaccttcatttgatcctaatctcagtgaattaagaaataatgaatgacttggaaaagaagatgcagtcaacattaataagtgcagccagagatcttggcttggaccctggcaaacagattaaactggattccagtgcacagtttggatattactttcgtgtaacctgtaaggaagaaaaagtccttcgtaacaataaaaactttagtactgtagatatccagaagaatggtgttaaatttaccaacagcaaattgacttctttaaatgaagagtataccaaaaataaaacagaatatgaagaagcccaggatgccattgttaaagaaattgtcaatatttcttcaggctatgtagaaccaatgcagacactcaatgatgtgttagctcagctagatgctgttgtcagctttgctcacgtgtcaaatggagcacctgttccatatgtacgaccagccattttggagaaaggacaaggaagaattatattaaaagcatccaggcatgcttgtgttgaagttcaagatgaaattgcatttattcctaatgacgtatactttgaaaaagataaacagatgttccacatcattactggccccaatatgggaggtaaatcaacatatattcgacaaactggggtgatagtactcatggcccaaattgggtgttttgtgccatgtgagtcagcagaagtgtccattgtggactgcatcttagcccgagtaggggctggtgacagtcaattgaaaggagtctccacgttcatggctgaaatgttggaaactgcttctatcctcaggtctgcaaccaaagattcattaataatcatagatgaattgggaagaggaacttctacctacgatggatttgggttagcatgggctatatcagaatacattgcaacaaagattggtgctttttgcatgtttgcaacccattttcatgaacttactgccttggccaatcagataccaactgttaataatctacatgtcacagcactcaccactgaagagaccttaactatgctttatcaggtgaagaaaggtgtctgtgatcaaagttttgggattcatgttgcagagcttgctaatttccctaagcatgtaatagagtgtgctaaacagaaagccctggaacttgaggagtttcagtatattggagaatcgcaaggatatgatatcatggaaccagcagcaaagaagtgctatctggaaagagagcaaggtgaaaaaattattcaggagttcctgtccaaggtgaaacaaatgccctttactgaaatgtcagaagaaaacatcacaataaagttaaaacagctaaaagctgaagtaatagcaaagaataatagctttgtaaatgaaatcatttcacgaataaaagttactacgtgaaaaatcccagtaatggaatgaaggtaatattgataagctattgtctgtaatagttttatattgttttatattaa

SEQ ID NO: 327148 - DNA, 1026 bp, Artificial Sequence
  derived and/or modified sequence
atggccgtccaacctaaggagacactgcaacttgagtcagctgccgaggtcgggtttgtaaggttctttcaaggtatgccggaaaagcccacgaccaccgtcaggctattcgataggggagatttttacactgcgcacggcgaagacgctctgctagccgcaagagaggtgtttaagacacagggagtcataaaatacatgggcccagctggcgctaaaaatttgcaaagcgtggtgctgagcaaaatgaatttcgaaagcttcgtgaaagatcttttactggttcgccaatatcgggtcgaagtctacaagaacagggctggaaacaaggcctccaaggagaatgactggtaccttgcttacaaggcatctcctggcaacctgagccaattcgaggatatcctgtttggcaataacgacatgtcagcaagtattggggtggtgggcgtaaaaatgtctgccgtggacggccaacgccaggttggcgtaggttacgtcgactccatccagcgcaagcttgggttgtgtgagttccctgacaatgatcagttctccaatttagaggctctgttaatccagatcggcccaaaagagtgtgtactgccgggaggagagactgctggggacatgggaaagctgcgccagattatccagcgcggaggcattctcatcactgaacgaaaaaaagccgatttctcaacaaaggatatctaccaagatcttaatagactactgaaggggaagaaaggtgagcagatgaacagcgcagtcctgccagaaatggagaatcaggtggcagtgtcttcgttgtctgctgttatcaagttcctggagctcttaagcgacgacagcaattttggccagtttgagctgactaccttcgacttttcccagtacatgaaattggatattgctgccgtcagggctctgaacctgttccagggatcagtggaagatacgaccggctcacaatccctggccgcactgctgaacaaatgtaaaaccccccaggggcagacctgttag

SEQ ID NO: 327149 - DNA, 2433 bp, Artificial Sequence
  derived and/or modified sequence
atggctgtccaaccgaaggagactctccagctcgaatcagctgcagaagttggctttgtgaggttctttcaagggatgcccgagaaaccaactaccacggtgcgcttgttcgatcgaggggacttctacactgcccacggtgaagacgcgctcctggcagctcgggaggtgttcaagacacagggagttataaagtatatgggaccagccggtgcgaaaaacttgcaatcagtggtgttgtcgaaaatgaactttgagagcttcgttaaggatctgctgttagtgcggcaataccgagtcgaggtctacaaaaacagagccggtaataaagcatccaaggaaaacgactggtatctggcgtacaaggccagtcccggtaacctctcacagttcgaggatattttgttcggaaacaatgatatgtcagcctctatcggggtggttggagtaaagatgagtgcagtagatggtcaaaggcaggtcggtgtgggatacgtggacagcatacagcgtaagctgggactgtgtgaattccctgataatgaccagtttagcaacctagaggccctcctgatccaaattggtccgaaggagtgcgtgttaccagggggtgaaactgctggcgacatgggaaagttacggcagattatacaaaggggtggcattctgattaccgaacgcaagaaagccgacttttccaccaaggatatttatcaggatcttaaccggttgttgaaagggaaaaaaggcgagcagatgaacagcgctgtgcttcctgagatggagaatcaagtggctgttagcagtttaagcgccgtgatcaagttcctggaattgctgagcgatgactccaatttcggacagtttgagctgaccactttcgacttttctcaatacatgaagctcgacattgccgcagtgagggctcttaacctcttccagggctcagtggaggacacaaccggaagccaatccctggccgcactgctgaacaagtgcaagacaccacagggccagcggttagtcaatcagtggattaagcagccacttatggataagaacaggatagaagaaaggctaaacctggtcgaagccttcgtggaggacgccgagcttagacagaccctccaggaggacttgcttaggagattcccagaccttaataggctggctaaaaaatttcagcggcaagctgcgaacctacaggattgctatagattatatcagggcataaaccagttgcctaatgtgattcaggcacttgagaagcatgagggtaagcatcagaagttgctcttggccgtctttgtcacacctctaacggatctgcggtctgactttagtaaattccaagagatgatagagaccaccctggacatggatcaagtggagaaccacgagttcttagtaaagccgtccttcgaccccaacctgtctgagcttagggagataatgaatgacctggaaaagaaaatgcagtctactttaatatccgcagccagagacctgggcttagaccccggaaaacaaataaaactagactcttcagcacagtttggctattacttccgtgtgacttgtaaggaggagaaggtgctcaggaataataagaacttttcgaccgtcgatatacagaagaacggagtcaagttcaccaacagtaagctaacatcccttaacgaggagtacacaaagaataagacagaatatgaggaggcgcaggatgccattgtgaaagaaattgttaatatctcctcaggctacgttgagcccatgcagacgctgaacgatgtcttggcgcagctggacgcagttgtatccttcgcacacgtctccaacggggcacccgtgccttacgtgagaccggctatcttggagaaaggacaaggcagaatcattttaaaggcctcccgtcacgcttgcgtagaagtccaggatgagattgcattcattcctaacgacgtctacttcgagaaggataaacagatgtttcacattatcaccgggcctaacatgggtgggaagagcacctacatccggcagacaggtgtgattgtgcttatggcccaaattggatgcttcgttccctgcgaatcggcggaggtttccatcgttgactgcatcctggctcgggtgggagcaggtgactctcagctgaaaggggtaagtacattcatggccgagatgctggagactgcaagtattttgcgtagtgctacaaaggatagtttaatcattattgacgagctcggcagggggactagtacttatgatggtttcgggttagcttgggccattagtgagtacatcgccaccaaaataggtgccttttgtatgttcgctaccatcttcatgaaccttctgccgtggcccatcaggtaccaactccttattatctatatgagccagcactctcccttgaagagaccgtag

SEQ ID NO: 327150 - DNA, 1602 bp, Artificial Sequence
  derived and/or modified sequence
atggctgtccagcccaaggaaacgcttcagctggagtcagccgctgaagtgggcttcgtcaggttttttcagggaatgcctgaaaaacctacgactaccgtccgcctttttgaccgaggcgacttttacactgcccacggcgaggatgccctgctggctgccagagaagtcttcaagacccagggcgttataaagtacatggggccagcgggagccaaaaacctccagagcgttgtactgagtaagatgaactttgagagtttcgtgaaggatctgctgttggtgagacaatatagagtggaggtgtacaagaacagagctggcaacaaggcctccaaggagaacgattggtatctggcatataaagcatcccccggtaatctgagccagtttgaagatatactgttcggtaataacgacatgtccgcatcaatcggggtggtgggagtgaaaatgtcagctgtggacggccagcgccaggtcggagtgggatatgtggattctattcagcgcaaactggggctatgcgagtttcccgacaacgatcagtttagtaacctggaggccctcctgatacagattggtccaaaggaatgtgtgctcccagggggagagaccgcgggagacatggggaaactgagacagattatccagcggggtgggattctgattacagaaagaaaaaaagcagatttttccaccaaagacatttatcaggacctgaataggctgttgaaagggaagaagggcgagcagatgaatagcgccgtgctgcctgaaatggaaaatcaggtggctgtctctagcctatctgccgtgataaaatttctagagcttctttcagacgattctaactttgggcaattcgaactgaccacattcgattttagccagtatatgaagctggacattgcagctgtgcgggctttgaacctgttccagggctctgtcgaagacaccacaggatcccagtcgctggcagccctccttaataaatgcaagacccctcaggggcagaggttggttaatcaatggatcaagcagccgctgatggacaaaaacagaatcgaggaaaggctgaatctggtggaagcctttgtggaggacgccgagctgcggcagacccttcaagaggatctactcagacggtttccagacctcaaccgcctggcgaagaagttccagagacaggcagccaacttgcaggattgctatcgcctgtaccagggcatcaatcagcttcctaatgttatccaagccctggagaagcacgaaggcaaacatcagaagctgctcctggccgtgtttgtcactccattaaccgacctgaggagtgacttctcaaagttccaggaaatgattgaaaccacccttgacatggatcaggtggagaaccatgagtttctggtcaaaccaagcttcgacccgaatctctcagagctcagagaaattatgaatgatcttgaaaaaaaaatgcaatccaccctgatctcagccgctagagacctgggtttggacccaggcaagcagatcaagcttgattcatcggcgcagtttggctactacttcagggtcacttgcaaagagaagtccccatcttag

SEQ ID NO: 327151 - DNA, 1233 bp, Artificial Sequence
  derived and/or modified sequence
atggctgtccagccaaaggagacgctgcagctggagtctgccgcagaagtggggtttgtgaggtttttccagggaatgcccgagaagccaacaaccaccgtgagattgtttgacagaggcgacttctataccgcacacggcgaggacgctctgctcgcagccagggaagtgttcaagactcagggcgtgataaagtacatgggaccagccggagccaagaacctgcagagtgtcgtgttaagtaagatgaatttcgagtcttttgtcaaagacttgttgttagtgcgtcagtacagagttgaggtttataagaatagggcgggtaacaaagcctctaaggaaaacgattggtatttggcatacaaggcctcgcccggtaatctcagtcagtttgaggatattctgtttggaaacaatgatatgagtgcttctataggggtggtgggcgtgaaaatgtctgcggtggatggacagcggcaggttggtgtgggatacgtggatagcatccaaagaaagctgggtctgtgtgaattccctgacaacgaccagttcagtaacctagaggctctgcttatccagattggtcccaaggagtgtgtcctacccggaggcgagacagccggtgacatgggtaagctcagacaaatcatccagaggggcggtattttgattaccgagcgcaagaaggccgacttttctaccaaggatatttaccaagaccttaatcggttgctcaagggaaaaaaaggggaacagatgaacagtgccgtacttccggaaatggagaaccaggtggcggtttcgtccctgtcagctgtcattaaattcctcgaactgctgagtgacgatagcaacttcggtcagttcgagctgaccacatttgacttctcccagtacatgaagcttgacatagccgctgtccgcgctcttaatctgtttcaggggagtgtagaagatactaccggctctcagtccctggctgctttgttgaacaagtgcaagaccccccaaggccagagattagtgaaccagtggattaaacaaccgctgatggacaaaaataggatcgaggagcgtttgaacctcgtcgaagccttcgtagaggacgccgagctccgccagacccttcaggaagactacttcgtggatagccagattcttacagatctccccaggagcttcaaggataagcagcaaacctacaaaattgtcaccgactcaattagagtctag

SEQ ID NO: 327152 - DNA, 1458 bp, Artificial Sequence
  derived and/or modified sequence
atggccgtccaaccaaaggagacccttcaattagaatcggccgctgaggtaggctttgttaggttcttccagggcatgcctgaaaaacccacaactaccgtgcggttgtttgatcggggtgacttttacacggcccacggagaggatgccctgctcgccgcaagggaagtgttcaaaacccaaggagtaatcaaatatatgggcccagctggcgcaaaaaacctccagagcgtggtgctctccaaaatgaactttgagtcttttgtcaaggacttgctcctggtacggcagtatagagtggaggtttataagaaccgtgctgggaataaagcttctaaggagaatgactggtacctggcctacaaagcttccccgggaaatctaagtcagttcgaggatatcctatttggcaataatgatatgtcagctagtattggcgttgttggcgtgaagatgagcgctgtggacggtcagagacaggtaggcgttggctacgtcgattctatccaaagaaaactgggcctttgtgaatttccggataacgatcagttctcaaacttagaggccctgcttatccaaattgggccaaaagagtgtgtgttacccggaggggaaactgctggagatatgggaaaactgcgccaaatcatccagagaggaggcattctcattaccgagcgaaagaaggccgattttagcaccaaagatatttaccaggacttaaaccgccttctaaaaggcaagaagggggaacaaatgaattccgcagtcctgcctgagatggaaaatcaggtggctgtctcttcactcagtgcggtgatcaaattcctggagctgctgtccgatgactcaaattttggtcagtttgagctgacaacttttgatttctctcagtacatgaaattggatattgccgcagtgagagcattaaatctcttccaaggctccgtggaggacactacaggtagtcaatcgctggcagccctgttaaataagtgtaaaactccacagggccagaggctcgtgaaccagtggattaaacaacccctgatggataagaaccgcattgaggaaagattaaacctcgttgaggcttttgtagaagacgcggaactgcgccagaccttgcaggaagatttgctgcggcgattccccgatctgaataggcttgcaaagaagtttcagagacaggcagctaatctgcaggattgctatcgcctgtatcagggcattaatcagctgccaaacgtcatccaggcccttgagaagcacgagggcaaacaccagaaactgctgttagcggtgtttgtaactccactgacagaccttagaagcgattttagtaagttccaggagatgatcgaaaccacccttgacatggaccaggtggagaatcatgaatttttggtgaaaccgtctttcgatcccaatctgtctgagttgagaaataatgaatag

SEQ ID NO: 327153 - DNA, 63 bp, Artificial Sequence
  derived and/or modified sequence
atgtccaatcgggtagtgtgcagggaagcaagccacgccgggagctggtacactgcgtcttag

SEQ ID NO: 327154 - DNA, 63 bp, Artificial Sequence
  derived and/or modified sequence
atgagcaacagagtggtgtgccgggaggccagccatgctggctcctggtacacagccagctag

SEQ ID NO: 327155 - DNA, 315 bp, Artificial Sequence
  derived and/or modified sequence
gagaccttgggggtgcaaatcgatgagagatgcctgtatatgatggatacccgcgggactgtcctcgtggaaagccgcatccgcgagccctaggtgctctccatttgaggaagttggctgggggagggggcttgccttgcggctgcgtcctgctccccgcgccctgcccccacctcccagcctctgctgccgctaaaccccggagagcggagcgtgcacgttgagattcctcggcgggcggcacaggcaccaagatgtccaaccgagtggtctgccgagaagccagtcacgccgggagctggtacacagcctcag

SEQ ID NO: 327156 - DNA, 63 bp, Artificial Sequence
  derived and/or modified sequence
atgagcaaccgggtggtgtgccgggaggccagccacgccggcagctggtacacagcgagttag

SEQ ID NO: 327157 - DNA, 63 bp, Artificial Sequence
  derived and/or modified sequence
atgtcaaaccgcgtagtgtgtagagaagcgtcgcacgccggtagctggtatacggcttcgtag

SEQ ID NO: 327158 - DNA, 63 bp, Artificial Sequence
  derived and/or modified sequence
atgagcaacagagtggtgtgcagagaggccagccacgccggcagctggtacaccgccagctag

SEQ ID NO: 327159 - protein, 190 aa, Artificial Sequence
  derived and/or modified sequence
MRTVVLTMKASVIEMFLVLLVTGVHSNKETAKKIKRPKFTVPQINCDVKAGKIIDPEFIVKCPAGCQDPKYHVYGTDVYASYSSVCGAAVHSGVLDNSGGKILVRKVAGQSGYKGSYSNGVQSLSLPRWRESFIVLESKPKKGVTYPSALTYSSSKSPAAQADLWSTATYTSSQNRPRADPVQRQPCYSL

SEQ ID NO: 327160 - DNA, 1003 bp, Artificial Sequence
  derived and/or modified sequence
agtgtgagaagcagtatgtgtgagcatgtgtgtgtgtgtatgtgtgtgggggggggtgtaaaatgtgtttttcaaagtactgagaggttgatgggactgttcgattagctcctctgagaagaagagaaaaggttcttggacctctccctgtttcttccttagaataatttggatgggatttgtgatgcaggaaagcctaagggaaaaagaatattcattctgtgtggtgaaaattttttgaaaaaaaaattgccttcttcaaacaagggtgtcattctgatatttatgaggactgttgttctcactatgaaggcatctgttattgaaatgttccttgttttgctggtgactggagtacattcaaacaaagaaacggcaaagaagattaaaaggcccaagttcactgtgcctcagatcaactgcgatgtcaaagccggaaagatcatcgatcctgagttcattgtgaaatgtccagcaggatgccaagaccccaaataccatgtttatggcactgacgtgtatgcatcctactccagtgtgtgtggcgctgccgtacacagtggtgtgcttgataattcaggagggaaaatacttgttcggaaggttgctggacagtctggttacaaagggagttattccaacggtgtccaatcgttatccctaccacgatggagagaatcctttatcgtcttagaaagtaaacccaaaaagggtgtaacctacccatcagctcttacatactcatcatcgaaaagtccagctgcccaagcagatctctggtccactgccacctacacaagcagccaaaacaggcccagagctgatccagttcagagacaaccctgctactcactttaacctcaagacacacacgaattctcgagatctgaagacagccatagagaaaattactcagagaggaggactttctaatgtaggtcgggccatctcctttgtgaccaagaacttcttttccaaagccaatggaaacagaagcggggct

SEQ ID NO: 327161 - DNA, 573 bp, Artificial Sequence
  derived and/or modified sequence
atgagaactgtggtgctgactatgaaggctagtgtcattgaaatgttcttggtccttcttgtaactggcgtgcactctaacaaagagaccgcaaagaaaattaaaagaccaaagtttacagtgccccagattaactgtgacgttaaggcaggcaaaatcatcgatcctgagtttatcgttaagtgtcccgctggttgtcaggaccctaagtaccacgtatatggtaccgacgtgtacgcctcttatagctctgtgtgtggggctgctgttcacagcggtgtattggacaattccggtggcaaaatcctggtgaggaaggttgccggacagtcaggatataagggttcctacagcaatggtgtgcaaagtctgtccttaccaagatggcgggagtcttttattgtactcgaatccaagcccaaaaaaggggtcacctatcctagcgcactgacatactctagctcaaaatccccagccgctcaagcagacctgtggagtactgctacctacacaagcagccagaatagaccgagagcagaccccgtgcagagacagccgtgctactctttgtag

SEQ ID NO: 327162 - DNA, 573 bp, Artificial Sequence
  derived and/or modified sequence
atgcgcacagttgttttgacaatgaaagctagcgtcatcgagatgttcctggtgctcctcgttacaggcgtgcactccaacaaagaaaccgccaagaagattaaaagaccaaagttcaccgttcctcaaatcaactgtgatgttaaagccgggaaaattatcgacccagagtttatcgtgaaatgccctgcgggatgccaggacccaaagtaccacgtctacggcactgatgtgtatgcctcttattcatccgtctgcggcgctgctgttcattctggtgtgttagacaattccggcggaaaaatcttagtgaggaaagtggccggtcagtctgggtacaaaggctcctacagtaacggagtccagtctctgagtctcccacgctggagagagtcttttatcgtgttggaaagtaagcccaaaaaaggggtgacctacccctcagccctgacttactctagtagtaaaagccctgccgcgcaggccgatttatggagcacagcaacctacactagttcccaaaaccgccctagggcagaccctgtccagcgccagccatgttactctctctag

SEQ ID NO: 327163 - DNA, 573 bp, Artificial Sequence
  derived and/or modified sequence
atgagaacagtagtgcttactatgaaagccagcgtgatagaaatgttcctagttcttctggtgacaggggttcattctaacaaagaaacagcaaagaagataaagcggcccaaattcaccgtgccccagatcaattgcgacgttaaagccggcaagatcatcgatcctgaattcatcgttaagtgccctgcagggtgtcaagacccgaagtatcatgtatacggtacagacgtctacgccagctattccagcgtgtgtggtgccgcagtgcattctggagttttagataacagcggcggcaaaatcctagtcaggaaagtggctggtcagtccgggtacaagggctcctattcaaatggagtacagtcactcagcctgccaagatggagagagagcttcatagtgttggagagtaaacccaagaaaggagtaacctaccccagtgccttaacttattccagctccaaatcaccagccgcacaagccgacctctggagcacggccacctatacctcttcccagaaccgtccccgtgccgatccagtgcagagacaaccctgttattccttgtag

SEQ ID NO: 327164 - DNA, 573 bp, Artificial Sequence
  derived and/or modified sequence
atgagaaccgtggtgctgaccatgaaggccagcgtgatcgagatgttcctggtgctgctggtgaccggcgtgcacagcaacaaggagaccgccaagaagatcaagagacccaagttcaccgtgccccagatcaactgcgacgtgaaggccggcaagatcatcgaccccgagttcatcgtgaagtgccccgccggctgccaggaccccaagtaccacgtgtacggcaccgacgtgtacgccagctacagcagcgtgtgcggcgccgccgtgcacagcggcgtgctggacaacagcggcggcaagatcctggtgagaaaggtggccggccagagcggctacaagggcagctacagcaacggcgtgcagagcctgagcctgcccagatggagagagagcttcatcgtgctggagagcaagcccaagaagggcgtgacctaccccagcgccctgacctacagcagcagcaagagccccgccgcccaggccgacctgtggagcaccgccacctacaccagcagccagaacagacccagagccgaccccgtgcagagacagccctgctacagcctgtag

SEQ ID NO: 327165 - DNA, 573 bp, Artificial Sequence
  derived and/or modified sequence
atgcggacagtggtcttgacaatgaaggcctctgttatagaaatgtttctcgtgctgctggtgacgggagtgcacagcaacaaggagacggccaaaaagatcaagaggccgaagtttacagtaccccaaattaactgcgatgtcaaggcagggaaaattatcgacccagagttcattgtgaagtgtcctgcaggatgtcaggaccccaaataccacgtctacgggaccgatgtgtacgcctcatatagttcagtctgtggagcagccgttcactccggagtgcttgataactccggtggtaaaattctcgtacgtaaggtggcagggcagtcaggctacaaaggtagctattcaaacggtgtgcaaagcctgagcctgcctaggtggcgcgagagttttatcgtgctggaatccaaacctaagaagggcgtaacatatccttctgccttaacttacagctcatctaagagccctgccgcccaggcggacctttggagtacagctacatacacctcatcccaaaataggccgagagccgaccccgtgcagcggcaaccgtgttactccctgtag

SEQ ID NO: 327166 - DNA, 573 bp, Artificial Sequence
  derived and/or modified sequence
atgaggacagtggtgctgaccatgaaggcctctgtgattgagatgttcctggtgctgctggtgactggagtgcacagcaacaaggagacagccaagaagatcaagaggcccaagttcaccgtgccccagatcaactgtgatgtgaaggccggcaagatcatcgaccctgagttcatcgtgaagtgcccagctggctgccaggaccccaagtaccacgtgtatggaacagatgtgtatgccagctacagctctgtgtgtggggctgctgtgcacagcggcgtgctggacaacagcggcggcaagatcctggtgaggaaggtggccggccagagcggctacaagggcagctacagcaatggagtgcagagcctgagcctgccccgctggagggagagcttcatcgtgctggagagcaagcccaagaagggcgtgacctaccccagcgccctgacctacagcagcagcaagagccctgctgcccaggccgacctgtggagcacagccacctacaccagcagccagaaccggcccagggctgaccctgtgcagaggcagccctgctacagcctgtag

SEQ ID NO: 327167 - DNA, 573 bp, Artificial Sequence
  derived and/or modified sequence
atgcggaccgtggtgctgaccatgaaggccagcgtgatcgagatgttcctggtgctcctggtcacgggagtccatagtaacaaggagaccgcaaagaaaattaaacgccctaagtttactgtgccacagattaactgcgacgttaaggcgggaaaaatcatcgacccagagttcattgtgaaatgcccggcaggatgtcaggatcctaagtaccacgtgtacggcaccgacgtgtatgccagctacagctctgtgtgtggcgccgccgtacacagtggagttctggacaattcaggcggtaagatattagtacggaaggtggccgggcagtctggctataagggctcttacagcaacggtgtgcagagtctctccctcccgcgttggagagaatccttcattgtgctcgaatctaagcccaagaagggcgtgacgtaccctagtgctctgacatacagttctagtaagtctccagcggctcaggcagacctgtggagcacggctacttacacatctagtcagaatcggcctcgggctgatcctgttcagcgccaaccttgttacagtttgtag

SEQ ID NO: 327168 - RNA, 573 nt, Artificial Sequence
  derived and/or modified sequence
augcgcacaguuguuuugacaaugaaagcuagcgucaucgagauguuccuggugcuccucguuacaggcgugcacuccaacaaagaaaccgccaagaagauuaaaagaccaaaguucaccguuccucaaaucaacugugauguuaaagccgggaaaauuaucgacccagaguuuaucgugaaaugcccugcgggaugccaggacccaaaguaccacgucuacggcacugauguguaugccucuuauucauccgucugcggcgcugcuguucauucugguguguuagacaauuccggcggaaaaaucuuagugaggaaaguggccggucagucuggguacaaaggcuccuacaguaacggaguccagucucugagucucccacgcuggagagagucuuuuaucguguuggaaaguaagcccaaaaaaggggugaccuaccccucagcccugacuuacucuaguaguaaaagcccugccgcgcaggccgauuuauggagcacagcaaccuacacuaguucccaaaaccgcccuagggcagacccuguccagcgccagccauguuacucucucuag

SEQ ID NO: 327169 - RNA, 573 nt, Artificial Sequence
  derived and/or modified sequence
augagaacaguagugcuuacuaugaaagccagcgugauagaaauguuccuaguucuucuggugacagggguucauucuaacaaagaaacagcaaagaagauaaagcggcccaaauucaccgugccccagaucaauugcgacguuaaagccggcaagaucaucgauccugaauucaucguuaagugcccugcagggugucaagacccgaaguaucauguauacgguacagacgucuacgccagcuauuccagcguguguggugccgcagugcauucuggaguuuuagauaacagcggcggcaaaauccuagucaggaaaguggcuggucaguccggguacaagggcuccuauucaaauggaguacagucacucagccugccaagauggagagagagcuucauaguguuggagaguaaacccaagaaaggaguaaccuaccccagugccuuaacuuauuccagcuccaaaucaccagccgcacaagccgaccucuggagcacggccaccuauaccucuucccagaaccguccccgugccgauccagugcagagacaacccuguuauuccuuguag

SEQ ID NO: 327170 - DNA, 1044 bp, Artificial Sequence
  derived and/or modified sequence
atgggtgtggtgcagtacggggacaatcccgctacccatttcaatttgaagacacacactaactcacgggacctcaaaaccgctatagagaagattacgcagcgcggagggctctctaatgtgggccgagctatttcctttgtcactaaaaactttttctctaaggctaacggcaacaggagcggcgctccaaacgttgtcgtcgtgatggtggatggttggccaaccgataaggtggaggaggccagccgcttggcccgagaaagcgggatcaatatttttttcatcaccatcgaaggcgcagctgaaaacgagaagcagtatgtggtggagcctaactttgcgaataaagctgtgtgtcgaactaacggcttctactccttacatgtgcagtcttggttcgggttgcacaagacactacagccgctggtgaaacgggtctgcgatactgatagactagcttgcagtaagacctgcctgaatagcgccgacatcggtttcgtgattgacggttcttctagcgtaggcaccgggaattttaggacagtgctgcagttcgtcacaaatctaaccaaagaattcgaaatatcagatacagacacccgcatcggggcagttcaatacacctacgaacagagactggaattcggatttgacaagtattcctctaaacctgatatcctgaatgctatcaaacgcgtcggatattggtccgggggaacctcgacgggagccgctatcaactttgctctggagcaactcttcaaaaagagtaaacccaacaagagaaagcttatgatcctgatcacagacggtagaagctatgacgatgtaaggatccccgcaatggcagcccacctaaagggcgtgatcacttacgccatcggcgtggcttgggccgctcaggaggagctggaagtgattgcaacacatcccgctcgcgatcacagtttctttgtggacgaatttgataacctgcaccagtatgtgcccaggatcatacagaacatctgtactgagtttaactcacagccccgaaattag

SEQ ID NO: 327171 - DNA, 1044 bp, Artificial Sequence
  derived and/or modified sequence
atgggggttgtgcagtacggagacaacccagctacgcatttcaacttgaagacccatacgaattcacgcgatctaaagacagctatcgaaaagatcacgcaaaggggtggcctaagcaatgtgggccgagctataagctttgtgactaagaattttttttcgaaggccaacggtaataggagtggggcccctaatgttgtggtagtgatggtggatggatggccaaccgacaaagtagaagaggcaagccgactggctcgagagtctgggatcaatatctttttcatcactatcgagggggccgccgaaaacgagaaacagtatgttgtcgagcccaattttgccaacaaggccgtgtgccgcactaacgggttttattccctccatgttcaatcctggttcggcctccataagaccctgcagcctttggtcaaacgggtgtgcgatacagatcgcttggcttgttccaaaacctgtttgaattctgccgatatcgggttcgtgatcgacggcagttctagcgttgggacagggaactttagaaccgtcttgcagtttgtgacgaacttgaccaaagaatttgaaatatctgacacagacacccggataggagcagtccagtatacgtacgaacaacgattggagttcggatttgacaaatattcctctaagccagacatactcaatgctataaagagggtgggttactggtctggtggcacctccaccggcgctgctatcaatttcgctttagagcagctatttaagaaatccaaacccaataaaaggaaactgatgatcctgatcaccgacggaagatcttacgatgacgttagaatccccgcgatggccgcacatctgaagggagttattacctatgcaataggcgtggcctgggccgctcaggaggaactcgaggttattgccacacatcctgcacgcgatcattcttttttcgtcgacgagttcgataacctgcaccagtacgtccctagaattatccagaacatctgcactgaattcaattctcagcctagaaactag

SEQ ID NO: 327172 - DNA, 1044 bp, Artificial Sequence
  derived and/or modified sequence
atgggtgtggtacagtacggtgataatcccgcaacacactttaacctgaaaacacacactaattcacgggacctaaaaacggcaatcgagaagattacccaacgcggcggtttgtctaacgtgggcagggctatttctttcgtgactaagaatttcttcagcaaggccaatggcaatagaagcggagcaccgaatgtagtcgtagttatggtcgacggatggccaacagacaaggttgaggaagcaagcagactggctcgtgaatccggcataaacatttttttcattactattgagggggcagccgagaatgagaaacaatacgtggttgagcctaatttcgccaataaggctgtctgccggacgaacggcttctatagtctgcacgttcagagttggtttggcctccacaaaacactgcagcctcttgttaaaagagtttgtgacacagaccgcctggcctgtagcaaaacatgtttgaactctgctgacataggatttgtgatcgatggaagctctagtgtgggaacaggtaactttagaacagtgctccagtttgtaacaaacttaaccaaagaattcgagatttccgacacagatacgagaattggcgccgtgcagtacacttacgagcagcggctggaatttggatttgacaaatacagctctaagccagacattctcaacgctattaaacgggtcggctattggtctggcggcacttcgaccggagcagcgattaactttgcccttgaacagctctttaagaaatcaaagcctaacaagcgaaaactgatgatattaatcaccgatggacgctcttatgacgatgttagaatccccgccatggctgcgcatctcaagggggtgatcacatacgcaatcggcgttgcgtgggccgctcaggaagaactagaggtgatagcgacgcatcccgcaagagaccattcatttttcgtagatgagttcgataacctacaccaatacgtgccacgcattattcagaatatttgtaccgaattcaacagtcagccccggaactag

SEQ ID NO: 327173 - DNA, 1044 bp, Artificial Sequence
  derived and/or modified sequence
atgggcgtggtgcagtacggcgacaaccccgccacccacttcaacctgaagacccacaccaacagcagagacctgaagaccgccatcgagaagatcacccagagaggcggcctgagcaacgtgggcagagccatcagcttcgtgaccaagaacttcttcagcaaggccaacggcaacagaagcggcgcccccaacgtggtggtggtgatggtggacggctggcccaccgacaaggtggaggaggccagcagactggccagagagagcggcatcaacatcttcttcatcaccatcgagggcgccgccgagaacgagaagcagtacgtggtggagcccaacttcgccaacaaggccgtgtgcagaaccaacggcttctacagcctgcacgtgcagagctggttcggcctgcacaagaccctgcagcccctggtgaagagagtgtgcgacaccgacagactggcctgcagcaagacctgcctgaacagcgccgacatcggcttcgtgatcgacggcagcagcagcgtgggcaccggcaacttcagaaccgtgctgcagttcgtgaccaacctgaccaaggagttcgagatcagcgacaccgacaccagaatcggcgccgtgcagtacacctacgagcagagactggagttcggcttcgacaagtacagcagcaagcccgacatcctgaacgccatcaagagagtgggctactggagcggcggcaccagcaccggcgccgccatcaacttcgccctggagcagctgttcaagaagagcaagcccaacaagagaaagctgatgatcctgatcaccgacggcagaagctacgacgacgtgagaatccccgccatggccgcccacctgaagggcgtgatcacctacgccatcggcgtggcctgggccgcccaggaggagctggaggtgatcgccacccaccccgccagagaccacagcttcttcgtggacgagttcgacaacctgcaccagtacgtgcccagaatcatccagaacatctgcaccgagttcaacagccagcccagaaactag

SEQ ID NO: 327174 - DNA, 1044 bp, Artificial Sequence
  derived and/or modified sequence
atgggtgtggtgcaatacggtgacaatccggcaactcatttcaacttaaaaacccacactaattctcgagacctgaagacggctatcgagaagatcacccagcgcggaggactgagcaacgtgggccgcgccatttcctttgttacgaaaaacttcttcagtaaggcaaatggaaaccgatctggagcacctaacgtagtcgtggtgatggtggatggttggcctacagacaaggtcgaagaggcctctaggttggcccgggagtctggaattaatattttcttcatcaccatcgaaggggctgcagagaatgagaaacaatacgtggttgagcccaattttgccaacaaagcagtgtgtcggacgaatggattctactccctgcatgtccagagttggttcggactgcataagaccctccagccattggtcaaaagggtatgcgataccgatcgcctagcttgcagcaaaacatgtctcaacagcgcagatataggcttcgtgatcgacggctccagtagcgtcgggactggcaatttcagaacagtgttgcaatttgttacgaatctgaccaaagaatttgagatttctgatacggatactcgaatcggggctgtgcaatacacgtacgaacagcgtctcgaattcggttttgataagtattcctccaaaccggatatcctgaacgccataaagcgcgttggctattggtccgggggcacttccaccggagcagctattaattttgcgttagaacaactgttcaagaagtccaaacccaacaagcggaagctgatgatcttaatcaccgacggaaggagctatgatgacgtgagaatcccagctatggccgctcatctgaaaggtgtgattacgtatgcaattggggtcgcttgggcagctcaggaggaactcgaagtaatcgccacccatccagcaagagatcacagctttttcgtagatgagttcgacaaccttcaccaatatgttccaaggattatccaaaacatttgcactgagtttaactcacagcctcggaactag

SEQ ID NO: 327175 - DNA, 1044 bp, Artificial Sequence
  derived and/or modified sequence
atgggcgtggtgcagtacggggacaacccagccacccacttcaacctgaagacccacaccaacagccgggacctgaagacagccatcgagaagatcacccagaggggcggcctgagcaatgtgggccgggccatcagctttgtgaccaagaacttcttcagcaaggccaatggaaacagaagtggggccccaaatgtggtggtggtgatggtggatggctggcccacagacaaggtggaggaggccagccggctggcccgggagagcggcatcaacatcttcttcatcaccatcgagggcgctgctgaaaatgagaagcagtatgtggtggagcccaactttgccaacaaggctgtgtgcaggaccaacggcttctacagcctgcacgtgcagagctggtttggcctgcacaagaccctgcagcccctggtgaagagggtgtgtgacacagaccggctggcctgcagcaagacctgcctgaacagcgctgacattggatttgtgattgatggcagcagctctgtgggcactggaaacttcagaacagtgctgcagtttgtgaccaacctgaccaaggagtttgagatcagtgacacagacaccagaattggagctgtgcagtacacctatgagcagaggctggagtttggatttgacaagtacagcagcaagccagacatcctgaatgccatcaagagggtgggctactggagcggcggcaccagcactggagctgccatcaactttgccctggagcagctgttcaagaagagcaagcccaacaagaggaagctgatgatcctgatcacagatggccgctcctatgatgatgtgcgcatcccagccatggccgcccacctgaagggcgtcatcacctacgccatcggcgtggcctgggccgcccaggaggagctggaggtgattgccacccacccagcccgggaccacagcttctttgtggatgaatttgacaacctgcaccagtatgtgccccgcatcatccagaacatctgcacagagttcaacagccagcccaggaactag

SEQ ID NO: 327176 - DNA, 1044 bp, Artificial Sequence
  derived and/or modified sequence
atgggcgtggtgcagtacggcgacaaccccgccacccacttcaacttaaagacccacacaaactcaagagacctgaaaacggctatcgagaagatcacccagcggggcggtctgagtaatgttggcagagcaatctcctttgtcactaaaaacttttttagcaaggctaacgggaatcggagcggggcccctaacgtggtcgtcgtgatggtagatggatggcccaccgataaggtggaggaagccagtagacttgctcgagaatcggggattaacatcttctttattactattgagggggcagcagaaaatgagaaacagtacgtcgtggaaccaaatttcgctaataaggccgtgtgcaggacaaacgggttctactccctgcatgtccagtcctggtttgggctgcataagacccttcagccactggtcaagagagtgtgcgataccgatcgcctggcctgttcaaagacctgtctgaacagtgcagatatcggcttcgtgatcgatgggtcgagttccgttggtacggggaacttccggacagttttgcagttcgtgacaaacctaacaaaagagttcgagatttccgatactgataccagaatcggagccgtgcaatacacgtacgaacagagactggagttcggcttcgacaaatacagcagtaaacccgacattcttaatgccatcaaacgggtggggtactggagcggaggaacatcaacaggcgctgcaataaactttgccctagagcagctgtttaagaaatctaagcccaacaagcgaaagctcatgattctcatcaccgacggccgctcatatgacgacgtcagaatcccagcaatggcagcgcacctcaagggcgtaattacctacgccattggggtggcgtgggccgcacaggaagagctagaggtgattgctactcatccagctcgtgatcatagtttctttgtcgatgaattcgataacttacaccagtatgttccgcgcatcatacagaacatctgcacagaatttaactcacaacccagaaattag

SEQ ID NO: 327177 - DNA, 492 bp, Artificial Sequence
  derived and/or modified sequence
atgactcatcccctcccgcacgacagtcacacctctggagctccgcccttggtgaacaaaagtcgcgaccttgccaatggcccccccttcttcagcccgcttcagtccttgtgggaagaattccttcaccttctcttcatggggaccctgcttttttataggattgcaacaaaagcattgcgaggcaaggctaccctacttaaaagtcactctaagcagcctgcgcagcctggctgggagcccggcatacgggcccccagccctgtgccggcatccagccttcaggatcactcgcggctgacatcactgagtcggactggcaaggaacagcggcgtacactgtcgctgatcaggaagacatctggcacacccactgagtctacggtggcaacggccgctgcctcaaccaccgaagtgccctcccgtttgccttgggccgctcgcgcaggtttcaaaaggacaaccggggtctgcattgccttgccgacatag

SEQ ID NO: 327178 - RNA, 1044 nt, Artificial Sequence
  derived and/or modified sequence
auggggguugugcaguacggagacaacccagcuacgcauuucaacuugaagacccauacgaauucacgcgaucuaaagacagcuaucgaaaagaucacgcaaagggguggccuaagcaaugugggccgagcuauaagcuuugugacuaagaauuuuuuuucgaaggccaacgguaauaggaguggggccccuaauguugugguagugaugguggauggauggccaaccgacaaaguagaagaggcaagccgacuggcucgagagucugggaucaauaucuuuuucaucacuaucgagggggccgccgaaaacgagaaacaguauguugucgagcccaauuuugccaacaaggccgugugccgcacuaacggguuuuauucccuccauguucaauccugguucggccuccauaagacccugcagccuuuggucaaacgggugugcgauacagaucgcuuggcuuguuccaaaaccuguuugaauucugccgauaucggguucgugaucgacggcaguucuagcguugggacagggaacuuuagaaccgucuugcaguuugugacgaacuugaccaaagaauuugaaauaucugacacagacacccggauaggagcaguccaguauacguacgaacaacgauuggaguucggauuugacaaauauuccucuaagccagacauacucaaugcuauaaagaggguggguuacuggucugguggcaccuccaccggcgcugcuaucaauuucgcuuuagagcagcuauuuaagaaauccaaacccaauaaaaggaaacugaugauccugaucaccgacggaagaucuuacgaugacguuagaauccccgcgauggccgcacaucugaagggaguuauuaccuaugcaauaggcguggccugggccgcucaggaggaacucgagguuauugccacacauccugcacgcgaucauucuuuuuucgucgacgaguucgauaaccugcaccaguacgucccuagaauuauccagaacaucugcacugaauucaauucucagccuagaaacuag

SEQ ID NO: 327179 - RNA, 1044 nt, Artificial Sequence
  derived and/or modified sequence
augggugugguacaguacggugauaaucccgcaacacacuuuaaccugaaaacacacacuaauucacgggaccuaaaaacggcaaucgagaagauuacccaacgcggcgguuugucuaacgugggcagggcuauuucuuucgugacuaagaauuucuucagcaaggccaauggcaauagaagcggagcaccgaauguagucguaguuauggucgacggauggccaacagacaagguugaggaagcaagcagacuggcucgugaauccggcauaaacauuuuuuucauuacuauugagggggcagccgagaaugagaaacaauacgugguugagccuaauuucgccaauaaggcugucugccggacgaacggcuucuauagucugcacguucagaguugguuuggccuccacaaaacacugcagccucuuguuaaaagaguuugugacacagaccgccuggccuguagcaaaacauguuugaacucugcugacauaggauuugugaucgauggaagcucuagugugggaacagguaacuuuagaacagugcuccaguuuguaacaaacuuaaccaaagaauucgagauuuccgacacagauacgagaauuggcgccgugcaguacacuuacgagcagcggcuggaauuuggauuugacaaauacagcucuaagccagacauucucaacgcuauuaaacgggucggcuauuggucuggcggcacuucgaccggagcagcgauuaacuuugcccuugaacagcucuuuaagaaaucaaagccuaacaagcgaaaacugaugauauuaaucaccgauggacgcucuuaugacgauguuagaauccccgccauggcugcgcaucucaagggggugaucacauacgcaaucggcguugcgugggccgcucaggaagaacuagaggugauagcgacgcaucccgcaagagaccauucauuuuucguagaugaguucgauaaccuacaccaauacgugccacgcauuauucagaauauuuguaccgaauucaacagucagccccggaacuag

SEQ ID NO: 327180 - protein, 801 aa, Artificial Sequence
  derived and/or modified sequence
MSRRKQGKPQHLSKREFSPEPLEAILTDDEPDHGPLGAPEGDHDLLTCGQCQMNFPLGDILIFIEHKRKQCNGSLCLEKAVDKPPSPSPIEMKKASNPVEVGIQVTPEDDDCLSTSSRGICPKQEHIAGKDEPSSYTCTTCKQPFTSAWFLLQHAQNTHGLRIYLESEHGSPLTPRVGIPSGLGAECPSQPPLHGIHIADNNPFNLLRIPGSVSREASGLAEGRFPPTPPLFSPPPRHHLDPHRIERLGAEEMALATHHPSAFDRVLRLNPMAMEPPAMDFSRRLRELAGNTSSPPLSPGRPSPMQRLLQPFQPGSKPPFLATPPLPPLQSAPPPSQPPVKSKSCEFCGKTFKFQSNLVVHRRSHTGEKPYKCNLCDHACTQASKLKRHMKTHMHKSSPMTVKSDDGLSTASSPEPGTSDLVGSASSALKSVVAKFKSENDPNLIPENGDEEEEEDDEEEEEEEEEEEEELTESERVDYGFGLSLEAARHHENSSRGAVVGVGDESRALPDVMQGMVLSSMQHFSEAFHQVLGEKHKRGHLAEAEGHRDTCDEDSVAGESDRIDDGTVNGRGCSPGESASGGLSKKLLLGSPSSLSPFSKRIKLEKEFDLPPAAMPNTENVYSQWLAGYAASRQLKDPFLSFGDSRQSPFASSSEHSSENGSLRFSTPPGELDGGISGRSGTGSGGSTPHISGPGPGRPSSKEGRRSDTCEYCGKVFKNCSNLTVHRRSHTGERPYKCELCNYACAQSSKLTRHMKTHGQVGKDVYKCEICKMPFSVYSTLEKHMKKWHSDRVLNNDIKTE

SEQ ID NO: 327181 - DNA, 2406 bp, Artificial Sequence
  derived and/or modified sequence
atgtcccgaaggaaacaggggaagccccaacacctgtctaagagagagttctctcctgaaccgctggaggcgatccttaccgacgacgagcctgaccacgggcctctgggggccccggagggtgaccacgatctgctaacttgtggccagtgtcagatgaactttccactgggggacattttgatctttatcgaacataagcgcaagcagtgtaatgggtccttgtgccttgagaaagccgtggataaacccccttcaccatcccctattgagatgaagaaggcatccaatccagtggaggttgggatccaggtaacgcccgaagacgacgactgtctttccacttcaagtcggggtatatgtcctaagcaggaacacatagccgggaaagacgaaccatcatcttatacctgtaccacgtgtaaacagccgttcacttctgcctggtttctgttgcagcacgctcagaacacacacggattacgaatctatttggaaagtgagcacggatcacctttaacgccccgagtcggcatcccgtctgggctgggcgcagaatgtccctcccagccccctctgcacggaattcacatcgccgacaacaatcctttcaacctgttgcggatccccggaagtgtttctagagaggcaagcggcctagccgaggggagattccccccaaccccaccgctgtttagccccccccctcggcaccacctcgatccgcatcgaattgagcgactgggcgctgaagagatggctctggctacgcaccacccctcagctttcgaccgcgttctgcggctcaaccccatggccatggaacctcccgcgatggacttttccagaaggctgcgcgaactcgcgggaaatactagctccccaccgttgagccctgggcgcccaagccccatgcagcgtctcttacagccttttcagcccggcagcaaacctcccttcctggctacccccccactgccgcctcttcagagtgcaccaccccccagccagcctcccgtgaagagcaagagttgtgagttctgcggtaagacattcaaattccagtccaacctagtcgtgcaccggaggtcccacacaggggagaagccttataaatgtaatctgtgtgaccacgcatgtacccaggctagcaaacttaagcgccacatgaaaacacacatgcacaagtcttcccctatgaccgttaaaagcgacgacgggctctcaacagcttcttctccggagcccggaacatccgacttagtgggctcagcgtccagtgctttgaaatctgtggtggctaagttcaagagcgagaacgaccccaatttaatcccagaaaacggtgacgaggaggaggaggaggatgatgaggaagaagaggaagaggaagaggaggaagaggaggagctcacagaaagcgagagagtggactacggatttggcctttcgctcgaggccgctcggcaccatgagaattcttcacggggtgccgtggtgggagttggtgacgagtcccgcgcgttgcctgatgtgatgcagggcatggtcctgtcctcaatgcagcacttctctgaggcctttcatcaggttctgggtgagaaacataagcggggccatttggcggaagccgagggacatagggacacctgcgacgaggactcggtggcaggggagagtgatagaattgatgatgggaccgtgaacggccgcggctgttcacccggggagtccgcctccggaggactaagcaaaaagctccttctgggatctccatcttctctctccccattctcaaaacggattaaactggagaaagagttcgatttgcccccggctgcaatgcctaacaccgagaacgtatacagccagtggcttgctggctacgctgcttcacggcagttgaaagacccattcctctctttcggcgatagccgacagtctccattcgcttcctccagcgaacactctagcgaaaacggttcattgcgattcagtactccgcccggcgagctcgatggaggtatctccggccggagtggcacgggatctggaggttccactcctcatatatctggtccaggccctgggagaccatcatcaaaggaaggtagaagatctgatacttgcgagtactgtggcaaggtctttaagaattgttctaacctgacggttcatcgcaggagccataccggtgagcggccttataaatgcgagctgtgcaattatgcttgtgcccagagcagcaagttgacaagacacatgaagacacatggacaggtaggaaaggatgtgtacaagtgtgagatatgcaagatgcccttttcggtctattctacgcttgagaaacacatgaagaaatggcactctgatagggtcctgaataatgatataaagacagagtag

SEQ ID NO: 327182 - DNA, 2406 bp, Artificial Sequence
  derived and/or modified sequence
atgagcaggaggaagcagggcaagccccagcacctgagcaagcgggagttcagccctgagcccctggaggccatcctgacagatgatgagccagaccacggccccctgggcgcccctgagggggaccatgacctgctgacctgtggccagtgccagatgaacttccccctgggggacatcctgatcttcatcgagcacaagaggaagcagtgcaatggcagcctgtgcctggagaaggctgtggacaagccacccagccccagccccatcgagatgaagaaggccagcaaccctgtggaggtgggcatccaggtgaccccagaagatgatgactgcctgagcaccagcagccggggcatctgccccaagcaggagcacatcgccggcaaggatgagcccagcagctacacctgcaccacctgcaagcagcccttcaccagcgcctggttcctgctgcagcacgcccagaacacccacggcctgcgcatctacctggagagcgagcacggcagccccctgaccccccgggtgggcatccccagcggcctgggcgctgagtgccccagccagccccccctgcacggcatccacatcgctgacaacaaccccttcaacctgctgcgcatccctggctctgtgtcccgggaggccagcggcctggccgagggccgcttcccccccaccccacccctcttcagccccccacccaggcaccacctggacccccacagaattgagcggctgggcgctgaggagatggccctggccacccaccaccccagcgcctttgacagagtgctgcggctgaaccccatggccatggagcccccagccatggacttcagccggcggctgcgggagctggccggcaacaccagcagcccccccctgagccctggccggcccagccccatgcagaggctgctgcagcccttccagcccggcagcaagccacccttcctggccaccccacccctgccccccctgcagagcgcccccccacccagccagccccctgtgaagagcaagagctgtgagttctgtgggaagaccttcaagttccagagcaacctggtggtgcaccggcgcagccacactggagagaagccctacaagtgcaacctgtgtgaccacgcctgcacccaggccagcaagctgaagaggcacatgaagacccacatgcacaagagcagccccatgacagtgaagagtgatgatggcctgagcacagccagcagccctgagcccggcaccagtgacctggtgggcagcgccagcagcgccctgaagtctgtggtggccaagttcaagtcagaaaatgaccccaacctgatcccagaaaatggagatgaggaggaggaggaggatgatgaggaggaggaggaggaggaggaggaggaggaggaggagctgacagagagcgagcgggtggactatggcttcggcctgagcctggaggccgcccggcaccacgagaacagcagcagaggagctgtggtgggcgtgggagatgagagccgggccctgcctgatgtgatgcagggcatggtgctgagctccatgcagcacttcagcgaggccttccaccaggtgctgggggagaagcacaagaggggccacctggccgaggccgagggccaccgggacacctgtgatgaagattctgtggccggggagagtgacagaattgatgatggcaccgtgaatggccggggctgcagccctggagagagcgccagcggcggcctgagcaagaagctgctgctgggcagccccagcagcctgagccccttcagcaagaggatcaagctggagaaggagtttgacctgcccccagctgccatgcccaacacagaaaatgtgtacagccagtggctggccggctacgccgccagccggcagctgaaggaccccttcctgagctttggagacagccggcagagcccctttgccagcagcagcgagcacagcagtgaaaatggcagcctgcgcttcagcaccccacctggagagctggatggcggcatcagcggccgcagcggcaccggcagcggcggcagcaccccccacatcagcggccctggccctggccggcccagcagcaaggagggcagaagaagtgacacctgtgagtactgcggcaaggtgttcaagaactgcagcaacctgactgtgcacagaagaagccacactggagagcggccctacaagtgtgagctgtgcaactatgcctgtgcccagagcagcaagctgaccaggcacatgaagacccacggccaggtgggcaaggatgtgtacaagtgtgagatctgcaagatgcccttctctgtgtacagcaccctggagaagcacatgaagaagtggcacagcgacagagtgctgaacaatgacatcaagacagaatag

SEQ ID NO: 327183 - DNA, 2406 bp, Artificial Sequence
  derived and/or modified sequence
atgagccggcggaagcagggcaagccccagcacctgagcaagcgggaatttagcccagaaccactcgaggctattctgactgacgatgaacccgatcacggaccccttggcgctcctgagggcgaccatgatctgctaacatgcggccagtgccaaatgaactttcctctgggcgacattctcatctttatcgagcacaaaagaaagcaatgtaacggttctctgtgcttggagaaagctgtcgacaagccaccatcccccagcccgatcgagatgaaaaaggcatctaaccccgtagaagtgggaatccaggtgacaccagaggatgatgattgtctcagcacaagttcccggggaatatgtcccaagcaggagcatatcgcaggaaaggacgagccttcatcgtacacatgtacaacctgtaagcagccttttacctccgcctggttccttcttcagcacgcacagaatacacatggcctacgtatttatttggaaagcgagcacggctccccactgactccaagggtaggcataccctccggcctgggagccgaatgccccagtcagccgcctcttcatggcatacacattgccgacaataatccctttaacctcctaagaatcccaggctccgtcagtcgggaggccagcggactggcagagggtcgcttcccacccaccccccccctattttctccaccgcctagacatcacctggatccccacagaatcgagagattgggggcagaggagatggccctagctactcatcatccttctgcgttcgacagagttctgaggctgaaccctatggccatggagcctcctgcgatggacttttcgcgcagactgagagagctagccggaaatacctcttcacctccgttatcccctggacggccctccccaatgcagagactgctccagccctttcagcctggaagtaaacctccattcctggctacacccccactgccaccactgcagtctgctcctcccccaagccagccccccgtaaagtccaagagttgtgagttttgcggcaagacttttaaatttcagtcaaatctcgttgttcaccggagatcccacaccggcgagaaaccttacaagtgtaacttatgtgaccatgcttgtacacaagctagcaagcttaaacgccacatgaagacccacatgcacaaatctagccctatgactgtgaaatccgatgacggactgagcacggcgagttctcccgaaccaggtacttcagatctagtgggctctgcgtcaagcgccctgaagtctgttgttgccaagttcaaatcggagaatgaccctaatctgattccggagaacggagatgaggaggaggaggaagatgatgaagaggaggaagaagaggaagaagaggaagaagaggaattaaccgagtccgaaagagtggactatgggttcggtctaagtctcgaggcagcacggcatcatgaaaacagcagtcgaggcgccgtggtgggtgttggcgacgagagtcgcgctctgcccgacgtgatgcagggcatggtactcagctccatgcagcatttctcggaagcctttcatcaagtactgggagagaaacataaacgcgggcatcttgccgaggcagagggccaccgggacacttgtgacgaggattccgtcgccggagaaagtgaccggatcgatgacggaactgtcaatggacgtggatgcagtccaggggagagcgcctccggggggctgtctaaaaagctgctgcttgggagcccttcaagtctaagccctttttctaagagaatcaaactggaaaaagaattcgaccttccccccgctgcaatgccaaacactgagaatgtctattctcagtggctggctggttacgcggctagccgccagctcaaagacccttttctatcattcggggattctcgtcagtctcccttcgcctctagctccgaacacagctccgagaatggaagcctaagattctcaactcctccaggggagttagacggaggcattagtggacgctctggaaccgggagcggagggtctacaccccacatctcagggcctggaccaggcagacccagtagcaaggaaggtcgacgcagtgacacctgtgagtactgcggaaaggtgttcaaaaattgttctaacctcacagtgcaccggcgtagccatacgggagagagaccatacaagtgtgagctgtgcaactacgcttgcgcccagtcctccaagcttacacgacacatgaagacacatggacaggtgggaaaggacgtttataagtgtgaaatatgtaagatgccattttcagtgtattcgactctcgaaaaacacatgaaaaaatggcattccgatcgagtgttgaacaacgatattaaaaccgaatag

SEQ ID NO: 327184 - DNA, 2406 bp, Artificial Sequence
  derived and/or modified sequence
atgtctagacgcaagcagggcaagccacagcacctgagcaaacgggagttcagccctgagccccttgaggccatccttacggacgatgagcctgatcatgggccacttggggcaccggaaggagaccatgacctactaacatgtggacagtgtcagatgaattttcctctgggagatatactcatttttattgagcataagcggaaacaatgcaacggatcactttgtcttgaaaaggccgtcgataaaccaccaagcccatctcccatcgagatgaaaaaggcatccaatcccgtcgaggttggaatccaagttaccccagaagatgacgactgcttgtctacttcaagccgcggaatctgccccaagcaagaacatatcgcgggtaaggatgaaccctcaagctatacctgcacaacttgcaaacagcccttcacatctgcctggtttcttctccagcacgcccagaatacacatggactgaggatttatctggagtccgaacatggatcccctcttacaccccgtgtaggaataccatccggcctcggagccgaatgcccttcacagccccctctccacgggattcacatagctgacaacaatccttttaacttactccgaatccccggatcagtaagccgggaggcctctgggcttgctgagggtcggtttcctcctactccacccctgttcagtccaccacctcgacaccacctcgatccccaccggatcgaacggcttggagccgaagaaatggctctggctacacaccacccttctgcatttgatagggtgctcaggctcaaccctatggctatggaaccgccagcaatggatttcagtcgaagattgcgagagttagcagggaacacctcgagcccccctctctctcccggtcgcccttcaccaatgcagcggttgctccaaccatttcagccaggatccaagcccccattcctcgctacacccccactgcccccactgcagtcagcccctcccccttcgcaaccacctgtaaagtcaaaatcttgcgagttttgcgggaaaacctttaagttccagtctaatttagtggtgcacagacggagtcatacgggagagaagccctacaagtgcaacctctgcgatcacgcatgcacccaggccagtaaactgaaacgccacatgaagacacacatgcacaaaagcagcccaatgacagtgaaaagtgatgacggcctgtcaacggcatctagccccgaacccggaacctccgacttggtgggctccgcatcttccgcactgaagtcagtggtggcaaagtttaagtctgagaacgaccccaacctgatccccgagaatggcgatgaagaagaggaggaagacgacgaagaggaagaggaggaggaggaggaggaggaggaggaacttacagagagtgagagggtagactacggattcgggctcagtctagaggcggcacgccaccacgaaaatagcagccgcggagctgtggtgggtgtcggtgatgagtcaagagctctgccagatgtcatgcagggcatggtgctgtccagcatgcagcatttcagcgaagccttccatcaggtcctcggcgagaagcacaagcgcggacacctggccgaggctgagggtcatagagacacttgtgatgaggactccgtagcaggtgagtccgacagaatcgatgacggcactgtgaatggacgcggatgcagccctggcgagtcagctagcggtggacttagcaaaaagcttctgctcgggtctcccagttccttgtcccctttttccaagagaattaagctggagaaagaatttgatttacccccagctgcaatgcccaacaccgaaaacgtctattcgcagtggctagctggctacgctgcctctaggcagcttaaagacccattcctaagtttcggcgacagtcggcagagtccattcgctagcagttccgagcattcgagcgagaatggatctctgaggttttcgacccctcccggtgagcttgatggcggtatcagtggcagatccggcaccggctctgggggttccaccccccacatcagtggcccaggtccaggccgacctagcagcaaggaaggcaggcgctctgatacatgtgagtactgcgggaaggtgtttaaaaactgttccaacctcactgttcacaggagaagccataccggagagcgcccatacaaatgtgagctgtgcaactacgcatgcgcacagagttctaagctcacaaggcatatgaagactcacgggcaggtgggcaaggatgtgtacaagtgcgaaatatgcaagatgccattcagtgtttactcaaccctcgagaagcatatgaagaagtggcactccgacagagtgctaaacaatgatatcaagaccgagtag

SEQ ID NO: 327185 - DNA, 2697 bp, Artificial Sequence
  derived and/or modified sequence
tctttgtattatttctaatttattttggatgtcaaaaggcactgatgaagatattttctctggagtctccttctttctaacccggctctcccgatgtgaaccgagccgtcgtccgcccgccgccgccgccgccgccgccgccgcccgccccgcagcccaccatgtctcgccgcaagcaaggcaaaccccagcacttaagcaaacgggaattctcgcccgagcctcttgaagccattcttacagatgatgaaccagaccacggcccgttgggagctccagaaggggatcatgacctcctcacctgtgggcagtgccagatgaacttcccattgggggacattcttatttttatcgagcacaaacggaaacaatgcaatggcagcctctgcttagaaaaagctgtggataagccaccttccccttcaccaatcgagatgaaaaaagcatccaatcccgtggaggttggcatccaggtcacgccagaggatgacgattgtttatcaacgtcatctagaggaatttgccccaaacaggaacacatagcaggtaaagatgagcccagcagctacacatgtacaacttgcaaacagccattcaccagtgcatggtttctcttgcaacacgcacagaacactcatggattaagaatctacttagaaagcgaacacggaagtcccctgaccccgcgggttggtatcccttcaggactaggtgcagaatgtccttcccagccacctctccatgggattcatattgcagacaataacccctttaacctgctaagaataccaggatcagtatcgagagaggcttccggcctggcagaagggcgctttccacccactccccccctgtttagtccaccaccgagacatcacttggacccccaccgcatagagcgcctgggggcggaagagatggccctggccacccatcacccgagtgcctttgacagggtgctgcggttgaatccaatggctatggagcctcccgccatggatttctctaggagacttagagagctggcagggaacacgtctagcccaccgctgtccccaggccggcccagccctatgcaaaggttactgcaaccattccagccaggtagcaagccgcccttcctggcgacgccccccctccctcctctgcaatccgcccctcctccctcccagcccccggtcaagtccaagtcatgcgagttctgcggcaagacgttcaaatttcagagcaacctggtggtgcaccggcgcagccacacgggcgagaagccctacaagtgcaacctgtgcgaccacgcgtgcacccaggccagcaagctgaagcgccacatgaagacgcacatgcacaaatcgtcccccatgacggtcaagtccgacgacggtctctccaccgccagctccccggaacccggcaccagcgacttggtgggcagcgccagcagcgcgctcaagtccgtggtggccaagttcaagagcgagaacgaccccaacctgatcccggagaacggggacgaggaggaagaggaggacgacgaggaagaggaagaagaggaggaagaggaggaggaggagctgacggagagcgagagggtggactacggcttcgggctgagcctggaggcggcgcgccaccacgagaacagctcgcggggcgcggtcgtgggcgtgggcgacgagagccgcgccctgcccgacgtcatgcagggcatggtgctcagctccatgcagcacttcagcgaggccttccaccaggtcctgggcgagaagcataagcgcggccacctggccgaggccgagggccacagggacacttgcgacgaagactcggtggccggcgagtcggaccgcatagacgatggcactgttaatggccgcggctgctccccgggcgagtcggcctcggggggcctgtccaaaaagctgctgctgggcagccccagctcgctgagccccttctctaagcgcatcaagctcgagaaggagttcgacctgcccccggccgcgatgcccaacacggagaacgtgtactcgcagtggctcgccggctacgcggcctccaggcagctcaaagatcccttccttagcttcggagactccagacaatcgccttttgcctcctcgtcggagcactcctcggagaacgggagtttgcgcttctccacaccgcccggggagctggacggagggatctcggggcgcagcggcacgggaagtggagggagcacgccccatattagtggtccgggcccgggcaggcccagctcaaaagagggcagacgcagcgacacttgtgagtactgtgggaaagtcttcaagaactgtagcaatctcactgtccacaggagaagccacacgggcgaaaggccttataaatgcgagctgtgcaactatgcctgtgcccagagtagcaagctcaccaggcacatgaaaacgcatggccaggtggggaaggacgtttacaaatgtgaaatttgtaagatgccttttagcgtgtacagtaccctggagaaacacatgaaaaaatggcacagtgatcgagtgttgaataatgatataaaaactgaatagaggtatattaatacccctccctcactcccacctgacaccccctttttcaccactccccttccccatcgccctccagccccactccctgtaggatttttttctagtcccatgtgatttaaacaaacaaaca

SEQ ID NO: 327186 - DNA, 2406 bp, Artificial Sequence
  derived and/or modified sequence
atgagcagaagaaagcagggcaagccccagcacctgagcaagagagagttcagccccgagcccctggaggccatcctgaccgacgacgagcccgaccacggccccctgggcgcccccgagggcgaccacgacctgctgacctgcggccagtgccagatgaacttccccctgggcgacatcctgatcttcatcgagcacaagagaaagcagtgcaacggcagcctgtgcctggagaaggccgtggacaagccccccagccccagccccatcgagatgaagaaggccagcaaccccgtggaggtgggcatccaggtgacccccgaggacgacgactgcctgagcaccagcagcagaggcatctgccccaagcaggagcacatcgccggcaaggacgagcccagcagctacacctgcaccacctgcaagcagcccttcaccagcgcctggttcctgctgcagcacgcccagaacacccacggcctgagaatctacctggagagcgagcacggcagccccctgacccccagagtgggcatccccagcggcctgggcgccgagtgccccagccagccccccctgcacggcatccacatcgccgacaacaaccccttcaacctgctgagaatccccggcagcgtgagcagagaggccagcggcctggccgagggcagattcccccccaccccccccctgttcagccccccccccagacaccacctggacccccacagaatcgagagactgggcgccgaggagatggccctggccacccaccaccccagcgccttcgacagagtgctgagactgaaccccatggccatggagccccccgccatggacttcagcagaagactgagagagctggccggcaacaccagcagcccccccctgagccccggcagacccagccccatgcagagactgctgcagcccttccagcccggcagcaagccccccttcctggccaccccccccctgccccccctgcagagcgcccccccccccagccagccccccgtgaagagcaagagctgcgagttctgcggcaagaccttcaagttccagagcaacctggtggtgcacagaagaagccacaccggcgagaagccctacaagtgcaacctgtgcgaccacgcctgcacccaggccagcaagctgaagagacacatgaagacccacatgcacaagagcagccccatgaccgtgaagagcgacgacggcctgagcaccgccagcagccccgagcccggcaccagcgacctggtgggcagcgccagcagcgccctgaagagcgtggtggccaagttcaagagcgagaacgaccccaacctgatccccgagaacggcgacgaggaggaggaggaggacgacgaggaggaggaggaggaggaggaggaggaggaggaggagctgaccgagagcgagagagtggactacggcttcggcctgagcctggaggccgccagacaccacgagaacagcagcagaggcgccgtggtgggcgtgggcgacgagagcagagccctgcccgacgtgatgcagggcatggtgctgagcagcatgcagcacttcagcgaggccttccaccaggtgctgggcgagaagcacaagagaggccacctggccgaggccgagggccacagagacacctgcgacgaggacagcgtggccggcgagagcgacagaatcgacgacggcaccgtgaacggcagaggctgcagccccggcgagagcgccagcggcggcctgagcaagaagctgctgctgggcagccccagcagcctgagccccttcagcaagagaatcaagctggagaaggagttcgacctgccccccgccgccatgcccaacaccgagaacgtgtacagccagtggctggccggctacgccgccagcagacagctgaaggaccccttcctgagcttcggcgacagcagacagagccccttcgccagcagcagcgagcacagcagcgagaacggcagcctgagattcagcaccccccccggcgagctggacggcggcatcagcggcagaagcggcaccggcagcggcggcagcaccccccacatcagcggccccggccccggcagacccagcagcaaggagggcagaagaagcgacacctgcgagtactgcggcaaggtgttcaagaactgcagcaacctgaccgtgcacagaagaagccacaccggcgagagaccctacaagtgcgagctgtgcaactacgcctgcgcccagagcagcaagctgaccagacacatgaagacccacggccaggtgggcaaggacgtgtacaagtgcgagatctgcaagatgcccttcagcgtgtacagcaccctggagaagcacatgaagaagtggcacagcgacagagtgctgaacaacgacatcaagaccgagtag

SEQ ID NO: 327187 - protein, 793 aa, Artificial Sequence
  derived and/or modified sequence
MSRRKQGKPQHLSKREFSPEPLEAILTDDEPDHGPLGAPEGDHDLLTCGQCQMNFPLGDILIFIEHKRKQCNGSLCLEKAVDKPPSPSPIEMKKASNPVEVGIQVTPEDDDCLSTSSRGICPKQEHIAGKDEPSSYTCTTCKQPFTSAWFLLQHAQNTHGLRIYLESEHGSPLTPRVGIPSGLGAECPSQPPLHGIHIADNNPFNLLRIPGSVSREASGLAEGRFPPTPPLFSPPPRHHLDPHRIERLGAEEMALATHHPSAFDRVLRLNPMAMEPPAMDFSRRLRELAGNTSSPPLSPGRPSPMQRLLQPFQPGSKPPFLATPPLPPLQSAPPPSQPPVKSKSCEFCGKTFKFQSNLVVHRRSHTGEKPYKCNLCDHACTQASKLKRHMKTHMHKSSPMTVKSDDGLSTASSPEPGTSDLVGSASSALKSVVAKFKSENDPNLIPENGDEEEEEDDEEEEEEEEEEEEELTESERVDYGFGLSLEAARHHENSSRGAVVGVGDESRALPDVMQGMVLSSMQHFSEAFHQVLGEKHKRGHLAEAEGHRDTCDEDSVAGESDRIDDGTVNGRGCSPGESASGGLSKKLLLGSPSSLSPFSKRIKLEKEFDLPPAAMPNTENVYSQWLAGYAASRQLKDPFLSFGDSRQSPFASSSEHSSENGSLRFSTPPGELDGGISGRSGTGSGGSTPHISGPGPGRPSSKEGRRSDTCEYCGKVFKNCSNLTVHRRSHTGERPYKCELCNYACAQSSKLTRHMKTHGQVLHTPPFGVVPRELKMCGSFRMEAREPLSSEKI

SEQ ID NO: 327188 - DNA, 2382 bp, Artificial Sequence
  derived and/or modified sequence
atgagcaggaggaagcagggcaagccgcaacaccttagcaaacgcgagttttctccagagccactggaggctattctgaccgatgacgagccggaccatggacccctgggtgctccagagggggatcatgaccttctcacatgcggacagtgccagatgaacttccccctgggcgatatcctgatcttcatcgaacacaagaggaaacagtgcaacgggtccctgtgcttggagaaagctgtcgataagcctcccagtccatctccaattgaaatgaaaaaggccagcaacccagtcgaggtcgggatccaggtgacccccgaagacgatgattgtctgtccacaagctcacggggaatctgtccaaagcaggagcacattgccggtaaagacgaaccctcttcctacacttgtacgacatgcaaacaacctttcacttcagcttggttccttcttcagcatgcacaaaatacccacggcctcagaatctatctggagtctgagcacggatctccccttaccccacgggtggggattccgtccggtttgggggctgagtgtcctagtcagccgccattgcatggaattcacatcgccgacaataaccccttcaatctgctacgcatccccggctcagtgtccagggaggccagtggtcttgccgagggcaggtttccaccaactccacctctgttctcccctcccccacggcaccacttagatcctcaccggatcgaacggctcggcgccgaagagatggcgctcgcaactcaccacccttcagccttcgatagggtgctgcgcctcaatcccatggctatggaaccccccgccatggacttctccagacggctccgtgagctggctggtaatacctcttcccctccactcagcccaggtcgcccaagtcccatgcagcggcttctccagccctttcaacccgggtccaaacctccctttctggcgaccccacctctgcctcccctccaaagcgcaccgcctccatcgcagcctccagtgaagtctaagagttgcgagttctgtggtaaaaccttcaaatttcagtccaatctcgtggtgcacagaagatctcatacaggcgagaaaccctacaagtgtaatttgtgtgaccacgcttgcactcaggcaagcaagctgaaacgacacatgaaaactcatatgcataagagctctccaatgactgttaagagcgacgatggtctgtccactgcatcctctcccgaaccaggaacttcagatctagtgggatcagcctcctccgcgctaaagtctgttgtggcaaaattcaaatcagagaacgatccaaatctcatccctgagaatggggacgaagaggaagaggaggacgacgaagaagaggaggaggaggaagaagaagaagaggaagagctaacagaaagtgagcgggtggattatgggtttggactatccctggaggccgccaggcatcatgaaaattcatcaagaggcgcggttgtgggagtcggcgacgaatcccgggcactgcccgacgttatgcaagggatggtgctatcatctatgcaacacttttctgaggctttccaccaggtcctcggagaaaaacacaaacgcgggcacctcgccgaggctgagggccaccgggacacatgtgatgaggactccgtggctggcgaaagtgaccgcattgatgatgggacggtgaatggccgcgggtgcagtcctggggaaagtgccagtggcggtttgagcaagaaactactactgggcagcccctcatcactgtcgcctttctctaagcgcataaagcttgagaaagaattcgatctgccaccagccgctatgccaaacactgagaatgtttattctcagtggcttgccgggtacgccgcatcacgtcagctgaaagaccctttcctttccttcggagattcccgccagagcccatttgccagttccagcgagcattcttccgagaacggtagcttaagattctctacacctcccggtgaactggacgggggcatcagcgggcggagtggcacaggttcaggtggttcaacaccccacatatctggacctggccccggccgcccgtcatccaaagaggggcggcgcagcgacacctgcgagtattgcggcaaggtgttcaaaaactgctcaaacctgacagtgcaccggcgctcacacaccggggagcgaccttataagtgcgaactgtgcaactatgcttgcgcacagtcctcaaagctgacgcgtcacatgaaaacccacggccaggtgttacatacaccaccttttggagttgttccaagagagttgaaaatgtgtgggtcctttaggatggaggccagggaacctcttagcagcgagaagatttag

SEQ ID NO: 327189 - DNA, 2382 bp, Artificial Sequence
  derived and/or modified sequence
atgagcaggaggaagcagggcaagccccagcacctgagcaagcgggagttcagccctgagcccctggaggccatcctgacagatgatgagccagaccacggccccctgggcgcccctgagggggaccatgacctgctgacctgtggccagtgccagatgaacttccccctgggggacatcctgatcttcatcgagcacaagaggaagcagtgcaatggcagcctgtgcctggagaaggctgtggacaagccacccagccccagccccatcgagatgaagaaggccagcaaccctgtggaggtgggcatccaggtgaccccagaagatgatgactgcctgagcaccagcagccggggcatctgccccaagcaggagcacatcgccggcaaggatgagcccagcagctacacctgcaccacctgcaagcagcccttcaccagcgcctggttcctgctgcagcacgcccagaacacccacggcctgcgcatctacctggagagcgagcacggcagccccctgaccccccgggtgggcatccccagcggcctgggcgctgagtgccccagccagccccccctgcacggcatccacatcgctgacaacaaccccttcaacctgctgcgcatccctggctctgtgtcccgggaggccagcggcctggccgagggccgcttcccccccaccccacccctcttcagccccccacccaggcaccacctggacccccacagaattgagcggctgggcgctgaggagatggccctggccacccaccaccccagcgcctttgacagagtgctgcggctgaaccccatggccatggagcccccagccatggacttcagccggcggctgcgggagctggccggcaacaccagcagcccccccctgagccctggccggcccagccccatgcagaggctgctgcagcccttccagcccggcagcaagccacccttcctggccaccccacccctgccccccctgcagagcgcccccccacccagccagccccctgtgaagagcaagagctgtgagttctgtgggaagaccttcaagttccagagcaacctggtggtgcaccggcgcagccacactggagagaagccctacaagtgcaacctgtgtgaccacgcctgcacccaggccagcaagctgaagaggcacatgaagacccacatgcacaagagcagccccatgacagtgaagagtgatgatggcctgagcacagccagcagccctgagcccggcaccagtgacctggtgggcagcgccagcagcgccctgaagtctgtggtggccaagttcaagtcagaaaatgaccccaacctgatcccagaaaatggagatgaggaggaggaggaggatgatgaggaggaggaggaggaggaggaggaggaggaggaggagctgacagagagcgagcgggtggactatggcttcggcctgagcctggaggccgcccggcaccacgagaacagcagcagaggagctgtggtgggcgtgggagatgagagccgggccctgcctgatgtgatgcagggcatggtgctgagctccatgcagcacttcagcgaggccttccaccaggtgctgggggagaagcacaagaggggccacctggccgaggccgagggccaccgggacacctgtgatgaagattctgtggccggggagagtgacagaattgatgatggcaccgtgaatggccggggctgcagccctggagagagcgccagcggcggcctgagcaagaagctgctgctgggcagccccagcagcctgagccccttcagcaagaggatcaagctggagaaggagtttgacctgcccccagctgccatgcccaacacagaaaatgtgtacagccagtggctggccggctacgccgccagccggcagctgaaggaccccttcctgagctttggagacagccggcagagcccctttgccagcagcagcgagcacagcagtgaaaatggcagcctgcgcttcagcaccccacctggagagctggatggcggcatcagcggccgcagcggcaccggcagcggcggcagcaccccccacatcagcggccctggccctggccggcccagcagcaaggagggcagaagaagtgacacctgtgagtactgcggcaaggtgttcaagaactgcagcaacctgactgtgcacagaagaagccacactggagagcggccctacaagtgtgagctgtgcaactatgcctgtgcccagagcagcaagctgaccaggcacatgaagacccacggccaggtgctgcacaccccaccatttggagtggtgccccgggagctgaagatgtgtggcagcttcaggatggaggcccgggagcccctgagcagcgagaagatctag

SEQ ID NO: 327190 - DNA, 2382 bp, Artificial Sequence
  derived and/or modified sequence
atgagccggcggaagcagggcaagccccagcacctgagcaagcgggaattcagtcccgagcctcttgaggcgatcctgacggatgacgagcccgaccatggtcccctcggagcccccgaaggggatcatgatctcttgacttgtgggcagtgccagatgaattttccacttggggatattctgatttttattgaacacaagcgcaagcaatgcaatggtagcttgtgcttagagaaagctgtcgataagcctccctctccctctccaatcgagatgaaaaaagccagtaacccggtggaagtggggattcaggtcaccccagaggacgatgactgcttaagcacaagttcacggggcatttgccctaagcaggagcacattgctggtaaggatgagcctagctcatacacttgcaccacatgcaagcagccctttacaagtgcctggttcctgctgcagcacgcccagaacacgcatggcctcagaatttatttggaaagtgagcacggctcaccccttacccccagggtaggcattccctccgggctcggggccgagtgtcccagccaaccgcctctacatggcatccatattgccgataataatccatttaaccttctgcgtataccggggtcagtgagtcgtgaggcaagcggactggctgagggccggtttccgccaacccctcctctcttcagcccacccccgcggcaccatctggacccccacaggatagagcgacttggggccgaggaaatggctctagctacgcaccatccgtctgcattcgacagggtgctgcgcctgaaccccatggcgatggagcctcctgccatggattttagccgtcggctgcgcgaacttgcgggcaatacaagcagtcctccactcagtcccgggaggccctccccaatgcaacggctgttgcagcccttccagccagggagcaagcctcccttcctggcgactccgccactccctcctttacagtccgccccacccccctcccaaccgcccgttaaaagcaagagctgtgagttctgtgggaagacatttaagttccagtccaacctggtggtccaccgccgctcccacaccggcgagaaaccatacaaatgtaacctgtgcgatcatgcctgtactcaggctagcaagctcaaacgccacatgaaaacccacatgcataagagttcccccatgaccgttaagtctgacgatgggctgtcaaccgcctcctctcctgaaccaggaacatccgatctggttggctcagcgtcatctgccctgaagtctgtggtggccaagtttaagtccgaaaatgatcccaaccttatacccgagaatggagatgaagaagaggaagaggacgatgaggaggaggaagaggaggaggaagaagaggaggaagagctgactgagtccgaaagggtggattatggcttcgggctgtcactcgaagcggcccgacaccatgaaaactctagtaggggcgcagtggtcggggtgggcgatgagagccgtgccctgccagatgttatgcaggggatggtgcttagctctatgcagcacttcagcgaagcctttcatcaggtgctgggtgaaaagcacaagcgcggacacctggcagaagcggagggccacagagatacctgcgacgaggactccgttgcaggagaaagcgataggatcgacgacggtaccgtaaacgggcgggggtgctccccaggagaaagtgcttctggggggctttccaagaaattactgcttggaagtccctcgtcactgtctcccttctctaagagaatcaaactcgagaaggaattcgacctcccccctgctgcaatgccgaataccgagaacgtttactcacagtggctggccggatacgctgctagtagacagcttaaggacccctttctgtctttcggggattctaggcagtctccatttgcgtcctcttcggagcatagttccgaaaacgggtccttgcgtttctcaactccacctggggagctggatgggggaatcagcggccggtctgggactggctcgggcggctccactccacacataagtggcccgggccccggccggcccagttccaaagagggcagacgttctgatacctgcgagtattgtggaaaggttttcaagaattgctcaaaccttacggtccaccgtagatcgcatacaggtgagaggccttataagtgtgagctctgtaactatgcctgcgcccagagcagcaaacttactcgtcacatgaagactcatggtcaggtgctgcacaccccgcccttcggggtggtgcctcgcgagctgaaaatgtgtggatctttccggatggaggctcgcgaacccctgagctcggagaaaatctag

SEQ ID NO: 327191 - DNA, 2382 bp, Artificial Sequence
  derived and/or modified sequence
atgtcccgcagaaagcaaggaaaaccgcagcacttgtccaagcgcgagtttagcccggagccccttgaagccatactgactgacgacgagcctgatcatggcccactgggggctccggaaggcgatcacgacctcttaacatgtggtcaatgtcagatgaatttccccctgggcgacattttaattttcatcgagcataaacggaaacaatgcaatggttccctgtgcttagaaaaagcggtggacaagccaccctctcccagcccaatcgaaatgaagaaggcctctaaccctgttgaggtcggcatccaggttacacctgaggacgatgactgtcttagcacgtccagccgaggaatctgtcctaagcaggagcacatcgctggtaaggatgaaccttcttcttatacctgcacaacatgcaagcagcctttcacatctgcctggttcctgctccaacatgcccaaaatacacacggactgcgcatttacctggagagtgagcatggcagtccactcaccccgagagtagggattccatctggcttaggggcagagtgcccgagccagcctcccttgcatggaatacacatagctgataacaacccattcaatctgcttaggatcccgggatccgtgtctagagaggccagcggacttgccgagggcagattcccacccacccccccactattctcccctccacccagacaccatctggacccacaccgcatcgagcgtttgggagcagaggagatggctctggccacacaccacccttcggcctttgacagggtacttaggctgaacccgatggccatggagcctccagcgatggattttagccggcgactgcgagagctagctgggaacacaagctctcctccactgagtccaggtagacctagtccaatgcagagacttttgcagccatttcagcctggctccaaacccccattcttggccacacctcctctaccacccttgcaaagtgccccaccaccgtcgcagccccctgtgaagtccaagagctgcgagttctgcggtaaaactttcaaattccagtcgaatctggtcgttcacagacggtcccacacgggcgagaaaccttataaatgcaatctgtgtgaccatgcttgtactcaggcaagcaagttaaaaagacacatgaagacccacatgcacaaaagcagtcccatgacggtgaaatcagatgacggcctgagcactgcatcaagcccagagcctggaacgtctgacttagtgggttcagccagctcagccttaaagagcgtcgtcgccaaattcaagtccgagaatgaccctaatcttatcccagagaatggagacgaggaggaggaggaggatgatgaggaggaggaggaggaggaggaggaggaggaagaggagctaaccgaatctgaaagagttgactatggctttgggcttagcctggaggctgccaggcaccatgagaattctagtcgaggggcagttgtgggcgtcggagatgagtcaagagccctgcctgatgtaatgcaggggatggtgctgtccagcatgcaacactttagcgaggctttccaccaagttctgggggagaagcacaagagagggcacctggccgaggctgagggccacagagacacatgtgatgaagactcagtcgctggggaatcagataggattgatgatggaactgtgaacggcagaggttgctctcccggtgaaagcgctagcggaggactgtccaaaaagctcctgcttggctctcctagctctctcagcccttttagtaaacgcattaaactcgaaaaagaatttgacctgcccccagccgcaatgcctaatactgaaaatgtatattcccagtggcttgcaggctatgccgcaagccggcagctcaaggacccattcctgtcgtttggcgactccagacagtccccatttgcgagcagttctgagcactcctcagagaatgggagtctccggttctctacccctccaggcgaactggatggaggcattagtgggagatctggaactggatccggcggatccacaccccatatctctggaccagggccaggcagaccgtcaagcaaggaggggagacggagtgacacgtgcgagtattgtgggaaggtcttcaaaaactgcagcaacctgacagtgcaccgccgatcccataccggagagcggccttataagtgcgaattatgtaattatgcatgcgcccagagctctaaactgacaagacatatgaagacacacggacaagtacttcataccccgcctttcggcgtggtccccagagaactaaaaatgtgtggctcattcaggatggaagcgagagagcccttgtcttctgagaaaatctag

SEQ ID NO: 327192 - DNA, 2660 bp, Artificial Sequence
  derived and/or modified sequence
ggatgtcaaaaggcactgatgaagatattttctctggagtctccttctttctaacccggctctcccgatgtgaaccgagccgtcgtccgcccgccgccgccgccgccgccgccgccgcccgccccgcagcccaccatgtctcgccgcaagcaaggcaaaccccagcacttaagcaaacgggaattctcgcccgagcctcttgaagccattcttacagatgatgaaccagaccacggcccgttgggagctccagaaggggatcatgacctcctcacctgtgggcagtgccagatgaacttcccattgggggacattcttatttttatcgagcacaaacggaaacaatgcaatggcagcctctgcttagaaaaagctgtggataagccaccttccccttcaccaatcgagatgaaaaaagcatccaatcccgtggaggttggcatccaggtcacgccagaggatgacgattgtttatcaacgtcatctagaggaatttgccccaaacaggaacacatagcaggtaaagatgagcccagcagctacacatgtacaacttgcaaacagccattcaccagtgcatggtttctcttgcaacacgcacagaacactcatggattaagaatctacttagaaagcgaacacggaagtcccctgaccccgcgggttggtatcccttcaggactaggtgcagaatgtccttcccagccacctctccatgggattcatattgcagacaataacccctttaacctgctaagaataccaggatcagtatcgagagaggcttccggcctggcagaagggcgctttccacccactccccccctgtttagtccaccaccgagacatcacttggacccccaccgcatagagcgcctgggggcggaagagatggccctggccacccatcacccgagtgcctttgacagggtgctgcggttgaatccaatggctatggagcctcccgccatggatttctctaggagacttagagagctggcagggaacacgtctagcccaccgctgtccccaggccggcccagccctatgcaaaggttactgcaaccattccagccaggtagcaagccgcccttcctggcgacgccccccctccctcctctgcaatccgcccctcctccctcccagcccccggtcaagtccaagtcatgcgagttctgcggcaagacgttcaaatttcagagcaacctggtggtgcaccggcgcagccacacgggcgagaagccctacaagtgcaacctgtgcgaccacgcgtgcacccaggccagcaagctgaagcgccacatgaagacgcacatgcacaaatcgtcccccatgacggtcaagtccgacgacggtctctccaccgccagctccccggaacccggcaccagcgacttggtgggcagcgccagcagcgcgctcaagtccgtggtggccaagttcaagagcgagaacgaccccaacctgatcccggagaacggggacgaggaggaagaggaggacgacgaggaagaggaagaagaggaggaagaggaggaggaggagctgacggagagcgagagggtggactacggcttcgggctgagcctggaggcggcgcgccaccacgagaacagctcgcggggcgcggtcgtgggcgtgggcgacgagagccgcgccctgcccgacgtcatgcagggcatggtgctcagctccatgcagcacttcagcgaggccttccaccaggtcctgggcgagaagcataagcgcggccacctggccgaggccgagggccacagggacacttgcgacgaagactcggtggccggcgagtcggaccgcatagacgatggcactgttaatggccgcggctgctccccgggcgagtcggcctcggggggcctgtccaaaaagctgctgctgggcagccccagctcgctgagccccttctctaagcgcatcaagctcgagaaggagttcgacctgcccccggccgcgatgcccaacacggagaacgtgtactcgcagtggctcgccggctacgcggcctccaggcagctcaaagatcccttccttagcttcggagactccagacaatcgccttttgcctcctcgtcggagcactcctcggagaacgggagtttgcgcttctccacaccgcccggggagctggacggagggatctcggggcgcagcggcacgggaagtggagggagcacgccccatattagtggtccgggcccgggcaggcccagctcaaaagagggcagacgcagcgacacttgtgagtactgtgggaaagtcttcaagaactgtagcaatctcactgtccacaggagaagccacacgggcgaaaggccttataaatgcgagctgtgcaactatgcctgtgcccagagtagcaagctcaccaggcacatgaaaacgcatggccaggttcttcacacacccccattcggcgtagtacccagagagctcaagatgtgtggcagttttcggatggaagctcgagagcccttaagttctgagaaaatttgaagcccccaggggtggggtggacgcgtgccgcccagtcgacgtcagcgtggtctgtcatcctgctagtttgtgatgttttctgacagtagcctccaagaagccgttgtgcgaagacagagtcctgcagagtccttccagcctag

SEQ ID NO: 327193 - DNA, 2382 bp, Artificial Sequence
  derived and/or modified sequence
atgagcagaagaaagcagggcaagccccagcacctgagcaagagagagttcagccccgagcccctggaggccatcctgaccgacgacgagcccgaccacggccccctgggcgcccccgagggcgaccacgacctgctgacctgcggccagtgccagatgaacttccccctgggcgacatcctgatcttcatcgagcacaagagaaagcagtgcaacggcagcctgtgcctggagaaggccgtggacaagccccccagccccagccccatcgagatgaagaaggccagcaaccccgtggaggtgggcatccaggtgacccccgaggacgacgactgcctgagcaccagcagcagaggcatctgccccaagcaggagcacatcgccggcaaggacgagcccagcagctacacctgcaccacctgcaagcagcccttcaccagcgcctggttcctgctgcagcacgcccagaacacccacggcctgagaatctacctggagagcgagcacggcagccccctgacccccagagtgggcatccccagcggcctgggcgccgagtgccccagccagccccccctgcacggcatccacatcgccgacaacaaccccttcaacctgctgagaatccccggcagcgtgagcagagaggccagcggcctggccgagggcagattcccccccaccccccccctgttcagccccccccccagacaccacctggacccccacagaatcgagagactgggcgccgaggagatggccctggccacccaccaccccagcgccttcgacagagtgctgagactgaaccccatggccatggagccccccgccatggacttcagcagaagactgagagagctggccggcaacaccagcagcccccccctgagccccggcagacccagccccatgcagagactgctgcagcccttccagcccggcagcaagccccccttcctggccaccccccccctgccccccctgcagagcgcccccccccccagccagccccccgtgaagagcaagagctgcgagttctgcggcaagaccttcaagttccagagcaacctggtggtgcacagaagaagccacaccggcgagaagccctacaagtgcaacctgtgcgaccacgcctgcacccaggccagcaagctgaagagacacatgaagacccacatgcacaagagcagccccatgaccgtgaagagcgacgacggcctgagcaccgccagcagccccgagcccggcaccagcgacctggtgggcagcgccagcagcgccctgaagagcgtggtggccaagttcaagagcgagaacgaccccaacctgatccccgagaacggcgacgaggaggaggaggaggacgacgaggaggaggaggaggaggaggaggaggaggaggaggagctgaccgagagcgagagagtggactacggcttcggcctgagcctggaggccgccagacaccacgagaacagcagcagaggcgccgtggtgggcgtgggcgacgagagcagagccctgcccgacgtgatgcagggcatggtgctgagcagcatgcagcacttcagcgaggccttccaccaggtgctgggcgagaagcacaagagaggccacctggccgaggccgagggccacagagacacctgcgacgaggacagcgtggccggcgagagcgacagaatcgacgacggcaccgtgaacggcagaggctgcagccccggcgagagcgccagcggcggcctgagcaagaagctgctgctgggcagccccagcagcctgagccccttcagcaagagaatcaagctggagaaggagttcgacctgccccccgccgccatgcccaacaccgagaacgtgtacagccagtggctggccggctacgccgccagcagacagctgaaggaccccttcctgagcttcggcgacagcagacagagccccttcgccagcagcagcgagcacagcagcgagaacggcagcctgagattcagcaccccccccggcgagctggacggcggcatcagcggcagaagcggcaccggcagcggcggcagcaccccccacatcagcggccccggccccggcagacccagcagcaaggagggcagaagaagcgacacctgcgagtactgcggcaaggtgttcaagaactgcagcaacctgaccgtgcacagaagaagccacaccggcgagagaccctacaagtgcgagctgtgcaactacgcctgcgcccagagcagcaagctgaccagacacatgaagacccacggccaggtgctgcacaccccccccttcggcgtggtgcccagagagctgaagatgtgcggcagcttcagaatggaggccagagagcccctgagcagcgagaagatctag

SEQ ID NO: 327194 - protein, 13 aa, Artificial Sequence
  derived and/or modified sequence
SYSMEHFRWGKPV

SEQ ID NO: 327195 - protein, 22 aa, Artificial Sequence
  derived and/or modified sequence
AEKKDEGPYRMEHFRWGSPPKD

SEQ ID NO: 327196 - protein, 12 aa, Artificial Sequence
  derived and/or modified sequence
YVMGHFRWDRFG

SEQ ID NO: 327197 - protein, 17 aa, Artificial Sequence
  derived and/or modified sequence
SYSMEHFRWGKPVGKKR

SEQ ID NO: 327198 - protein, 267 aa, Artificial Sequence
  derived and/or modified sequence
MPRSCCSRSGALLLALLLQASMEVRGWCLESSQCQDLTTESNLLECIRACKPDLSAETPMFPGNGDEQPLTENPRKYVMGHFRWDRFGRRNSSSSGSSGAGQKREDVSAGEDCGPLPEGGPEPRSDGAKPGPREGKRSYSMEHFRWGKPVGKKRRPVKVYPNGAEDESAEAFPLEFKRELTGQRLREGDGPDGPADDGAGAQADLEHSLLVAAEKKDEGPYRMEHFRWGSPPKDKRYGGFMTSEKSQTPLVTLFKNAIIKNAYKKGE

SEQ ID NO: 327199 - protein, 246 aa, Artificial Sequence
  derived and/or modified sequence
MPRSCCSRSGALLLALLLQASMEVRGWCLESSQCQDLTTESNLLECIRACKPDLSAETPMFPGNGDEQPLTENPRKYVMGHFRWDRFGRRNSSSSGSSGAGQKREDVSAGEDCGPLPEGGPEPRSDGAKPGPREGKRSYSMEHFRWGKPVGKKRRPVKVYPNGAEDESAEAFPLEFKRELTGQRLREGDGPDGPADDGAGAQADLEHSLLVAAEKKDEGPYRMEHFRWGSPPKDKRYGGFMTSEKS

SEQ ID NO: 327200 - DNA, 437 bp, Artificial Sequence
  derived and/or modified sequence
aagcttttggaccctcgtacagaagctaatacgactcactatagggaaataagagagaaaagaagagtaagaagaaatataagagccaccatgcctagatcatgttgttcacgatcgggagcgttgttgctggcactcttgctccaagcctcgatggaagtgcggggatggtgccttgagagctcccagtgccaggacctcacaacggagtcgaaccttctggaatgcatccgcgcgtgtaaaccgagggaaggtaaaaggtcctacagcatggagcacttcagatgggggaagcccgtcgggaagaagcggtgaagcgctgccttctgcggggcttgccttctggccatgcccttcttctctcccttgcacctgtacctcttggtctttgaataaagcctgagtaggaaggcggccgctcgagcatgcatctagag

SEQ ID NO: 327201 - DNA, 3081 bp, Artificial Sequence
  derived and/or modified sequence
tagaaaaactcatcgagcatcaaatgaaactgcaatttattcatatcaggattatcaataccatatttttgaaaaagccgtttctgtaatgaaggagaaaactcaccgaggcagttccataggatggcaagatcctggtatcggtctgcgattccgactcgtccaacatcaatacaacctattaatttcccctcgtcaaaaataaggttatcaagtgagaaatcaccatgagtgacgactgaatccggtgagaatggcaaaagtttatgcatttctttccagacttgttcaacaggccagccattacgctcgtcatcaaaatcactcgcatcaaccaaaccgttattcattcgtgattgcgcctgagcgaggcgaaatacgcgatcgctgttaaaaggacaattacaaacaggaatcgagtgcaaccggcgcaggaacactgccagcgcatcaacaatattttcacctgaatcaggatattcttctaatacctggaacgctgtttttccggggatcgcagtggtgagtaaccatgcatcatcaggagtacggataaaatgcttgatggtcggaagtggcataaattccgtcagccagtttagtctgaccatctcatctgtaacatcattggcaacgctacctttgccatgtttcagaaacaactctggcgcatcgggcttcccatacaagcgatagattgtcgcacctgattgcccgacattatcgcgagcccatttatacccatataaatcagcatccatgttggaatttaatcgcggcctcgacgtttcccgttgaatatggctcatattcttcctttttcaatattattgaagcatttatcagggttattgtctcatgagcggatacatatttgaatgtatttagaaaaataaacaaataggggtcagtgttacaaccaattaaccaattctgaacattatcgcgagcccatttatacctgaatatggctcataacaccccttgtttgcctggcggcagtagcgcggtggtcccacctgaccccatgccgaactcagaagtgaaacgccgtagcgccgatggtagtgtggggactccccatgcgagagtagggaactgccaggcatcaaataaaacgaaaggctcagtcgaaagactgggcctttcgcccgggctaattagggggtgtcgcccttcgctgaataagcttttggaccctcgtacagaagctaatacgactcactatagggaaataagagagaaaagaagagtaagaagaaatataagagccaccatgcctagatcatgttgttcacgatcgggagcgttgttgctggcactcttgctccaagcctcgatggaagtgcggggatggtgccttgagagctcccagtgccaggacctcacaacggagtcgaaccttctggaatgcatccgcgcgtgtaaaccgagggaaggtaaaaggtcctacagcatggagcacttcagatgggggaagcccgtcgggaagaagcggtgaagcgctgccttctgcggggcttgccttctggccatgcccttcttctctcccttgcacctgtacctcttggtctttgaataaagcctgagtaggaaggcggccgctcgagcatgcatctagagcgtcaaagggcgacacaaaatttattctaaatgcataataaatactgataacatcttatagtttgtattatattttgtattatcgttgacatgtataattttgatatcaaaaactgattttccctttattattttcgagatttattttcttaattctctttaacaaactagaaatattgtatatacaaaaaatcataaataatagatgaatagtttaattataggtgttcatcaatcgaaaaagcaacgtatcttatttaaagtgcgttgcttttttctcatttataaggttaaataattctcatatatcaagcaaagtgacaggcgcccttaaatattctgacaaatgctctttccctaaactccccccataaaaaaacccgccgaagcgggtttttacgttatttgcggattaacgattactcgttatcagaaccgcccagggggcccgagcttaagactggccgtcgttttacaacacagaaagagtttgtagaaacgcaaaaaggccatccgtcaggggccttctgcttagtttgatgcctggcagttccctactctcgccttccgcttcctcgctcactgactcgctgcgctcggtcgttcggctgcggcgagcggtatcagctcactcaaaggcggtaatacggttatccacagaatcaggggataacgcaggaaagaacatgtgagcaaaaggccagcaaaaggccaggaaccgtaaaaaggccgcgttgctggcgtttttccataggctccgcccccctgacgagcatcacaaaaatcgacgctcaagtcagaggtggcgaaacccgacaggactataaagataccaggcgtttccccctggaagctccctcgtgcgctctcctgttccgaccctgccgcttaccggatacctgtccgcctttctcccttcgggaagcgtggcgctttctcatagctcacgctgtaggtatctcagttcggtgtaggtcgttcgctccaagctgggctgtgtgcacgaaccccccgttcagcccgaccgctgcgccttatccggtaactatcgtcttgagtccaacccggtaagacacgacttatcgccactggcagcagccactggtaacaggattagcagagcgaggtatgtaggcggtgctacagagttcttgaagtggtgggctaactacggctacactagaagaacagtatttggtatctgcgctctgctgaagccagttaccttcggaaaaagagttggtagctcttgatccggcaaacaaaccaccgctggtagcggtggtttttttgtttgcaagcagcagattacgcgcagaaaaaaaggatctcaagaagatcctttgatcttttctacggggtctgacgctcagtggaacgacgcgcgcgtaactcacgttaagggattttggtcatgagcttgcgccgtcccgtcaagtcagcgtaatgctctgcttt

SEQ ID NO: 327202 - DNA, 804 bp, Artificial Sequence
  derived and/or modified sequence
atgcccagaagctgctgcagcagaagcggcgccctgctgctggccctgctgctgcaggccagcatggaggtgagaggctggtgcctggagagcagccagtgccaggacctgaccaccgagagcaacctgctggagtgcatcagagcctgcaagcccgacctgagcgccgagacccccatgttccccggcaacggcgacgagcagcccctgaccgagaaccccagaaagtacgtgatgggccacttcagatgggacagattcggcagaagaaacagcagcagcagcggcagcagcggcgccggccagaagagagaggacgtgagcgccggcgaggactgcggccccctgcccgagggcggccccgagcccagaagcgacggcgccaagcccggccccagagagggcaagagaagctacagcatggagcacttcagatggggcaagcccgtgggcaagaagagaagacccgtgaaggtgtaccccaacggcgccgaggacgagagcgccgaggccttccccctggagttcaagagagagctgaccggccagagactgagagagggcgacggccccgacggccccgccgacgacggcgccggcgcccaggccgacctggagcacagcctgctggtggccgccgagaagaaggacgagggcccctacagaatggagcacttcagatggggcagcccccccaaggacaagagatacggcggcttcatgaccagcgagaagagccagacccccctggtgaccctgttcaagaacgccatcatcaagaacgcctacaagaagggcgagtag

SEQ ID NO: 327203 - DNA, 741 bp, Artificial Sequence
  derived and/or modified sequence
atgcccagaagctgctgcagcagaagcggcgccctgctgctggccctgctgctgcaggccagcatggaggtgagaggctggtgcctggagagcagccagtgccaggacctgaccaccgagagcaacctgctggagtgcatcagagcctgcaagcccgacctgagcgccgagacccccatgttccccggcaacggcgacgagcagcccctgaccgagaaccccagaaagtacgtgatgggccacttcagatgggacagattcggcagaagaaacagcagcagcagcggcagcagcggcgccggccagaagagagaggacgtgagcgccggcgaggactgcggccccctgcccgagggcggccccgagcccagaagcgacggcgccaagcccggccccagagagggcaagagaagctacagcatggagcacttcagatggggcaagcccgtgggcaagaagagaagacccgtgaaggtgtaccccaacggcgccgaggacgagagcgccgaggccttccccctggagttcaagagagagctgaccggccagagactgagagagggcgacggccccgacggccccgccgacgacggcgccggcgcccaggccgacctggagcacagcctgctggtggccgccgagaagaaggacgagggcccctacagaatggagcacttcagatggggcagcccccccaaggacaagagatacggcggcttcatgaccagcgagaagagctag

SEQ ID NO: 327204 - DNA, 804 bp, Artificial Sequence
  derived and/or modified sequence
atgcctaggtcatgttgtagtagaagtggcgccctgcttctggcattactgctccaggcttcaatggaggtgcgggggtggtgcctggagtcgtcccagtgtcaggatcttacgacagaatccaatcttttagagtgtatccgcgcctgtaagcctgacctttccgcagaaacccctatgtttccagggaacggcgacgaacagccactgacagaaaatcctcgaaaatatgtcatggggcactttaggtgggacagattcggccgacggaattcctccagctcgggctcctccggcgccggccagaagcgggaggacgtcagcgctggcgaggactgcggacccctgcctgaagggggtcctgagccccggtcagatggcgccaagcctggcccacgggagggaaaaaggagctattcgatggaacattttcggtggggaaagccagtgggaaagaagagaaggcccgtgaaagtttatcccaacggggcagaagacgaaagcgccgaagcctttccactggaatttaagagagaactcacggggcagcgtctccgggaaggagacggacccgatggcccagccgacgatggcgccggcgcccaggccgatctcgagcattccctgctggtggccgctgaaaagaaagacgagggtccttatcgtatggagcactttcggtgggggtcgccacctaaagacaaacgctacggggggtttatgaccagcgaaaaatcacaaacgccgttggtcacattgtttaagaatgcaatcatcaagaatgcctataagaagggcgagtag

SEQ ID NO: 327205 - DNA, 804 bp, Artificial Sequence
  derived and/or modified sequence
atgcctcggtcctgttgtagtagatctggtgccctcctgctagccctcctgctgcaagcctcaatggaggtacgtgggtggtgtcttgagtcatctcagtgccaggatctcactacggagagcaatcttctggagtgcataagggcctgcaagcccgatctcagtgccgagactcctatgtttcccggcaatggagatgagcaaccactgacggagaacccaagaaaatacgtaatgggtcacttcaggtgggatcggttcggccgacgtaacagttcgtcatccgggagctctggcgccggacagaagcgggaagatgtgagtgcaggggaagattgcggacccttgcctgaaggtggtcccgaaccaaggagcgacggggccaagccaggtccaagggagggcaagagatcttatagcatggagcacttccgctggggcaagccggtgggtaaaaagcgacgacctgtgaaagtgtacccaaacggagccgaggacgagtctgcagaggcgtttccgctggaattcaagagagagcttacgggccagcgcctcagggaaggggacggccccgacggccctgcagacgatggcgctggcgcacaggcggacttagagcattctctacttgtggccgccgaaaaaaaggacgagggcccttataggatggagcactttaggtgggggtcaccgcccaaggataagcgctacggaggattcatgaccagcgaaaagtctcaaaccccactggttaccctgttcaaaaacgcaatcatcaagaatgcatacaaaaagggcgaatag

SEQ ID NO: 327206 - DNA, 804 bp, Artificial Sequence
  derived and/or modified sequence
atgcctcggtcttgctgctcccggtcaggagcactcctacttgcacttttgctccaagcttcaatggaagttcgaggatggtgcctggagagcagccagtgtcaagatttaaccacagagagtaacttgttggagtgtataagagcttgtaaacccgacctgtcagcagaaacaccgatgttcccaggaaacggcgacgagcaaccgttgaccgaaaatccaagaaaatatgttatggggcacttccgctgggatagatttggcagacgaaactccagcagtagcggcagtagcggagccggtcaaaagcgggaagatgtgtctgccggggaagactgtggccccttaccggaagggggccctgagccccgtagcgacggtgctaaacctggacctcgggaaggtaagaggtcttacagtatggaacacttccgctgggggaagcccgtcggaaagaaacgacggccggtgaaagtatatcccaacggggcagaagatgagtctgcagaagcctttccactggaatttaagcgagagctgaccggtcagcggctgcgggagggagacggccctgacggtccggccgatgatggggcaggagcgcaggccgacctcgagcattcgctcctcgtggctgccgagaagaaggatgaaggcccttaccgcatggaacattttagatggggcagtcccccaaaagacaagcgatatgggggatttatgacaagcgagaagtcccaaactcctcttgtgaccctcttcaagaacgcaatcattaaaaatgcatacaagaaaggggagtag

SEQ ID NO: 327207 - DNA, 804 bp, Artificial Sequence
  derived and/or modified sequence
atgccacgctcctgctgtagccggtcaggagccttgctgctggctctactcctgcaggcctctatggaagtgcgcggctggtgcctcgagagcagccagtgccaggacctgacgaccgaatcaaatctacttgagtgtataagagcttgcaagccagatttgtcagccgaaacgcctatgtttcctggaaatggagatgaacagcctctaaccgaaaatccgagaaaatatgtgatgggccacttcaggtgggatcgcttcggaagacgaaattcttcgagctcgggatcatctggggccggtcagaagagggaggatgtgtctgcaggcgaagactgcggtccactcccagagggtgggcccgaacccagatctgacggcgcaaagcccggtcctagggaggggaagcgtagctactccatggagcacttccggtggggcaagcctgtaggcaagaagaggagaccagttaaagtgtatcccaacggtgcagaggacgaaagtgctgaggcattcccactcgagttcaagcgcgaactcaccgggcagaggctgagggaaggcgacggccccgatggcccagctgatgatggggcaggggcgcaagctgatctggagcattccttgttagttgcagccgagaaaaaggatgagggcccttatcgcatggagcatttccgctggggatcaccgcccaaagacaagcgctatggtggatttatgacctctgaaaagtcacagactcctttggtgactcttttcaagaatgccatcattaagaacgcatataaaaaaggggagtag

SEQ ID NO: 327208 - DNA, 741 bp, Artificial Sequence
  derived and/or modified sequence
atgcctcgcagttgctgttcacgctcaggcgctctgctgctcgcgctgctgttgcaagcttctatggaggtacgcgggtggtgcctggagagttcacaatgtcaagacctgaccacggagtccaacctgctggaatgcatacgggcttgcaagcccgacctgtcagctgagacgccaatgttcccggggaatggagatgagcagcccctgaccgagaatcctcggaagtacgtcatgggtcacttcaggtgggatagattcggtcgaagaaatagtagcagctcgggtagctcaggcgccgggcagaaacgtgaagacgtttccgctggagaggattgcggaccattacctgagggaggcccagagcccagatcagatggtgccaagcccgggccgcgcgagggtaagcgcagttatagtatggagcactttcgttggggaaagccagtgggcaaaaagcgaaggccagtgaaggtataccctaacggcgcagaagacgaatctgccgaggcctttccccttgagtttaaaagagagctcactggccaacggcttcgagagggcgacggcccggacggtcctgcagatgatggagctggcgcacaggcagacctggaacactcactcctcgttgcagccgaaaagaaagatgaaggaccctaccgaatggagcacttccgctggggttccccacctaaagacaaaaggtatggcgggtttatgactagcgagaaaagctag

SEQ ID NO: 327209 - DNA, 804 bp, Artificial Sequence
  derived and/or modified sequence
atgcccaggagctgctgcagccgcagcggggccctgctgctggccctgctgctgcaggcctccatggaggtgcggggctggtgcctggagagcagccagtgccaggacctgaccacagagagcaacctgctggagtgcatccgggcctgcaagccagacctgtctgctgagacccccatgtttcctggaaatggagatgagcagcccctgacagagaaccccaggaaatatgtgatgggccacttccgctgggacagatttggaagaagaaacagcagcagcagcggcagcagcggggccggccagaagagagaagatgtgtctgctggggaggactgtggccccctgcctgagggcggccctgagcccaggagtgatggagccaagccaggcccccgggagggcaagaggagctacagcatggagcacttccgctggggcaagcctgtgggcaagaagaggaggcctgtgaaggtgtaccccaacggggctgaagatgagagcgctgaggccttccccctggagttcaagcgggagctgaccggccagaggctgcgggagggagatggcccagatggccctgcagatgatggagctggggcccaggccgacctggagcacagcctgctggtggccgctgagaagaaggatgagggcccctacaggatggagcacttccgctggggcagcccccccaaggacaagagatatggaggcttcatgaccagcgagaagagccagacccccctggtgaccctcttcaagaatgccatcatcaagaatgcctacaagaagggggagtag

SEQ ID NO: 327210 - DNA, 741 bp, Artificial Sequence
  derived and/or modified sequence
atgcccaggagctgctgcagccgcagcggggccctgctgctggccctgctgctgcaggcctccatggaggtgcggggctggtgcctggagagcagccagtgccaggacctgaccacagagagcaacctgctggagtgcatccgggcctgcaagccagacctgtctgctgagacccccatgtttcctggaaatggagatgagcagcccctgacagagaaccccaggaaatatgtgatgggccacttccgctgggacagatttggaagaagaaacagcagcagcagcggcagcagcggggccggccagaagagagaagatgtgtctgctggggaggactgtggccccctgcctgagggcggccctgagcccaggagtgatggagccaagccaggcccccgggagggcaagaggagctacagcatggagcacttccgctggggcaagcctgtgggcaagaagaggaggcctgtgaaggtgtaccccaacggggctgaagatgagagcgctgaggccttccccctggagttcaagcgggagctgaccggccagaggctgcgggagggagatggcccagatggccctgcagatgatggagctggggcccaggccgacctggagcacagcctgctggtggccgctgagaagaaggatgagggcccctacaggatggagcacttccgctggggcagcccccccaaggacaagagatatggaggcttcatgaccagcgagaagagctag

SEQ ID NO: 327211 - DNA, 804 bp, Artificial Sequence
  derived and/or modified sequence
atgccccggagctgctgcagccggagcggcgccctgctgctggccctgcttcttcaggcctccatggaagtgagggggtggtgcctagagtcatcacagtgtcaggacttgacaaccgagagtaacctgcttgagtgtattagggcctgtaagcccgatctgtccgccgagacacccatgttccctggtaacggcgacgagcagccacttactgagaacccacgaaagtatgtcatgggacacttcagatgggaccggtttggccggcggaacagcagtagctccggttccagcggtgccggccagaagagggaggatgtgagcgcaggagaggactgcggtccgctccctgaaggagggcctgagcctcggagcgatggggctaaacccggaccacgtgaaggaaagcgctcttatagtatggagcacttccgctgggggaagccggtaggaaaaaagcggcgtcctgtgaaggtttatcccaacggtgctgaggatgagtctgctgaagccttcccactggagttcaagagggagctgactggacagcgattacgcgaaggagacggcccagacggacccgctgatgacggggctggggcccaagcagatcttgaacactccctattggtcgcggccgaaaaaaaggacgaggggccctatcggatggagcactttcggtggggcagcccccctaaagataagcggtacgggggattcatgactagcgagaaaagccagacccccctggttactctgttcaaaaatgccataatcaagaacgcctacaagaagggtgaatag

SEQ ID NO: 327212 - DNA, 804 bp, Artificial Sequence
  derived and/or modified sequence
atgccccggagctgctgcagccggagcggcgccctgctgctggccctgttactccaagcaagtatggaggttcgggggtggtgccttgagtcctctcagtgccaggatcttacaaccgagtccaaccttctggagtgcatcagagcatgcaaacccgatctttcggccgagacacctatgttccccggaaacggtgatgaacagcctctcacggaaaacccacggaaatatgtgatgggacattttagatgggacaggtttggaaggagaaattcaagttcttccggcagctcgggcgccggacagaaaagagaagacgtgtcagcaggcgaggactgtggcccgctccccgaaggcggccctgagccccgttccgatggcgccaagccagggcctcgcgaggggaaaagatcatattccatggagcattttcggtgggggaaacccgtggggaagaagcgccggccagtgaaagtataccctaatggggccgaggacgaatctgctgaagcctttccgctggagtttaagcgcgagcttaccggtcagaggctgcgcgaaggagacgggccagacgggcccgccgatgacggcgccggagcccaagccgacctggagcatagcctgctggtcgccgccgagaagaaggacgagggtccatatcggatggagcactttaggtggggatctccgccaaaagataaaaggtatggcgggttcatgacgtcggagaagagccagacacctctggttaccttattcaagaatgcaattatcaagaacgcgtataagaaaggagagtag

SEQ ID NO: 327213 - DNA, 804 bp, Artificial Sequence
  derived and/or modified sequence
atgccccggagctgctgcagccggagcggcgccctgctgctggccctcctgctgcaggcgtccatggaggttcgcggatggtgcttagagagcagtcagtgtcaagacctgactactgagtcaaacctgttggaatgcattcgggcctgcaagccggacctctcagccgagacacctatgttcccagggaatggtgatgagcagccacttacagaaaacccacggaaatacgtaatggggcatttccgctgggatcggttcggacggcgcaactcttcttccagtgggagctcaggagccggccaaaagagagaagatgtctcggccggcgaggactgcggccctctgccagaaggcggccccgaacctcgcagtgacggtgcgaagcctggtcccagggagggaaaacgctcatattcaatggagcatttcagatgggggaagcccgtcgggaagaaacggcggcccgtgaaagtttaccctaatggtgccgaggacgaatctgctgaggcctttcctctggagtttaagagggaactcacaggacaaaggctgcgcgagggcgacggccctgatggacccgctgacgatggggctggagcccaggccgacctggagcatagcctgctggtggcggccgaaaaaaaggacgaaggtccgtaccgcatggagcactttcgctgggggtctcccccaaaggataaacggtacgggggctttatgacctctgagaaatcccagacccctttagtgaccctgtttaaaaacgcgattatcaaaaatgcctacaagaagggggagtag

SEQ ID NO: 327214 - DNA, 804 bp, Artificial Sequence
  derived and/or modified sequence
atgccccggagctgctgcagccggagcggcgccctgctgctggccctactgctgcaggccagcatggaggtaagaggatggtgtttagaatcatcccagtgtcaggatcttaccacggagagcaatctgttggagtgcatccgagcttgcaagcctgatctcagcgcagaaacccctatgtttcctggcaatggtgatgagcagccccttactgagaatcctcgcaaatacgtaatggggcacttccgctgggatcgcttcgggcgccggaactccagctcgagcggctcaagcggggcggggcagaagcgagaagacgtctcagccggagaagactgtgggcctttgcctgaaggaggccccgagccaaggagcgatggcgcgaaacccgggccacgcgagggaaaaaggagctacagcatggaacacttccgctggggcaagccggttggaaagaaaagaagaccagtgaaggtgtatcccaatggcgcggaggacgaatctgctgaggccttcccattagagtttaaacgcgagcttacaggccagagactgcgcgaaggagatggcccagatgggccggcggacgacggcgctggcgcgcaggcagatcttgagcactcacttctggttgcagccgagaagaaagatgagggaccctataggatggagcactttcggtggggaagtccccctaaggataaacgatacggagggtttatgacctcagagaaatctcagaccccccttgtgactctgtttaaaaatgctattattaaaaatgcatacaaaaaaggggaatag

SEQ ID NO: 327215 - DNA, 741 bp, Artificial Sequence
  derived and/or modified sequence
atgccccggagctgctgcagccggagcggcgccctgctgctggccctgttactccaggccagtatggaagtaagagggtggtgtctggaaagctctcagtgccaggatctaacaactgagtctaacctcctggagtgcattcgagcctgtaaaccggacctgagcgccgaaaccccaatgtttccaggcaatggcgatgagcaacctctgacagaaaatccccggaagtacgtcatgggccactttagatgggatagattcgggcgcagaaattcttcctctagtggatcttccggtgcaggccagaagcgagaggacgtgtccgctggggaagactgcgggccactgcccgaagggggcccggaaccacggtctgatggcgcaaagccagggccacgggagggaaagagaagctactccatggagcacttccgttggggcaagcccgtcgggaagaagagacgccctgtcaaggtgtatcctaacggagccgaggacgagagcgctgaggcgtttcccctcgagtttaagcgggaactgacagggcagaggttgagggaaggggatggcccagacggacccgctgacgatggagccggcgcacaggctgacctcgagcactccctactggttgccgccgagaagaaggacgagggcccttacaggatggagcatttccggtgggggagccccccgaaagacaaaagatatgggggctttatgacaagcgaaaagagctag

SEQ ID NO: 327216 - DNA, 804 bp, Artificial Sequence
  derived and/or modified sequence
atgcccaggtcctgttgtagccggtccggggcactcctgctggcactgctgctccaggcaagtatggaagtgcgaggttggtgcctcgagagttctcaatgccaggacttaaccaccgagtcaaacttgctggagtgcatccgggcttgcaagccagatctgagtgcagagaccccaatgtttcctggcaatggtgatgaacaaccattaaccgaaaatcctcggaagtatgtgatggggcatttcaggtgggatcgcttcggcaggcggaacagttcatcttccggctcttcaggcgctggtcagaaaagagaagatgtgagtgccggtgaagattgtggaccgctgccagaggggggaccagagcccaggagcgacggagcgaagccaggtcctcgcgaggggaaacgcagctattcaatggaacacttccgttgggggaaaccagtgggtaagaagcgcaggccagtgaaggtctacccaaatggagccgaggacgagtccgcagaggcgtttccattggagtttaagcgtgaactgaccggtcagcgactgcgggagggggatggccctgatggcccagctgacgacggggcaggcgctcaagccgaccttgagcactcgctgctggtagctgccgagaaaaaagatgaagggccatatcgaatggaacacttcagatggggctctcctcccaaagacaagcgttacgggggattcatgacgtccgagaagagccagacccccttagtcacgctttttaaaaatgccattataaagaatgcatacaagaaaggtgagtag

SEQ ID NO: 327217 - DNA, 804 bp, Artificial Sequence
  derived and/or modified sequence
atgcctaggtcctgctgttctcgcagcggcgcattgctgttggcacttctcttgcaggcttcaatggaggtcaggggttggtgcctggagtcatctcagtgccaggacctcacaacagaaagcaatcttctcgaatgtattcgggcttgtaagccagacctgagtgcagaaactccgatgtttccaggaaacggagacgagcagcccctgacggaaaatccccgtaagtacgtgatgggccacttccggtgggaccgcttcggaagacgaaatagttcttcctcaggcagcagcggtgccggtcagaagcgggaggacgtcagcgccggtgaagactgcggaccgctgcctgagggaggccctgaacctcggagtgacggcgctaagcccggaccaagagaaggtaaacgatcatattctatggaacactttcgctggggtaagccggttggcaaaaagagacgcccagttaaagtttatcccaatggggctgaggatgagtcggccgaagccttccctttagaattcaagcgggaactaacaggccagaggttacgcgaaggcgatgggcctgatggtcccgctgatgacggagcaggcgctcaagcagatttggaacactcactgcttgtggctgcggaaaaaaaagatgagggaccttatcgaatggaacacttcaggtgggggagccccccaaaagacaagaggtacggcggtttcatgacaagcgaaaagagccagactccacttgttaccctgttcaagaacgccataatcaagaacgcatataagaaaggcgagtag

SEQ ID NO: 327218 - DNA, 804 bp, Artificial Sequence
  derived and/or modified sequence
atgccaaggtcatgttgttctaggagcggcgcactgctcctcgcacttttgctgcaggcctctatggaggtgaggggttggtgtttggagtccagccagtgtcaggacttaactacggagtcgaacttactggaatgcatcagagcgtgcaagcccgatctttctgccgaaacccctatgttccctggcaatggcgacgagcagcccctcaccgaaaatcccagaaaatacgtcatgggacattttaggtgggacagattcgggcgtagaaactcatcttcttccggctcatctggagccggtcagaaaagggaggatgtgtccgccggagaagactgtgggccattgccagagggtgggcctgagcctcgctcggatggagccaaacctggtccacgtgagggcaaacgttcttacagcatggaacactttcggtggggtaagccagttggtaagaaacgacgacctgtcaaggtctacccaaatggagccgaggacgaatccgcagaagcgtttccactagagtttaaacgtgaacttacagggcagcgcctgagggaaggcgacgggcctgacgggcctgccgatgatggagctggggctcaggccgatctggagcattccctgttggttgccgctgaaaaaaaggatgagggtccttataggatggaacatttcaggtgggggagccctccgaaggacaagagatacggaggattcatgacttctgaaaagtcacagactcccctggttaccctctttaaaaatgccattatcaagaatgcctacaagaagggcgagtag

SEQ ID NO: 327219 - DNA, 804 bp, Artificial Sequence
  derived and/or modified sequence
atgcctcggagctgttgtagtcgatcaggggcactgctgctcgcactcctgctccaagcatcgatggaggttcgaggttggtgtctggagagcagccagtgtcaggatcttaccaccgaatcgaatctgctcgaatgtattagagcctgtaaacctgatctaagcgcggaaacacctatgtttccaggtaacggggatgagcaacctctcaccgaaaacccacgcaaatatgtaatgggtcacttcaggtgggaccgattcggcagacgcaattcaagctcctccggctcctctggagccggtcaaaagagagaggacgtgagcgctggtgaggactgtggtccactgccagagggcggacctgagcctcggtcagatggagctaagcccggaccccgtgagggaaaaagatcgtatagcatggagcactttcggtggggaaaacctgttggtaagaagagaagaccggtcaaggtgtaccccaatggtgccgaggacgagtccgccgaagcttttccattagaatttaagagagagctgactgggcaaagattaagagagggagatggcccagatggacccgctgatgacggcgctggcgcacaagccgacttggagcactccctgctcgtagccgcagaaaagaaagacgaggggccatacaggatggagcacttccggtggggttcacctcctaaggataagaggtacggcggatttatgacgtcagaaaagtcccagactcctcttgtaacccttttcaagaacgcaattattaaaaacgcatataaaaagggcgagtag

SEQ ID NO: 327220 - DNA, 741 bp, Artificial Sequence
  derived and/or modified sequence
atgccccgatcctgttgtagtcggtcgggcgctctgctattagctctactgttacaggcctccatggaggtgaggggctggtgtttggagtcttcccagtgccaggacctgacaaccgagtccaatctgctggaatgcatccgcgcatgcaagcccgacctctccgctgaaaccccgatgttccccggaaacggagatgagcagcccctcacagaaaatccacggaaatacgtgatgggccactttcggtgggatcgttttggaagaagaaactccagcagttccgggagttcaggggcagggcagaaacgcgaggacgtttctgctggggaggactgtggccctcttccagaaggaggaccggagccgcgatctgacggagccaagcctggtcctagagaggggaagagaagttactctatggaacattttcggtgggggaagcccgttggcaagaagaggcgcccagttaaagtttacccaaatggagctgaagatgagtcggccgaggctttcccacttgaatttaagcgcgagctgacaggacagagattgcgcgaaggggacggccctgacggtcccgctgatgacggtgcaggcgcacaggcggatctggaacattctcttctcgtggccgctgaaaaaaaggatgaagggccttatcgcatggaacacttccgctggggctcccctccaaaggacaaacgctacggcggttttatgacttccgaaaaatcatag

SEQ ID NO: 327221 - DNA, 1074 bp, Artificial Sequence
  derived and/or modified sequence
ggaggggaagaagagccgcgaccgagagaggccgccgagcgtccccgccctcagagagcagcctcccgagacaggcacttgctggattctccaaaagtatctgcagtggctgttccaccaggaggggtcccaccaatcttgtttgcttctgcagagcctcagcctgcctggaagatgccgagatcgtgctgcagccgctcgggggccctgttgctggccttgctgcttcaggcctccatggaagtgcgtggctggtgcctggagagcagccagtgtcaggacctcaccacggaaagcaacctgctggagtgcatccgggcctgcaagcccgacctctcggccgagactcccatgttcccgggaaatggcgacgagcagcctctgaccgagaacccccggaagtacgtcatgggccacttccgctgggaccgattcggccgccgcaacagcagcagcagcggcagcagcggcgcagggcagaagcgcgaggacgtctcagcgggcgaagactgcggcccgctgcctgagggcggccccgagccccgcagcgatggtgccaagccgggcccgcgcgagggcaagcgctcctactccatggagcacttccgctggggcaagccggtgggcaagaagcggcgcccagtgaaggtgtaccctaacggcgccgaggacgagtcggccgaggccttccccctggagttcaagagggagctgactggccagcgactccgggagggagatggccccgacggccctgccgatgacggcgcaggggcccaggccgacctggagcacagcctgctggtggcggccgagaagaaggacgagggcccctacaggatggagcacttccgctggggcagcccgcccaaggacaagcgctacggcggtttcatgacctccgagaagagccagacgcccctggtgacgctgttcaaaaacgccatcatcaagaacgcctacaagaagggcgagtgagggcacagcggggccccagggctaccctcccccaggaggtcgaccccaaagccccttgctctcccctgccctgctgccgcctcccagcctgggggg

SEQ ID NO: 327222 - DNA, 1295 bp, Artificial Sequence
  derived and/or modified sequence
ccttcccctggcccggggagctgctccttgtgctgccgggaaggtcaaagtcccgcgcccaccaggagagctcggcaagtatataaggacagaggagcgcgggaccaagcggcggcgaaggaggggaagaagagccgcgaccgagagaggccgccgagcgtccccgccctcagagagcagcctcccgagacaggcacttgctggattctccaaaagtatctgcagtggctgttccaccaggagagcctcagcctgcctggaagatgccgagatcgtgctgcagccgctcgggggccctgttgctggccttgctgcttcaggcctccatggaagtgcgtggctggtgcctggagagcagccagtgtcaggacctcaccacggaaagcaacctgctggagtgcatccgggcctgcaagcccgacctctcggccgagactcccatgttcccgggaaatggcgacgagcagcctctgaccgagaacccccggaagtacgtcatgggccacttccgctgggaccgattcggccgccgcaacagcagcagcagcggcagcagcggcgcagggcagaagcgcgaggacgtctcagcgggcgaagactgcggcccgctgcctgagggcggccccgagccccgcagcgatggtgccaagccgggcccgcgcgagggcaagcgctcctactccatggagcacttccgctggggcaagccggtgggcaagaagcggcgcccagtgaaggtgtaccctaacggcgccgaggacgagtcggccgaggccttccccctggagttcaagagggagctgactggccagcgactccgggagggagatggccccgacggccctgccgatgacggcgcaggggcccaggccgacctggagcacagcctgctggtggcggccgagaagaaggacgagggcccctacaggatggagcacttccgctggggcagcccgcccaaggacaagcgctacggcggtttcatgacctccgagaagagccagacgcccctggtgacgctgttcaaaaacgccatcatcaagaacgcctacaagaagggcgagtgagggcacagcggggccccagggctaccctcccccaggaggtcgaccccaaagccccttgctctcccctgccctgctgccgcctcccagcctggggggtcgtggcagataatcagcctcttaaagctgcctgtagttaggaaataaaacctttcaaatttcacatccacctctgactttgaatgtaaactgtgtgaataaagtaaaaatacgtagccgtcaaataacagc

SEQ ID NO: 327223 - DNA, 959 bp, Artificial Sequence
  derived and/or modified sequence
ggacagaggagcgcgggaccaagcggcggcgaaggaggggaagaagagccgcgaccgagagaggccgccgagcgtccccgccctcagagagcagcctcccgagacagagcctcagcctgcctggaagatgccgagatcgtgctgcagccgctcgggggccctgttgctggccttgctgcttcaggcctccatggaagtgcgtggctggtgcctggagagcagccagtgtcaggacctcaccacggaaagcaacctgctggagtgcatccgggcctgcaagcccgacctctcggccgagactcccatgttcccgggaaatggcgacgagcagcctctgaccgagaacccccggaagtacgtcatgggccacttccgctgggaccgattcggccgccgcaacagcagcagcagcggcagcagcggcgcagggcagaagcgcgaggacgtctcagcgggcgaagactgcggcccgctgcctgagggcggccccgagccccgcagcgatggtgccaagccgggcccgcgcgagggcaagcgctcctactccatggagcacttccgctggggcaagccggtgggcaagaagcggcgcccagtgaaggtgtaccctaacggcgccgaggacgagtcggccgaggccttccccctggagttcaagagggagctgactggccagcgactccgggagggagatggccccgacggccctgccgatgacggcgcaggggcccaggccgacctggagcacagcctgctggtggcggccgagaagaaggacgagggcccctacaggatggagcacttccgctggggcagcccgcccaaggacaagcgctacggcggtttcatgacctccgagaagagccagacgcccctggtgacgctgttcaaaaacgccatcatcaagaacgcctacaagaagggcgagtgagggcacagcggggccccagggctaccct

SEQ ID NO: 327224 - DNA, 1426 bp, Artificial Sequence
  derived and/or modified sequence
acctcagaggctgcccggcctgccccacacgggggtgctaagcctcccgcccgttctaagcggagacccaacgccatccataattaagttcttcctgagggcgagcggccaggtgcgccttcggcaggacagtgctaattccagcccctttccagcgcgtctccccgcgctcgtcccccgtctggaagcccccctcccacgccccgcggccccccttcccctggcccggggagctgctccttgtgctgccgggaaggtcaaagtcccgcgcccaccaggagagctcggcaagtatataaggacagaggagcgcgggaccaagcggcggcgaaggaggggaagaagagccgcgaccgagagaggccgccgagcgtccccgccctcagagagcagcctcccgagacaggggtcccaccaatcttgtttgcttctgcagagcctcagcctgcctggaagatgccgagatcgtgctgcagccgctcgggggccctgttgctggccttgctgcttcaggcctccatggaagtgcgtggctggtgcctggagagcagccagtgtcaggacctcaccacggaaagcaacctgctggagtgcatccgggcctgcaagcccgacctctcggccgagactcccatgttcccgggaaatggcgacgagcagcctctgaccgagaacccccggaagtacgtcatgggccacttccgctgggaccgattcggccgccgcaacagcagcagcagcggcagcagcggcgcagggcagaagcgcgaggacgtctcagcgggcgaagactgcggcccgctgcctgagggcggccccgagccccgcagcgatggtgccaagccgggcccgcgcgagggcaagcgctcctactccatggagcacttccgctggggcaagccggtgggcaagaagcggcgcccagtgaaggtgtaccctaacggcgccgaggacgagtcggccgaggccttccccctggagttcaagagggagctgactggccagcgactccgggagggagatggccccgacggccctgccgatgacggcgcaggggcccaggccgacctggagcacagcctgctggtggcggccgagaagaaggacgagggcccctacaggatggagcacttccgctggggcagcccgcccaaggacaagcgctacggcggtttcatgacctccgagaagagccagacgcccctggtgacgctgttcaaaaacgccatcatcaagaacgcctacaagaagggcgagtgagggcacagcggggccccagggctaccctcccccaggaggtcgaccccaaagccccttgctctcccctgccctgctgccgcctcccagcctggggggtcgtggcagataatcagcctcttaaagctgcctgtagttaggaaataaaacctttcaaatttcacatcca

SEQ ID NO: 327225 - DNA, 883 bp, Artificial Sequence
  derived and/or modified sequence
ggaggggaagaagagccgcgaccgagagaggccgccgagcgtccccgccctcagagagcagcctcccgagacaggcacttgctggattctccaaaagtatctgcagtggctgttccaccaggagagcctcagcctgcctggaagatgccgagatcgtgctgcagccgctcgggggccctgttgctggccttgctgcttcaggcctccatggaagtgcgtggctggtgcctggagagcagccagtgtcaggacctcaccacggaaagcaacctgctggagtgcatccgggcctgcaagcccgacctctcggccgagactcccatgttcccgggaaatggcgacgagcagcctctgaccgagaacccccggaagtacgtcatgggccacttccgctgggaccgattcggccgccgcaacagcagcagcagcggcagcagcggcgcagggcagaagcgcgaggacgtctcagcgggcgaagactgcggcccgctgcctgagggcggccccgagccccgcagcgatggtgccaagccgggcccgcgcgagggcaagcgctcctactccatggagcacttccgctggggcaagccggtgggcaagaagcggcgcccagtgaaggtgtaccctaacggcgccgaggacgagtcggccgaggccttccccctggagttcaagagggagctgactggccagcgactccgggagggagatggccccgacggccctgccgatgacggcgcaggggcccaggccgacctggagcacagcctgctggtggcggccgagaagaaggacgagggcccctacaggatggagcacttccgctggggcagcccgcccaaggacaagcgctacggcggtttcatgacctccgagaagagcc

SEQ ID NO: 327226 - DNA, 63 bp, Artificial Sequence
  derived and/or modified sequence
atcatgcccctgtacagcagcagcggcgacagaacccccatcagcaagaaccccaccaagtag

SEQ ID NO: 327227 - DNA, 63 bp, Artificial Sequence
  derived and/or modified sequence
attatgcctttgtatagttccagtggcgatcgcaccccgatctccaagaatccaactaagtag

SEQ ID NO: 327228 - DNA, 63 bp, Artificial Sequence
  derived and/or modified sequence
attatgcctctctacagcagctcaggggacaggacgcccattagtaagaatcccacgaaatag

SEQ ID NO: 327229 - RNA, 437 nt, Artificial Sequence
  derived and/or modified sequence
aagcuuuuggacccucguacagaagcuaauacgacucacuauagggaaauaagagagaaaagaagaguaagaagaaauauaagagccaccaugccuagaucauguuguucacgaucgggagcguuguugcuggcacucuugcuccaagccucgauggaagugcggggauggugccuugagagcucccagugccaggaccucacaacggagucgaaccuucuggaaugcauccgcgcguguaaaccgagggaagguaaaagguccuacagcauggagcacuucagaugggggaagcccgucgggaagaagcggugaagcgcugccuucugcggggcuugccuucuggccaugcccuucuucucucccuugcaccuguaccucuuggucuuugaauaaagccugaguaggaaggcggccgcucgagcaugcaucuagag

SEQ ID NO: 327230 - protein, 127 aa, Artificial Sequence
  derived and/or modified sequence
MAVTEASLLRQCPLLLPQNRSKTVYEGFISAQGRDFHLRIVLPEDLQLKNARLLCSWQLRTILSGYHRIVQQRMQHSPDLMSFMMELKMLLEVALKNRQELYALPPPPQFYSSLIEEIGTLGWDKAP

SEQ ID NO: 327231 - protein, 918 aa, Artificial Sequence
  derived and/or modified sequence
MKRTKCADIDVETPDSILVNTNLRALINKHTFSVLPGDCQQRLLLLLPEVDRQVGPDGLMKLNGSALNNEFFTSAAQGWKERLSEGEFTPEMQVRIRQEIEKEKKVEPWKEQFFESYYGQSSGLSLEDSKKLTASPSDPKVKKTPAEQPKSMPVSEASLIRIVPVVSQSECKEEALQMSSPGRKEECESQGEVQPNFSTSSEPLLSSALNTHELSSILPIKCPKDEDLLEQKPVTSAEQESEKNHLTTASNYNKSESQESLVTSPSKPKSPGVEKPIVKPTAGAGPQETNMKEPLATLVDQSPESLKRKSSLTQEEAPVSWEKRPRVTENRQHQQPFQVSPQPFLNRGDRIQVRKVPPLKIPVSRISPMPFHPSQVSPRARFPVSITSPNRTGARTLADIKAKAQLVKAQRAAAAAAAAAAAAASVGGTIPGPGPGGGQGPGEGGEGQTARGGSPGSDRVSETGKGPTLELAGTGSRGGTRELLPCGPETQPQSETKTTPSQAQPHSVSGAQLQQTPPVPPTPAVSGACTSVPSPAHIEKLDNEKLNPTRATATVASVSHPQGPSSCRQEKAPSPTGFQLEDISTSQRFMLGFAGRRTSKPAMAGHYLLNISTYGRGSESFRRTHSVNPEDRFCLSSPTEALKMGYTDCKNATGESSSSKEDDTDEESTGDEQESVTVKEEPQVSQSAGKGDTSSGPHSRETLSTSDCLASKNVKAEIPLNEQTTLSKENYLFTRGQTFDEKTLARDLIQAAQKQMAHAVRGKAIRSSPELFSSTVLPLPADSPTHQPLLLPPLQTPKLYGSPTQIGPSYRGMINVSTSSDMDHNSAVPGSQVSSNVGDVMSFSVTVTTIPASQAMNPSSHGQTIPVQAFSEENSIEGTPSKCYCRLKAMIMCKGCGAFCHDDCIGPSKLCVSCLVVR

SEQ ID NO: 327232 - protein, 387 aa, Artificial Sequence
  derived and/or modified sequence
MTCLISYWVTLRKPSPVYSFGFERLEVLAVFASTVLAQLGALFILKESAERFLEQPEIHTGRLLVGTFVALCFNLFTMLSIRNKPFAYVSEAASTSWLQEHVADLSRSLCGIIPGLSSIFLPRMNPFVLIDLAGAFALCITYMLIEINNYFAVDTASAIAIALMTFGTMYPMSVYSGKVLLQTTPPHVIGQLDKLIREVSTLDGVLEVRNEHFWTLGFGSLAGSVHVRIRRDANEQMVLAHVTNRLYTLVSTLTVQIFKDDWIRPALLSGPVAANVLNFSDHHVIPMPLLKGTDDLNPVTSTPAKPSSPPPEFSFNTPGKNVNPVILLNTQTRPYGFGLNHGHTPYSSMLNQGLGVPGIGATQGLRTGFTNIPSRYGTNNRIGQPRP

SEQ ID NO: 327233 - DNA, 1164 bp, Artificial Sequence
  derived and/or modified sequence
atgacttgcttgatctcatactgggtcactctccgaaaaccttcacccgtgtacagttttggttttgagagacttgaagtgctggctgtgtttgcaagcaccgtgttggctcaactgggggccctttttatccttaaagagtcggccgaaagattcctagagcagcccgaaattcataccggacgactcctcgtaggtacttttgtagccctgtgcttcaacctgttcacgatgctctctattcgaaataagccttttgcttacgtctccgaagccgcaagtacctcatggctgcaggaacacgtggcggatctttctcgctctctatgcgggataatccctggactgagtagtatttttctcccgcgaatgaatcctttcgttctgattgatctggccggagcttttgccctatgcatcacatatatgctgattgagatcaataattacttcgccgtggacactgcttctgccattgctattgctctaatgaccttcgggaccatgtaccccatgagtgtttactccgggaaagtgttattgcagaccacgcctcctcacgtcatcggccagctggataaattaattagggaggtgagcacgctcgatggcgtgcttgaggtgcgaaacgagcacttctggaccttgggattcgggagcctggcagggagtgtgcacgtacgaatccgcagagacgctaatgagcagatggtgttggcccatgttacaaacaggctttacacactggtgtccacactgaccgtccagatatttaaggacgattggatccggccggcgctgttgtctgggcccgtggccgccaatgtccttaattttagcgaccatcatgtcatcccgatgcctttgctcaaaggcactgatgatttaaatcctgtaacaagcacgcccgccaaaccgagcagtccacccccagagttctcatttaatactcccggaaaaaacgtgaacccagtcattttactgaatacccagactaggccctacgggttcggactgaaccacggtcacaccccctacagttccatgttgaatcagggacttggcgtaccaggcatcggggctactcagggactcaggactggattcaccaacatcccatctcgttatggcaccaacaataggattggacaaccccggccctag

SEQ ID NO: 327234 - DNA, 1164 bp, Artificial Sequence
  derived and/or modified sequence
atgacctgcctgatctcctactgggtgaccctgaggaagcccagccctgtgtacagctttggatttgagcggctggaggtgctggccgtgtttgccagcacagtgctggcccagctgggcgccctcttcatcctgaaggagagcgctgagcgcttcctggagcagcctgagatccacacaggccgcctgctggtgggcacctttgtggccctgtgcttcaacctcttcaccatgctgagcatccggaacaagccctttgcctacgtgtctgaggccgccagcacctcctggctgcaggagcacgtggccgacctgagccgcagcctgtgtggcatcatccctggcctgagcagcatcttcctgcccaggatgaacccctttgtgctgattgacctggccggggcctttgccctgtgcatcacctacatgctgattgagatcaacaactactttgctgtggacacagccagcgccatcgccatcgccctgatgaccttcggcaccatgtaccccatgtctgtgtacagcggcaaggtgctgctgcagaccaccccacctcatgtgattggccagctggacaagctgatccgggaggtgtccaccctggatggagtgctggaggtgagaaatgagcacttctggaccctgggcttcggcagcctggccggctctgtgcacgtgcgcatcagaagagatgccaatgagcagatggtgctggcccacgtgaccaaccggctgtacaccctggtgtccaccctgactgtgcagatcttcaaggatgactggatccggcctgccctgctgagcggccctgtggccgccaacgtgctgaacttcagtgaccaccacgtgatccccatgcccctgctgaagggcacagatgacctgaaccctgtgaccagcaccccagccaagcccagcagccccccacctgagttctccttcaacacccctgggaagaatgtgaaccctgtgatcctgctgaacacccagacccggccctacggcttcggcctgaaccacggccacaccccctacagctccatgctgaaccagggcctgggcgtgcccggcattggagccacccagggcctgaggacaggcttcaccaacatccccagccgctatggcaccaacaaccgcatcggccagccccggccctag

SEQ ID NO: 327235 - DNA, 1164 bp, Artificial Sequence
  derived and/or modified sequence
atgacctgcctgatcagctactgggtgaccctgcggaagcccagccccgtgtactcattcggattcgagaggctggaagttctggctgtgtttgcaagcactgtgctcgcccagctgggcgcactgttcatcctgaaggagtctgcggaacgcttcttagagcaaccagaaatccataccggacgcctactggtgggtactttcgtggctttatgcttcaacctgtttacaatgctttccattcgcaataagccgtttgcatacgtcagtgaggctgcttctacgagttggctgcaggagcatgtcgctgatctgagtcgcagtctgtgtgggattatacctggactttctagcattttcctgccccgtatgaatcctttcgtactgatcgacctggcaggtgcattcgccctatgcatcacctacatgttgattgagatcaacaactactttgcagttgacaccgctagcgccatcgccattgccctcatgacattcgggactatgtacccaatgtcggtttacagcgggaaagtcttgctgcagacgacaccaccccacgtgattggccagttggacaagcttatccgggaggttagcacactggacggcgttctcgaagttcgaaatgaacacttttggacactgggctttgggtcgctggcaggctcagtacacgttaggattcgccgcgacgccaacgaacagatggtactggctcacgtgacgaatcgcctgtacacactggtcagtaccttgacagtacagatattcaaggacgactggattagacctgccttgctcagtggacctgtggcagccaacgtgttgaatttcagcgaccaccatgtgatccccatgcctctgctgaagggcacagatgatctgaatcccgtaaccagcaccccagcgaaaccatcatctcccccccctgaattttcattcaatacccccgggaagaatgtgaatccagtgattttgctcaacacgcagacacgaccgtacggcttcggactaaaccacggccatactccatacagttctatgctcaatcagggtcttggagtgcccggcatcggcgctacgcagggtctgaggacgggttttaccaatatcccaagtaggtatggcaccaacaacagaatcggtcagccaaggccctag

SEQ ID NO: 327236 - DNA, 1164 bp, Artificial Sequence
  derived and/or modified sequence
atgacttgccttatatcatactgggtgacgctgcgtaaaccgtccccagtgtatagtttcggatttgaaagactggaagtgctcgcagtattcgccagtactgttttagcacagctcggtgcactgttcatcctcaaggaatcagccgaacgctttctcgagcaacccgagatccacaccggcaggttactggtggggaccttcgtggccctgtgctttaacctctttacgatgctatccattcggaataagccgtttgcttatgtctctgaggccgcttctacctcctggctccaagagcatgtggcagacctgtcgcgcagtctgtgcggtataatccctggacttagcagcatcttcctgcctcgcatgaatcccttcgtgctgatagatctcgccggagccttcgctctgtgcataacctatatgctgatcgagattaataattacttcgccgtcgacacagcttcagccattgcgattgcattaatgacatttgggaccatgtacccaatgtcagtttacagcgggaaggtgctgctgcagacaacacccccacacgttataggacagctggacaagctgatcagggaagtgtcaacactggacggtgttcttgaagtgagaaacgagcacttctggaccctcgggttcgggagcctggccggtagcgttcatgtgaggattcgtcgagatgccaatgagcaaatggtgctcgctcacgttactaatagactttacactctggtatcaactctcacagtgcagatcttcaaggatgattggatcagacctgccctgctgtctggtccagtcgcagcaaatgtcctcaatttctccgaccatcacgtgatccccatgcctctcctaaaagggacagacgacctgaatcctgtgacctccacacctgctaaaccctcttcaccccctccagaattctcgttcaatactcccggaaagaacgtaaaccctgtaatcttgctgaacacccaaacacggccttacggtttcgggctgaatcacgggcataccccatacagctcgatgctgaatcaaggcctgggggtcccgggaatcggcgctacccaagggctgcgtactggctttaccaacattccctctcggtatggaacaaacaacagaatcggacagccccgtccctag

SEQ ID NO: 327237 - DNA, 4589 bp, Artificial Sequence
  derived and/or modified sequence
ggcttccggcgggagctgtgcagctccttatcatgtttaatgacatgtttaataagttactgggtaacattgaggaaacctagccctgtctattcatttgggtttgaaagattagaagtcctggctgtatttgcctccacagtcttggcacagttgggagctctctttatattaaaagaaagtgcagaacgctttttggaacagcccgagatacacacgggaagattattagttggtacttttgtggctctttgtttcaacctgttcacgatgctttctattcggaataaaccttttgcttatgtctcagaagctgctagtacgagctggcttcaagagcatgttgcagatcttagtcgaagcttgtgtggaattattccgggacttagcagtatcttccttccccgaatgaatccatttgttttgattgatcttgctggagcatttgctctttgtattacatatatgctcattgaaattaataattattttgccgtagacactgcctctgctatagctattgccttgatgacatttggcactatgtatcccatgagtgtgtacagtgggaaagtcttactccagacaacaccaccccatgttattggtcagttggacaaactcatcagagaggtatctaccttagatggagttttagaagtccgaaatgaacatttttggaccctaggttttggctcattggctggatcagtgcatgtaagaattcgacgagatgccaatgaacaaatggttcttgctcatgtgaccaacaggctgtacactctagtgtctactctaactgttcaaattttcaaggatgactggattaggcctgccttattgtctgggcctgttgcagccaatgtcctaaacttttcagatcatcacgtaatcccaatgcctcttttaaagggtactgatgatttgaacccagttacatcaactccagctaaacctagtagtccacctccagaattttcatttaacactcctgggaaaaatgtgaacccagttattcttctaaacacacaaacaaggccttatggttttggtctcaatcatggacacacaccttacagcagcatgcttaatcaaggacttggagttccaggaattggagcaactcaaggattgaggactggttttacaaatataccaagtagatatggaactaataatagaattggacaaccaagaccatgatagactctaacttatttttataaggaatattgactccttggcttccaatttatttagtaatccaactttgcattgactgtttaatcatttactctaaatgttagataatagtagtcttgttcacatttcatgaaacctatgaaactatatttttgtaaaatgtatttgtgacagtgaaatcctcgtaaatgttaaaggctttaaataggcttcctttagaaaatgtgtttctttaaatttggattttggtatctttggttttgtagttgactgcagtgtgatgtgaccttacctttataagagccacttgatggagtagatctgtcacattactaagatacgatatttctttttttttccgagacggagtcttgctctgccactgtgcccggccaatacattattattaacttaaggctgtactttattaaggcttccttagtttttgttttgttttgttttttgagatggagtctcactctgtcgcccaggctggaatgcagtggcatgatctcagctcactgcaacctctgcctcctgagttcaaatgattctcctgcctcagcctcccgagtagctgggattacaggcacctgccaccacgcccagctaatttttgtatttttagtaaagacgggggatttcaccatgttggccaggctggtcttgaactcctgacctcatgatccacccaccttagcctcccaaagtgctgggattaggtgtgagccaccgcacctggccgatattttctttaatgaaatttataaatatgcttcttgaataatacacattttgggaaagggaaaaatgtctgttcaaaaagtaaaagtctcttttatagcttttccaaacttaattgctaaatttttctttgaggttctcctgaattatgtcttacaaactaaaagcaaaaatttttagcagaaattttggaatacattctatctagcacaatttgaatttttaattatcaagatttttgttaaagtttctctcctttaaaaattttagtacatttgtaaatagtccatggttctcagtgttttattttgattaagtgactacccaacttttggtgatatgcagtgaaagaatcccaattttctatgttacatttaatcaaatactgacataatgaatttatctttcctgacacattttcattcattggctttttaatttcttattttattaacaaaatatatcagatatattaccaaaacacatggagttccatacataatatggaatttgatgtcttttcaagttgcacaaagaatttgagcatatataattttaccaaagcataatggaccttagattatagaatacagcattgttaggtctgcagtgggcagtttctttttgttttgctttgtcaaaaatgggaaattgttaactgtgatgaaatgtgagaattacatagattatgttattttttagttgttttccaaatgcagagtttaaggactttctaacatggctagtattacttccaaaaagtataacaagcagcagtcacacatgacctaggagggttttttattgttttattttattatgcattccataacagttttaaaatgggattttgagaatggacttaactttcctggaatccaatgctcctggagatttatgactttcccagccatcagccagctatctagagaagatttttgtttttcttttgcaacagtttcttcagtcaactcattcactttcaaataggagcagcactttgaaatcctttttcttcactgtggattaaaaacatccaagaagccatctctgtcaagcagaattgtcatctgtggtaataagtgaccatgtcctaaatacctttttcttagtgaggagttggtcattgtctttggcatctgcaacccctgttcaggcatgtgacctgctaaagaaatacagcctacactaccttgactactggggaaaatgatacttcgtaaaatgtaataaggcaacctgttccttggcctttatcttatgttttccaactattactgtatctgttattggtctactattacaggatgattcttcttcctccattgatctcaactaaatatgaattagggtcatgcatgaaatctgaactgccgtgtcctgagttatggttaagaggtatgtgctgccaccccatgcatgtcttccccatccccataggattttaaagtgttcaggtaccaaacacagttctgtgtgaggttttatgcctacttcctcaacaccaattcagaggcaacacctgtgcatctgtcccaccaaaggtgctttaatacctaccttcactatttgagaaaggacactcacagttgcctgtgggttatgaaagaattggccctacgtcctgcatgtaagatgttacaggggacattgggccaggcattattatatagagaagtcttatttgccaagctctgactaacttctggatatgaaaataaggaacttgcccagcataggcctataggcagcagccttactagtaaatcttgccacagaatcacttgaagctagacagagaaagaagttcaatttaaatatttgtcccattgtttgtgattaggatgtaagctttgtggaatgtaattaaccctgctttacgaagtcaccatattataataggaaaaacactgcctaggaggcaagagatctgaattccagttctgatgctgccactgtgtaaggaagtagttttataacccatgggcaaatcatctgagctttctcatctgtaaagttagggagaggaattaattagttgatctgtaaaataatcagcttcaaaacgttatggctaaatctgtagaatgtatgcccaattgctaaacggatgttgtgcccagaattttatctagtgactacctcaacatacaggccaagcgttacctacaccaacacccaagccattaatttgaggtgccatgagaataggtgaaccacagcctaacaccatttaggtttttgtgtttttttcaggcttgcctctacttaaatatatttagatgagagagttctcttagacttctttctttgtaaggaagggttatttggggaagtgttggaaaaaagattagggcagggtacccttagtttatatagggtacaaaagaatgggaaacatcttccctttcttctttaatctctgaagtcatgtttggaattacatataatgtagcaggtactggagaggacctgaatttcaagcttctgatttagctgtttgtaaacttccaagttttgcttgactaaagaatgctgatcttttttgggagtctgatctccttctaatatcagaaagtgctttttatattccagattgcttgaattaaactgtttggattaaagaacatatatggagtttc

SEQ ID NO: 327238 - DNA, 1164 bp, Artificial Sequence
  derived and/or modified sequence
atgacctgcctgatcagctactgggtgaccctgagaaagcccagccccgtgtacagcttcggcttcgagagactggaggtgctggccgtgttcgccagcaccgtgctggcccagctgggcgccctgttcatcctgaaggagagcgccgagagattcctggagcagcccgagatccacaccggcagactgctggtgggcaccttcgtggccctgtgcttcaacctgttcaccatgctgagcatcagaaacaagcccttcgcctacgtgagcgaggccgccagcaccagctggctgcaggagcacgtggccgacctgagcagaagcctgtgcggcatcatccccggcctgagcagcatcttcctgcccagaatgaaccccttcgtgctgatcgacctggccggcgccttcgccctgtgcatcacctacatgctgatcgagatcaacaactacttcgccgtggacaccgccagcgccatcgccatcgccctgatgaccttcggcaccatgtaccccatgagcgtgtacagcggcaaggtgctgctgcagaccacccccccccacgtgatcggccagctggacaagctgatcagagaggtgagcaccctggacggcgtgctggaggtgagaaacgagcacttctggaccctgggcttcggcagcctggccggcagcgtgcacgtgagaatcagaagagacgccaacgagcagatggtgctggcccacgtgaccaacagactgtacaccctggtgagcaccctgaccgtgcagatcttcaaggacgactggatcagacccgccctgctgagcggccccgtggccgccaacgtgctgaacttcagcgaccaccacgtgatccccatgcccctgctgaagggcaccgacgacctgaaccccgtgaccagcacccccgccaagcccagcagccccccccccgagttcagcttcaacacccccggcaagaacgtgaaccccgtgatcctgctgaacacccagaccagaccctacggcttcggcctgaaccacggccacaccccctacagcagcatgctgaaccagggcctgggcgtgcccggcatcggcgccacccagggcctgagaaccggcttcaccaacatccccagcagatacggcaccaacaacagaatcggccagcccagaccctag

SEQ ID NO: 327239 - protein, 121 aa, Artificial Sequence [sequence omitted]

SEQ ID NO: 327240 - DNA, 1252 bp, Artificial Sequence
  derived and/or modified sequence
gggaggccagggacctcactgggctgggcaggtgcaggccaccgccgtcccagtgccctcagaggcacctagactcatgtggacccggccgcagaccgttctgggcagctctgtccaggccggccctgccctctgacctggggccgcaggggctggccactgtgggctcggttccctgccaccccaattcatctgcaccccaaggaaagaaaatgaggggttgcagcgccccaggacccaagagcccccgaacaccagggcagcacatacttccagtgccagggccacagcagagaggggcgcaggagctgccgcggccaggacaaaccaacctcaggctgacctaggccggtaatgggtttaacgcatcaggtgcaaaagagaaacaccccacaaatcagggagaggagggaagccgcccaccccatgggaggaagctgaggagtgaacgccagggatgggcagggccggtcctcggagcactgcagacaccagaccaagggcgactgtcatcaccacgagaaggccccgtccatggcagaagccaacctcaccgcgccgactgcaccggagacgcccacgaggacagccggcctctgagaacgcagctgagccgtcacaggtcgccatcagcaaaggcaagagtccagattatgcaaacggaggcaaggctgccatggactccagagcctcagacgccatcaacaaaagcaaagtggacacatctgcatcaaatccatcacaaagacggccttccagactccgggggaaacggagtctcgctctgccacccagactggagtgccttttcccctcatcgtgtgggagccgccgggcgacatcccgccccggtttccctccactcgaaggcagtcacctcggttgccagctcctgcctctgtgatgatccccacgagggctgcagagtgaagggcacagcagggttcggcctaactccccggggagccctaggcgagagggcttggtcctggggagctgcccaggtcttctatatcccctggcctccatccagtcccgcacgactcagctcctggccctgtgcaccgggcgacgcctgctaggcgcatgaccctcagagtcaggcctgtactcacctcagcatctatcaagggccttcaaggatcgggtttttttaatcatcgtcaaatatatcgttactaaaaagatacgtacactttgggaggccgaggtgggaagatcacttgaggtcaggagtttgagaccatcctgg

SEQ ID NO: 327241 - protein, 1871 aa, Artificial Sequence
  derived and/or modified sequence
MENEIFTPLLEQFMTSPLVTWVKTFGPLAAGNGTNLDEYVALVDGVFLNQVMLQINPKLESQRVNKKVNNDASLRMHNLSILVRQIKFYYQETLQQLIMMSLPNVLIIGKNPFSEQGTEEVKKLLLLLLGCAVQCQKKEEFIERIQGLDFDTKAAVAAHIQEVTHNQENVFDLQWMEVTDMSQEDIEPLLKNMALHLKRLIDERDEHSETIIELSEERDGLHFLPHASSSAQSPCGSPGMKRTESRQHLSVELADAKAKIRRLRQELEEKTEQLLDCKQELEQMEIELKRLQQENMNLLSDARSARMYRDELDALREKAVRVDKLESEVSRYKERLHDIEFYKARVEELKEDNQVLLETKTMLEDQLEGTRARSDKLHELEKENLQLKAKLHDMEMERDMDRKKIEELMEENMTLEMAQKQSMDESLHLGWELEQISRTSELSEAPQKSLGHEVNELTSSRLLKLEMENQSLTKTVEELRTTVDSVEGNASKILKMEKENQRLSKKVEILENEIVQEKQSLQNCQNLSKDLMKEKAQLEKTIETLRENSERQIKILEQENEHLNQTVSSLRQRSQISAEARVKDIEKENKILHESIKETSSKLSKIEFEKRQIKKELEHYKEKGERAEELENELHHLEKENELLQKKITNLKITCEKIEALEQENSELERENRKLKKTLDSFKNLTFQLESLEKENSQLDEENLELRRNVESLKCASMKMAQLQLENKELESEKEQLKKGLELLKASFKKTERLEVSYQGLDIENQRLQKTLENSNKKIQQLESELQDLEMENQTLQKNLEELKISSKRLEQLEKENKSLEQETSQLEKDKKQLEKENKRLRQQAEIKDTTLEENNVKIGNLEKENKTLSKEIGIYKESCVRLKELEKENKELVKRATIDIKTLVTLREDLVSEKLKTQQMNNDLEKLTHELEKIGLNKERLLHDEQSTDDSRYKLLESKLESTLKKSLEIKEEKIAALEARLEESTNYNQQLRQELKTVKKNYEALKQRQDEERMVQSSPPISGEDNKWERESQETTRELLKVKDRLIEVERNNATLQAEKQALKTQLKQLETQNNNLQAQILALQRQTVSLQEQNTTLQTQNAKLQVENSTLNSQSTSLMNQNAQLLIQQSSLENENESVIKEREDLKSLYDSLIKDHEKLELLHERQASEYESLISKHGTLKSAHKNLEVEHRDLEDRYNQLLKQKGQLEDLEKMLKVEQEKMLLENKNHETVAAEYKKLCGENDRLNHTYSQLLKETEVLQTDHKNLKSLLNNSKLEQTRLEAEFSKLKEQYQQLDITSTKLNNQCELLSQLKGNLEEENRHLLDQIQTLMLQNRTLLEQNMESKDLFHVEQRQYIDKLNELRRQKEKLEEKIMDQYKFYDPSPPRRRGNWITLKMRKLIKSKKDINRERQKSLTLTPTRSDSSEGFLQLPHQDSQDSSSVGSNSLEDGQTLGTKKSSMVALKRLPFLRNRPKDKDKMKACYRRSMSMNDLVQSMVLAGQWTGSTENLEVPDDISTGKRRKELGAMAFSTTAINFSTVNSSAGFRSKQLVNNKDTTSFEDISPQGVSDDSSTGSRVHASRPASLDSGRTSTSNSNNNASLHEVKAGAVNNQSRPQSHSSGEFSLLHDHEAWSSSGSSPIQYLKRQTRSSPVLQHKISETLESRHHKIKTGSPGSEVVTLQQFLEESNKLTSVQIKSSSQENLLDEVMKSLSVSSDFLGKDKPVSCGLARSVSGKTPGDFYDRRTTKPEFLRPGPRKTEDTYFISSAGKPTPGTQGKIKLVKESSLSRQSKDSNPYATLPRASSVISTAEGTTRRTSIHDFLTKDSRLPISVDSPPAAADSNTTAASNVDKVQESRNSKSRSREQQSS

SEQ ID NO: 327242 - DNA, 5616 bp, Artificial Sequence
  derived and/or modified sequence
atggagaatgagatcttcacaccactgctggagcaatttatgacctcgccactggtgacttgggtgaagactttcgggcccctggcggctggtaacggcacaaacctggacgagtacgtggctttggtcgacggggtgttcctcaaccaagttatgcttcagatcaaccctaaattagagagccagagggtcaacaagaaagtaaacaacgacgcatccttgaggatgcacaatttgagcatcctggtgagacagataaaattttactatcaggagaccctgcagcagctgattatgatgtcattgccaaatgtacttattattggaaagaatcctttcagcgagcagggcactgaagaggtgaaaaaactcctcctcttgctcctaggttgcgctgttcagtgtcagaagaaggaggaatttatagagcgaattcaaggactcgacttcgacaccaaagctgccgtggcggcacatattcaggaagtgactcacaaccaggagaacgttttcgacctccagtggatggaggtgactgacatgtctcaagaagatattgagcccctgttgaaaaacatggcgctccatctgaaacgactgatcgacgagcgagatgagcactccgaaactattatcgaactcagcgaagagcgggatgggttacacttcctcccgcacgcctcctcctcagcccagtccccatgcggatctcctggaatgaagagaacagagtcacggcaacatctgtctgttgaattggccgatgccaaggccaagataagacggctcaggcaggagctggaagagaaaactgagcagctgctggactgcaagcaagaactcgagcagatggaaattgagcttaagcggttacagcaagaaaatatgaatttgctgtcggatgcgcgcagcgctcgcatgtatagagatgaactagatgcactgagggaaaaagccgtgcgtgttgataagctggagtctgaggtctcaagatataaggaaaggctgcatgatattgaattctataaggcgcgggtggaggagctgaaagaggataatcaggtgctgctggagactaagaccatgttggaagatcagctggaagggactagggctcggagcgacaagctgcacgaactcgagaaagagaatctccaattgaaagcaaaacttcatgatatggaaatggagcgcgatatggaccgcaagaaaatcgaggagctcatggaggagaatatgaccctagagatggcccaaaaacagtccatggacgagagcctgcacttgggctgggaattggagcagatttcaagaacctccgaattgagcgaggccccacagaagtccctgggacatgaagtgaatgaattgacctcttcacgattactgaagctcgaaatggaaaaccagagtctcaccaagacggtggaggagctcagaaccactgttgattccgtagagggcaacgctagcaaaatcctgaagatggagaaggaaaatcaaagactctccaagaaagtggaaatactggagaatgaaatcgtccaggaaaagcagagcttgcagaactgccagaatttgtcgaaggacctcatgaaggaaaaggcccagctggagaagactatcgagaccctgcgtgagaatagcgagaggcagatcaagatactcgaacaggaaaacgagcacctgaaccaaacagtgagcagtcttcggcagcgttcccagatctcagccgaggcacgggtcaaggacatcgaaaaagaaaacaagattttgcacgaatccattaaggaaacatcaagtaaactgagcaagattgaattcgagaaaaggcagattaagaaagaattagaacattacaaggaaaagggtgagcgggctgaggaattggagaatgagctccaccatttggagaaggaaaacgagctcctgcagaaaaaaatcactaacctgaagataacctgtgagaaaatcgaggctctcgaacaggaaaactcagagctggaaagggagaatcgaaagctgaagaaaaccttggactcatttaaaaacctaacctttcaactcgagtctttggaaaaagagaatagtcagctcgatgaggagaacctcgaactcagacggaacgtagagtccctgaagtgcgcttcgatgaaaatggcccagctgcagctagaaaataaagagctggagtctgagaaagagcagcttaagaagggactcgagttgctcaaggcctcgttcaagaaaactgagagactagaagtgagttatcagggccttgatatagagaatcagcggctgcagaaaacgctggagaattccaacaaaaagatccagcagttagagtcagaattgcaggacttggaaatggagaatcagaccttacaaaagaatctggaggaactgaagatctctagtaagagactggagcagctcgagaaggaaaataaatcattggagcaagaaacatcgcagctggagaaggacaaaaagcagctggaaaaggagaacaagagactgagacagcaggcggagataaaggacactactttggaggagaacaacgtgaagattggaaacctggaaaaagaaaacaagactctctccaaagaaatcggtatttataaggaatcttgcgttcgcctgaaagaattagaaaaggaaaataaggaactggtcaagagggccaccattgacatcaagaccttagtaacattgagggaggacctggtgtcagagaagctgaaaacacaacagatgaataacgacctggagaagttgactcacgagctggagaagatcggcttaaacaaagagcgtctgttgcatgacgagcagtcaacagatgactcccggtataaactgctggaatcgaaacttgaatcaaccttaaagaagtcacttgaaataaaggaggagaagattgctgccctggaggccaggctggaagagagcacaaattataatcagcaactccgccaggaattaaagaccgtaaaaaagaattacgaagccctgaaacagagacaggacgaggagagaatggtgcagtcctcacctcccattagcggagaagataacaagtgggagagggagagccaggaaacaacccgtgaattactgaaggttaaagatcggctgatcgaagtcgaacgcaataacgcaactctccaagctgaaaagcaagcattaaaaacccagctgaaacaactcgagacacagaacaacaacctgcaggcacaaattttggcgctgcaacgccagacggtgtccctgcaagagcaaaacacaaccttgcagacccagaacgcaaaattacaagtggagaactccaccttaaacagccagtctaccagcctgatgaatcagaatgctcagctccttattcagcagagttcactcgagaatgagaacgagagcgtgatcaaggagagggaggatctgaagtcgctgtatgattccctcattaaggaccacgaaaagcttgagttgctgcacgaaagacaagcatctgagtatgagagtctcatctcgaagcatggtaccctgaaatcagcccataaaaatctggaagtggagcatcgggatttggaggacagatacaaccagctccttaagcagaaggggcagttggaagatctggaaaagatgctcaaggttgagcaagagaagatgctactagaaaataagaaccatgagaccgtggccgcagaatataaaaaactttgtggcgaaaacgaccgcctcaatcatacctattctcagctactgaaagagacggaagtcctccagacagatcataagaacctcaaatcgctgttaaataactccaagctggagcaaacccgcctggaggcagagttcagtaaattaaaagagcagtatcagcagctcgacataacatccaccaagctgaataaccagtgtgaactgctttcacagctaaagggaaacctcgaggaggaaaaccgccatcttctcgatcagatccagaccctgatgctccaaaatagaactctgctggaacagaatatggaatcaaaagacctgtttcatgtcgagcagaggcagtatatcgacaagcttaacgagttacgcaggcaaaaggaaaagctagaggaaaaaataatggaccagtacaagttttatgatccttctcctccaaggcgaagaggcaactggataaccttgaaaatgcggaaattaattaaaagtaagaaagatattaatagggaacgtcagaaaagccttacactaacccctacacggtctgattccagcgagggcttccttcagttgccccaccaggactcacaggactcttcatctgtcggctccaacagcttagaggacggtcagacgctggggacaaagaaatccagtatggtcgctcttaaacggttgcctttcctccggaaccgccccaaagacaaagataagatgaaagcctgttaccgaaggagcatgtctatgaatgatttggtacaaagtatggtgctggcaggccaatggacgggtagtactgaaaatctggaagtgccagatgatatctcaacaggaaagaggcgtaaagagttgggggctatggcttttagtaccaccgctatcaacttctctacagtgaactcttcggccgggtttaggagcaaacaacttgtgaataacaaagacaccacctcttttgaggacatcagcccccagggcgtaagcgatgactcctccactggctcgagggtgcatgcctcgcgcccagcttctctggatagcggacggactagtacatcaaacagtaataataacgcatcacttcatgaagtgaaagctggggccgtgaacaaccagtcccggccccagtctcattcttccggtgagtttagccttctccatgatcatgaggcttggagcagtagcgggtcaagccccattcagtatttgaagcgccaaaccaggagcagtccggtgcttcagcacaaaatatcagagacccttgagagtcggcatcataagattaagacaggctcccctggctctgaagtggtgacgttgcagcagttcttggaggaaagcaataaattaacttccgtccagataaagtccagttcccaggagaacctgctggacgaggttatgaagtcactctccgtgtcatccgatttcctgggaaaagacaaacccgtgtcatgtggcttggcccgaagcgtcagcggcaagactccaggcgacttttatgacaggcggaccactaaacctgaattcctacggccagggccacgaaagactgaggatacctacttcatctcatctgccggcaaaccaacgcctgggactcaaggcaaaatcaagttggtcaaagagtcctcactgagccgccagtcaaaggactctaacccttacgcaaccctccctcgggccagctctgtcatcagtactgcagagggcacaacaaggcgtacttccatacatgactttctgaccaaagacagcaggctacctatctcagtggatagcccaccagctgccgctgactcaaacacaactgccgcctccaacgtagataaagtacaggagtctagaaactccaagtcccggagtcgcgagcaacaatcttcttag

SEQ ID NO: 327243 - DNA, 5616 bp, Artificial Sequence
  derived and/or modified sequence
atggagaatgagatcttcacccccctgctggagcagttcatgaccagccccctggtgacctgggtgaagaccttcggccccctggccgctggaaatggcaccaacctggatgaatatgtggccctggtggatggagtcttcctgaaccaggtgatgctgcagatcaaccccaagctggagagccagagggtgaacaagaaggtgaacaatgatgccagcctgaggatgcacaacctgagcatcctggtgcggcagatcaagttctactaccaggagaccctgcagcagctgatcatgatgagcctgcccaacgtgctgatcatcggcaagaaccccttcagcgagcagggcacagaggaggtgaagaagctgctgctgctgctgctgggctgtgctgtgcagtgccagaagaaggaggagttcatcgagcgcatccagggcctggactttgacaccaaggctgctgtggccgcccacatccaggaggtgacccacaaccaggagaatgtgtttgacctgcagtggatggaggtgacagacatgagccaggaggacatcgagcccctgctgaagaacatggccctgcacctgaagaggctgattgatgaaagagatgagcacagcgagaccatcatcgagctgtctgaggagagagatggcctgcacttcctgccccacgccagcagcagcgcccagagcccctgtggcagccctggcatgaagaggacagagagccggcagcacctgtctgtggagctggctgatgccaaggccaagatccggcggctgcggcaggagctggaggagaagacagagcagctgctggactgcaagcaggagctggagcagatggagattgagctgaagaggctgcagcaggagaacatgaacctgctgagtgatgcccggagcgccaggatgtacagagatgagctggatgccctgcgggagaaggctgtgcgggtggacaagctggagagcgaggtgagccgctacaaggagcggctgcatgacatcgagttctacaaggcccgggtggaggagctgaaggaggacaaccaggtgctgctggagaccaagaccatgctggaggaccagctggagggcacccgggcccggagtgacaagctgcacgagctggagaaggagaacctgcagctgaaggccaagctgcatgacatggagatggagcgggacatggacaggaagaagattgaggagctgatggaggagaacatgaccctggagatggcccagaagcagagcatggatgagagcctgcacctgggctgggagctggagcagatcagcaggaccagcgagctgtctgaggccccccagaagagcctgggccacgaggtgaatgagctgaccagcagccggctgctgaagctggagatggagaaccagagcctgaccaagacagtggaggagctgcggaccaccgtggacagcgtggagggcaatgccagcaagatcctgaagatggagaaggagaaccagaggctgagcaagaaggtggagatcctggagaatgagatcgtgcaggagaagcagagcctgcagaactgccagaacctgagcaaggacctgatgaaggagaaggcccagctggagaagaccatcgagaccctgagagaaaattctgagcggcagatcaagatcctggagcaggagaatgagcacctgaaccagacagtgagcagcctgcggcagaggagccagatctctgctgaggcccgggtgaaggacatcgagaaggagaacaagatcctgcacgagagcatcaaggagaccagcagcaagctgagcaagattgaatttgagaagaggcagatcaagaaggagctggagcactacaaggagaagggggagagagctgaggagctggagaatgagctgcaccacctggagaaggaaaatgagctgctgcagaagaagatcaccaacctgaagatcacctgtgagaagattgaggccctggagcaggagaacagcgagctggagagagaaaataggaagctgaagaagaccctggacagcttcaagaacctgaccttccagctggagagcctggagaaggagaacagccagctggatgaggagaacctggagctgcggagaaatgtggagagcctgaagtgtgcctccatgaagatggcccagctgcagctggagaacaaggagctggagagcgagaaggagcagctgaagaagggcctggagctgctgaaggccagcttcaagaagacagagcggctggaggtgtcctaccagggcctggacatcgagaaccagaggctgcagaagaccctggagaacagcaacaagaagatccagcagctggagagcgagctgcaggacctggagatggagaaccagaccctgcagaagaacctggaggagctgaagatcagcagcaagaggctggagcagctggagaaggagaacaagagcctggagcaggagaccagccagctggagaaggacaagaagcagctggagaaggagaacaagaggctgcggcagcaggccgagatcaaggacaccaccctggaggagaacaacgtgaagattggcaacctggagaaggagaacaagaccctgagcaaggagatcggcatctacaaggagagctgtgtgcggctgaaggagctggagaaggagaacaaggagctggtgaagagggccaccatcgacatcaagaccctggtgaccctgcgggaggacctggtgtctgagaagctgaagacccagcagatgaacaatgacctggagaagctgacccatgagctggagaagattggcctgaacaaggagcggctgctgcatgatgagcagagcacagatgacagccgctacaagctgctggagagcaagctggagagcaccctgaagaagagcctggagatcaaggaggagaagattgctgccctggaggcccggctggaggagagcaccaactacaaccagcagctgcggcaggagctgaagacagtgaagaagaactatgaggccctgaagcagaggcaggatgaggagaggatggtgcagagcagcccccccatcagcggggaggacaacaagtgggagcgggagagccaggagaccacccgggagctgctgaaggtgaaggaccggctgattgaggtggagagaaataatgccaccctgcaggccgagaagcaggccctgaagacccagctgaagcagctggagacccagaacaacaacctgcaggcccagatcctggccctgcagaggcagacagtgtccctgcaggagcagaacaccaccctgcagacccagaatgccaagctgcaggtggagaacagcaccctgaacagccagagcaccagcctgatgaaccagaatgcccagctgctgatccagcagagcagcctggagaatgaaaatgaatctgtcatcaaggagcgggaggacctgaagagcctgtatgacagcctcatcaaggaccacgagaagctggagctgctgcacgagcggcaggcctctgaatatgagagcctcatcagcaagcacggcaccctgaagagcgcccacaagaacctggaggtggagcaccgggacctggaggaccgctacaaccagctgctgaagcagaagggccagctggaggacctggagaagatgctgaaggtggagcaggagaagatgctgctggagaacaagaaccatgaaacagtggccgctgagtacaagaagctgtgtggggagaatgaccggctgaaccacacctacagccagctgctgaaggagacagaggtgctgcagacagaccacaagaacctgaagagcctgctgaacaacagcaagctggagcagacccggctggaggccgagttcagcaagctgaaggagcagtaccagcagctggacatcaccagcaccaagctgaacaaccagtgtgagctgctgagccagctgaagggcaacctggaggaggagaacagacacctgctggaccagatccagaccctgatgctgcagaacagaaccctgctggagcagaacatggagagcaaggacctcttccacgtggagcagaggcagtacatcgacaagctgaatgagctgcggcggcagaaggagaagctggaggagaagatcatggaccagtacaagttctatgaccccagcccccccaggagaagaggcaactggatcaccctgaagatgaggaagctgatcaagagcaagaaggacatcaaccgggagcggcagaagagcctgaccctgacccccaccaggagtgacagcagcgagggcttcctgcagctgccccaccaggacagccaggacagcagctctgtgggcagcaacagcctggaggatggccagaccctgggcaccaagaagagctccatggtggccctgaagaggctgcccttcctgaggaaccggcccaaggacaaggacaagatgaaggcctgctacagaagatccatgtccatgaatgacctggtgcagagcatggtgctggccggccagtggacaggcagcacagagaacctggaggtgcctgatgacatcagcacaggcaagaggaggaaggagctgggcgccatggccttcagcaccacagccatcaacttcagcacagtgaacagcagcgctggcttccgcagcaagcagctggtgaacaacaaggacaccaccagctttgaggacatcagcccccagggcgtgtctgatgacagcagcacaggcagccgggtgcacgccagcaggcctgccagcctggacagcggccgcaccagcaccagcaacagcaacaacaatgccagcctgcacgaggtgaaggccggggctgtgaacaaccagagccggccccagagccacagcagtggagagttcagcctgctgcatgaccacgaggcctggagcagcagcggcagcagccccatccagtacctgaagaggcagaccaggagcagccctgtgctgcagcacaagatcagcgagaccctggagagccgccaccacaagatcaagacaggcagccctggcagcgaggtggtgaccctgcagcagttcctggaggagagcaacaagctgacctctgtgcagatcaagagcagcagccaggagaacctgctggatgaggtgatgaagagcctgtctgtgtccagtgacttcctgggcaaggacaagcctgtgtcctgtggcctggcccggtctgtgtctgggaagacccctggggacttctatgacaggaggaccaccaagccagagttcctgcggcccggccccaggaagacagaggacacctacttcatcagcagcgctgggaagcccaccccaggcacccagggcaagatcaagctggtgaaggagagcagcctgagccggcagagcaaggacagcaacccctatgccaccctgccccgggccagcagcgtcatcagcacagctgagggcaccaccaggaggaccagcatccatgacttcctgaccaaggacagccggctgcccatctctgtggacagccccccagctgctgctgacagcaacaccacagctgccagcaatgtggacaaggtgcaggagagcaggaacagcaagagccgcagccgggagcagcagagcagctag

SEQ ID NO: 327244 - DNA, 5616 bp, Artificial Sequence
  derived and/or modified sequence
atggagaacgagatcttcacccccctgctggagcagttcatgacctcccctctagtgacttgggttaagacgtttggaccactggctgccggaaatggcactaatctggacgagtatgttgcactggtggacggcgtttttcttaatcaggtgatgttgcaaatcaaccccaaacttgagagccagcgagttaataagaaggtcaacaatgacgcttccttgagaatgcataacctgtccatcctggttagacagatcaagttctactatcaagagaccttgcagcagctgattatgatgagcctgcccaatgtgctgatcatcgggaagaatccttttagcgagcagggcactgaagaggttaaaaagttgcttctgctcctcctgggctgtgccgttcagtgccagaaaaaagaagaattcatcgaacggatccagggattggatttcgacactaaagccgctgtggcagcacacattcaggaagtcacacacaaccaggagaatgtgtttgacctgcagtggatggaagttactgatatgtctcaggaagatattgaaccgctcctcaagaacatggccttgcacctgaaacggctaatagatgaacgggatgagcattccgagacaatcatcgagttgtccgaggaacgggacgggttacatttcctgccccacgcaagctccagcgctcagtcaccatgcggctcacccgggatgaagcgaacagagtctaggcagcacctttccgttgaactcgctgacgccaaggcaaagatcaggagactgcggcaagagttggaagaaaagacagagcagctgttagattgcaaacaggagttggaacagatggagatcgaattaaaaaggctccagcaagagaatatgaatctgctttccgatgcgaggtccgctaggatgtaccgggacgaactggatgccctgagggaaaaggcagtgagagtagacaaacttgaatccgaggttagcagatacaaagagcgcctgcacgatatcgaattttataaagctagagtcgaggaattgaaggaggataatcaggtgctgctcgagactaaaacgatgctggaggatcagctggagggtacccgtgctcgcagcgataagttgcacgaactggagaaagagaatctgcaattaaaagccaagctgcatgatatggagatggaacgagacatggatagaaagaagattgaagagctaatggaagaaaacatgacactggaaatggctcaaaaacagtctatggacgaaagcctacacttgggctgggagcttgaacagatctcgcgcacaagtgagctctcagaggcccctcagaaaagtcttggccacgaagttaacgaactgacttcttcaaggctgctgaaactggaaatggagaatcaaagcctcacaaaaacagtcgaggagctcagaaccaccgttgattccgttgaaggtaatgcttctaaaatactcaaaatggaaaaagaaaaccagaggctgtcaaagaaggtggagattctcgaaaatgagattgtacaggagaagcaatcactccagaactgccagaaccttagcaaggacctgatgaaagagaaggcgcagctcgagaaaaccatcgaaaccctccgcgaaaacagtgaacgtcagataaagatcttggagcaagaaaacgagcacctgaatcagactgtttcatccttgagacagaggtcacagatttccgcggaggctagggtgaaagatatcgaaaaagaaaataaaattctgcacgagtccattaaggagacttcatctaaactgtctaagatcgagttcgagaagagacagataaaaaaggagttagaacattataaggagaaaggcgagcgagctgaggaactagagaacgagctgcatcacctggaaaaagaaaacgagctgttacagaaaaaaataactaacctgaagatcacatgtgaaaagatagaggctctggagcaggagaactccgagctcgagagggaaaatcgtaagctcaagaaaactctggatagcttcaagaacctgacctttcagctggaaagtctcgagaaagagaacagtcagctggatgaagaaaatcttgagttgcggcgcaatgtcgaaagcctgaagtgcgccagcatgaagatggcccagctgcaactcgaaaacaaagagctagaatcggaaaaggaacagttaaagaagggtctggaactgctcaaggctagcttcaagaagacggaacggttggaggtgtcgtaccagggcttggacatcgaaaatcagaggctccagaagaccctagaaaatagcaataaaaaaattcagcaactggaatccgagctccaggacctggagatggaaaaccaaacccttcagaagaatctggaagaacttaagatcagctcgaagagactggaacagctggagaaggagaacaagagccttgagcaagagacttctcagctcgagaaagataagaagcagctggagaaagagaataagaggctgaggcagcaggcagaaattaaagatacaactctggaagagaataatgttaaaattggaaatcttgaaaaagaaaataaaaccctctctaaggagattggtatatacaaagagtcatgcgttcgactcaaagaactggagaaggagaataaggagctggtgaaaagagccactattgacatcaaaacgttggttacacttcgagaggatctggtgtccgaaaaacttaagacccagcagatgaacaatgatctcgagaagttaacacacgaacttgagaagataggcctaaataaagaacgcctcctgcacgacgaacagtcaaccgacgactccaggtataagttgctggaatcaaagttggaaagtaccctgaagaagtccttggaaattaaagaggagaaaatagcagccttggaggcccgcctcgaagaaagtaccaattacaaccagcagctgcgtcaagagctaaagactgtgaaaaagaactatgaagccttgaaacaaagacaagacgaggaacgaatggtccagtcctcgcctcctattagtggtgaggataataagtgggagcgggagtcacaagaaaccactagggagttacttaaagttaaggaccgcctgattgaagtggagaggaataacgctacactgcaggctgaaaaacaggcactcaaaacacagcttaaacagttggagacgcagaataacaatctacaggctcagatccttgcactccaacggcagacagtgtccttacaggagcagaataccacactgcagacccagaatgctaaactgcaggtggaaaacagcaccctgaactcccaaagcacctccctgatgaatcaaaatgcccagctgctgattcaacaatccagtcttgagaacgaaaacgagagtgtcataaaggagcgcgaggaccttaagtcactttatgattcattgatcaaggatcacgaaaaattggagctgctccacgaacgccaggcctctgagtatgaaagcctaataagcaagcacggcacacttaaatcggcccacaaaaatctggaggtagaacaccgggacctagaagatcggtataatcagctgttaaaacagaaagggcagctggaggaccttgaaaaaatgttaaaggtggaacaggaaaagatgctcttggaaaacaagaatcacgaaacggttgccgctgaatataagaagctctgcggtgagaacgacaggctcaaccacacctattctcagctgcttaaggagacggaggtactgcaaacggatcataagaaccttaaatccctgctgaataattccaagctggaacagacccggttagaggcggagtttagtaagctgaaggaacagtatcagcagttggatataacatcaactaagctgaataaccagtgtgaacttctatcccagcttaagggaaacctcgaagaagagaaccggcatttgcttgaccagattcagaccctgatgcttcagaatcggacactactagagcagaatatggagtcaaaagacttatttcatgtggaacagcgacaatacatagataaactgaacgaactgaggaggcagaaagaaaagttggaagagaaaatcatggaccaatacaaattctatgatcctagcccccccagaaggagaggtaactggataactctgaaaatgcgcaaactcattaagagcaagaaggatatcaatcgcgagcgacagaaatccctgacccttacacccactagatcagattcatctgaggggtttttacagctgccgcatcaagacagccaggactcatccagcgtgggatcaaattctcttgaagatggccagaccctgggaacaaagaaatcttccatggtggcactgaagagactgcccttcctgagaaatagaccaaaggacaaggataagatgaaggcctgctatagaagatctatgagtatgaacgacctcgtccaatccatggtgttagctggacagtggaccgggagtacggagaatctggaagtgccagacgatattagcactgggaaacgtcgcaaggagctgggcgcaatggccttttctaccacagcgatcaatttcagtacagtgaatagttccgcaggatttaggagtaagcagctcgtgaacaacaaagacactacttctttcgaggatatttccccccaaggggtgtctgacgacagcagcacgggatctagagtccacgcctctcggcccgctagtctcgatagtggtaggacatccacttctaattccaacaataatgcatccttgcacgaggtcaaagctggcgccgttaacaaccagagccgtccacagtcccactcatcgggagagttcagcctgttacacgatcacgaagcctggagttcatccggcagttccccgatacagtacctgaaaagacagaccaggagctcacctgtactgcagcataagatttccgagacgctggagtcccgccatcataagatcaaaacaggatcccctggcagcgaggtcgtaaccttgcagcagttcttggaggaaagcaacaagctgacctccgtgcagattaaatctagctcacaggaaaacctcctggacgaggttatgaaatcattgagcgtctcctctgacttccttggcaaagacaagcccgtatcttgtgggttggcgagaagtgtaagcgggaaaacccctggggatttctatgacaggagaaccactaagcccgaattcttgaggcccggccccagaaagacagaagacacctactttatcagcagcgcagggaaaccaactcctgggacccagggcaaaatcaaactggtaaaggagtcatctctgtcgcggcagtcgaaagacagcaatccgtacgccacactgccccgcgcctcgtctgtgatatccaccgccgagggaacaactaggcggacctctattcacgatttcctcaccaaagatagcagacttcctatttcagtcgattctcctcccgccgctgctgacagtaatacaaccgctgcttctaatgtagataaggtgcaagagtcacgcaattctaagtccaggtccagggaacaacagtcgagctag

SEQ ID NO: 327245 - DNA, 5615 bp, Artificial Sequence
  derived and/or modified sequence
atggaaaatgagatattcactccgctgctggagcagtttatgacatcccctctggtgacgtgggtgaagacgttcggacccctggccgcaggcaatggcacaaatcttgatgagtatgtggcactagtcgacggtgtgttcctgaaccaggtaatgctgcagatcaaccctaaactcgagagccaaagagtgaacaagaaagtgaataacgatgcctccttgcgcatgcacaatctgtccattctcgtccggcagatcaagttttattaccaggaaacattgcaacaactcattatgatgagtttgccgaatgtgctaatcatcggcaagaatccattcagcgaacaaggtacggaggaagtgaagaagctgctgctacttctcctgggctgcgccgtgcagtgccagaagaaagaagaatttatcgagagaatacagggcctggatttcgatacaaaggccgctgtggcagcccatatacaggaggttactcataaccaggagaacgttttcgacttacagtggatggaagtgacggacatgagtcaggaagatattgaacctctgcttaagaacatggctcttcatctgaagagactgattgacgaacgcgacgaacactccgagaccataatcgagttatccgaggagcgggacgggctgcattttttgccacatgcctcctcatccgcccagtccccctgtggatcccccggtatgaagagaactgaaagtcggcagcacttgtccgttgagcttgccgatgcaaaagccaagatccgacggttgcggcaagaactcgaggagaagactgagcagcttttggactgtaaacaggaacttgagcaaatggaaatagagctgaagagacttcagcaagagaacatgaatctcctctcagatgcaagaagtgctaggatgtatagagacgaactagatgctttgagggaaaaggcagtgagagtagataaattggaatcagaggtgtcccgttataaggagcgcctgcacgatatcgagttttataaagctcgagtggaagaactaaaagaggataatcaagtgcttcttgagaccaagaccatgcttgaagaccagcttgaaggcactcgagccaggtctgacaaactgcatgagcttgagaaggaaaacctgcaactcaaggcaaagctgcatgacatggagatggagcgagacatggatcggaagaagatcgaggagttgatggaagaaaacatgacgctggagatggctcagaagcagagcatggatgagagcctgcatctaggatgggagcttgagcaaatctcaaggactagtgagctaagtgaagcccctcaaaagtccctgggtcacgaggtgaacgaactaacaagttcgaggctcctcaagctggagatggagaaccagagccttacgaagactgttgaagaactacgaactacggtcgatagtgtcgaagggaacgccagcaagatcctgaagatggaaaaagagaatcaacgtctgtccaagaaagtcgagattctggaaaatgaaattgtgcaggagaaacagagcctgcagaactgtcagaacttgtccaaggatctcatgaaagaaaaggcccaacttgagaaaacaattgaaacgctccgcgagaattcagagcggcagatcaagattctcgaacaggaaaatgagcacctgaatcaaaccgtgtcaagtctgagacagaggtcccagatcagcgcagaggcccgagtgaaagatatcgagaaagaaaacaagatactacacgagagtattaaggagacctccagcaaactctccaaaatcgagttcgaaaagcgacagataaaaaaagaactggagcattacaaagagaagggcgagcgggctgaagaattagagaatgagctgcaccacctggaaaaggaaaacgaactgctgcaaaagaagatcaccaacctgaaaattacttgcgagaaaattgaagccctcgaacaagagaacagcgagctggagcgagaaaatcggaagctgaagaaaacccttgactcgttcaagaacctgacgtttcagttggagagcctggagaaggaaaatagccagttggatgaggaaaaccttgaattgcgacgaaacgtggagtctctgaagtgcgcttcaatgaagatggctcagctacagctagagaataaagaactagagtccgagaaggagcagctgaaaaaaggattagaactgctgaaagccagctttaaaaagacggaacgccttgaagtttcctaccaggggttagatattgaaaaccaaaggctccagaagacactggaaaactctaataagaagatccaacagttggaatctgagttgcaggatcttgagatggaaaatcagaccctgcagaagaacctggaggagttaaaaattagcagcaaaaggctcgaacagctggagaaggaaaataagagcctcgagcaagagaccagtcagttggagaaggataagaagcagttggaaaaagaaaataaacggctgcggcagcaggccgagatcaaagacaccaccttggaggagaacaacgttaaaatcggtaatctggagaaagaaaataagactcttagtaaggaaatcggcatttataaggaatcctgcgtgaggcttaaggagctggaaaaggaaaacaaagaattggtgaaaagggcaaccatcgacataaagaccctagtgacccttcgggaagacctggttagtgagaaacttaagactcagcagatgaataacgatttggagaaactgacccacgaacttgagaagataggtctgaacaaggagagacttttacatgatgaacagtccaccgatgactccaggtacaagcttcttgaaagtaagctcgagagtacacttaagaaatccttagagattaaggaggaaaagatcgctgcccttgaagccagattagaagagtccaccaactacaaccagcagctacgtcaggagttaaaaaccgtcaagaagaactacgaagctctcaagcagagacaggacgaggaacgaatggtccagagctcaccacccataagcggtgaagataataaatgggagcgagagtctcaggaaaccacaagggagctgctgaaggttaaggatagactaatcgaagtggagcgcaataatgccactttacaggcagagaaacaagcactgaagactcagctgaagcagcttgagactcaaaataacaatctgcaggcacagatcctcgctttacaaagacagactgtgtctttacaggagcagaataccactctccaaacccagaatgctaaactccaggtggagaacagtactctcaactctcagagcacatctctgatgaaccagaacgcacaactgctgattcagcagagtagcctggagaatgagaacgagtccgtgatcaaggaaagagaagacttgaagtcactgtatgacagccttatcaaggaccacgagaagttggagctcttgcacgagcgacaggcgtctgagtacgagagcctgataagtaaacatggtacactgaaaagcgcacacaagaatctggaggtcgaacaccgggatctcgaagataggtacaatcagctgctgaagcagaaagggcagctggaagaccttgagaaaatgctgaaggtggagcaggagaaaatgctcctcgagaacaagaaccatgaaaccgtggctgcggaatacaagaaactttgtggtgagaatgatagattgaatcatacgtatagccaactcctcaaagaaaccgaagttctgcagaccgaccacaagaatctaaaaagtctgcttaataactccaaacttgagcagacccgattagaggccgagttcagtaagcttaaagagcagtatcaacagttagacataacaagcaccaaactgaacaaccagtgcgaactgctaagtcagctgaagggaaatttagaagaagagaaccgccacctgctggatcagattcagacattaatgctacagaacagaacattgctcgaacagaacatggagtctaaggatctgtttcacgtggaacaaagacagtatattgacaagctgaatgaattgagaagacagaaagagaagctcgaggagaagattatggaccagtacaaattctacgatcccagtccacctaggcggcgaggcaattggataacactaaagatgcgcaagctgattaaatcaaaaaaggatatcaacagggaacgccaaaagtcgctgacattgaccccgacacggtccgactcctctgagggatttttgcaactcccccaccaggatagccaggactcctcatcggtgggcagcaatagtctggaagacgggcagacgctaggcacaaaaaagagctctatggttgccctaaaaaggctcccatttttacgcaatcgtcccaaggataaggacaaaatgaaagcgtgctatcggaggagcatgagcatgaacgacctagtacagtcgatggtgctggctggccagtggactggaagcaccgaaaacctggaagtgccagatgatatctccaccgggaagcgcagaaaggagcttggagctatggctttcagtaccaccgcgataaatttcagtactgtgaactccagcgcaggattccgaagtaagcagctggttaacaataaggatacaacctctttcgaagatatctccccgcagggcgtgagcgacgactcctccaccggtagcagagtgcatgccagcaggcccgcatctctagatagcgggagaacaagtacatcgaactcgaataataatgccagtctgcatgaagtgaaggcgggtgcagtgaacaaccagagcaggcctcagagccactccagcggtgagttttccctgctgcatgaccatgaggcatggtcatcatcgggatccagtcctatccagtacctgaaacgccagacgagaagttcccccgtgctccagcacaagatctccgagactctggagtctaggcaccacaagatcaaaaccggaagccccggatccgaagtggtgacacttcagcagttcctggaggagtcaaacaagctgacgagtgtgcagatcaagagctccagccaggaaaatctgctcgatgaggtcatgaagtcactttcggtgtcgtctgatttcctcggcaaggataagcctgttagttgcggtttggctagatcagtcagcggaaagacacctggcgacttctatgatagacggaccaccaaacccgagtttctaaggcccggtccaagaaaaactgaagacacttacttcatctccagtgcgggaaaaccaacccctggtacccaggggaaaataaaactggtgaaagagtcttccctctcaagacagtcaaaagactccaacccgtacgctacactgccacgagcatcaagtgtgatatcaaccgccgaaggcaccacacggcgaacatccatccacgatttccttacaaaggactcccgattgcctatctctgtagactcccctccggctgctgccgattccaatactacggcggcttccaacgtggacaaagttcaggagagcagaaatagcaagtctcggtcccgcgagcagcagagttcata

SEQ ID NO: 327246 - DNA, 9811 bp, Artificial Sequence
  derived and/or modified sequence
attggcgggcggcgctggcgggcggcgaggggtggggtgtgatgcggcactgcggttctgaggccgttactccggcttctccatagagggcggagaaggctggagcgcggcggtgattttgtgccagggattcccagagacgcgctgaaaggctggcagggcttaggaagctggggggttagggacacacattcaagcccccacccccgggaggggaagggggctggaggcgaggcttgagggcggcggaggaatggtgtctgctcggggggaaggggcgagccctgcctgttggtactgaggggctgcgggcagtggaggctccgcgggtcgaaagcggctccatgcccatcggtgggtggaacgtgtagaggtcggaacgccgaggtcgagtctggtggcgcctcggtatccttaacgtggtctctgtttaacgtatttcatttagcccccgttgggattgattcattgggagcagtttcgctggtctggatcctccaggagctggacaaccttgacgggctttttgtcttgggttccagccccctttcccttcctcctcctccagatgccttttctctgcccctcctcgcccggtacagacatttccagcgcaggctgctgctcgtggtgtccgtcgtcgaagccacttcttgggatttcggctcgtttcactctggggtgttttttgaggagggagagtgcccccctcctccacgatgggatttttctcccttgccgaaatggactttcattgatttctacttacttccacgtttagtgaccaattccctaggcgtatttttgtggtagttccttttttcaaatacatactctgtaaaatggagaacgaaatttttactccccttctggagcagttcatgaccagccctttggtcacttgggttaaaacgtttggacctctggccgcaggaaatgggaccaaccttgatgaatatgtggctttggtggatggggtattcttgaaccaggtcatgctccaaattaatcctaaattggagagtcagagagtaaataaaaaagtcaataatgatgcctcacttagaatgcacaatctatccattttggtgagacagataaaattttattaccaggagactttgcagcaattgatcatgatgtcgttgccaaatgtcttaatcattggcaaaaatcccttttctgaacaaggcacagaagaagttaaaaaactgcttttacttttattgggttgtgcagttcagtgtcagaaaaaagaggaatttattgaaagaattcaaggtttagattttgatacaaaagcagcggttgccgcacatattcaagaggtaactcataatcaggaaaatgtgtttgacctgcaatggatggaagtgactgatatgtcgcaggaggacatagaaccactcttgaaaaatatggcattgcatctaaaaagacttatagatgagagagatgaacattcagagactatcatagaactctctgaagagcgggatggtctccattttctaccccatgcctcttcatctgcacagtcaccctgtggttctccaggcatgaagcgaacagaaagtcgacaacatctgtcggtggaactggcagatgctaaagccaagataagaaggcttaggcaggaattggaggaaaagactgagcagttgttggattgtaaacaagaacttgagcaaatggaaatagaactcaaaaggctgcaacaagagaacatgaatttgctttcggatgctcgctctgccagaatgtaccgagatgaattagatgcacttcgagagaaagcagtcagagtcgataagcttgaaagtgaagtcagcagatataaagagagactacatgatattgaattttataaggcaagagttgaggaattaaaagaagacaatcaagttttattagaaacaaaaaccatgttggaagaccaactagagggaactcgtgctcgttctgataaattacatgaattagaaaaagagaacttacaactgaaagctaaacttcatgatatggaaatggaacgagatatggatagaaaaaagattgaagaattaatggaagaaaatatgactttggaaatggcacagaaacaaagtatggatgaatcattacatcttggctgggaactggaacagatatccagaactagtgaactttccgaagcaccccagaaatccctgggccatgaggtgaatgagttgacatcaagtagattattgaagctagagatggaaaatcaaagtttgacaaaaaccgtagaagagcttcggactactgtggattctgtagaaggcaatgcttccaaaatcctgaaaatggaaaaagaaaatcaaaggctcagtaaaaaggttgagattcttgaaaatgagattgttcaagaaaagcaaagtcttcagaattgtcagaatttaagcaaggatctaatgaaggagaaagctcagcttgaaaaaacaatagaaacactgagagaaaattcagagagacagattaagatactggaacaggaaaatgaacatctgaatcaaacagtgtcttccttaaggcagcggtcccagataagtgcagaagcaagagtgaaagacattgaaaaagaaaacaaaattcttcatgaatctatcaaagaaacaagtagcaagctaagcaagattgaatttgaaaaaagacaaattaaaaaagaattggaacattataaagaaaaaggagaacgagctgaagaacttgaaaatgaattgcatcatcttgaaaaagaaaatgaattattacagaaaaaaataactaatttaaaaattacttgtgaaaaaattgaggccttagaacaagaaaattcagagctagaaagagaaaatagaaaattaaaaaaaacattggatagctttaaaaatctgacctttcagttagaatccctagaaaaagagaattcccaacttgatgaggaaaacttagaactgcgaaggaatgtagaatctttgaagtgtgcaagcatgaaaatggctcagctacagctagaaaacaaagaactggaaagtgaaaaagagcaacttaagaagggtttggagctcctgaaagcatctttcaagaaaacagaacgcttagaagttagctaccagggtttagatatagaaaatcaaagactgcaaaaaactttagagaacagcaataaaaaaatccagcaattagagagtgaactacaagacttagagatggaaaatcaaacattgcagaaaaacctagaagaactaaaaatatctagcaaaagactagaacagctggaaaaagaaaataaatcattagagcaagagacttctcaactggaaaaggataagaaacaattggagaaggaaaataagagactccgacaacaagcagaaattaaagataccacattagaagaaaataatgtgaagattggaaatttggaaaaagaaaacaaaaccctatccaaagaaattggtatatataaagaatcttgtgtccgtctgaaagaactagaaaaagaaaataaggagcttgtgaaaagagcaactattgatataaaaacgttggttacactacgtgaggatttggtgagtgaaaagttgaagacccaacagatgaacaatgatctcgaaaaattaactcatgagcttgagaagatagggttaaataaggagcgactcttacatgatgaacaaagtactgatgacagtaggtataaacttttggaatcaaaattagaatccactcttaagaagtctcttgaaataaaagaagaaaaaattgctgctttagaagctcgattagaagaatccacgaattataaccagcaattgcgccaagaacttaaaacagtgaaaaaaaattatgaagctctcaaacagagacaagatgaggaaaggatggtacagagctctcctccaatatctggtgaagacaacaaatgggagcgagaaagtcaagaaacgactagagaacttctgaaagttaaagacagattaattgaagtagaaagaaataatgctacactgcaagcagagaagcaagcgttgaaaactcaactgaagcaacttgagacacagaacaataatttgcaggctcagattcttgcacttcagaggcagacagtgtcattacaagaacagaataccactcttcaaacacagaatgccaagcttcaggttgaaaattccacccttaattcccaaagtacctcactcatgaaccagaatgcccaactcctaatccagcagtcttccttagaaaatgaaaatgaatctgtaatcaaagagcgagaagacctaaaatctctctatgattctctgatcaaagatcatgaaaagctggaacttcttcatgaacgtcaggcttcagagtatgaatctcttatctctaaacatggaactctgaagtctgcccacaaaaatcttgaggtggaacatagagaccttgaagaccgttacaatcagttattaaaacagaaaggacagttggaagatttggaaaaaatgctcaaagtagaacaggaaaaaatgctgcttgaaaataaaaatcatgaaacagtagctgcagaatacaagaaactttgtggtgaaaatgataggctgaatcatacctatagtcaacttttaaaagagactgaagttttacaaactgaccataaaaatttgaaaagtcttctgaataattccaaactggaacaaacaagattagaagctgaattttcaaaactaaaggaacaataccaacaattggatattacatcaaccaagctgaataaccagtgtgagttgctaagccaacttaaaggaaatttagaagaagaaaatcggcatctactagatcaaattcagacattaatgctacagaacagaacacttttggagcagaatatggaaagcaaggatctttttcatgttgaacaaagacagtacattgataagttaaatgaattaagacgtcagaaggagaaactagaagagaaaattatggatcaatacaaattttatgacccatctcctcctagaaggagaggcaactggattactctaaaaatgagaaaattgataaagtctaagaaagatattaatcgggaacgccagaaatctctaacattaacacccacccgctcagactccagtgaaggatttcttcagctccctcatcaagacagtcaagatagttcttcagtaggttcaaactctttagaagatggccagaccttggggaccaagaaaagcagcatggttgcactgaaaagactgccctttttgaggaacagaccgaaggataaagacaaaatgaaggcctgctaccgtcgttccatgtccatgaatgacctggtgcagtccatggtcctagcaggacagtggacaggtagtactgagaatttggaggttcctgatgatatttcaacgggtaaaaggagaaaagaattgggagctatggccttctctactacagccatcaacttttcaactgtcaactcttctgcaggcttcagatccaagcagttggttaataataaagatactacatcctttgaagacataagtccacaaggtgttagtgatgattctagtacgggatcaagagttcatgcttcaagaccagccagccttgatagtggcagaacatccactagcaatagcaataataatgcttcactacatgaagtcaaagcaggtgcagttaataaccaaagcaggccacaaagccacagcagtggagaatttagcctgcttcatgaccatgaggcttggtccagcagtggtagcagtccaatccagtacttgaaaagacagaccagatcaagcccagtgctccagcacaaaatatctgaaacactggagagtcgacatcacaagatcaaaactggttcccctggaagtgaagttgttactctacaacagtttttggaagaaagcaataagcttacctcagtacagataaagtcctcaagtcaagagaatcttttagatgaagtaatgaaaagtttgtctgtctcttctgactttttgggaaaagacaaaccagttagctgtggtctggccaggtcagtaagtggaaaaaccccaggggacttctatgatagacggacaactaagcctgagtttttgagacctggtcctcgaaaaactgaagatacctacttcattagttctgcgggaaaacctacaccaggcactcaaggaaaaataaaattagtaaaagaatcttctctgtcacgacaatcaaaagatagtaacccttatgcaactttacctcgtgcaagcagcgtgatctcaactgccgaaggaactacacgaaggacaagcatccatgattttttgaccaaggacagtagactgcctatatcagttgattcaccaccagctgctgctgacagcaacaccactgcagcatctaatgtggacaaagtacaagaaagcagaaattcaaaaagcaggtctagggagcaacaaagctcctaattctattacccactacatgacatgtgggccaagtgagagaaaagtgtccttcagtttctcagtatgaagcctttatttctgaagtaacaagacacctagcaactataggaatcatttttaaaaatctttaaggagacttttaacagtccttcgtgaatagagcaggcaagaaatacaaaccttcattccttgaatcaaggagcactactggattcaactgccaaaattttttaaaggttttaggacttactataccttgtactgttaagatctactgaataaaggacgttctctcactaaggaccaggtgttttaaggttaagtgtttaaagaagtactccaagaacaatctgcttttttcatcatttgttttatgaatttatccatgtttgcttaatgcttctgctaagtgttagccaaaatctagccatttatatttagttgtgtaaacctaaattaaatgctgtagtattttgtggaatgtactatatagcaagatacagagaaaattgttttggcatgtcagagccttatttggttagcagactgcatgtgttgatactttttttttcttaaagccaattattttgatgcaaaagaaattcagtttataagataaatctgaaaaatccataatgaaataggagttataaaaaatttatagtgatattaatctttccatatttcccattaagcaacactaagcattcataagttaacccatggtaaagagtgtttttctgaaacttttttttagtaagatggtttttcagcaaatggcattcccaagataaagctgttgtgctttaactcatttcttttctttggtattgggttatgtatgcgtgtgcatttttttaacttgagagctgactgttgcttaagaagttttcttatggcaaaaataatgtaaataagttactatgatctgcattttgccagaaactcatttataattaaggctatcatttattaatgatttttttctcctttatgatattacattaaagttgataactgttattggtacttttgaaatatttgtatgcatttgttacctttaaacatttggaagaagcacaaaaaaatagatttagttaacccagggaaacatcaatttttttagtagttccaattttatatcacagttttattttcttatgaaatcaaaaaatgcattgatactcattaatgcaaattcattatttaacatcaatatcagagtaatcttcaaggtctgaaatgagaaacatactgactttttaaaattttaacagtgtacttcttaggctttcattaccagctctgaagaactttttggaataattccatattccatagtgtgtggtttatgagttgtgggtttcatcactaacccagtaaccataagaaaagtctctctctctctctctctctctctctctttctctctccctctttctctctctctttcgtaggccagtagcaatgttgtgttcacagtctaatttccaaaagaccatcaataaaaaagagagcatgtttaaattgaaatggaacttagagaacttgagcttacttacgtacttcaatgccaccggtaacttaggttttaccaccaaatgctgttaacgttaaatcattttgaaaatcttggatgaaaggtgctatgtaaatggaaatacaaaggattcttactaacatacaaaaataatgcacaacagaaatatctaaaaccttttccgtagactttgaaacatctctctctctcataactccctggattcaagtagcacattggtaataggtatcagagcagtctagagacaattgcatgtcaaaaaatgtacattcatttttaggtggataaaagtaaacatagaaattatgttatggctaaatacagttagtgggtaacttagatttatattagctagcatctaatttgcacaactagaacacatcccagaacaattactgaaaagctgaaatttaatgggtggtgatgtagcccaatgagggcgaatgacattacagcttgacctctccagaacactaatatcctaaaatacagaacatgctgggttaagtgcattagtgcttcaagcagaaaatgctgaaaacaacgtgtaaagtactgaatctgagtaggctgaccctgagaagggacaattaaagagacaaccaagggaacacattgagactacaaaaatatgaataatctcaattatattcatcacacttttttcataccatttcaagaaacgactagacagtagtaaccacatgaatattttactttctccagtataccttgagaagcaaactttgtaggaagccactcttctcccctaaacaacttctgccaaacaataataaagccaactggaaacgaatcggagccattttcattttcctaaccggggcctgacatgctttaaattatctggctgtattctaaatcaacacctaacccctcaaggaaactgaagaatcaatatacagggtaatagctttggctcagagctccaataatgtgcttcagatctgtccatgtggaaatgctttcatccaaatttttaaattggtggttaccaaagagttcacaaaacaggtttgtatgtagcacctttcatgcaaggcatgcaaaaagcctattttaaaatcactgtgcatattatagagttgtagccacctcacaatgaagtactacagcctgtgctgtcttaatggtttatgtcaggaaatgaaaaagatactgtaccaaatctggaattacaatggggagtaataatgtatactaaatgacttttgtattttaagttactttttgtgagtggtgaatttttgtgtttttcttttcagctacacttagtcctgagatgtattttttctttaagtcttgaatgaatacaaaaggagcccattttataatataaaccttgatgtacatgttgagatatttggacaatgaaaatgccttaaaaggaatgcatatggataaagttgcacttataacacccttcaacaaaatctaattttaaattgtctttttcttttctattaagggttttctttttcagtgtctaccattgtacttataactgttattaaataccaaatcaaataatataaaagctgtaacatttcctttaaaactaatgctaataagggatttagagttgaatggcaaaatgtttattacttggcaatacctgatgtcagtcacaggcatccaactcatgacaagagataccactgtttgttttttaaaaaacatttttcattttgtttctccttcaaaaattaagttggactaacattcacgtatcaaactaatataaaaagaaataaaaccaagaggtgatttttgt

SEQ ID NO: 327247 - DNA, 5616 bp, Artificial Sequence
  derived and/or modified sequence
atggagaacgagatcttcacccccctgctggagcagttcatgaccagccccctggtgacctgggtgaagaccttcggccccctggccgccggcaacggcaccaacctggacgagtacgtggccctggtggacggcgtgttcctgaaccaggtgatgctgcagatcaaccccaagctggagagccagagagtgaacaagaaggtgaacaacgacgccagcctgagaatgcacaacctgagcatcctggtgagacagatcaagttctactaccaggagaccctgcagcagctgatcatgatgagcctgcccaacgtgctgatcatcggcaagaaccccttcagcgagcagggcaccgaggaggtgaagaagctgctgctgctgctgctgggctgcgccgtgcagtgccagaagaaggaggagttcatcgagagaatccagggcctggacttcgacaccaaggccgccgtggccgcccacatccaggaggtgacccacaaccaggagaacgtgttcgacctgcagtggatggaggtgaccgacatgagccaggaggacatcgagcccctgctgaagaacatggccctgcacctgaagagactgatcgacgagagagacgagcacagcgagaccatcatcgagctgagcgaggagagagacggcctgcacttcctgccccacgccagcagcagcgcccagagcccctgcggcagccccggcatgaagagaaccgagagcagacagcacctgagcgtggagctggccgacgccaaggccaagatcagaagactgagacaggagctggaggagaagaccgagcagctgctggactgcaagcaggagctggagcagatggagatcgagctgaagagactgcagcaggagaacatgaacctgctgagcgacgccagaagcgccagaatgtacagagacgagctggacgccctgagagagaaggccgtgagagtggacaagctggagagcgaggtgagcagatacaaggagagactgcacgacatcgagttctacaaggccagagtggaggagctgaaggaggacaaccaggtgctgctggagaccaagaccatgctggaggaccagctggagggcaccagagccagaagcgacaagctgcacgagctggagaaggagaacctgcagctgaaggccaagctgcacgacatggagatggagagagacatggacagaaagaagatcgaggagctgatggaggagaacatgaccctggagatggcccagaagcagagcatggacgagagcctgcacctgggctgggagctggagcagatcagcagaaccagcgagctgagcgaggccccccagaagagcctgggccacgaggtgaacgagctgaccagcagcagactgctgaagctggagatggagaaccagagcctgaccaagaccgtggaggagctgagaaccaccgtggacagcgtggagggcaacgccagcaagatcctgaagatggagaaggagaaccagagactgagcaagaaggtggagatcctggagaacgagatcgtgcaggagaagcagagcctgcagaactgccagaacctgagcaaggacctgatgaaggagaaggcccagctggagaagaccatcgagaccctgagagagaacagcgagagacagatcaagatcctggagcaggagaacgagcacctgaaccagaccgtgagcagcctgagacagagaagccagatcagcgccgaggccagagtgaaggacatcgagaaggagaacaagatcctgcacgagagcatcaaggagaccagcagcaagctgagcaagatcgagttcgagaagagacagatcaagaaggagctggagcactacaaggagaagggcgagagagccgaggagctggagaacgagctgcaccacctggagaaggagaacgagctgctgcagaagaagatcaccaacctgaagatcacctgcgagaagatcgaggccctggagcaggagaacagcgagctggagagagagaacagaaagctgaagaagaccctggacagcttcaagaacctgaccttccagctggagagcctggagaaggagaacagccagctggacgaggagaacctggagctgagaagaaacgtggagagcctgaagtgcgccagcatgaagatggcccagctgcagctggagaacaaggagctggagagcgagaaggagcagctgaagaagggcctggagctgctgaaggccagcttcaagaagaccgagagactggaggtgagctaccagggcctggacatcgagaaccagagactgcagaagaccctggagaacagcaacaagaagatccagcagctggagagcgagctgcaggacctggagatggagaaccagaccctgcagaagaacctggaggagctgaagatcagcagcaagagactggagcagctggagaaggagaacaagagcctggagcaggagaccagccagctggagaaggacaagaagcagctggagaaggagaacaagagactgagacagcaggccgagatcaaggacaccaccctggaggagaacaacgtgaagatcggcaacctggagaaggagaacaagaccctgagcaaggagatcggcatctacaaggagagctgcgtgagactgaaggagctggagaaggagaacaaggagctggtgaagagagccaccatcgacatcaagaccctggtgaccctgagagaggacctggtgagcgagaagctgaagacccagcagatgaacaacgacctggagaagctgacccacgagctggagaagatcggcctgaacaaggagagactgctgcacgacgagcagagcaccgacgacagcagatacaagctgctggagagcaagctggagagcaccctgaagaagagcctggagatcaaggaggagaagatcgccgccctggaggccagactggaggagagcaccaactacaaccagcagctgagacaggagctgaagaccgtgaagaagaactacgaggccctgaagcagagacaggacgaggagagaatggtgcagagcagcccccccatcagcggcgaggacaacaagtgggagagagagagccaggagaccaccagagagctgctgaaggtgaaggacagactgatcgaggtggagagaaacaacgccaccctgcaggccgagaagcaggccctgaagacccagctgaagcagctggagacccagaacaacaacctgcaggcccagatcctggccctgcagagacagaccgtgagcctgcaggagcagaacaccaccctgcagacccagaacgccaagctgcaggtggagaacagcaccctgaacagccagagcaccagcctgatgaaccagaacgcccagctgctgatccagcagagcagcctggagaacgagaacgagagcgtgatcaaggagagagaggacctgaagagcctgtacgacagcctgatcaaggaccacgagaagctggagctgctgcacgagagacaggccagcgagtacgagagcctgatcagcaagcacggcaccctgaagagcgcccacaagaacctggaggtggagcacagagacctggaggacagatacaaccagctgctgaagcagaagggccagctggaggacctggagaagatgctgaaggtggagcaggagaagatgctgctggagaacaagaaccacgagaccgtggccgccgagtacaagaagctgtgcggcgagaacgacagactgaaccacacctacagccagctgctgaaggagaccgaggtgctgcagaccgaccacaagaacctgaagagcctgctgaacaacagcaagctggagcagaccagactggaggccgagttcagcaagctgaaggagcagtaccagcagctggacatcaccagcaccaagctgaacaaccagtgcgagctgctgagccagctgaagggcaacctggaggaggagaacagacacctgctggaccagatccagaccctgatgctgcagaacagaaccctgctggagcagaacatggagagcaaggacctgttccacgtggagcagagacagtacatcgacaagctgaacgagctgagaagacagaaggagaagctggaggagaagatcatggaccagtacaagttctacgaccccagcccccccagaagaagaggcaactggatcaccctgaagatgagaaagctgatcaagagcaagaaggacatcaacagagagagacagaagagcctgaccctgacccccaccagaagcgacagcagcgagggcttcctgcagctgccccaccaggacagccaggacagcagcagcgtgggcagcaacagcctggaggacggccagaccctgggcaccaagaagagcagcatggtggccctgaagagactgcccttcctgagaaacagacccaaggacaaggacaagatgaaggcctgctacagaagaagcatgagcatgaacgacctggtgcagagcatggtgctggccggccagtggaccggcagcaccgagaacctggaggtgcccgacgacatcagcaccggcaagagaagaaaggagctgggcgccatggccttcagcaccaccgccatcaacttcagcaccgtgaacagcagcgccggcttcagaagcaagcagctggtgaacaacaaggacaccaccagcttcgaggacatcagcccccagggcgtgagcgacgacagcagcaccggcagcagagtgcacgccagcagacccgccagcctggacagcggcagaaccagcaccagcaacagcaacaacaacgccagcctgcacgaggtgaaggccggcgccgtgaacaaccagagcagaccccagagccacagcagcggcgagttcagcctgctgcacgaccacgaggcctggagcagcagcggcagcagccccatccagtacctgaagagacagaccagaagcagccccgtgctgcagcacaagatcagcgagaccctggagagcagacaccacaagatcaagaccggcagccccggcagcgaggtggtgaccctgcagcagttcctggaggagagcaacaagctgaccagcgtgcagatcaagagcagcagccaggagaacctgctggacgaggtgatgaagagcctgagcgtgagcagcgacttcctgggcaaggacaagcccgtgagctgcggcctggccagaagcgtgagcggcaagacccccggcgacttctacgacagaagaaccaccaagcccgagttcctgagacccggccccagaaagaccgaggacacctacttcatcagcagcgccggcaagcccacccccggcacccagggcaagatcaagctggtgaaggagagcagcctgagcagacagagcaaggacagcaacccctacgccaccctgcccagagccagcagcgtgatcagcaccgccgagggcaccaccagaagaaccagcatccacgacttcctgaccaaggacagcagactgcccatcagcgtggacagcccccccgccgccgccgacagcaacaccaccgccgccagcaacgtggacaaggtgcaggagagcagaaacagcaagagcagaagcagagagcagcagagcagctag

SEQ ID NO: 327248 - protein, 1843 aa, Artificial Sequence
  derived and/or modified sequence
MENEIFTPLLEQFMTSPLVTWVKTFGPLAAGNGTNLDEYVALVDGVFLNQVMLQINPKLESQRVNKKVNNDASLRMHNLSILVRQIKFYYQETLQQLIMMSLPNVLIIGKNPFSEQGTEEVKKLLLLLLGCAVQCQKKEEFIERIQGLDFDTKAAVAAHIQEVTHNQENVFDLQWMEVTDMSQEDIEPLLKNMALHLKRLIDERDEHSETIIELSEERDGLHFLPHASSSAQSPCGSPGMKRTESRQHLSVELADAKAKIRRLRQELEEKTEQLLDCKQELEQMEIELKRLQQENMNLLSDARSARMYRDELDALREKAVRVDKLESEVSRYKERLHDIEFYKARVEELKEDNQVLLETKTMLEDQLEGTRARSDKLHELEKENLQLKAKLHDMEMERDMDRKKIEELMEENMTLEMAQKQSMDESLHLGWELEQISRTSELSEAPQKSLGHEVNELTSSRLLKLEMENQSLTKTVEELRTTVDSVEGNASKILKMEKENQRLSKKVEILENEIVQEKQSLQNCQNLSKDLMKEKAQLEKTIETLRENSERQIKILEQENEHLNQTVSSLRQRSQISAEARVKDIEKENKILHESIKETSSKLSKIEFEKRQIKKELEHYKEKGERAEELENELHHLEKENELLQKKITNLKITCEKIEALEQENSELERENRKLKKTLDSFKNLTFQLESLEKENSQLDEENLELRRNVESLKCASMKMAQLQLENKELESEKEQLKKGLELLKASFKKTERLEVSYQGLDIENQRLQKTLENSNKKIQQLESELQDLEMENQTLQKNLEELKISSKRLEQLEKENKSLEQETSQLEKDKKQLEKENKRLRQQAEIKDTTLEENNVKIGNLEKENKTLSKEIGIYKESCVRLKELEKENKELVKRATIDIKTLVTLREDLVSEKLKTQQMNNDLEKLTHELEKIGLNKERLLHDEQSTDDSRYKLLESKLESTLKKSLEIKEEKIAALEARLEESTNYNQQLRQELKTVKKNYEALKQRQDEERMVQSSPPISGEDNKWERESQETTRELLKVKDRLIEVERNNATLQAEKQALKTQLKQLETQNNNLQAQILALQRQTVSLQEQNTTLQTQNAKLQVENSTLNSQSTSLMNQNAQLLIQQSSLENENESVIKEREDLKSLYDSLIKDHEKLELLHERQASEYESLISKHGTLKSAHKNLEVEHRDLEDRYNQLLKQKGQLEDLEKMLKVEQEKMLLENKNHETVAAEYKKLCGENDRLNHTYSQLLKETEVLQTDHKNLKSLLNNSKLEQTRLEAEFSKLKEQYQQLDITSTKLNNQCELLSQLKGNLEEENRHLLDQIQTLMLQNRTLLEQNMESKDLFHVEQRQYIDKLNELRRQKEKLEEKIMDQYKFYDPSPPRRRGNWITLKMRKLIKSKKDINRERQKSLTLTPTRSDSSEGFLQLPHQDSQDSSSVGSNSLEDGQTLGTKKSSTMNDLVQSMVLAGQWTGSTENLEVPDDISTGKRRKELGAMAFSTTAINFSTVNSSAGFRSKQLVNNKDTTSFEDISPQGVSDDSSTGSRVHASRPASLDSGRTSTSNSNNNASLHEVKAGAVNNQSRPQSHSSGEFSLLHDHEAWSSSGSSPIQYLKRQTRSSPVLQHKISETLESRHHKIKTGSPGSEVVTLQQFLEESNKLTSVQIKSSSQENLLDEVMKSLSVSSDFLGKDKPVSCGLARSVSGKTPGDFYDRRTTKPEFLRPGPRKTEDTYFISSAGKPTPGTQGKIKLVKESSLSRQSKDSNPYATLPRASSVISTAEGTTRRTSIHDFLTKDSRLPISVDSPPAAADSNTTAASNVDKVQESRNSKSRSREQQSS

SEQ ID NO: 327249 - protein, 888 aa, Artificial Sequence
  derived and/or modified sequence
LLESKLESTLKKSLEIKEEKIAALEARLEESTNYNQQLRQELKTVKKNYEALKQRQDEERMVQSSPPISGEDNKWERESQETTRELLKVKDRLIEVERNNATLQAEKQALKTQLKQLETQNNNLQAQILALQRQTVSLQEQNTTLQTQNAKLQVENSTLNSQSTSLMNQNAQLLIQQSSLENENESVIKEREDLKSLYDSLIKDHEKLELLHERQASEYESLISKHGTLKSAHKNLEVEHRDLEDRYNQLLKQKGQLEDLEKMLKVEQEKMLLENKNHETVAAEYKKLCGENDRLNHTYSQLLKETEVLQTDHKNLKSLLNNSKLEQTRLEAEFSKLKEQYQQLDITSTKLNNQCELLSQLKGNLEEENRHLLDQIQTLMLQNRTLLEQNMESKDLFHVEQRQYIDKLNELRRQKEKLEEKIMDQYKFYDPSPPRRRGNWITLKMRKLIKSKKDINRERQKSLTLTPTRSDSSEGFLQLPHQDSQDSSSVGSNSLEDGQTLGTKKSSTMNDLVQSMVLAGQWTGSTENLEVPDDISTGKRRKELGAMAFSTTAINFSTVNSSAGFRSKQLVNNKDTTSFEDISPQGVSDDSSTGSRVHASRPASLDSGRTSTSNSNNNASLHEVKAGAVNNQSRPQSHSSGEFSLLHDHEAWSSSGSSPIQYLKRQTRSSPVLQHKISETLESRHHKIKTGSPGSEVVTLQQFLEESNKLTSVQIKSSSQENLLDEVMKSLSVSSDFLGKDKPVSCGLARSVSGKTPGDFYDRRTTKPEFLRPGPRKTEDTYFISSAGKPTPGTQGKIKLVKESSLSRQSKDSNPYATLPRASSVISTAEGTTRRTSIHDFLTKDSRLPISVDSPPAAADSNTTAASNVDKVQESRNSKSRSREQQSS

SEQ ID NO: 327250 - DNA, 5532 bp, Artificial Sequence
  derived and/or modified sequence
atggagaatgaaattttcaccccgctgctagagcagtttatgaccagcccactcgtcacctgggtcaaaacttttggccccctggccgcgggcaacgggactaacctcgacgagtacgttgctttagtggacggagtgtttctgaaccaagtgatgttacagattaatcctaagttggagagtcaacgagtgaacaagaaagttaacaatgacgcctctttgagaatgcacaatctctcaatcctggttcgccagattaagttctactaccaggagaccctccaacaacttattatgatgagcctcccaaatgtcttaatcatcgggaaaaatccattttcagagcagggcactgaagaagtgaagaaattacttctgttgctcctcggttgtgcagtacaatgccaaaaaaaagaggagttcatagaaaggatccagggcctggactttgacaccaaagcagcagtagcagcccatatccaagaggttacacataatcaagagaatgtgtttgatctccagtggatggaagtgaccgacatgagccaagaggacatagaacccctgctgaagaacatggctctgcatctgaagcgcttgatcgatgagcgcgatgaacactctgagacaatcattgagctgagtgaggaacgcgacgggctccatttcctccctcacgcttcctcaagtgcccagtctccttgcggtagcccaggtatgaaaagaacagagtccaggcagcatttgtcagtggagctcgccgacgctaaggccaaaatcaggcggctgaggcaggagctggaagaaaagacagaacagctgttggattgcaaacaggaactcgaacagatggaaatagagcttaagcggttgcagcaggagaatatgaacctgctgtccgatgccaggagtgctaggatgtaccgtgacgaattagacgcactgcgcgagaaagcagtccgagtcgacaagcttgaatccgaggtttccagatacaaggaacgcctccacgatattgagttttacaaggcgagggtggaagaactaaaggaggataaccaggtgttgctggagacgaaaactatgctggaagaccagctcgagggaaccagggctcgttcagataagctgcatgaactggagaaggagaacctccagttgaaggcgaagctacacgatatggaaatggagagggatatggaccgcaaaaaaatagaagaattgatggaagagaatatgacgctggagatggcccaaaaacagtccatggatgagtccctgcacctggggtgggaattggagcagatatcgcgtacatccgaactgtctgaagccccgcagaagtccctcggacatgaggttaacgagctgacaagcagcaggcttttaaaattagaaatggagaaccagagcctgaccaaaacagtggaagaactgcgtactaccgtggattccgttgaaggtaacgcgtcgaagatccttaagatggagaaagaaaaccagaggctttctaaaaaagtggagatcctcgagaatgagatcgttcaggagaaacagtctcttcagaattgtcagaacctttcaaaggacctgatgaaagaaaaggcgcagctggagaagacgatcgagacgctcagggagaattccgaaagacaaatcaaaattctggaacaggaaaacgagcacctaaatcagacagtgagttcccttagacagcgatcccagattagtgccgaggcccgagtgaaggacatagagaaggaaaacaaaatactgcacgaatccatcaaggagacttcatctaaactgagtaaaatcgaatttgaaaagagacaaatcaagaaagaactggaacattacaaggagaagggagagcgagcggaagaactggagaacgagcttcatcacctggagaaggagaacgagttgctgcagaaaaaaatcaccaacttgaaaatcacatgtgagaagatcgaggcccttgaacaagagaattccgagctagagagggaaaataggaaacttaagaagactttagattctttcaagaatctgaccttccagcttgagtcgctggaaaaggagaattcccagctggatgaggaaaacttggagctccgcaggaacgtcgagagtctgaaatgcgcctccatgaagatggctcaattgcagctggaaaataaggaattggaatccgagaaagaacagttgaaaaaggggctagagctcctgaaagccagtttcaagaagactgaacgactggaggtatcgtaccaaggcctagatatagagaaccagaggcttcagaagacactggagaattctaataagaagatccagcagctggaatctgaactccaggatcttgagatggagaatcagaccttgcagaagaacctggaagaactgaagatctctagcaagagactcgagcagctcgagaaagaaaataaatctctcgagcaggaaacctcacaactggagaaggacaagaagcagcttgagaaggagaacaagcgcctccgtcagcaggcagaaatcaaggacactaccctggaagagaataacgtgaagataggcaatctggaaaaagagaataagaccctgagtaaggagattggaatttacaaagaatcctgcgttaggctcaaggaactcgaaaaggagaataaagagttagtgaagagggccaccatcgacatcaagaccctggtcacccttcgagaagacttagtctccgaaaaattgaaaactcagcagatgaataatgaccttgaaaaacttacccatgagctggaaaagatcggcctgaacaaggagcggcttctccatgatgagcaatcgacggacgactctcgctacaagctgctcgagtccaaattggagtccactctgaagaagagtctcgaaatcaaggaggaaaaaatagctgctcttgaggctaggctcgaggagagcacgaattataatcagcagctgcgccaggagctgaaaacagtgaaaaagaactatgaggcactgaagcaacgccaggatgaagagcggatggttcaatcctctccccctatctctggcgaggacaataagtgggagagggagagccaggaaacaaccagagagttactcaaagtaaaggatagattgattgaagtagaacgcaacaatgctaccctgcaggccgaaaagcaggctctgaagacccagttgaaacagcttgagacgcagaataacaatctgcaggcacagatcctcgccctgcaaagacaaaccgtgagtctgcaggaacagaacacaacccttcagactcaaaacgccaaacttcaggtcgagaatagcacattgaatagccagtccacctccctcatgaaccaaaatgctcagctgttgatccagcagtcatcgctcgaaaacgagaatgaaagcgtgataaaggagagggaagacctgaagagtctctacgacagtctgatcaaagatcacgaaaagctggaactactgcatgagcggcaggccagcgagtacgagtccctgatttcaaaacacggtacactcaagtcggcacataaaaatttggaggtagagcaccgggatctggaagacagatacaatcagttgttaaagcagaaaggtcagctcgaagacttagaaaaaatgcttaaggttgaacaggagaaaatgctgctcgaaaacaaaaatcacgaaaccgttgccgccgagtataagaaattatgcggagaaaacgatagactgaatcacacttactcacagctccttaaagaaacagaggtcctacagacagaccacaaaaacttgaaaagtctacttaataactccaaattggagcaaacccgcctcgaggccgaatttagcaagttgaaggagcagtaccagcagctggacataacctcaaccaagcttaacaatcagtgtgagctgctctctcagctgaagggaaatctggaagaggagaacagacatttactagaccagatacagacactcatgctccagaacagaactttactggagcaaaatatggagtctaaagacctattccacgtagaacaaaggcagtatattgacaaattgaatgaactaaggcggcagaaagaaaagctggaggagaagatcatggatcagtataagttctacgatccgtccccaccaaggagaagaggaaattggatcactttaaagatgcgcaaactgattaagagtaagaaggacataaatcgcgagagacaaaagtccctcacgctcaccccgactagatccgattcaagcgagggattcctgcagctgccccatcaggactcacaagatagcagctctgtcggaagcaattctttagaggacggacaaacgttggggacgaagaagagtagcaccatgaatgatctagtccagtctatggtcctggccgggcagtggacaggaagcacggagaatttagaagtgcctgacgacatatctaccgggaaaaggaggaaggagctgggtgctatggccttcagtactacggctattaacttttccacggttaatagttcggctgggtttcgaagcaaacagctggtgaacaataaggacactacttccttcgaagacataagcccacagggggtgtccgacgattccagtaccgggagtagagtgcacgcatccagacccgcctcactagacagcgggagaacatccacgagtaactctaataataacgcttccttgcacgaggtgaaggccggtgccgtaaacaaccaatcgcgcccacagagccattcaagcggcgagttttcactcttgcacgaccacgaagcttggtcctccagcggaagtagcccaatccagtatctgaagcgccagactaggagctcacctgtactacaacacaaaattagtgagaccttggagagccgacatcacaaaatcaaaacaggaagtccagggtccgaggtggtcacattacagcagtttttggaagaatccaataagctgacatctgttcagatcaagagcagcagccaggaaaatctgctggacgaagtaatgaaaagcctttccgtgagctctgactttctaggcaaagacaaaccggtgagctgtggactcgctagaagtgtcagcgggaaaacacccggggacttctacgatcgccgaacaactaaacctgaattccttcggccgggaccaagaaagaccgaggatacgtatttcatctcgtctgcaggcaagcccaccccagggactcagggcaagatcaaactagtgaaagagtcgtctttatctaggcaaagcaaagatagcaacccctacgcaaccctgccccgggcttcctcggttatttctactgccgagggcactacgaggaggacctctattcatgatttcctgaccaaggactcacggttgccaatctctgtcgatagtcctccagccgcagccgactctaatactacagccgctagcaatgtcgataaggtacaggagagcaggaattcaaaaagccggagtagggaacagcagagcagctag

SEQ ID NO: 327251 - DNA, 2667 bp, Artificial Sequence
  derived and/or modified sequence
ctcttggaatcaaagttagaatcaactttaaaaaagagtttggagataaaggaggagaagatagccgctctggaggcgaggctcgaggagtcgactaattacaatcagcagctgcgccaggaacttaagacagttaaaaaaaattatgaagcgctgaagcagcggcaggacgaagaacgcatggtgcagtcgtctccgcccattagcggggaagataacaaatgggaaagggagtcgcaagaaactacacgagagctgctgaaggtaaaagatcgactgattgaggtcgagaggaacaacgccaccctgcaggctgagaagcaggccctcaaaacccagttaaagcaacttgagactcaaaataataatctccaagctcaaatcctcgccctccagcggcagaccgtctccctccaggaacaaaacaccacccttcaaacccaaaatgcaaagctgcaagtagaaaattctacactgaactcacaaagcacatctcttatgaatcaaaacgcccagttgctgattcagcaaagcagtctcgagaacgagaacgaatctgtgattaaggagagggaagacctgaagtccttgtatgactcactgattaaggatcatgagaaactggagctactgcatgagcgccaggctagcgagtatgagagcctgatatccaaacacggcaccctgaagtctgcccacaagaacttagaggttgagcacagagacctagaagaccgctataaccagttgctgaaacagaaagggcaactggaagacctggaaaaaatgctgaaagtagaacaagaaaagatgctgttagagaataagaaccatgaaactgtggcagctgagtacaagaaactctgcggcgaaaacgatcgcctgaatcatacatactcccagctgctcaaagagacagaggtgctgcagacggaccacaaaaatttgaaaagccttctgaataattccaaactagaacagaccaggctcgaagccgaattttccaagcttaaagagcagtatcagcagctcgacatcacaagcacgaaacttaataatcagtgcgaactgctgtcccaattaaaggggaatttggaggaggaaaaccgccacctcctagaccagattcagactctgatgctccagaaccgcactctgctagaacaaaatatggagtccaaggacctcttccacgtcgagcagcgccaatacatcgacaaactaaatgaactgcgacggcagaaggaaaagctcgaggaaaaaattatggaccagtataaattctatgatccctccccacctaggaggcggggtaactggatcaccctgaagatgcggaaactcattaagtccaagaaggacattaaccgggaaaggcaaaaatccctgactcttaccccaaccaggagtgatagctcagaaggcttcctacagcttccccatcaggattctcaggattcaagcagcgtcgggtccaactctctcgaagacgggcagacactcgggaccaaaaagtcttcaacaatgaacgatcttgtgcaatccatggtgctagctgggcaatggacaggaagtaccgagaatctagaggtgcctgacgatatttccaccggcaaacggagaaaggagctgggagcaatggctttctcaacaacagcaattaacttctcaacggttaactccagcgctggatttcggtctaaacagctggttaataacaaagacacgacttcgttcgaggacatcagtccccagggggtatcagacgatagcagcactggaagcagagtacatgccagtcggcctgcctccctggactccggcaggaccagcacttcaaacagcaataataacgcatccctgcacgaggttaaagcgggcgccgtgaataatcagtcgcggccacagtcacatagctcaggggaattctcacttctacatgaccacgaagcatggagctcgagcggaagctctcctatccaatacctgaaaaggcagacgcgatcatctcccgtgctgcagcacaaaatctctgagacactagaatcgaggcaccataagatcaagaccggaagccctggcagcgaagtggtgactctgcagcaattcctagaagaatccaataaactgacctctgttcaaattaagagttcatcccaagaaaatctgttggacgaagtgatgaagtcgctgagcgttagcagtgatttccttgggaaggataaacctgtctcttgcggcctcgctaggtcagtttccggcaaaactcctggagatttttacgaccgccgcacaaccaagcctgaattcttgaggcctggaccgcggaaaaccgaagatacttatttcatttcctcagccggaaaacctaccccaggcacgcagggcaagatcaagctagtcaaggagagcagtttgtctcgccaatctaaggatagcaatccgtacgcgacactcccgcgtgcttctagcgtgatctcaaccgcggaaggaactactagacggactagcattcacgatttccttaccaaagactctagactgcccatctccgtggactcccctccagctgcggctgactctaataccacagcagcaagcaatgtcgataaagtgcaagagagcagaaacagcaaatcacgctctcgtgagcagcagtcttcctag

SEQ ID NO: 327252 - DNA, 5532 bp, Artificial Sequence
  derived and/or modified sequence
atggagaatgagatcttcacccccctgctggagcagttcatgaccagccccctggtgacctgggtgaagaccttcggccccctggccgctggaaatggcaccaacctggatgaatatgtggccctggtggatggagtcttcctgaaccaggtgatgctgcagatcaaccccaagctggagagccagagggtgaacaagaaggtgaacaatgatgccagcctgaggatgcacaacctgagcatcctggtgcggcagatcaagttctactaccaggagaccctgcagcagctgatcatgatgagcctgcccaacgtgctgatcatcggcaagaaccccttcagcgagcagggcacagaggaggtgaagaagctgctgctgctgctgctgggctgtgctgtgcagtgccagaagaaggaggagttcatcgagcgcatccagggcctggactttgacaccaaggctgctgtggccgcccacatccaggaggtgacccacaaccaggagaatgtgtttgacctgcagtggatggaggtgacagacatgagccaggaggacatcgagcccctgctgaagaacatggccctgcacctgaagaggctgattgatgaaagagatgagcacagcgagaccatcatcgagctgtctgaggagagagatggcctgcacttcctgccccacgccagcagcagcgcccagagcccctgtggcagccctggcatgaagaggacagagagccggcagcacctgtctgtggagctggctgatgccaaggccaagatccggcggctgcggcaggagctggaggagaagacagagcagctgctggactgcaagcaggagctggagcagatggagattgagctgaagaggctgcagcaggagaacatgaacctgctgagtgatgcccggagcgccaggatgtacagagatgagctggatgccctgcgggagaaggctgtgcgggtggacaagctggagagcgaggtgagccgctacaaggagcggctgcatgacatcgagttctacaaggcccgggtggaggagctgaaggaggacaaccaggtgctgctggagaccaagaccatgctggaggaccagctggagggcacccgggcccggagtgacaagctgcacgagctggagaaggagaacctgcagctgaaggccaagctgcatgacatggagatggagcgggacatggacaggaagaagattgaggagctgatggaggagaacatgaccctggagatggcccagaagcagagcatggatgagagcctgcacctgggctgggagctggagcagatcagcaggaccagcgagctgtctgaggccccccagaagagcctgggccacgaggtgaatgagctgaccagcagccggctgctgaagctggagatggagaaccagagcctgaccaagacagtggaggagctgcggaccaccgtggacagcgtggagggcaatgccagcaagatcctgaagatggagaaggagaaccagaggctgagcaagaaggtggagatcctggagaatgagatcgtgcaggagaagcagagcctgcagaactgccagaacctgagcaaggacctgatgaaggagaaggcccagctggagaagaccatcgagaccctgagagaaaattctgagcggcagatcaagatcctggagcaggagaatgagcacctgaaccagacagtgagcagcctgcggcagaggagccagatctctgctgaggcccgggtgaaggacatcgagaaggagaacaagatcctgcacgagagcatcaaggagaccagcagcaagctgagcaagattgaatttgagaagaggcagatcaagaaggagctggagcactacaaggagaagggggagagagctgaggagctggagaatgagctgcaccacctggagaaggaaaatgagctgctgcagaagaagatcaccaacctgaagatcacctgtgagaagattgaggccctggagcaggagaacagcgagctggagagagaaaataggaagctgaagaagaccctggacagcttcaagaacctgaccttccagctggagagcctggagaaggagaacagccagctggatgaggagaacctggagctgcggagaaatgtggagagcctgaagtgtgcctccatgaagatggcccagctgcagctggagaacaaggagctggagagcgagaaggagcagctgaagaagggcctggagctgctgaaggccagcttcaagaagacagagcggctggaggtgtcctaccagggcctggacatcgagaaccagaggctgcagaagaccctggagaacagcaacaagaagatccagcagctggagagcgagctgcaggacctggagatggagaaccagaccctgcagaagaacctggaggagctgaagatcagcagcaagaggctggagcagctggagaaggagaacaagagcctggagcaggagaccagccagctggagaaggacaagaagcagctggagaaggagaacaagaggctgcggcagcaggccgagatcaaggacaccaccctggaggagaacaacgtgaagattggcaacctggagaaggagaacaagaccctgagcaaggagatcggcatctacaaggagagctgtgtgcggctgaaggagctggagaaggagaacaaggagctggtgaagagggccaccatcgacatcaagaccctggtgaccctgcgggaggacctggtgtctgagaagctgaagacccagcagatgaacaatgacctggagaagctgacccatgagctggagaagattggcctgaacaaggagcggctgctgcatgatgagcagagcacagatgacagccgctacaagctgctggagagcaagctggagagcaccctgaagaagagcctggagatcaaggaggagaagattgctgccctggaggcccggctggaggagagcaccaactacaaccagcagctgcggcaggagctgaagacagtgaagaagaactatgaggccctgaagcagaggcaggatgaggagaggatggtgcagagcagcccccccatcagcggggaggacaacaagtgggagcgggagagccaggagaccacccgggagctgctgaaggtgaaggaccggctgattgaggtggagagaaataatgccaccctgcaggccgagaagcaggccctgaagacccagctgaagcagctggagacccagaacaacaacctgcaggcccagatcctggccctgcagaggcagacagtgtccctgcaggagcagaacaccaccctgcagacccagaatgccaagctgcaggtggagaacagcaccctgaacagccagagcaccagcctgatgaaccagaatgcccagctgctgatccagcagagcagcctggagaatgaaaatgaatctgtcatcaaggagcgggaggacctgaagagcctgtatgacagcctcatcaaggaccacgagaagctggagctgctgcacgagcggcaggcctctgaatatgagagcctcatcagcaagcacggcaccctgaagagcgcccacaagaacctggaggtggagcaccgggacctggaggaccgctacaaccagctgctgaagcagaagggccagctggaggacctggagaagatgctgaaggtggagcaggagaagatgctgctggagaacaagaaccatgaaacagtggccgctgagtacaagaagctgtgtggggagaatgaccggctgaaccacacctacagccagctgctgaaggagacagaggtgctgcagacagaccacaagaacctgaagagcctgctgaacaacagcaagctggagcagacccggctggaggccgagttcagcaagctgaaggagcagtaccagcagctggacatcaccagcaccaagctgaacaaccagtgtgagctgctgagccagctgaagggcaacctggaggaggagaacagacacctgctggaccagatccagaccctgatgctgcagaacagaaccctgctggagcagaacatggagagcaaggacctcttccacgtggagcagaggcagtacatcgacaagctgaatgagctgcggcggcagaaggagaagctggaggagaagatcatggaccagtacaagttctatgaccccagcccccccaggagaagaggcaactggatcaccctgaagatgaggaagctgatcaagagcaagaaggacatcaaccgggagcggcagaagagcctgaccctgacccccaccaggagtgacagcagcgagggcttcctgcagctgccccaccaggacagccaggacagcagctctgtgggcagcaacagcctggaggatggccagaccctgggcaccaagaagagcagcaccatgaatgacctggtgcagagcatggtgctggccggccagtggacaggcagcacagagaacctggaggtgcctgatgacatcagcacaggcaagaggaggaaggagctgggcgccatggccttcagcaccacagccatcaacttcagcacagtgaacagcagcgctggcttccgcagcaagcagctggtgaacaacaaggacaccaccagctttgaggacatcagcccccagggcgtgtctgatgacagcagcacaggcagccgggtgcacgccagcaggcctgccagcctggacagcggccgcaccagcaccagcaacagcaacaacaatgccagcctgcacgaggtgaaggccggggctgtgaacaaccagagccggccccagagccacagcagtggagagttcagcctgctgcatgaccacgaggcctggagcagcagcggcagcagccccatccagtacctgaagaggcagaccaggagcagccctgtgctgcagcacaagatcagcgagaccctggagagccgccaccacaagatcaagacaggcagccctggcagcgaggtggtgaccctgcagcagttcctggaggagagcaacaagctgacctctgtgcagatcaagagcagcagccaggagaacctgctggatgaggtgatgaagagcctgtctgtgtccagtgacttcctgggcaaggacaagcctgtgtcctgtggcctggcccggtctgtgtctgggaagacccctggggacttctatgacaggaggaccaccaagccagagttcctgcggcccggccccaggaagacagaggacacctacttcatcagcagcgctgggaagcccaccccaggcacccagggcaagatcaagctggtgaaggagagcagcctgagccggcagagcaaggacagcaacccctatgccaccctgccccgggccagcagcgtcatcagcacagctgagggcaccaccaggaggaccagcatccatgacttcctgaccaaggacagccggctgcccatctctgtggacagccccccagctgctgctgacagcaacaccacagctgccagcaatgtggacaaggtgcaggagagcaggaacagcaagagccgcagccgggagcagcagagcagctag

SEQ ID NO: 327253 - DNA, 2667 bp, Artificial Sequence
  derived and/or modified sequence
ctgctggagagcaagctggagagcaccctgaagaagagcctggagatcaaggaggagaagattgctgccctggaggcccggctggaggagagcaccaactacaaccagcagctgcggcaggagctgaagacagtgaagaagaactatgaggccctgaagcagaggcaggatgaggagaggatggtgcagagcagcccccccatctctggagaggacaacaagtgggagcgggagagccaggagaccacccgggagctgctgaaggtgaaggacaggctcatcgaggtggagaggaacaatgccaccctgcaggccgagaagcaggccctgaagacccagctgaagcagctggagacccagaacaacaacctgcaggcccagatcctggccctgcagaggcagacagtgtccctgcaggagcagaacaccaccctgcagacccagaatgccaagctgcaggtggagaacagcaccctgaacagccagagcaccagcctgatgaaccagaatgcccagctgctgatccagcagagcagcctggagaatgaaaatgaatctgtcatcaaggagcgggaggacctgaagagcctgtatgacagcctcatcaaggaccacgagaagctggagctgctgcacgagcggcaggcctctgaatatgagagcctcatcagcaagcacggcaccctgaagagcgcccacaagaacctggaggtggagcaccgggacctggaggaccgctacaaccagctgctgaagcagaagggccagctggaggacctggagaagatgctgaaggtggagcaggagaagatgctgctggagaacaagaaccacgagaccgtggccgctgagtacaagaagctgtgtggagaaaatgaccggctgaaccacacctacagccagctgctgaaggagacagaggtgctgcagacagaccacaagaacctgaagagcctgctgaacaacagcaagctggagcagacccggctggaggccgagttcagcaagctgaaggagcagtaccagcagctggacatcaccagcaccaagctgaacaaccagtgtgagctgctgagccagctgaagggcaacctggaggaggagaacagacacctgctggaccagatccagaccctgatgctgcagaacagaaccctgctggagcagaacatggagagcaaggacctcttccacgtggagcagaggcagtacatcgacaagctgaatgagctgcggcggcagaaggagaagctggaggagaagatcatggaccagtacaagttctatgaccccagccccccaagaagaagaggcaactggatcaccctgaagatgaggaagctgatcaagagcaagaaggacatcaaccgggagcggcagaagagcctgaccctgacccccaccaggagtgacagcagcgagggcttcctgcagctgccccaccaggacagccaggacagcagctctgtgggcagcaacagcctggaggatggccagaccctgggcaccaagaagagcagcaccatgaatgacctggtgcagagcatggtgctggccggccagtggacaggcagcacagagaacctggaggtgcctgatgacatcagcacaggcaagaggaggaaggagctgggcgccatggccttcagcaccacagccatcaacttcagcacagtgaacagcagcgctggcttccgcagcaagcagctggtgaacaacaaggacaccaccagctttgaggacatcagcccccagggcgtgtctgatgacagcagcacaggcagccgggtgcacgccagcaggcctgccagcctggacagcggccgcaccagcaccagcaacagcaacaacaatgccagcctgcacgaggtgaaggccggggctgtgaacaaccagagccggccccagagccacagcagcggggagttcagcctgctgcatgaccacgaggcctggagcagcagcggcagcagccccatccagtacctgaagaggcagaccaggagcagccctgtgctgcagcacaagatcagcgagaccctggagagccgccaccacaagatcaagacaggcagccctggcagcgaggtggtgaccctgcagcagttcctggaggagagcaacaagctgacctctgtgcagatcaagagcagcagccaggagaacctgctggatgaggtgatgaagagcctgtctgtgtccagtgacttcctgggcaaggacaagcctgtgtcctgtggcctggcccggtctgtgtctgggaagacccctggggacttctatgacaggaggaccaccaagccagagttcctgcggcccggccccaggaagacagaggacacctacttcatcagcagcgctgggaagcccaccccaggcacccagggcaagatcaagctggtgaaggagagcagcctgagccggcagagcaaggacagcaacccctatgccaccctgccccgggccagcagcgtcatcagcacagctgagggcaccaccaggaggaccagcatccatgacttcctgaccaaggacagccggctgcccatctctgtggacagccccccagctgctgctgacagcaacaccacagctgccagcaatgtggacaaggtgcaggagagcaggaacagcaagagccgcagccgggagcagcagagcagctag

SEQ ID NO: 327254 - DNA, 5532 bp, Artificial Sequence
  derived and/or modified sequence
atggagaacgagatcttcacccccctgctggagcagttcatgacctcgcccctcgtcacgtgggtcaaaaccttcggacctcttgccgccgggaacgggacaaatctggatgaatacgtggccttggtcgatggagtgtttctgaaccaggtgatgttgcagattaaccccaagctggaatctcaaagggtgaacaaaaaagtgaacaacgatgcatctctgcgcatgcataatctgagcatcttagttcgccagatcaagttctactaccaggaaacactgcagcagctgatcatgatgtccctgccaaacgtcctcatcatcggtaagaacccatttagcgagcagggtaccgaggaagttaagaaactactgctccttctcttaggttgcgcggtccagtgccagaagaaagaggagtttatcgagcgtattcaaggcctggacttcgacaccaaagccgctgtggctgctcacattcaagaggtcacacacaaccaggagaatgtcttcgacctgcagtggatggaggtgactgacatgagtcaggaagacattgaaccgctcctgaagaatatggcactccatctgaaaaggctgatcgatgagagggatgagcattctgagacaatcatagagctctccgaggagcgcgacggtttgcatttccttcctcacgcttcttcatctgcccagtctccttgtggtagtccgggaatgaaacgaaccgagtcccgacagcatctgtcagtggagctcgcagacgccaaagcaaaaattcggagactgagacaggaattggaggagaaaacagagcagctcctggactgcaaacaggagctcgaacagatggagatcgagctgaagagactgcagcaggagaacatgaacctcctgtctgacgcccgatctgcccggatgtacagggacgagcttgatgctctccgcgaaaaggccgtgagggtagataagctggaatccgaagtgtcaaggtacaaggaaagacttcacgacatcgagttctacaaggccagagtggaagagctcaaggaagataaccaagtcctgctagagactaagaccatgctggaagaccagctggagggcactagggctaggtccgacaagttgcatgagttggagaaggagaatttgcagcttaaggctaagttgcatgatatggaaatggaaagggatatggaccggaagaaaatcgaggaactgatggaagagaatatgaccctggagatggcccagaaacaatctatggatgagtcattacacctcgggtgggaactcgagcagatctctcgcacctccgagctgtccgaggccccccagaaatccctcgggcacgaagtcaacgagttgacctcttcccgcctcctgaaacttgagatggaaaatcagtccctgaccaagactgtagaagagcttcggacaaccgtggattcggtcgaagggaatgccagtaaaatcttgaagatggaaaaggaaaatcagcggctatctaagaaggtggagatcctggaaaacgagatcgtacaggaaaagcagtctcttcagaattgccagaatctgagcaaagatctgatgaaagagaaggcccaactggagaaaaccatcgaaaccctgagagaaaactctgaacggcagataaagattctggaacaggagaacgagcatcttaaccaaactgtatcaagcctccgacaaaggtctcagattagcgctgaagcccgggtcaaggatatagaaaaagaaaacaaaatcctgcatgagtctatcaaggaaacgtcctctaagctcagcaaaattgaatttgaaaaaaggcagatcaaaaaagaattagagcactacaaggagaagggcgaaagggccgaggaactcgaaaatgaactgcaccaccttgaaaaggagaatgagctgcttcaaaagaaaatcacgaaccttaagattacatgtgaaaaaatcgaagctttggagcaagagaattcagaacttgaacgcgaaaaccgcaaattgaagaagacactggactcttttaaaaatctgacctttcagctcgagtcgctcgaaaaggaaaatagccagttagatgaggagaaccttgagctgagacggaacgttgaatcactgaaatgtgcttcaatgaagatggctcagctccagctcgagaataaagagctggaaagcgaaaaggaacagctgaaaaagggcctcgaactcctgaaggcttcatttaaaaaaactgaacggctggaggtgtcataccagggcctggacattgaaaatcagcggctccagaaaacgctggaaaacagtaacaagaagattcaacaacttgagtcagaactccaggatcttgagatggagaaccagacactgcagaagaacctcgaggaactaaaaatcagtagcaagcgactggaacagctggagaaggagaataaatcccttgagcaagagacttctcagcttgagaaagacaagaagcagctggagaaagagaataaacgcctcagacagcaggctgaaattaaagatacaaccctggaagaaaacaacgtcaaaatcgggaatctggagaaggagaacaagacactgtctaaagagatcggaatctacaaggagtcctgtgtacggcttaaggagcttgagaaggagaacaaggagctcgtgaaacgtgctaccattgacatcaaaaccctcgtcacactgcgcgaagaccttgtcagtgagaaactgaagacccagcagatgaataacgacttggagaaattgactcacgagctggagaagatagggcttaataaggagaggcttctgcatgatgagcagtctactgatgacagtagatataagctgctagagtccaagctggagagcaccctgaaaaaatccctcgagataaaggaggagaagattgcagctctggaggcccgcttagaggagtccactaactacaaccagcaacttcgtcaggaactgaagacagttaaaaagaattatgaggccctgaagcaaagacaggatgaggagcggatggtgcaatccagcccgcccatcagcggtgaggataacaagtgggaaagggagagtcaggaaaccacaagagagcttctgaaggtgaaagaccggctgatcgaggtggaaagaaacaatgccactctgcaggctgagaagcaagctcttaagacacagcttaaacaactagaaacgcaaaataataacctgcaggcccagattctggccttacagcgccagacggtctctttgcaagaacagaatactaccttgcagacccaaaacgctaagctgcaggtcgaaaattccaccctgaacagtcaaagcacctccctcatgaaccagaacgctcagcttctaatccagcagagctcactggaaaatgaaaatgaaagtgtgatcaaagaaagggaagacttgaaatccttatatgacagtttgatcaaggatcatgaaaaattagagttattacatgagaggcaggcctcagagtatgagagcctgatctcaaaacacgggactttaaaatcagcccacaagaatctggaggttgagcaccgcgacctcgaggacaggtataatcagctacttaaacagaagggtcagctggaggaccttgaaaaaatgctgaaggttgagcaggaaaaaatgttgttggaaaataagaatcacgagaccgttgccgcggagtataaaaaactatgcggagagaatgatcgccttaatcacacatactctcagctactgaaggagaccgaagtgttgcagaccgatcataaaaacctgaagtcacttctgaataactcgaaacttgaacaaacgaggcttgaagcagagttcagtaaactgaaagaacagtaccagcagctggacattaccagcaccaagctgaacaatcagtgtgagctgctcagtcagctcaagggtaatcttgaagaagaaaacagacacctcttggatcagattcaaaccctgatgctccagaatcggaccttactggagcaaaacatggaatctaaagacctctttcatgtggagcagcgccagtatattgataaattgaacgagttgagaaggcagaaagagaaactcgaggagaagatcatggaccagtataagttctacgatccctcgccaccacgacgtcgtggcaattggattacattaaagatgcgtaaattgattaagagcaaaaaggacatcaacagagagagacagaagtcactgacgcttactcccacacggtccgattctagtgagggctttctccagctgccacatcaggacagccaggactctagttcagtggggtcgaattccctggaagacgggcagacgctcggtaccaagaagagttccacgatgaacgatctagtccaatctatggtcttggcagggcagtggactggctctacagagaatctggaagttcctgatgacatttccactggcaaaaggcggaaagagctgggagcaatggcctttagcacaactgcaattaacttcagtacagtcaactctagcgctggattccgttccaagcagctcgtcaataacaaagacaccacatcatttgaggacatttccccacagggagtgtctgacgatagttcaactgggtctcgcgtccatgcctctcgtcctgcctccctagattccggccgtacgagcacctctaatagcaacaacaatgcatccctgcatgaggtaaaggcgggcgccgtgaataatcaatctaggcctcagtcccacagctcaggcgagttttccctgttgcacgatcatgaggcctggtcgtcaagcgggtcctctcccatccaatacttaaagcggcagaccaggagctctcctgtgctccaacataagatttcggaaaccctagaaagccgccaccacaagataaagacaggttcccccggatccgaggttgtcaccttgcagcagtttcttgaggagtccaacaagctgaccagtgtgcagataaagagcagctctcaggaaaacttgctggacgaagtaatgaaatccctgtctgtgtcctccgacttcctaggaaaggataagcccgtgtcgtgcgggctcgccaggagcgtgtctggaaaaactcccggagacttctatgacagacgcacaacgaaaccagagtttttgagaccagggccacggaaaaccgaggacacctactttatttccagtgccgggaagcctactcctggtacccaggggaagatcaaactggttaaagaatctagtctctcccgccaatctaaggatagtaatccatacgcaacgctcccaagagcatcaagtgtcataagcaccgcagaagggacgaccagacgtacctctattcatgactttttaactaaggacagccggcttcccatctctgtggactctccccctgccgccgctgattcaaatacgactgccgctagcaacgtggacaaagtccaggagtccaggaacagcaagtcaaggagccgggagcaacagtcctcatag

SEQ ID NO: 327255 - DNA, 2667 bp, Artificial Sequence
  derived and/or modified sequence
ctgctggagagcaagctggagagcaccctgaagaagagcctggagataaaggaggagaaaatcgccgccctggaagcccggctggaggagtcaacaaattacaaccagcaacttcgtcaggaactgaagacggtgaaaaaaaactacgaggccctcaagcagcggcaagacgaagaacgtatggtacaaagctctcctccaatctcaggggaggacaacaagtgggaaagggagtcgcaagagaccacccgagagctgctcaaagtgaaggaccgactcatcgaggtggaaaggaataacgctacactccaggcagagaagcaggccttgaagacacagctgaagcaattggaaactcagaacaacaacttgcaggcacaaattcttgcactgcagcgacagacagtatcactccaggaacagaataccaccctgcagacacagaatgcgaagctccaagtggaaaattctacgctaaattcgcagtctacttctctgatgaaccagaatgcccagctgttgattcagcagagctcgttggagaacgaaaacgagtccgttataaaggaaagggaagacttaaaatccttgtacgattcgctgattaaggaccatgagaagttagagctactacacgagagacaagcctccgaatacgagtctctgatttccaagcacgggaccctgaaatctgctcacaagaatctggaagttgaacatcgagacttagaagatcggtacaatcagctcctaaaacagaagggacaactcgaagatctggagaaaatgctgaaagtggagcaggaaaagatgttgctggagaataaaaatcatgagaccgttgccgccgaatataaaaagttgtgcggtgagaacgaccgtcttaatcatacgtacagccagttactgaaagaaactgaggtgctccagacagatcacaagaacctgaaatcattactcaataattccaaactcgagcagacccggctggaggccgaattctcaaagctaaaagaacaatatcagcagctggatatcaccagcacgaaactgaataaccagtgcgagctgctgtcccagttaaaaggaaaccttgaggaagagaaccggcacctgctggaccagattcagaccctcatgctgcagaatcggacacttctcgaacaaaatatggaatccaaggacctgttccatgtggaacagcgccaatatatcgataaactcaacgagctgcgcaggcagaaagagaagctggaagaaaaaatcatggaccaatataagttttacgacccttccccaccaaggaggcgcgggaattggattaccctgaagatgagaaagttgatcaagagcaagaaggacatcaatcgagagcgacaaaaatctttaaccctcactccaacgcgctccgactccagcgagggcttcctgcagttaccgcaccaggacagccaggattcctcctcagtggggagcaacagtctggaggatggtcagactctgggaacgaagaagagcagcaccatgaatgaccttgtgcaaagcatggtgctggccggccaatggacgggctctacagaaaacttagaggtacctgacgatatcagcacagggaaaaggcgaaaagaactgggggcaatggctttctccactaccgccatcaacttctcaacagtcaattcatctgccgggttccgaagtaagcaactggttaacaataaggataccactagcttcgaagatatatcccctcaaggcgtcagtgacgattcctccactggcagtcgcgttcatgcatcacgccctgccagtttggattcagggaggacaagtacaagcaatagtaataataacgcctctctgcacgaggtgaaagcaggcgctgtaaataaccaaagtcggccgcagtcacactcttccggtgaattctcattgcttcatgaccacgaagcatggtctagttctggctcatctccaatccaatatctaaagagacagacaagaagttccccggttctgcagcacaaaattagtgagacgctagaatcacgccaccataagattaaaaccggctctccaggtagtgaggtggtgacactgcagcagttcttagaggaatcaaacaaactcacatcagtgcagataaagtcttccagtcaggagaatctgctcgatgaggtcatgaagtcattgtctgtgtcctctgactttctgggaaaggataagccagtatcatgcggcctggcgcgctcggtcagtggcaagacccctggcgatttctacgatcgacggaccacaaaaccagaattcttaaggcctggccctagaaaaaccgaggacacatatttcatctccagcgccggtaaacctacccccggtacacaaggaaagatcaagcttgtcaaggaatcaagcctcagtcgccaatctaaggactcgaatccttatgcaaccttgcctagggcgtcatccgttatctcaactgctgaggggacgactaggcgcacatccatccacgattttttaacgaaagactcaaggctcccgatctcagttgatagcccacccgcagcggcagacagtaataccacggccgccagtaacgtagataaggtgcaggagagccggaactcaaagagcagaagcagagaacagcagtcctcttag

SEQ ID NO: 327256 - DNA, 5532 bp, Artificial Sequence
  derived and/or modified sequence
atggaaaatgagattttcacaccattacttgagcagtttatgacatctcccctcgtgacatgggtgaaaactttcggaccactggccgcaggaaacggtactaaccttgacgaatacgtggcactggttgatggagttttcttgaatcaggttatgttgcagataaatccgaaactggaatcccagcgggttaataaaaaagtcaacaacgacgcgtcgctgagaatgcacaacttgtctatcctagtgaggcagattaagttctactaccaggagactctccagcaactgattatgatgtccctgcctaacgtcctgatcattggaaagaatcccttttcagagcagggcacagaggaggttaaaaaattactgttgctgcttctggggtgcgccgtacagtgccagaagaaggaagaatttatagagcgaatccagggactcgactttgacacaaaggctgctgtagcggcacacatccaggaagtcacacacaaccaggagaatgtgttcgacctgcaatggatggaagtgacagacatgtctcaagaggacatcgagcccctcctgaagaacatggcactgcacttgaaaaggctgattgatgagagagacgagcactccgagactatcatcgagctctcggaggaaagggacggcctccacttcttgccccacgccagttcatctgcccagtcaccttgcgggagccccggtatgaagcgcacagagtccaggcaacacctgtccgtcgaactcgctgatgctaaggctaaaattaggaggcttagacaggagttagaggaaaaaaccgagcagctgttagattgtaaacaggaactcgagcagatggagatcgagctgaagcgcctccagcaggagaacatgaatctgctcagtgacgcaaggagtgccaggatgtatagggacgaactggacgcgcttagggaaaaggctgtccgagtggacaaacttgagagcgaagttagtcggtataaagagcggctgcacgacatcgaattttataaagctcgtgtcgaagaactgaaagaggataatcaggtcttactggagaccaagactatgctggaagaccagcttgaggggaccagggccaggtcagataaattacacgagctggaaaaagagaacctgcagttgaaagccaagctgcatgatatggagatggaaagggacatggatcgcaaaaagatcgaggaattgatggaggagaacatgacactggaaatggcccagaaacagtctatggacgagagtttgcatctggggtgggagctggagcagatatctcgcaccagcgaactgagtgaagccccacagaaatccctgggacatgaggtgaacgaattaacctcaagtcgactgctcaaattggaaatggaaaaccaatcactaaccaaaaccgtggaagagctgagaacaactgtagactctgtggaaggtaatgcatctaaaatcctgaagatggagaaggaaaaccagagattgtcaaaaaaggttgagattttggagaatgaaattgtgcaggaaaaacagagcctgcagaactgtcagaacctctctaaggacttgatgaaagagaaagcacagctcgaaaagactattgagaccctgagagagaactctgaaaggcagattaaaattctggagcaagagaacgaacacctgaaccagacggtttcaagcttgaggcagcgctctcagatatcagcagaggccagggtcaaggacatcgaaaaagagaacaagattctccacgagtcgatcaaagagactagcagcaagctgagcaagatcgagttcgaaaagcgtcagatcaagaaagagcttgagcattataaggaaaaaggggagagagccgaagagctggaaaatgaactgcaccacctagaaaaggagaacgaacttctccagaagaagattaccaacctcaaaatcacatgcgagaagattgaggctcttgagcaggagaatagtgagctagagagagagaatcgcaaactgaagaaaactcttgattcttttaaaaatctgacatttcaactcgagtcactcgagaaagaaaatagccagctggacgaggagaatctagagctgaggcgcaatgtggagtccctgaaatgcgcctccatgaaaatggcacagcttcagctggaaaacaaggagttagaatcagaaaaagagcaactaaaaaagggacttgagctactgaaggcttctttcaagaagactgaacgcctcgaagtaagctatcagggattggatatcgagaaccaacgtttgcaaaagaccttggaaaactctaataaaaaaattcagcaactcgaaagcgagctacaggatctggagatggaaaatcagactctgcagaagaatttagaggaactgaaaatcagttcgaagcggctggagcaactcgagaaagagaacaagtcccttgagcaagagactagccaattggagaaggacaagaagcagctggagaaggaaaacaaacgtttgagacagcaggctgagatcaaggatactactctcgaggagaacaacgttaaaattggaaacttagaaaaagagaacaagacgctgagtaaggaaattggtatttacaaagaatcatgcgtccgccttaaggagctggagaaagaaaacaaggagttggtaaagcgggctaccatcgacattaaaacgctcgtgacactgcgcgaggacttggtcagtgaaaaacttaagacacagcagatgaacaatgatctggaaaaactgacgcatgaactcgaaaagatagggctcaacaaagagagactgctgcacgatgagcagtccacagatgatagtcgctacaagctcctcgagagcaagctggaatcaaccttgaagaagtcactggagatcaaagaagagaagatagcagccttggaggcaaggctggaggagagtactaactataaccaacagctgcgacaagagctaaagaccgtgaagaaaaattacgaagccctcaagcagcgccaggatgaggagaggatggtccagtcgtctcctcccatctccggcgaagacaacaagtgggagcgggagagccaggaaaccacacgcgagctcctgaaggtgaaagatcgtctcatcgaagtggaacgcaacaacgcaacactgcaggccgagaagcaggccttgaagactcaactcaaacagctggaaacacagaacaataatttgcaggctcaaattctggctctgcagaggcaaactgtttctctccaagaacaaaacaccacactgcaaactcagaacgctaagctacaagtggaaaactcaaccctcaactcacagagcacgtcgctgatgaatcagaacgcccagctgctgatccagcaatcctccctggagaatgagaacgagagcgtgattaaggaacgcgaggatctgaagtctctgtatgacagcctgattaaagaccacgagaagctggagctcttacatgagaggcaggcttccgaatatgaatctctcatcagcaagcacggcactctgaagtcagcccacaagaacctggaggtagagcatcgagatctcgaggatagatataatcagctccttaagcagaaaggacagttagaagacctggagaaaatgctcaaagtggagcaggaaaagatgctcttagagaataagaaccatgaaactgtggctgccgagtacaaaaagctgtgcggcgagaacgaccggctaaaccacacctattcccaactgttaaaggagactgaagtgctgcagacggaccacaagaatctcaaatcattactgaacaactcaaagcttgagcagacaagactggaggctgaattttcaaaactgaaggagcagtaccaacagctagatattaccagtacgaagttaaataatcaatgcgagctcttgtcacagctgaaaggaaatctggaggaggaaaacaggcatttacttgatcagattcagaccttgatgctccagaataggactctcctggaacagaacatggagagcaaggatttattccacgtcgaacagaggcagtatatcgataaactgaacgagctgcgcagacagaaggagaagcttgaagaaaagatcatggatcagtataagttctacgacccctccccccctaggagacgcggaaactggatcaccctcaagatgcggaaactcatcaaaagtaagaaagacattaaccgggaaagacagaaatcacttacactaactccaactcgttccgactcctccgaggggtttctgcagctacctcaccaggatagtcaagattcaagcagcgtggggagtaactctctagaagatggccagactctagggacaaagaagtcttccacaatgaacgaccttgtgcagtccatggtcctggcaggccagtggactgggtcaaccgaaaatctggaagtgccagatgatatctccaccggaaaacgcagaaaagagctgggagccatggcattcagcacaacggctattaattttagtacggtcaactcatccgccggttttcgaagcaagcagctagtgaacaataaggatactacctctttcgaagatatttctccccagggcgtgtccgatgactctagcactggaagccgcgttcatgcatcccggcctgcctcactcgattcaggacgtacctctactagcaacagcaacaataacgcatcactgcatgaggttaaagccggagctgtgaataatcaatccagacctcaaagccattctagtggggaattttctttactgcatgaccacgaggcttggagtagttcagggagcagtcccatccagtacctgaaaagacagacgcggtcctctcccgtgctccagcacaaaatttcagaaacactcgagagccgacaccacaagatcaagacaggatctcccggtagtgaagtagtaacactgcagcagttccttgaagagagcaataaactcaccagtgtacaaatcaagagctcatcgcaagagaatctgctcgatgaagtgatgaaatccctgagcgtgtcatcagactttctgggaaaagacaagccggtgtcatgcgggctcgccagatcagtgagcgggaagacgcccggtgacttttatgacagaaggactaccaagccggagttcctgcgcccaggcccaaggaagaccgaagacacttactttatctctagtgcaggaaaaccaacacccggtacccaagggaagatcaagctggtcaaagaaagcagcctgtcccgccagtcaaaagatagtaacccatacgccaccctgccacgagcaagctccgtgataagcactgccgaagggacgacgagaaggactagtatccacgattttctcacaaaggactccagattacctatcagcgtagactccccgccagctgccgctgacagtaacacaactgccgctagtaacgttgataaggtacaggagtctcgcaattctaaaagtcgctccagggaacagcaaagcagctac

SEQ ID NO: 327257 - DNA, 2667 bp, Artificial Sequence
  derived and/or modified sequence
ctgcttgaaagcaagttggagtctacacttaagaagtccctcgaaattaaggaagagaaaattgctgccctggaggcacgccttgaggaaagcactaattataatcaacagctgcggcaagagctgaaaactgtgaagaaaaattacgaagcgcttaaacaacggcaggatgaagagcgaatggtgcaaagctcaccacccatctcgggggaagataataagtgggaacgtgagagccaggaaaccaccagagagcttctcaaggtaaaagacaggctgatcgaggtcgagcggaacaacgccaccctgcaggccgaaaagcaggcactcaagactcagttgaaacagttagagacccaaaataataacctacaggcccagattctggctctgcaaagacagacagtgagtctccaggagcaaaataccactctgcagacacagaacgccaagcttcaggtggaaaactccaccttaaactcacaaagcacatcgctgatgaaccagaatgcccaactactgattcaacagtcatccctcgaaaatgaaaacgaatccgtgatcaaggagcgcgaagacctgaagagtctgtacgattccctcatcaaggatcatgaaaagttagaattgctccacgagagacaggccagcgaatatgaaagtttgattagcaaacatgggactctaaagagcgctcacaaaaatctggaggttgagcacagagatctggaagatagatataaccagttactcaaacagaaagggcagctcgaagacctggagaagatgctgaaggtggaacaggaaaaaatgctgctcgagaacaaaaaccacgagactgtcgctgcggagtataaaaaactgtgcggggaaaacgacaggctgaatcatacttacagtcagctgttaaaggagaccgaggttctccagacggaccacaaaaatctgaagagccttctaaataactctaaactggaacagacccgccttgaagctgagttcagcaagctgaaagagcaatatcagcaattagatattactagtactaagttaaacaatcagtgtgaactactgtcccagctcaaggggaatctcgaagaggagaatcgccacttactggaccagatacagacactgatgctgcaaaaccgaacattgcttgagcagaatatggaatccaaggacctcttccacgtggagcagcgacagtacatagacaagctaaacgagctgagaaggcagaaggagaaattagaggagaagattatggaccagtacaaattttatgacccatctcctccacgcaggcggggaaactggattaccctgaagatgcgaaaactgataaagagcaagaaggacataaatagggagaggcagaaatctctgactctgacaccaactcggagcgactcctccgaaggattcctgcaattgccacatcaggatagccaggacagtagctctgttgggtctaactcgctggaggacggacagacgttgggcacaaagaagtcctctactatgaatgacttggtccagtctatggtgctggccggacaatggactgggagcacagagaacctcgaggttcctgacgacatctccacaggtaagaggcgcaaagaactgggcgcaatggcttttagcactacggccatcaatttctccacagtcaattctagcgccggtttcaggtcaaagcagctggtgaacaacaaagatacaactagcttcgaggacatctctccccaaggagtgagtgacgacagttcaactggtagtcgcgtacacgcgtccagaccagccagtctggattctggaagaacatcaacgtctaactccaacaataacgccagtctccacgaagtcaaagctggagccgtaaataatcaatcccggcctcagtcacattcatccggtgagttcagcctgcttcatgatcatgaagcttggtctagcagtgggtcctctcccatccagtacttgaagaggcaaacccgatctagtcctgtgctccaacacaaaatctcagagaccctggagtcccgtcaccacaaaataaaaacaggcagccctggatcagaggtggtgactctacagcaattcctagaggagtccaacaagctgactagcgtgcagattaaatcgagctcccaggaaaaccttctggacgaagttatgaagtcactgagtgtttcctccgactttctcgggaaggataagccagtgagttgcggcctcgcccgatcagtcagtggaaaaactcctggagatttctacgataggaggactactaaacccgaatttctccggccagggccaagaaaaaccgaggatacctacttcataagtagtgctgggaagcccaccccagggacacaagggaagattaagctagtcaaggagtccagcctgtcacgccaaagtaaggactccaacccctacgcaaccttacctcgggcatcctctgtcatctctaccgcagagggaaccactcgtaggacatctattcacgactttctgactaaagatagccgactacccatctctgtggattcgcctcctgccgctgcagacagtaataccaccgctgcttcgaatgtggacaaggtccaggagagcagaaatagcaaatcccgctcccgtgagcagcagtcatcatag

SEQ ID NO: 327258 - DNA, 9667 bp, Artificial Sequence
  derived and/or modified sequence
gttactccggcttctccatagagggcggagaaggctggagcgcggcggtgattttgtgccagggattcccagagacgcgctgaaaggctggcagggcttaggaagctggggggttagggacacacattcaagcccccacccccgggaggggaagggggctggaggcgaggcttgagggcggcggaggaatggtgtctgctcggggggaaggggcgagccctgcctgttggtactgaggggctgcgggcagtggaggctccgcgggtcgaaagcggctccatgcccatcggtgggtggaacgtgtagaggtcggaacgccgaggtcgagtctggtggcgcctcggtatccttaacgtggtctctgtttaacgtatttcatttagcccccgttgggattgattcattgggagcagtttcgctggtctggatcctccaggagctggacaaccttgacgggctttttgtcttgggttccagccccctttcccttcctcctcctccagatgccttttctctgcccctcctcgcccggtacagacatttccagcgcaggctgctgctcgtggtgtccgtcgtcgaagccacttcttgggatttcggctcgtttcactctggggtgttttttgaggagggagagtgcccccctcctccacgatgggatttttctcccttgccgaaatggactttcattgatttctacttacttccacgtttagtgaccaattccctaggcgtatttttgtggtagttccttttttcaaatacatactctgtaaaatggagaacgaaatttttactccccttctggagcagttcatgaccagccctttggtcacttgggttaaaacgtttggacctctggccgcaggaaatgggaccaaccttgatgaatatgtggctttggtggatggggtattcttgaaccaggtcatgctccaaattaatcctaaattggagagtcagagagtaaataaaaaagtcaataatgatgcctcacttagaatgcacaatctatccattttggtgagacagataaaattttattaccaggagactttgcagcaattgatcatgatgtcgttgccaaatgtcttaatcattggcaaaaatcccttttctgaacaaggcacagaagaagttaaaaaactgcttttacttttattgggttgtgcagttcagtgtcagaaaaaagaggaatttattgaaagaattcaaggtttagattttgatacaaaagcagcggttgccgcacatattcaagaggtaactcataatcaggaaaatgtgtttgacctgcaatggatggaagtgactgatatgtcgcaggaggacatagaaccactcttgaaaaatatggcattgcatctaaaaagacttatagatgagagagatgaacattcagagactatcatagaactctctgaagagcgggatggtctccattttctaccccatgcctcttcatctgcacagtcaccctgtggttctccaggcatgaagcgaacagaaagtcgacaacatctgtcggtggaactggcagatgctaaagccaagataagaaggcttaggcaggaattggaggaaaagactgagcagttgttggattgtaaacaagaacttgagcaaatggaaatagaactcaaaaggctgcaacaagagaacatgaatttgctttcggatgctcgctctgccagaatgtaccgagatgaattagatgcacttcgagagaaagcagtcagagtcgataagcttgaaagtgaagtcagcagatataaagagagactacatgatattgaattttataaggcaagagttgaggaattaaaagaagacaatcaagttttattagaaacaaaaaccatgttggaagaccaactagagggaactcgtgctcgttctgataaattacatgaattagaaaaagagaacttacaactgaaagctaaacttcatgatatggaaatggaacgagatatggatagaaaaaagattgaagaattaatggaagaaaatatgactttggaaatggcacagaaacaaagtatggatgaatcattacatcttggctgggaactggaacagatatccagaactagtgaactttccgaagcaccccagaaatccctgggccatgaggtgaatgagttgacatcaagtagattattgaagctagagatggaaaatcaaagtttgacaaaaaccgtagaagagcttcggactactgtggattctgtagaaggcaatgcttccaaaatcctgaaaatggaaaaagaaaatcaaaggctcagtaaaaaggttgagattcttgaaaatgagattgttcaagaaaagcaaagtcttcagaattgtcagaatttaagcaaggatctaatgaaggagaaagctcagcttgaaaaaacaatagaaacactgagagaaaattcagagagacagattaagatactggaacaggaaaatgaacatctgaatcaaacagtgtcttccttaaggcagcggtcccagataagtgcagaagcaagagtgaaagacattgaaaaagaaaacaaaattcttcatgaatctatcaaagaaacaagtagcaagctaagcaagattgaatttgaaaaaagacaaattaaaaaagaattggaacattataaagaaaaaggagaacgagctgaagaacttgaaaatgaattgcatcatcttgaaaaagaaaatgaattattacagaaaaaaataactaatttaaaaattacttgtgaaaaaattgaggccttagaacaagaaaattcagagctagaaagagaaaatagaaaattaaaaaaaacattggatagctttaaaaatctgacctttcagttagaatccctagaaaaagagaattcccaacttgatgaggaaaacttagaactgcgaaggaatgtagaatctttgaagtgtgcaagcatgaaaatggctcagctacagctagaaaacaaagaactggaaagtgaaaaagagcaacttaagaagggtttggagctcctgaaagcatctttcaagaaaacagaacgcttagaagttagctaccagggtttagatatagaaaatcaaagactgcaaaaaactttagagaacagcaataaaaaaatccagcaattagagagtgaactacaagacttagagatggaaaatcaaacattgcagaaaaacctagaagaactaaaaatatctagcaaaagactagaacagctggaaaaagaaaataaatcattagagcaagagacttctcaactggaaaaggataagaaacaattggagaaggaaaataagagactccgacaacaagcagaaattaaagataccacattagaagaaaataatgtgaagattggaaatttggaaaaagaaaacaaaaccctatccaaagaaattggtatatataaagaatcttgtgtccgtctgaaagaactagaaaaagaaaataaggagcttgtgaaaagagcaactattgatataaaaacgttggttacactacgtgaggatttggtgagtgaaaagttgaagacccaacagatgaacaatgatctcgaaaaattaactcatgagcttgagaagatagggttaaataaggagcgactcttacatgatgaacaaagtactgatgacagtaggtataaacttttggaatcaaaattagaatccactcttaagaagtctcttgaaataaaagaagaaaaaattgctgctttagaagctcgattagaagaatccacgaattataaccagcaattgcgccaagaacttaaaacagtgaaaaaaaattatgaagctctcaaacagagacaagatgaggaaaggatggtacagagctctcctccaatatctggtgaagacaacaaatgggagcgagaaagtcaagaaacgactagagaacttctgaaagttaaagacagattaattgaagtagaaagaaataatgctacactgcaagcagagaagcaagcgttgaaaactcaactgaagcaacttgagacacagaacaataatttgcaggctcagattcttgcacttcagaggcagacagtgtcattacaagaacagaataccactcttcaaacacagaatgccaagcttcaggttgaaaattccacccttaattcccaaagtacctcactcatgaaccagaatgcccaactcctaatccagcagtcttccttagaaaatgaaaatgaatctgtaatcaaagagcgagaagacctaaaatctctctatgattctctgatcaaagatcatgaaaagctggaacttcttcatgaacgtcaggcttcagagtatgaatctcttatctctaaacatggaactctgaagtctgcccacaaaaatcttgaggtggaacatagagaccttgaagaccgttacaatcagttattaaaacagaaaggacagttggaagatttggaaaaaatgctcaaagtagaacaggaaaaaatgctgcttgaaaataaaaatcatgaaacagtagctgcagaatacaagaaactttgtggtgaaaatgataggctgaatcatacctatagtcaacttttaaaagagactgaagttttacaaactgaccataaaaatttgaaaagtcttctgaataattccaaactggaacaaacaagattagaagctgaattttcaaaactaaaggaacaataccaacaattggatattacatcaaccaagctgaataaccagtgtgagttgctaagccaacttaaaggaaatttagaagaagaaaatcggcatctactagatcaaattcagacattaatgctacagaacagaacacttttggagcagaatatggaaagcaaggatctttttcatgttgaacaaagacagtacattgataagttaaatgaattaagacgtcagaaggagaaactagaagagaaaattatggatcaatacaaattttatgacccatctcctcctagaaggagaggcaactggattactctaaaaatgagaaaattgataaagtctaagaaagatattaatcgggaacgccagaaatctctaacattaacacccacccgctcagactccagtgaaggatttcttcagctccctcatcaagacagtcaagatagttcttcagtaggttcaaactctttagaagatggccagaccttggggaccaagaaaagcagcaccatgaatgacctggtgcagtccatggtcctagcaggacagtggacaggtagtactgagaatttggaggttcctgatgatatttcaacgggtaaaaggagaaaagaattgggagctatggccttctctactacagccatcaacttttcaactgtcaactcttctgcaggcttcagatccaagcagttggttaataataaagatactacatcctttgaagacataagtccacaaggtgttagtgatgattctagtacgggatcaagagttcatgcttcaagaccagccagccttgatagtggcagaacatccactagcaatagcaataataatgcttcactacatgaagtcaaagcaggtgcagttaataaccaaagcaggccacaaagccacagcagtggagaatttagcctgcttcatgaccatgaggcttggtccagcagtggtagcagtccaatccagtacttgaaaagacagaccagatcaagcccagtgctccagcacaaaatatctgaaacactggagagtcgacatcacaagatcaaaactggttcccctggaagtgaagttgttactctacaacagtttttggaagaaagcaataagcttacctcagtacagataaagtcctcaagtcaagagaatcttttagatgaagtaatgaaaagtttgtctgtctcttctgactttttgggaaaagacaaaccagttagctgtggtctggccaggtcagtaagtggaaaaaccccaggggacttctatgatagacggacaactaagcctgagtttttgagacctggtcctcgaaaaactgaagatacctacttcattagttctgcgggaaaacctacaccaggcactcaaggaaaaataaaattagtaaaagaatcttctctgtcacgacaatcaaaagatagtaacccttatgcaactttacctcgtgcaagcagcgtgatctcaactgccgaaggaactacacgaaggacaagcatccatgattttttgaccaaggacagtagactgcctatatcagttgattcaccaccagctgctgctgacagcaacaccactgcagcatctaatgtggacaaagtacaagaaagcagaaattcaaaaagcaggtctagggagcaacaaagctcctaattctattacccactacatgacatgtgggccaagtgagagaaaagtgtccttcagtttctcagtatgaagcctttatttctgaagtaacaagacacctagcaactataggaatcatttttaaaaatctttaaggagacttttaacagtccttcgtgaatagagcaggcaagaaatacaaaccttcattccttgaatcaaggagcactactggattcaactgccaaaattttttaaaggttttaggacttactataccttgtactgttaagatctactgaataaaggacgttctctcactaaggaccaggtgttttaaggttaagtgtttaaagaagtactccaagaacaatctgcttttttcatcatttgttttatgaatttatccatgtttgcttaatgcttctgctaagtgttagccaaaatctagccatttatatttagttgtgtaaacctaaattaaatgctgtagtattttgtggaatgtactatatagcaagatacagagaaaattgttttggcatgtcagagccttatttggttagcagactgcatgtgttgatactttttttttcttaaagccaattattttgatgcaaaagaaattcagtttataagataaatctgaaaaatccataatgaaataggagttataaaaaatttatagtgatattaatctttccatatttcccattaagcaacactaagcattcataagttaacccatggtaaagagtgtttttctgaaacttttttttagtaagatggtttttcagcaaatggcattcccaagataaagctgttgtgctttaactcatttcttttctttggtattgggttatgtatgcgtgtgcatttttttaacttgagagctgactgttgcttaagaagttttcttatggcaaaaataatgtaaataagttactatgatctgcattttgccagaaactcatttataattaaggctatcatttattaatgatttttttctcctttatgatattacattaaagttgataactgttattggtacttttgaaatatttgtatgcatttgttacctttaaacatttggaagaagcacaaaaaaatagatttagttaacccagggaaacatcaatttttttagtagttccaattttatatcacagttttattttcttatgaaatcaaaaaatgcattgatactcattaatgcaaattcattatttaacatcaatatcagagtaatcttcaaggtctgaaatgagaaacatactgactttttaaaattttaacagtgtacttcttaggctttcattaccagctctgaagaactttttggaataattccatattccatagtgtgtggtttatgagttgtgggtttcatcactaacccagtaaccataagaaaagtctctctctctctctctctctctctctctttctctctccctctttctctctctctttcgtaggccagtagcaatgttgtgttcacagtctaatttccaaaagaccatcaataaaaaagagagcatgtttaaattgaaatggaacttagagaacttgagcttacttacgtacttcaatgccaccggtaacttaggttttaccaccaaatgctgttaacgttaaatcattttgaaaatcttggatgaaaggtgctatgtaaatggaaatacaaaggattcttactaacatacaaaaataatgcacaacagaaatatctaaaaccttttccgtagactttgaaacatctctctctctcataactccctggattcaagtagcacattggtaataggtatcagagcagtctagagacaattgcatgtcaaaaaatgtacattcatttttaggtggataaaagtaaacatagaaattatgttatggctaaatacagttagtgggtaacttagatttatattagctagcatctaatttgcacaactagaacacatcccagaacaattactgaaaagctgaaatttaatgggtggtgatgtagcccaatgagggcgaatgacattacagcttgacctctccagaacactaatatcctaaaatacagaacatgctgggttaagtgcattagtgcttcaagcagaaaatgctgaaaacaacgtgtaaagtactgaatctgagtaggctgaccctgagaagggacaattaaagagacaaccaagggaacacattgagactacaaaaatatgaataatctcaattatattcatcacacttttttcataccatttcaagaaacgactagacagtagtaaccacatgaatattttactttctccagtataccttgagaagcaaactttgtaggaagccactcttctcccctaaacaacttctgccaaacaataataaagccaactggaaacgaatcggagccattttcattttcctaaccggggcctgacatgctttaaattatctggctgtattctaaatcaacacctaacccctcaaggaaactgaagaatcaatatacagggtaatagctttggctcagagctccaataatgtgcttcagatctgtccatgtggaaatgctttcatccaaatttttaaattggtggttaccaaagagttcacaaaacaggtttgtatgtagcacctttcatgcaaggcatgcaaaaagcctattttaaaatcactgtgcatattatagagttgtagccacctcacaatgaagtactacagcctgtgctgtcttaatggtttatgtcaggaaatgaaaaagatactgtaccaaatctggaattacaatggggagtaataatgtatactaaatgacttttgtattttaagttactttttgtgagtggtgaatttttgtgtttttcttttcagctacacttagtcctgagatgtattttttctttaagtcttgaatgaatacaaaaggagcccattttataatataaaccttgatgtacatgttgagatatttggacaatgaaaatgccttaaaaggaatgcatatggataaagttgcacttataacacccttcaacaaaatctaattttaaattgtctttttcttttctattaagggttttctttttcagtgtctaccattgtacttataactgttattaaataccaaatcaaataatataaaagctgtaacatttcctttaaaactaatgctaataagggatttagagttgaatggcaaaatgtttattacttggcaatacctgatgtcagtcacaggcatccaactcatgacaagagataccactgtttgttttttaaaaaacatttttcattttgtttctccttcaaaaattaagttggactaacattcacgtatcaaactaatataaaaagaaataaaaccaagaggtgatttttgtaacaa

SEQ ID NO: 327259 - DNA, 2880 bp, Artificial Sequence
  derived and/or modified sequence
cttttggaatcaaaattagaatccactcttaagaagtctcttgaaataaaagaagaaaaaattgctgctttagaagctcgattagaagaatccacgaattataaccagcaattgcgccaagaacttaaaacagtgaaaaaaaattatgaagctctcaaacagagacaagatgaggaaaggatggtacagagctctcctccaatatctggtgaagacaacaaatgggagcgagaaagtcaagaaacgactagagaacttctgaaagttaaagacagattaattgaagtagaaagaaataatgctacactgcaagcagagaagcaagcgttgaaaactcaactgaagcaacttgagacacagaacaataatttgcaggctcagattcttgcacttcagaggcagacagtgtcattacaagaacagaataccactcttcaaacacagaatgccaagcttcaggttgaaaattccacccttaattcccaaagtacctcactcatgaaccagaatgcccaactcctaatccagcagtcttccttagaaaatgaaaatgaatctgtaatcaaagagcgagaagacctaaaatctctctatgattctctgatcaaagatcatgaaaagctggaacttcttcatgaacgtcaggcttcagagtatgaatctcttatctctaaacatggaactctgaagtctgcccacaaaaatcttgaggtggaacatagagaccttgaagaccgttacaatcagttattaaaacagaaaggacagttggaagatttggaaaaaatgctcaaagtagaacaggaaaaaatgctgcttgaaaataaaaatcatgaaacagtagctgcagaatacaagaaactttgtggtgaaaatgataggctgaatcatacctatagtcaacttttaaaagagactgaagttttacaaactgaccataaaaatttgaaaagtcttctgaataattccaaactggaacaaacaagattagaagctgaattttcaaaactaaaggaacaataccaacaattggatattacatcaaccaagctgaataaccagtgtgagttgctaagccaacttaaaggaaatttagaagaagaaaatcggcatctactagatcaaattcagacattaatgctacagaacagaacacttttggagcagaatatggaaagcaaggatctttttcatgttgaacaaagacagtacattgataagttaaatgaattaagacgtcagaaggagaaactagaagagaaaattatggatcaatacaaattttatgacccatctcctcctagaaggagaggcaactggattactctaaaaatgagaaaattgataaagtctaagaaagatattaatcgggaacgccagaaatctctaacattaacacccacccgctcagactccagtgaaggatttcttcagctccctcatcaagacagtcaagatagttcttcagtaggttcaaactctttagaagatggccagaccttggggaccaagaaaagcagcaccatgaatgacctggtgcagtccatggtcctagcaggacagtggacaggtagtactgagaatttggaggttcctgatgatatttcaacgggtaaaaggagaaaagaattgggagctatggccttctctactacagccatcaacttttcaactgtcaactcttctgcaggcttcagatccaagcagttggttaataataaagatactacatcctttgaagacataagtccacaaggtgttagtgatgattctagtacgggatcaagagttcatgcttcaagaccagccagccttgatagtggcagaacatccactagcaatagcaataataatgcttcactacatgaagtcaaagcaggtgcagttaataaccaaagcaggccacaaagccacagcagtggagaatttagcctgcttcatgaccatgaggcttggtccagcagtggtagcagtccaatccagtacttgaaaagacagaccagatcaagcccagtgctccagcacaaaatatctgaaacactggagagtcgacatcacaagatcaaaactggttcccctggaagtgaagttgttactctacaacagtttttggaagaaagcaataagcttacctcagtacagataaagtcctcaagtcaagagaatcttttagatgaagtaatgaaaagtttgtctgtctcttctgactttttgggaaaagacaaaccagttagctgtggtctggccaggtcagtaagtggaaaaaccccaggggacttctatgatagacggacaactaagcctgagtttttgagacctggtcctcgaaaaactgaagatacctacttcattagttctgcgggaaaacctacaccaggcactcaaggaaaaataaaattagtaaaagaatcttctctgtcacgacaatcaaaagatagtaacccttatgcaactttacctcgtgcaagcagcgtgatctcaactgccgaaggaactacacgaaggacaagcatccatgattttttgaccaaggacagtagactgcctatatcagttgattcaccaccagctgctgctgacagcaacaccactgcagcatctaatgtggacaaagtacaagaaagcagaaattcaaaaagcaggtctagggagcaacaaagctcctaattctattacccactacatgacatgtgggccaagtgctacacttagtcctgagatgtattttttctttaagtcttgaatgaatacaaaaggagcccattttataatataaaccttgatgtacatgttgagatatttggacaatgaaaatgccttaaaaggaatgcatatggataaagttgcacttataacacccttcaacaaaatctaatttta

SEQ ID NO: 327260 - DNA, 5532 bp, Artificial Sequence
  derived and/or modified sequence
atggagaacgagatcttcacccccctgctggagcagttcatgaccagccccctggtgacctgggtgaagaccttcggccccctggccgccggcaacggcaccaacctggacgagtacgtggccctggtggacggcgtgttcctgaaccaggtgatgctgcagatcaaccccaagctggagagccagagagtgaacaagaaggtgaacaacgacgccagcctgagaatgcacaacctgagcatcctggtgagacagatcaagttctactaccaggagaccctgcagcagctgatcatgatgagcctgcccaacgtgctgatcatcggcaagaaccccttcagcgagcagggcaccgaggaggtgaagaagctgctgctgctgctgctgggctgcgccgtgcagtgccagaagaaggaggagttcatcgagagaatccagggcctggacttcgacaccaaggccgccgtggccgcccacatccaggaggtgacccacaaccaggagaacgtgttcgacctgcagtggatggaggtgaccgacatgagccaggaggacatcgagcccctgctgaagaacatggccctgcacctgaagagactgatcgacgagagagacgagcacagcgagaccatcatcgagctgagcgaggagagagacggcctgcacttcctgccccacgccagcagcagcgcccagagcccctgcggcagccccggcatgaagagaaccgagagcagacagcacctgagcgtggagctggccgacgccaaggccaagatcagaagactgagacaggagctggaggagaagaccgagcagctgctggactgcaagcaggagctggagcagatggagatcgagctgaagagactgcagcaggagaacatgaacctgctgagcgacgccagaagcgccagaatgtacagagacgagctggacgccctgagagagaaggccgtgagagtggacaagctggagagcgaggtgagcagatacaaggagagactgcacgacatcgagttctacaaggccagagtggaggagctgaaggaggacaaccaggtgctgctggagaccaagaccatgctggaggaccagctggagggcaccagagccagaagcgacaagctgcacgagctggagaaggagaacctgcagctgaaggccaagctgcacgacatggagatggagagagacatggacagaaagaagatcgaggagctgatggaggagaacatgaccctggagatggcccagaagcagagcatggacgagagcctgcacctgggctgggagctggagcagatcagcagaaccagcgagctgagcgaggccccccagaagagcctgggccacgaggtgaacgagctgaccagcagcagactgctgaagctggagatggagaaccagagcctgaccaagaccgtggaggagctgagaaccaccgtggacagcgtggagggcaacgccagcaagatcctgaagatggagaaggagaaccagagactgagcaagaaggtggagatcctggagaacgagatcgtgcaggagaagcagagcctgcagaactgccagaacctgagcaaggacctgatgaaggagaaggcccagctggagaagaccatcgagaccctgagagagaacagcgagagacagatcaagatcctggagcaggagaacgagcacctgaaccagaccgtgagcagcctgagacagagaagccagatcagcgccgaggccagagtgaaggacatcgagaaggagaacaagatcctgcacgagagcatcaaggagaccagcagcaagctgagcaagatcgagttcgagaagagacagatcaagaaggagctggagcactacaaggagaagggcgagagagccgaggagctggagaacgagctgcaccacctggagaaggagaacgagctgctgcagaagaagatcaccaacctgaagatcacctgcgagaagatcgaggccctggagcaggagaacagcgagctggagagagagaacagaaagctgaagaagaccctggacagcttcaagaacctgaccttccagctggagagcctggagaaggagaacagccagctggacgaggagaacctggagctgagaagaaacgtggagagcctgaagtgcgccagcatgaagatggcccagctgcagctggagaacaaggagctggagagcgagaaggagcagctgaagaagggcctggagctgctgaaggccagcttcaagaagaccgagagactggaggtgagctaccagggcctggacatcgagaaccagagactgcagaagaccctggagaacagcaacaagaagatccagcagctggagagcgagctgcaggacctggagatggagaaccagaccctgcagaagaacctggaggagctgaagatcagcagcaagagactggagcagctggagaaggagaacaagagcctggagcaggagaccagccagctggagaaggacaagaagcagctggagaaggagaacaagagactgagacagcaggccgagatcaaggacaccaccctggaggagaacaacgtgaagatcggcaacctggagaaggagaacaagaccctgagcaaggagatcggcatctacaaggagagctgcgtgagactgaaggagctggagaaggagaacaaggagctggtgaagagagccaccatcgacatcaagaccctggtgaccctgagagaggacctggtgagcgagaagctgaagacccagcagatgaacaacgacctggagaagctgacccacgagctggagaagatcggcctgaacaaggagagactgctgcacgacgagcagagcaccgacgacagcagatacaagctgctggagagcaagctggagagcaccctgaagaagagcctggagatcaaggaggagaagatcgccgccctggaggccagactggaggagagcaccaactacaaccagcagctgagacaggagctgaagaccgtgaagaagaactacgaggccctgaagcagagacaggacgaggagagaatggtgcagagcagcccccccatcagcggcgaggacaacaagtgggagagagagagccaggagaccaccagagagctgctgaaggtgaaggacagactgatcgaggtggagagaaacaacgccaccctgcaggccgagaagcaggccctgaagacccagctgaagcagctggagacccagaacaacaacctgcaggcccagatcctggccctgcagagacagaccgtgagcctgcaggagcagaacaccaccctgcagacccagaacgccaagctgcaggtggagaacagcaccctgaacagccagagcaccagcctgatgaaccagaacgcccagctgctgatccagcagagcagcctggagaacgagaacgagagcgtgatcaaggagagagaggacctgaagagcctgtacgacagcctgatcaaggaccacgagaagctggagctgctgcacgagagacaggccagcgagtacgagagcctgatcagcaagcacggcaccctgaagagcgcccacaagaacctggaggtggagcacagagacctggaggacagatacaaccagctgctgaagcagaagggccagctggaggacctggagaagatgctgaaggtggagcaggagaagatgctgctggagaacaagaaccacgagaccgtggccgccgagtacaagaagctgtgcggcgagaacgacagactgaaccacacctacagccagctgctgaaggagaccgaggtgctgcagaccgaccacaagaacctgaagagcctgctgaacaacagcaagctggagcagaccagactggaggccgagttcagcaagctgaaggagcagtaccagcagctggacatcaccagcaccaagctgaacaaccagtgcgagctgctgagccagctgaagggcaacctggaggaggagaacagacacctgctggaccagatccagaccctgatgctgcagaacagaaccctgctggagcagaacatggagagcaaggacctgttccacgtggagcagagacagtacatcgacaagctgaacgagctgagaagacagaaggagaagctggaggagaagatcatggaccagtacaagttctacgaccccagcccccccagaagaagaggcaactggatcaccctgaagatgagaaagctgatcaagagcaagaaggacatcaacagagagagacagaagagcctgaccctgacccccaccagaagcgacagcagcgagggcttcctgcagctgccccaccaggacagccaggacagcagcagcgtgggcagcaacagcctggaggacggccagaccctgggcaccaagaagagcagcaccatgaacgacctggtgcagagcatggtgctggccggccagtggaccggcagcaccgagaacctggaggtgcccgacgacatcagcaccggcaagagaagaaaggagctgggcgccatggccttcagcaccaccgccatcaacttcagcaccgtgaacagcagcgccggcttcagaagcaagcagctggtgaacaacaaggacaccaccagcttcgaggacatcagcccccagggcgtgagcgacgacagcagcaccggcagcagagtgcacgccagcagacccgccagcctggacagcggcagaaccagcaccagcaacagcaacaacaacgccagcctgcacgaggtgaaggccggcgccgtgaacaaccagagcagaccccagagccacagcagcggcgagttcagcctgctgcacgaccacgaggcctggagcagcagcggcagcagccccatccagtacctgaagagacagaccagaagcagccccgtgctgcagcacaagatcagcgagaccctggagagcagacaccacaagatcaagaccggcagccccggcagcgaggtggtgaccctgcagcagttcctggaggagagcaacaagctgaccagcgtgcagatcaagagcagcagccaggagaacctgctggacgaggtgatgaagagcctgagcgtgagcagcgacttcctgggcaaggacaagcccgtgagctgcggcctggccagaagcgtgagcggcaagacccccggcgacttctacgacagaagaaccaccaagcccgagttcctgagacccggccccagaaagaccgaggacacctacttcatcagcagcgccggcaagcccacccccggcacccagggcaagatcaagctggtgaaggagagcagcctgagcagacagagcaaggacagcaacccctacgccaccctgcccagagccagcagcgtgatcagcaccgccgagggcaccaccagaagaaccagcatccacgacttcctgaccaaggacagcagactgcccatcagcgtggacagcccccccgccgccgccgacagcaacaccaccgccgccagcaacgtggacaaggtgcaggagagcagaaacagcaagagcagaagcagagagcagcagagcagctag

SEQ ID NO: 327261 - DNA, 2667 bp, Artificial Sequence
  derived and/or modified sequence
ctgctggagagcaagctggagagcaccctgaagaagagcctggagatcaaggaggagaagatcgccgccctggaggccagactggaggagagcaccaactacaaccagcagctgagacaggagctgaagaccgtgaagaagaactacgaggccctgaagcagagacaggacgaggagagaatggtgcagagcagcccccccatcagcggcgaggacaacaagtgggagagagagagccaggagaccaccagagagctgctgaaggtgaaggacagactgatcgaggtggagagaaacaacgccaccctgcaggccgagaagcaggccctgaagacccagctgaagcagctggagacccagaacaacaacctgcaggcccagatcctggccctgcagagacagaccgtgagcctgcaggagcagaacaccaccctgcagacccagaacgccaagctgcaggtggagaacagcaccctgaacagccagagcaccagcctgatgaaccagaacgcccagctgctgatccagcagagcagcctggagaacgagaacgagagcgtgatcaaggagagagaggacctgaagagcctgtacgacagcctgatcaaggaccacgagaagctggagctgctgcacgagagacaggccagcgagtacgagagcctgatcagcaagcacggcaccctgaagagcgcccacaagaacctggaggtggagcacagagacctggaggacagatacaaccagctgctgaagcagaagggccagctggaggacctggagaagatgctgaaggtggagcaggagaagatgctgctggagaacaagaaccacgagaccgtggccgccgagtacaagaagctgtgcggcgagaacgacagactgaaccacacctacagccagctgctgaaggagaccgaggtgctgcagaccgaccacaagaacctgaagagcctgctgaacaacagcaagctggagcagaccagactggaggccgagttcagcaagctgaaggagcagtaccagcagctggacatcaccagcaccaagctgaacaaccagtgcgagctgctgagccagctgaagggcaacctggaggaggagaacagacacctgctggaccagatccagaccctgatgctgcagaacagaaccctgctggagcagaacatggagagcaaggacctgttccacgtggagcagagacagtacatcgacaagctgaacgagctgagaagacagaaggagaagctggaggagaagatcatggaccagtacaagttctacgaccccagcccccccagaagaagaggcaactggatcaccctgaagatgagaaagctgatcaagagcaagaaggacatcaacagagagagacagaagagcctgaccctgacccccaccagaagcgacagcagcgagggcttcctgcagctgccccaccaggacagccaggacagcagcagcgtgggcagcaacagcctggaggacggccagaccctgggcaccaagaagagcagcaccatgaacgacctggtgcagagcatggtgctggccggccagtggaccggcagcaccgagaacctggaggtgcccgacgacatcagcaccggcaagagaagaaaggagctgggcgccatggccttcagcaccaccgccatcaacttcagcaccgtgaacagcagcgccggcttcagaagcaagcagctggtgaacaacaaggacaccaccagcttcgaggacatcagcccccagggcgtgagcgacgacagcagcaccggcagcagagtgcacgccagcagacccgccagcctggacagcggcagaaccagcaccagcaacagcaacaacaacgccagcctgcacgaggtgaaggccggcgccgtgaacaaccagagcagaccccagagccacagcagcggcgagttcagcctgctgcacgaccacgaggcctggagcagcagcggcagcagccccatccagtacctgaagagacagaccagaagcagccccgtgctgcagcacaagatcagcgagaccctggagagcagacaccacaagatcaagaccggcagccccggcagcgaggtggtgaccctgcagcagttcctggaggagagcaacaagctgaccagcgtgcagatcaagagcagcagccaggagaacctgctggacgaggtgatgaagagcctgagcgtgagcagcgacttcctgggcaaggacaagcccgtgagctgcggcctggccagaagcgtgagcggcaagacccccggcgacttctacgacagaagaaccaccaagcccgagttcctgagacccggccccagaaagaccgaggacacctacttcatcagcagcgccggcaagcccacccccggcacccagggcaagatcaagctggtgaaggagagcagcctgagcagacagagcaaggacagcaacccctacgccaccctgcccagagccagcagcgtgatcagcaccgccgagggcaccaccagaagaaccagcatccacgacttcctgaccaaggacagcagactgcccatcagcgtggacagcccccccgccgccgccgacagcaacaccaccgccgccagcaacgtggacaaggtgcaggagagcagaaacagcaagagcagaagcagagagcagcagagcagctag

SEQ ID NO: 327262 - protein, 170 aa, Artificial Sequence
  derived and/or modified sequence
MVLTLGESWPVLVGRRFLSLSAADGSDGSHDSWDVERVAEWPWLSGTIRAVSHTDVTKKDLKVCVEFDGESWRKRRWIEVYSLLRRAFLVEHNLVLAERKSPEISERIVQWPAITYKPLLDKAGLGSITSVRFLGDQQRVFLSKDLLKPIQDVNSLRLSLTDNQIVSKEF

SEQ ID NO: 327263 - protein, 121 aa, Artificial Sequence
  derived and/or modified sequence
MVLTLGESWPVLVGRRFLSLSAADGSDGSHDSWDVERVAEWPWLSGTIRAVSHTDVTKKDLKVCVEFDGESWRKRRWIEVYSLLRRAFLVEHNLVLAERKSPEISERIVQWPAITYKPLLD

SEQ ID NO: 327264 - DNA, 77 bp, Artificial Sequence
  derived and/or modified sequence
aaaagcaattggactgattttaaatatacgtggcaacaaggataaactgctaatgatgggtttgcaaatacagatcg

SEQ ID NO: 327265 - protein, 960 aa, Artificial Sequence
  derived and/or modified sequence
MEDLDQSPLVSSSDSPPRPQPAFKYQFVREPEDEEEEEEEEEEDEDEDLEELEVLERKQFSELEYSEMGSSFSVSPKAESAVIVANPREEIIVKNKDEEEKLVSNNILHNQQELPTALTKLVKEDEVVSSEKAKDSFNEKRVAVEAPMREEYADFKPFERVWEVKDSKEDSDMLAAGGKIESNLESKVDKKCFADSLEQTNHEKDSESSNDDTSFPSTPEGIKDRSGAYITCAPFNPAATESIATNIFPLLGDPTSENKTDEKKIEEKKAQIVTEKNTSTKTSNPFLVAAQDSETDYVTTDNLTKVTEEVVANMPEGLTPDLVQEACESELNEVTGTKIAYETKMDLVQTSEVMQESLYPAAQLCPSFEESEATPSPVLPDIVMEAPLNSAVPSAGASVIQPSSSPLEASSVNYESIKHEPENPPPYEEAMSVSLKKVSGIKEEIKEPENINAALQETEAPYISIACDLIKETKLSAEPAPDFSDYSEMAKVEQPVPDHSELVEDSSPDSEPVDLFSDDSIPDVPQKQDETVMLVKESLTETSFESMIEYENKEKLSALPPEGGKPYLESFKLSLDNTKDTLLPDEVSTLSKKEKIPLQMEELSTAVYSNDDLFISKEAQIRETETFSDSSPIEIIDEFPTLISSKTDSFSKLAREYTDLEVSHKSEIANAPDGAGSLPCTELPHDLSLKNIQPKVEEKISFSDDFSKNGSATSKVLLLPPDVSALATQAEIESIVKPKVLVKEAEKKLPSDTEKEDRSPSAIFSAELSKTSVVDLLYWRDIKKTGVVFGASLFLLLSLTVFSIVSVTAYIALALLSVTISFRIYKGVIQAIQKSDEGHPFRAYLESEVAISEELVQKYSNSALGHVNCTIKELRRLFLVDDLVDSLKFAVLMWVFTYVGALFNGLTLLILALISLFSVPVIYERHQAQIDHYLGLANKNVKDAMAKIQAKIPGLKRKAE

SEQ ID NO: 327266 - protein, 986 aa, Artificial Sequence
  derived and/or modified sequence
MDLKEQPGNTISAGQEDFPSVLLETAASLPSLSPLSAASFKEHEYLGNLSTVLPTEGTLQENVSEASKEVSEKAKTLLIDRDLTEFSELEYSEMGSSFSVSPKAESAVIVANPREEIIVKNKDEEEKLVSNNILHNQQELPTALTKLVKEDEVVSSEKAKDSFNEKRVAVEAPMREEYADFKPFERVWEVKDSKEDSDMLAAGGKIESNLESKVDKKCFADSLEQTNHEKDSESSNDDTSFPSTPEGIKDRSGAYITCAPFNPAATESIATNIFPLLGDPTSENKTDEKKIEEKKAQIVTEKNTSTKTSNPFLVAAQDSETDYVTTDNLTKVTEEVVANMPEGLTPDLVQEACESELNEVTGTKIAYETKMDLVQTSEVMQESLYPAAQLCPSFEESEATPSPVLPDIVMEAPLNSAVPSAGASVIQPSSSPLEASSVNYESIKHEPENPPPYEEAMSVSLKKVSGIKEEIKEPENINAALQETEAPYISIACDLIKETKLSAEPAPDFSDYSEMAKVEQPVPDHSELVEDSSPDSEPVDLFSDDSIPDVPQKQDETVMLVKESLTETSFESMIEYENKEKLSALPPEGGKPYLESFKLSLDNTKDTLLPDEVSTLSKKEKIPLQMEELSTAVYSNDDLFISKEAQIRETETFSDSSPIEIIDEFPTLISSKTDSFSKLAREYTDLEVSHKSEIANAPDGAGSLPCTELPHDLSLKNIQPKVEEKISFSDDFSKNGSATSKVLLLPPDVSALATQAEIESIVKPKVLVKEAEKKLPSDTEKEDRSPSAIFSAELSKTSVVDLLYWRDIKKTGVVFGASLFLLLSLTVFSIVSVTAYIALALLSVTISFRIYKGVIQAIQKSDEGHPFRAYLESEVAISEELVQKYSNSALGHVNCTIKELRRLFLVDDLVDSLKFAVLMWVFTYVGALFNGLTLLILALISLFSVPVIYERHQAQIDHYLGLANKNVKDAMAKIQAKIPGLKRKAE

SEQ ID NO: 327267 - protein, 91 aa, Artificial Sequence
  derived and/or modified sequence
MDLKEQPGNTISAGQEDFPSVLLETAASLPSLSPLSAASFKEHEYLGNLSTVLPTEGTLQENVSEASKEVSEKAKTLLIDRDLTEFSELEY

SEQ ID NO: 327268 - DNA, 2883 bp, Artificial Sequence
  derived and/or modified sequence
atggaggacctcgaccagtctcccctggtgtcctcatccgattcgccacccagaccccagcccgcttttaagtaccagtttgtacgcgagcccgaggatgaggaggaggaggaggaggaggaggaggaagacgaagacgaggatctggaagagcttgaagtgttggaacgcaagcagttctctgaacttgagtactcagagatggggtcttctttttcggtttcccccaaagccgaatcggccgtcatcgtggcaaatcctagagaggagattatagtgaaaaataaagatgaggaagaaaaactcgtgtccaataacattctccataatcagcaggaattaccaaccgcgttgaccaaacttgtgaaggaggacgaagtggtctcgtcagagaaagctaaggactcctttaatgagaaaagggttgctgtggaggctcccatgcgggaggagtatgcggactttaaacctttcgagagagtttgggaggttaaagactcaaaggaggatagtgacatgcttgcagcaggaggtaagatcgagagtaacttggaaagcaaggttgataagaaatgtttcgccgactcgctggagcagacaaatcacgagaaggattctgaatctagtaatgatgacacctcctttccgtctacccctgaagggataaaagatcgctcgggtgcatacattacttgcgccccatttaatcccgcagcaacggagtctatagccaccaacatatttcctttgttgggtgacccaacgagtgagaataaaactgatgagaagaagatcgaagagaagaaagcccagatcgttacagaaaagaacacctcaacaaaaacaagcaatcctttcctggtggccgctcaagattccgaaaccgattatgtgaccaccgataatctgaccaaagtgaccgaagaggtcgtggcaaacatgccagaagggctcacccccgatctagtccaggaagcctgcgagagcgagctgaacgaggttacagggactaaaatcgcatacgagacgaaaatggatcttgtacagacatctgaagtcatgcaagagtcattatacccagccgcccagttatgtcctagcttcgaggaatcagaggccaccccctctccggttctcccggacatcgtcatggaggcaccccttaatagcgccgttcctagcgccggggcttccgtaatccaacccagctccagtcccctggaggcgagtagcgtgaactacgagtcaataaagcacgagcccgagaatcctcccccatatgaagaagctatgtcagtgagcttaaaaaaagtatcaggtataaaagaagagattaaagagccagaaaatataaacgccgcgttgcaggagacggaggccccatacataagcatcgcttgcgatttaatcaaagaaaccaagctctcagcggaaccggccccagacttttctgattatagcgaaatggcaaaagtggagcagcccgttccagatcactctgagctggtggaggacagttctcccgacagcgagcctgtcgacttgttctctgacgatagtattccagatgtccctcaaaaacaggatgaaaccgtcatgctagtcaaggagtcactcactgagaccagctttgaaagcatgatcgaatacgagaacaaggaaaaactttcggccctccccccagaaggcgggaaaccctatctcgagtcttttaagttgtccctagataatacaaaggacaccctcctgcccgacgaagtctctaccctcagcaaaaaggagaaaatacccctgcagatggaagaactgagcaccgccgtttactccaatgacgacctgtttatatccaaagaagcacaaattagggagaccgaaacttttagcgattcctctcccattgagataatcgatgaatttcccacattgatttctagtaagaccgacagcttcagcaagctagcgcgcgagtacacagacctggaggtgagccataaatccgagattgccaatgcacctgatggtgcaggaagcctgccctgcactgaactcccccacgatctttctctcaaaaacatacagcccaaagtggaggagaaaatcagtttttccgatgacttctccaagaatgggtccgccacaagcaaagttttgctgcttccccccgacgtttctgcgctggcaacacaagccgaaatcgaatccatcgtaaagcctaaagtgctggttaaggaggccgaaaagaaacttccaagtgatacagaaaaggaagatcggagtccttctgccattttttccgcggagttatctaaaacctccgtcgtcgacttactgtattggagggatataaaaaagaccggcgtagtcttcggcgcctccctatttttgctgctttcactgacggttttcagcatcgtgtccgtgaccgcatatatcgcactagcccttctcagcgttacgatcagctttcggatctacaaaggagtgattcaggccatccaaaagagcgacgaaggtcatcccttccgggcttaccttgagagcgaagtggccatctccgaagagttagtgcagaaatactccaatagtgcactgggacatgtgaactgtacgataaaagagctgcgcagacttttcctggttgatgatcttgttgatagcctgaaattcgctgtcttaatgtgggtattcacatatgtgggcgccttattcaacggccttacattgctgatactcgctctgattagtctgttctcagtgcccgttatctacgaacgccatcaggcacagatcgatcactaccttgggctggcaaataagaatgtgaaggacgctatggctaaaattcaagccaagataccgggtctgaagaggaaggccgagtag

SEQ ID NO: 327269 - DNA, 2961 bp, Artificial Sequence
  derived and/or modified sequence
atggacctcaaagagcagcccggtaacactataagtgcagggcaggaagattttccaagcgtgttactagaaactgccgccagccttccatctctgtcacccttatcagccgcctcatttaaggaacacgagtacttgggcaacctgtcgacagtcctgccaaccgaagggacactccaggagaacgtaagtgaagcctccaaagaggtttcagaaaaagctaagactttgctgatagaccgggacctgaccgagtttagcgaacttgagtactccgaaatgggatccagcttcagcgtgtctcccaaagccgaaagcgcagttattgtggccaacccccgcgaagagattattgtgaaaaataaagacgaagaagagaagttagtctcaaataacatattgcataatcagcaagagctgcccacagcactaacgaaactggtgaaagaagacgaggttgtcagcagcgagaaggctaaggattctttcaacgaaaagagagttgccgtcgaggctcctatgagagaagaatacgccgacttcaaaccctttgaacgggtgtgggaagttaaggatagtaaagaagatagcgatatgctggccgcaggaggcaagatcgagtccaatctggaaagcaaggtggacaagaagtgctttgcagatagcttggagcagacgaaccatgagaaagatagtgagagctccaacgacgatacctcatttccgagcaccccagaaggcattaaggatagatctggcgcatacattacctgcgctccttttaacccagcggccacagagtcaatcgccaccaatatcttccccttgctcggggatcccacaagtgagaacaaaacagacgagaaaaagatagaagaaaagaaagcccaaatcgtgactgaaaaaaatacctctacgaagacttcaaacccctttttggtagcagcccaagacagtgaaacagattacgtaacaacggacaatctgacaaaggtcacagaagaggtggtggccaacatgcctgaaggtctgaccccagatttggtacaggaggcatgcgaatctgagctgaatgaagtcaccgggacaaagatcgcgtacgaaacgaaaatggacctggtacagactagtgaggtgatgcaagagagcctctatccagccgcccagctctgtccaagcttcgaagaaagtgaagctaccccaagtcctgtgctgcctgacatagtcatggaagccccactgaatagtgccgttccctctgctggcgccagcgtgatccagccctcctcttccccgttggaagcctcatccgtgaattacgagagcatcaagcacgagcctgagaatccgccgccttatgaggaagctatgtcagtgtcactgaaaaaggtgtctggcattaaggaagagatcaaagaacctgagaacatcaacgcggcgttgcaggagaccgaagccccatacataagtatcgcttgcgacctaatcaaggaaacaaaactgagcgccgagcccgcaccagatttcagtgactactccgagatggcaaaagtcgaacagcccgtaccagaccatagcgagctggtggaagactctagtccagatagcgagcccgttgatctcttctccgatgactcgatccctgacgtcccccagaaacaggacgagacagtgatgcttgttaaagaaagtctcacagaaactagcttcgaatctatgattgagtacgaaaacaaagagaagctgtctgcccttccgccagaaggcggcaaaccttacttagaatcattcaaactgagcttagacaacacaaaagacaccttgctccctgatgaagtcagtactttgtcaaagaaggagaaaattcccctgcagatggaggaactgtccaccgcagtctactccaatgatgatctcttcatatctaaggaggctcagattagggagactgaaacctttagcgactcttcacctatcgaaattattgacgaatttcccacactgatatcttcgaaaaccgacagcttctctaaactggcacgggaatacacggatctggaagtaagccacaaaagtgagatcgctaacgctccagacggcgccgggtccctgccctgcactgagttaccccatgacctgagtcttaaaaacattcagcctaaagtggaggaaaaaatatctttttcggacgatttcagcaaaaacgggtcagccacttctaaggtgcttcttctgcccccagatgtttccgcattggcaacacaggcagaaatcgagtccattgtgaaacctaaggtgcttgtgaaggaagccgaaaaaaagctgccctcagatacagagaaggaggaccggtccccaagtgccatcttcagtgccgagctgagtaaaacgagtgtggtggacctcctttactggcgagacattaaaaaaactggggtggtgttcggagcctcactgttcctgctgctctccctgactgtgttttccattgttagtgttaccgcgtatattgctctcgctctcctctctgtgacaataagtttccggatctacaagggggtgatccaagctattcagaagtccgatgaaggccacccttttcgcgcatatttggagagtgaggtggccatctctgaagaattagttcagaaatatagcaactccgctctcgggcacgtaaattgcaccatcaaggaacttcgaagactcttcctggttgatgatctcgttgattcattaaagttcgccgtactaatgtgggtgtttacttatgtaggagcgcttttcaacggcctgaccctcttgatcctcgccctgatcagcctgtttagcgtgcctgtaatatatgagcgacatcaggcacagatcgatcactatctggggcttgccaacaagaacgtcaaagatgccatggcaaagatacaggcgaaaattccggggctgaagcggaaagccgaatag

SEQ ID NO: 327270 - DNA, 2961 bp, Artificial Sequence
  derived and/or modified sequence
atggacctaaaggagcaacctggaaacaccataagcgccggccaagaagattttccaagcgtactactagaaactgccgcaagtctgccctcactgtcccctctgagcgcagcttcatttaaagagcacgaatatctcggcaatctctcaacagtgctgcccaccgagggcacactccaggagaacgtgtcagaagcttccaaggaagtgtcggagaaggccaaaaccctactcatcgacagagacctcacggagttctccgagctggagtacagcgagatgggcagcagctttagtgtgagcccaaaggccgagtccgccgttatcgtagctaaccctcgagaagagattattgtgaagaataaggatgaggaagagaagctggtgtctaataacatcctgcacaaccagcaagaactgcctaccgcactcaccaaactcgtcaaggaagacgaggtggtgtcatccgagaaagctaaagatagctttaatgagaaacgggttgcggtagaagctccgatgagggaagagtatgcagatttcaaacccttcgagcgcgtttgggaagtgaaggactccaaggaagactccgacatgctggctgccggaggcaaaatcgaatctaatttagagagcaaggtggacaaaaagtgttttgccgacagcctggagcagactaaccatgagaaagattcagagagttctaatgacgacacgtcatttccctcaactcctgaaggaatcaaggacaggagtggcgcctacattacttgcgccccattcaatccggccgctacagaaagcatcgccaccaatatctttcctctccttggcgacccgacatctgagaacaaaaccgatgagaagaagatcgaagagaaaaaggcccaaattgttaccgaaaagaacacttccacaaaaacgagcaacccttttctggtggccgcgcaagatagcgagacggactatgtgaccacagataacctgacaaaggtgacagaggaggtggtggcaaatatgcctgaggggctgacccccgatttggtgcaggaagcctgcgaatccgaattgaatgaggtcaccggcacaaaaatcgcctacgagaccaagatggatctggttcagacctcagaagtgatgcaagagtccctgtacccagctgcccagttgtgcccatcatttgaggaaagcgaggcgaccccaagccctgttctccctgatattgtaatggaggccccactcaacagcgctgttcccagcgccggtgcttcggtgatccagccatcaagcagtcccctcgaagcatcatccgtgaattatgaaagcatcaagcatgagccggagaaccccccgccgtatgaagaagccatgagcgtgagcttgaagaaagtcagtgggattaaagaggagatcaaggagcccgagaacatcaacgcagcactccaagagactgaggcaccctatattagcattgcgtgcgatttgatcaaggagactaaactgagtgcagaaccagcgcctgattttagcgattactcagaaatggccaaagttgagcagccagttcccgaccactcagaactggtcgaggattccagtcccgattccgagccagtggacttattcagcgatgacagcattcccgacgtgccacagaagcaggatgaaaccgtcatgctggtgaaggaatcgctgactgagacctcttttgaaagcatgattgagtacgaaaataaggaaaaactgtctgctctccccccagagggcgggaagccatatctggagtcattcaagctaagcctggataataccaaagatacgctcctccctgacgaggtgtctactttgagcaagaaggaaaaaatcccactccagatggaggaactaagcacagcagtgtactctaacgatgatctgtttatatcgaaagaggcccagattagagagaccgaaacatttagtgattctagccctatcgaaattatagatgagttccccaccctgataagcagcaaaacagacagcttctccaaattagctagagaatacaccgatctggaagtgagccacaagagcgaaatcgctaacgccccagatggcgccggaagtctcccttgcaccgagcttcctcatgatctgagcttaaagaatatccaacccaaggtggaggaaaaaatctcattttcagatgacttcagcaaaaacggatctgccacaagcaaggtgctgctgctcccgcctgacgtgtctgccctcgccacgcaagccgagatcgagtcaatcgtcaaacccaaggtgctagtgaaggaggcagagaaaaagcttccatctgatacggagaaagaggatagatcaccctctgcgatcttctccgctgagctctctaagacctctgtggttgatttgctatactggcgagacattaagaagaccggggtcgtctttggagcttcccttttcctgctactgtctctgacagtgttttccatcgtctccgtgacggcctatattgccctggccctgctcagtgttactatctccttccgaatttataaaggcgttatacaagctatccaaaagagcgacgaggggcatccatttcgagcttaccttgaaagtgaggtggcgatctccgaggaactcgtgcagaagtatagtaactctgcgctggggcacgttaattgcaccattaaggagctccgtagactttttctggtcgacgacctggtggattccttaaagttcgcagtcctgatgtgggtgttcacttacgttggagccctgttcaatggcttgacgttacttattttggccctgatttccttgtttagtgtgccagtgatttatgaacggcatcaagcacagatagatcactacctgggattggctaacaagaacgtaaaggacgccatggcgaaaatccaagccaagattcccggcctaaagcggaaagctgagtag

SEQ ID NO: 327271 - DNA, 2961 bp, Artificial Sequence
  derived and/or modified sequence
atggatctcaaagagcaaccgggcaataccatctccgcaggtcaagaggatttcccatccgtgttgctcgagactgctgcatccttaccgagcctgtctccgttgagcgccgcttcctttaaggaacacgaatatctgggcaatctgtccacggtgctgcctaccgaggggaccttacaagagaacgtctccgaggcaagcaaagaagtcagcgagaaggctaagacactgctaatcgacagagatctcactgaattcagtgaactagaatactcagaaatgggcagttccttttccgtgtctcccaaagccgaatcggcagtgattgtcgccaaccctagggaagagattattgtcaagaataaggacgaagaggagaagctggtgagcaataatatactccacaatcaacaagagctgcctacagctttaacaaaactcgtgaaagaggacgaggtggtatcaagtgaaaaagccaaggacagctttaatgagaagcgggtggccgtcgaggccccaatgcgcgaggagtatgctgatttcaaaccttttgagcgagtatgggaggtgaaggactcaaaagaggattccgatatgttggcagcaggcggcaaaatcgagtccaatctggaatccaaggtcgataagaagtgttttgccgactcactcgagcagacaaaccacgagaaagattctgagagcagtaatgatgatacgagcttcccctccacgcccgagggtatcaaagatcggagcggagcctatataacgtgtgctcccttcaaccctgcagccaccgaatctatcgccacaaacatcttcccactgctgggcgaccctacctcagagaataagaccgacgagaagaaaattgaagaaaagaaggctcaaatagtgaccgaaaagaatacttccacgaagactagcaaccctttccttgtcgccgcccaagactctgaaactgattatgtcactactgataacctcaccaaggtgactgaggaagtagtggctaacatgcccgaaggacttaccccagaccttgttcaggaagcgtgtgaaagcgagttaaacgaggtgacaggaactaagattgcctatgagaccaagatggacctggttcagacttctgaggtgatgcaggaaagtttgtacccagccgcgcagctttgcccatcgttcgaagagagtgaggccactcccagccctgtcctacctgatatcgtgatggaagcacctttgaacagcgctgtccccagtgcaggcgcctctgttatacagccatcttcttcccccctcgaggccagcagtgtgaattatgaatctatcaaacacgagcccgagaatccgccaccttatgaggaggccatgagcgtctctctcaagaaggtgtccggcataaaagaggagatcaaggagccagagaatattaatgccgcactacaggagactgaagccccctacattagcatcgcttgcgatctgatcaaggagaccaagctctcagctgaacccgcaccagacttcagtgactacagtgagatggccaaggtggagcaaccagtgcccgaccattctgaactcgtggaggactcctctccagacagcgaaccggtggaccttttcagcgatgactctatccctgatgtaccccaaaaacaggacgagaccgtgatgctggttaaggagagcctgactgaaaccagctttgaaagtatgatcgaatacgagaataaagagaagctgagcgcccttccccctgaaggcggcaagccatatctggaatctttcaagctgtcgctcgataatactaaggacactctgttgcctgacgaagtgtcgacactgagcaagaaggaaaagattcccctacagatggaggaactgtccactgccgtgtatagcaacgatgatctgtttatttccaaggaggcgcaaatcagggaaactgagacttttagcgactcatcccctatcgagatcatcgatgaatttcctaccctgatttcctcaaagaccgactctttctccaaactggcaagggagtatacagacctggaggtatcccataaaagcgaaatcgctaacgcccctgatggggctggaagtctcccgtgtaccgaactgcctcacgatctgagtctgaaaaatatccagcccaaagtggaggagaagatctccttctccgacgacttttccaagaatggcagcgccacatctaaagtcctgctccttccacccgacgtgagcgccctggctacccaggcagagattgagtctatcgttaaaccgaaggtgctcgtcaaggaggcggagaagaagcttccctcagatacggagaaagaagatcggagcccctcagccatcttcagtgctgagctctccaagacgagtgtggtggacttgctgtactggagggatatcaagaaaacgggcgtggtctttggagcatcactattcctgttactctcattgactgtgttcagcatagtgagcgtgacagcctatattgctctggcactgctgtccgtgacaatttccttccgaatctacaaaggagtgatccaggctattcagaagtccgacgaggggcacccatttcgggcctatctggagagtgaggtagcaatcagcgaggagctggtgcagaagtactcaaatagcgccctgggccatgtgaattgcacaatcaaggagctgcgaaggttgttcttagttgacgatctggtcgacagtttgaagttcgccgtcctcatgtgggtctttacgtacgtcggagccctgttcaacgggcttacactactgattctggccttaatcagcttgttttcagttccggtaatctacgagcggcaccaggcacaaatagaccactatcttgggctcgccaacaagaatgttaaagacgccatggcaaagatccaggctaagatacccggacttaagcggaaagcagaatag

SEQ ID NO: 327272 - DNA, 2961 bp, Artificial Sequence
  derived and/or modified sequence
atggacttgaaggagcagccagggaatactatctccgcaggccaggaggacttcccatcggtccttctggagaccgctgcatctctgccctctctgtcccctctatctgccgcatcttttaaagagcacgaataccttggtaacttgagcactgtcctgccaaccgaaggtacgcttcaagagaacgtgtccgaagcgtccaaagaggtttctgagaaagccaagactctactgattgatcgcgaccttactgaattttctgagctagaatacagcgagatgggctcttctttctccgtgagtcccaaagccgaaagcgccgtcatcgtggccaacccaagagaggagattattgtgaagaataaggacgaggaggagaagctggtgtcgaacaacatcctgcacaatcaacaggagctcccgactgcacttaccaaactggttaaggaggatgaggtggtatccagcgaaaaggctaaggattcgtttaacgaaaagagggtggctgtggaggcccctatgcgggaggagtacgcggactttaaaccatttgagcgcgtgtgggaagtgaaagattccaaggaagatagtgacatgctagctgctggaggcaaaattgagtccaatttagagagcaaggtggacaaaaagtgtttcgcggactcgttggagcaaacaaaccatgagaaagacagcgagtcaagtaatgacgataccagcttcccttcaactcctgagggaatcaaggaccgaagcggagcctacattacatgtgccccattcaacccagctgctaccgaatcaatcgcaaccaacatttttcctttgctgggggatcctacttccgaaaataagacagatgaaaaaaaaatcgaggagaaaaaggcccagattgtgaccgaaaagaacaccagtaccaaaacgtcaaatcccttcctggtggcagcccaggactccgagacggattatgtgacaactgacaacctgacaaaggttaccgaagaggtggttgcgaatatgcctgaaggcttaacccccgacttggtgcaggaagcctgcgagagcgagctcaacgaggtgactggtacaaagatcgcatatgagacaaagatggatctggtccagacatctgaagtgatgcaggagtcattgtatccagccgcccagttgtgtccatcttttgaagagtctgaggccaccccctcacctgtcctcccggatatagttatggaagctcctctcaacagtgcggttcccagcgcaggagcctctgtcattcagccaagtagctcccccctggaagcatcttccgtgaactacgagtcaattaagcatgaaccagaaaatccccccccatatgaagaggccatgtccgtgtccctgaagaaagtctcaggcataaaagaggaaattaaggagccggaaaatattaacgcagccctgcaggagaccgaagcaccttacatttctatcgcttgtgacctgattaaagaaacaaagctgtcagccgagcccgcccctgacttcagtgactattcagaaatggccaaggtcgagcaaccagtgccagaccattcagagctagtggaggattcatccccagactccgaacctgtggacctcttctcagatgatagtattcctgatgtcccacagaaacaggatgagacagtcatgttagtgaaagagagtctgaccgaaacctccttcgagagcatgatcgagtacgaaaataaggagaagttgagtgcactgccaccagagggcgggaaaccatatcttgagtcattcaagctgtccttggacaataccaaagacactttgttgcccgacgaggtgagtaccctgtcaaagaaggagaagattccactgcagatggaagaactgagcacggccgtgtattctaacgatgaccttttcatatccaaagaagcccagattcgagaaaccgaaactttttcagactcttcacccatagagattatagatgaatttcctaccttgatctcatccaaaactgactccttcagtaagctagccagggagtacaccgacctggaggtaagccacaagtccgaaatcgctaacgcccctgatggcgccgggtcccttccctgcactgagttgccccacgatctgtctttgaagaacatccagcctaaggtggaagagaagataagtttcagcgacgacttttccaaaaacggctcagcaacgtctaaggtactactgctcccacctgatgtatctgccctcgccactcaggccgagatcgagagcatcgtcaaacctaaagttctggtgaaggaggccgaaaagaagctgccctctgacacagagaaggaagatcgctccccatcggcaattttcagtgcagaactgtccaaaacatccgtcgtggatctgctctactggcgtgacatcaaaaagacgggtgttgtgtttggggcgagtctattcctactgctctcattaactgtgttctccatagtgagtgttactgcttatatagccctggccctgttgtcagtcaccatttcatttaggatttacaaaggagttattcaggctatccagaaatctgacgagggccacccgtttcgggcatacttggaaagtgaggtggcaatctctgaagagcttgtccagaaatactctaattctgcactgggccatgttaactgcactattaaagaactacgacgattgtttctcgtggatgacctcgtggatagcctcaagttcgccgtgctgatgtgggtgttcacatacgtgggagccttgtttaacgggttgactttactgatcctcgccctgataagcctattctcagtcccagtcatttatgagcgacatcaggcccagattgaccactatctgggacttgccaacaaaaatgtgaaagatgccatggcgaagatccaggctaaaattccaggcctaaaacggaaggctgaatag

SEQ ID NO: 327273 - DNA, 276 bp, Artificial Sequence
  derived and/or modified sequence
atggacctgaaggagcaacccggaaacacaatctctgcggggcaggaagacttccccagtgtactactcgagaccgccgcctcattaccctcattaagccccctaagcgcagccagttttaaggaacacgagtatctggggaaccttagtacagtgctgccgacagagggtacactccaggagaacgtgagcgaagcctccaaggaggtttcagagaaggccaagactctgctgattgaccgtgatcttaccgaattctctgagctggaatactag

SEQ ID NO: 327274 - DNA, 2883 bp, Artificial Sequence
  derived and/or modified sequence
atggaggacctggaccagagccccctggtgagcagcagtgacagccccccccggccccagcctgccttcaagtaccagtttgtgcgggagccagaagatgaggaggaggaggaggaggaggaggaggaggatgaagatgaggacctggaggagctggaggtgctggagaggaagcagttcagcgagctggagtacagcgagatgggcagcagcttctctgtgagccccaaggccgagagcgctgtgattgtggccaacccccgggaggagatcatcgtgaagaacaaggatgaggaggagaagctggtgagcaacaacatcctgcacaaccagcaggagctgcccacagccctgaccaagctggtgaaggaggatgaggtggtgagcagcgagaaggccaaggacagcttcaatgagaagagggtggccgtggaggcccccatgagggaggagtatgctgacttcaagccctttgagcgggtgtgggaggtgaaggacagcaaagaagattctgacatgctggccgccggcggcaagattgagagcaacctggagagcaaggtggacaagaagtgctttgctgacagcctggagcagaccaaccacgagaaggacagcgagagcagcaatgatgacaccagcttccccagcaccccagagggcatcaaggacagaagtggggcctacatcacctgtgcccccttcaacccagctgccacagagagcatcgccaccaacatcttccccctgctgggggaccccaccagcgagaacaagacagatgagaagaagattgaggagaagaaggcccagatcgtgacagagaagaacaccagcaccaagaccagcaaccccttcctggtggccgcccaggacagcgagacagattatgtgaccacagacaacctgaccaaggtgacagaggaggtggtggccaacatgcctgagggcctgaccccagacctggtgcaggaggcctgtgagagcgagctgaatgaggtgacaggcaccaagatcgcctatgagaccaagatggacctggtgcagaccagcgaggtgatgcaggagagcctgtacccagctgcccagctgtgccccagctttgaggagagcgaggccacccccagccctgtgctgcctgacatcgtgatggaggcccccctgaacagcgctgtgcccagcgctggggccagcgtcatccagcccagcagcagccccctggaggccagctctgtgaactatgagagcatcaagcatgagcctgagaaccccccaccctatgaggaggccatgtctgtgtccctgaagaaggtgtctggcatcaaggaggagatcaaggagcctgagaacatcaatgctgccctgcaggagacagaggccccctacatcagcatcgcctgtgacctgatcaaggagaccaagctgtctgctgagcccgccccagacttcagtgactacagcgagatggccaaggtggagcagcctgtgcctgaccacagcgagctggtggaggacagcagcccagacagcgagcctgtggacctcttcagtgatgacagcatcccagatgtgccccagaagcaggatgaaacagtgatgctggtgaaggagagcctgacagagaccagctttgagagcatgattgaatatgagaacaaggagaagctgagcgccctgcccccagagggcggcaagccctacctggagagcttcaagctgagcctggacaacaccaaggacaccctgctgcctgatgaggtgtccaccctgagcaagaaggagaagatccccctgcagatggaggagctgagcacagctgtgtacagcaatgatgacctcttcatcagcaaggaggcccagatccgggagacagagaccttcagtgacagcagccccatcgagatcattgatgagttccccaccctcatcagcagcaagacagacagcttcagcaagctggcccgggagtacacagacctggaggtgagccacaagtctgagatcgccaatgccccagatggagctggcagcctgccctgcacagagctgccccatgacctgagcctgaagaacatccagcccaaggtggaggagaagatctccttcagtgatgacttcagcaagaatggaagtgccaccagcaaggtgctgctgctgcccccagatgtgtctgccctggccacccaggccgagattgagagcatcgtgaagcccaaggtgctggtgaaggaggccgagaagaagctgcccagcgacacagagaaggaggacaggagccccagcgccatcttctctgctgagctgagcaagacctctgtggtggacctgctgtactggagggacatcaagaagacaggagtggtgtttggagccagcctcttcctgctgctgagcctgaccgtcttcagcatcgtgtctgtgacagcctacatcgccctggccctgctgtctgtgaccatctccttccgcatctacaagggcgtcatccaggccatccagaagagtgatgagggccaccccttccgggcctacctggagagcgaggtggccatcagcgaggagctggtgcagaagtacagcaacagcgccctgggccacgtgaactgcaccatcaaggagctgcggcggctcttcctggtggatgacctggtggacagcctgaagtttgctgtgctgatgtgggtgttcacctacgtgggcgccctcttcaacggcctgaccctgctgatcctggccctgatcagcctcttctctgtgcctgtgatctatgagcggcaccaggcccagattgaccactacctgggcctggccaacaagaatgtgaaggatgccatggccaagatccaggccaagatccctggcctgaagaggaaggccgagtag

SEQ ID NO: 327275 - DNA, 2961 bp, Artificial Sequence
  derived and/or modified sequence
atggacctgaaggagcagcccggcaacaccatctctgctggccaggaggacttccccagcgtgctgctggagacagctgccagcctgcccagcctgagccccctgtctgctgccagcttcaaggagcacgagtacctgggcaacctgagcacagtgctgcccacagagggcaccctgcaggagaatgtgtctgaggccagcaaggaggtgtctgagaaggccaagaccctgctgattgaccgggacctgacagagttcagcgagctggagtacagcgagatgggcagcagcttctctgtgagccccaaggccgagagcgctgtgattgtggccaacccccgggaggagatcatcgtgaagaacaaggatgaggaggagaagctggtgagcaacaacatcctgcacaaccagcaggagctgcccacagccctgaccaagctggtgaaggaggatgaggtggtgagcagcgagaaggccaaggacagcttcaatgagaagagggtggccgtggaggcccccatgagggaggagtatgctgacttcaagccctttgagcgggtgtgggaggtgaaggacagcaaagaagattctgacatgctggccgccggcggcaagattgagagcaacctggagagcaaggtggacaagaagtgctttgctgacagcctggagcagaccaaccacgagaaggacagcgagagcagcaatgatgacaccagcttccccagcaccccagagggcatcaaggacagaagtggggcctacatcacctgtgcccccttcaacccagctgccacagagagcatcgccaccaacatcttccccctgctgggggaccccaccagcgagaacaagacagatgagaagaagattgaggagaagaaggcccagatcgtgacagagaagaacaccagcaccaagaccagcaaccccttcctggtggccgcccaggacagcgagacagattatgtgaccacagacaacctgaccaaggtgacagaggaggtggtggccaacatgcctgagggcctgaccccagacctggtgcaggaggcctgtgagagcgagctgaatgaggtgacaggcaccaagatcgcctatgagaccaagatggacctggtgcagaccagcgaggtgatgcaggagagcctgtacccagctgcccagctgtgccccagctttgaggagagcgaggccacccccagccctgtgctgcctgacatcgtgatggaggcccccctgaacagcgctgtgcccagcgctggggccagcgtcatccagcccagcagcagccccctggaggccagctctgtgaactatgagagcatcaagcatgagcctgagaaccccccaccctatgaggaggccatgtctgtgtccctgaagaaggtgtctggcatcaaggaggagatcaaggagcctgagaacatcaatgctgccctgcaggagacagaggccccctacatcagcatcgcctgtgacctgatcaaggagaccaagctgtctgctgagcccgccccagacttcagtgactacagcgagatggccaaggtggagcagcctgtgcctgaccacagcgagctggtggaggacagcagcccagacagcgagcctgtggacctcttcagtgatgacagcatcccagatgtgccccagaagcaggatgaaacagtgatgctggtgaaggagagcctgacagagaccagctttgagagcatgattgaatatgagaacaaggagaagctgagcgccctgcccccagagggcggcaagccctacctggagagcttcaagctgagcctggacaacaccaaggacaccctgctgcctgatgaggtgtccaccctgagcaagaaggagaagatccccctgcagatggaggagctgagcacagctgtgtacagcaatgatgacctcttcatcagcaaggaggcccagatccgggagacagagaccttcagtgacagcagccccatcgagatcattgatgagttccccaccctcatcagcagcaagacagacagcttcagcaagctggcccgggagtacacagacctggaggtgagccacaagtctgagatcgccaatgccccagatggagctggcagcctgccctgcacagagctgccccatgacctgagcctgaagaacatccagcccaaggtggaggagaagatctccttcagtgatgacttcagcaagaatggaagtgccaccagcaaggtgctgctgctgcccccagatgtgtctgccctggccacccaggccgagattgagagcatcgtgaagcccaaggtgctggtgaaggaggccgagaagaagctgcccagcgacacagagaaggaggacaggagccccagcgccatcttctctgctgagctgagcaagacctctgtggtggacctgctgtactggagggacatcaagaagacaggagtggtgtttggagccagcctcttcctgctgctgagcctgaccgtcttcagcatcgtgtctgtgacagcctacatcgccctggccctgctgtctgtgaccatctccttccgcatctacaagggcgtcatccaggccatccagaagagtgatgagggccaccccttccgggcctacctggagagcgaggtggccatcagcgaggagctggtgcagaagtacagcaacagcgccctgggccacgtgaactgcaccatcaaggagctgcggcggctcttcctggtggatgacctggtggacagcctgaagtttgctgtgctgatgtgggtgttcacctacgtgggcgccctcttcaacggcctgaccctgctgatcctggccctgatcagcctcttctctgtgcctgtgatctatgagcggcaccaggcccagattgaccactacctgggcctggccaacaagaatgtgaaggatgccatggccaagatccaggccaagatccctggcctgaagaggaaggccgagtag

SEQ ID NO: 327276 - DNA, 276 bp, Artificial Sequence
  derived and/or modified sequence
atggacctgaaggagcagcccggcaacaccatctctgctggccaggaggacttccccagcgtgctgctggagacagctgccagcctgcccagcctgagccccctgtctgctgccagcttcaaggagcacgagtacctgggcaacctgagcacagtgctgcccacagagggcaccctgcaggagaatgtgtctgaggccagcaaggaggtgtctgagaaggccaagaccctgctgattgaccgggacctgacagagttcagcgagctggagtactag

SEQ ID NO: 327277 - DNA, 2883 bp, Artificial Sequence
  derived and/or modified sequence
atggaggacctggaccagagccccctggtgagcagcagcgacagccccccaaggcctcagcctgcgtttaaataccaatttgtgcgggaacccgaggacgaggaggaggaggaggaggaggaggaagaggatgaggacgaagacctggaggaattggaggtactggaacgcaaacagttctccgagctcgaatattccgaaatgggcagcagcttttcagtgagtcccaaggctgagagtgcagtgattgtagcaaatccgagagaagagattatcgtgaaaaacaaagacgaggaagagaagttagtttcaaacaatatccttcacaatcagcaggagctgcctacggccttaacaaaactggtgaaagaggatgaagtcgtcagcagcgaaaaggcaaaggatagttttaatgaaaagagggtggccgtcgaagctccaatgcgcgaagaatatgcagattttaagccctttgagagagtgtgggaagttaaagactctaaggaagattccgacatgcttgctgcaggaggaaagattgagagcaatttggaatctaaggtggataagaaatgtttcgcagattcgttagagcaaactaaccacgagaaggattccgaatcgagtaatgacgacacaagttttccatcaacccccgaagggattaaggataggagcggggcctacatcacatgcgctcctttcaatccggccgctaccgagagtatagcaaccaacatattccccctgctcggggatcccacatcagaaaacaagacagacgaaaagaagatagaggagaagaaggcccaaatcgtgaccgagaagaatacgtcaacaaaaacttcaaacccttttcttgtagcggctcaggactctgaaactgactacgtgaccaccgacaacctgaccaaagttaccgaagaggtagtggccaatatgccggaaggccttacccctgatctcgtccaggaggcctgtgaaagtgaactgaacgaggtgaccgggacaaagatcgcctatgaaactaagatggatcttgtgcagacgagcgaagtgatgcaagagagcctttaccccgccgctcagctgtgccctagctttgaggagtctgaagcaacaccctcacctgtcctgcctgatatcgtgatggaagcccctcttaatagcgcagttcccagcgctggagcctccgtcatacagcctagttccagccctctggaggctagtagtgtgaattatgaaagcatcaagcacgagccggaaaacccgccaccatatgaggaggccatgtccgtttccctcaagaaggtgtcaggaatcaaggaagaaattaaagagccagaaaacatcaatgcagcacttcaggagaccgaggccccctatatcagcatcgcatgtgatctcattaaagagaccaaactaagtgcagaacccgcccctgacttttctgattatagtgaaatggctaaggttgagcagcctgtgcctgatcacagcgagctggttgaggattcaagcccagactctgagccagtcgatctgtttagcgacgactccataccagacgtgcctcaaaagcaggacgagacagtgatgttggtaaaggagagcctgaccgagacctcttttgagtcaatgatagagtatgagaataaggaaaagctatcagccctgccaccagaaggagggaagccatatctcgagtcattcaagctgtctctggataataccaaggatacgctcctgcccgacgaggtgtccactctgagcaaaaaggagaaaatccccctacaaatggaggaactatctacagcagtgtactcaaacgacgatctattcatttcaaaggaagcacaaatccgggagacagagactttctccgactcttcgccgatcgagattattgacgaatttcccactctcattagtagcaagaccgacagcttttctaagctggccagagagtatactgacctcgaggttagccacaaatcagaaattgccaacgcgcccgatggggcaggaagcctcccatgcactgagttgcctcacgacctttccctgaagaacattcaacccaaggttgaggagaaaatatctttcagcgatgacttcagtaagaatggttccgcaacctctaaggttctgctcctgccaccagacgtgtcagctctggctacacaagccgagatcgagagcattgtaaaacccaaggtactggtaaaggaagcagagaagaagctgccgagcgacacagaaaaagaagatcgaagtccaagtgccatttttagtgccgaactgtccaagaccagtgtggttgatcttttatactggagagacatcaaaaagacaggcgtggtgtttggggcctctctgtttttgttgctgagcctgactgtcttttctatagtgtcagtcacagcttatatcgccctggccttgttgtcagtaaccatttcatttcggatctacaaaggagttatacaggcaatccagaagtctgatgaaggccatcccttccgggcctacctagagagtgaagtggctattagtgaagaacttgtccagaagtactccaatagtgccctcggtcatgtgaactgcactatcaaagagctcagacggttgttcttggtcgacgacctcgtggatagccttaagttcgcagtcttgatgtgggtgtttacatacgtgggtgccctgttcaatggactgacccttctcatcttggctctgatttcattatttagcgtgcccgttatttacgaacgccaccaagcacagattgatcattacttgggactggcgaacaagaatgtgaaggacgcaatggcaaaaattcaagccaaaatacccggcttaaaacgaaaggcggagtag

SEQ ID NO: 327278 - DNA, 2961 bp, Artificial Sequence
  derived and/or modified sequence
atggacctgaaggagcagcccggcaacaccatcagcgccggccaggaggactttccttcagtgctgctggagactgccgcaagtctcccttcactctctcccctttctgcagcatcatttaaagaacatgagtacctgggaaatttatcaacagtcctgccaacggagggaacgttgcaggaaaacgtgagcgaggcctccaaggaggtatctgagaaagctaaaactctactcattgatcgtgacctcacagagtttagcgagctggaatatagcgagatggggtcttcctttagcgtgagccccaaggccgagtcagcggtcatcgtggccaacccgagggaagagattatagtgaagaataaagacgaggaggaaaaactggtgagcaataacatcttacacaatcaacaggagcttcctactgccttgaccaagctggtgaaggaagacgaagtggttagtagtgaaaaggccaaggatagcttcaatgaaaagagggtggccgtcgaggccccaatgagagaggaatatgccgatttcaagcccttcgagagggtgtgggaggtgaaggacagcaaagaggattcggacatgcttgccgcgggcgggaaaattgaaagtaatttggagtctaaagtggacaaaaagtgttttgctgacagcctggaacagacaaatcacgagaaagattctgaaagcagtaatgacgacacatcttttccatcgaccccagaggggattaaggaccgcagcggggcctacattacctgcgctccattcaatcctgccgcgactgaatcgatcgctactaacatcttcccactactcggtgaccctacgtccgagaacaagactgacgaaaagaaaatcgaggagaagaaggcccaaattgtgacagaaaagaacactagtacgaaaacgtcaaatccattcttggtagccgcccaagactccgaaaccgactatgtgaccaccgacaacctgaccaaagtgacggaagaagtggttgccaatatgcccgaaggtctgacgcctgacttggtgcaggaagcatgtgagtcagagcttaacgaggttaccgggaccaagatagcttacgaaactaaaatggacctggtgcaaacgagcgaagtcatgcaggaatccttgtaccccgcagcccaactctgcccatctttcgaagagtctgaggcaactccttcaccagttctcccggacatcgtgatggaggccccccttaattccgccgtgccctcggccggtgccagcgtcatacagccaagcagcagccctctcgaggcgagctctgtcaactatgagagcatcaaacacgagcctgagaatcctccgccatatgaagaagcgatgagcgtaagtctgaagaaagtcagcggaataaaagaggaaattaaggagcccgaaaatatcaatgcagcactccaggagacagaagctccgtatattagcatcgcttgtgacctgatcaaagaaacgaagttaagtgccgagcccgcacccgacttcagcgattactcagagatggccaaagtcgaacaaccggtgcccgaccattcagagctggtggaggacagttccccagatagtgagcctgtcgatctgtttagtgatgattcaataccagatgtaccccaaaagcaagacgagacagtaatgcttgtgaaggagtctttgacagagacatcttttgagtccatgatagagtatgagaataaagaaaaactctctgcgctgccccccgaaggaggaaaaccatacttagagtcctttaaactgtccttagacaataccaaggatacacttctgccggatgaagtcagtaccctgagtaaaaaggagaaaatcccgctccagatggaggaactctccacggccgtgtactccaatgatgacctgttcatatccaaggaggctcaaattcgggagaccgagacattctcagattcgagtccaattgaaatcatcgatgaattccccacactcatctctagcaaaaccgactcatttagcaaactggctcgtgaatacacggacctcgaggtctcccacaaaagcgagatagccaatgcccctgacggagctggatccttgccgtgcactgagctgccccacgatcttagccttaagaacattcagccaaaagttgaagaaaagatctcctttagcgacgatttcagtaagaatgggtcggcaacgtccaaggtgctgctgctgcctccagatgtgtccgccctggccacccaagctgagattgagtcaatcgtgaagcccaaagtgttggtgaaggaggctgagaaaaagttgccatccgacaccgaaaaagaggacagatcgccaagtgcaattttctccgcagaactgagtaagacaagcgtggtagacttgctctattggcgcgacattaaaaagacgggagtggtgttcggcgcaagtttgtttctgctgttgagccttaccgttttctcaattgtgtcagtcacggcgtatatcgctctggccctgctctccgtcactatttcttttcgcatctacaaaggggtgatccaagccatccagaagtccgacgagggacacccttttcgcgcgtatttagaaagtgaagtggctatctccgaagagctcgtgcagaagtacagcaactccgctcttgggcacgtaaattgcaccatcaaggaactgcggcggctttttctcgtggatgacctggtggactcgctgaaattcgccgtgttaatgtgggtctttacctacgtgggggcactctttaatggtctgacactgctaatcctggcactgattagtctcttttccgtgccggtcatctatgaaagacatcaagcccagatagatcactacctcggcctcgccaacaagaacgtgaaggatgcaatggctaagatacaggctaagattcccgggctcaagcggaaggcggaatag

SEQ ID NO: 327279 - DNA, 2961 bp, Artificial Sequence
  derived and/or modified sequence
atggacctgaaggagcagcccggcaacaccatcagcgccggccaggaagattttccatctgtgctgctcgagaccgctgcatccttaccctcgctcagccccctaagtgcagcaagcttcaaggagcatgagtatttaggcaatctatccacagtcctgcccacggaagggactcttcaagaaaatgtctcagaagcctccaaagaagttagcgagaaagccaagaccttattaatcgatcgggatcttaccgagttctccgaactggaatatagcgagatggggtctagctttagcgtgagcccgaaagcagaatctgcggtgatcgtggccaacccccgcgaagagattatagttaagaataaggacgaggaggaaaagctcgtgtcgaacaatattctgcataaccagcaggaattgcccactgcactgaccaaattagtaaaggaggacgaggtcgtttcctctgagaaggctaaggatagcttcaatgagaagcgggtggccgtagaggcccctatgcgggaggagtacgcagactttaagccattcgaacgagtgtgggaggtaaaggacagtaaggaggattccgacatgctggccgcaggcggaaagattgagagcaacctcgaatctaaggttgacaaaaaatgttttgcggacagccttgaacagactaaccatgaaaaagattcagaatcctccaacgacgatacctcttttccgagcacgccagaagggattaaagaccggtccggtgcctatattacatgcgctcccttcaaccccgcggccacggagtccattgccacgaatattttccccctgctcggcgatccaacatccgagaataagacggacgaaaaaaaaattgaggaaaagaaggcccagatagttacagaaaaaaatacgagcaccaaaactagtaacccttttttggttgcagcgcaggacagcgagactgattatgtgactaccgacaatctgaccaaagttaccgaagaggtcgtggctaacatgccagagggcctgacgccagatctggtgcaggaggcgtgcgagagcgagctgaatgaagtgaccggtaccaagatcgcctatgaaacaaaaatggacctcgtgcagacaagcgaggtgatgcaggagagcctctaccctgccgctcagctatgtccaagttttgaggaatccgaagcgaccccttctcctgtcctgccagacatcgtgatggaagcaccactgaacagcgcagtaccctctgccggagcatccgtcattcagcccagttcttcgcccctggaggcttctagcgtgaactacgagagcataaagcacgagccagagaatccaccaccctatgaggaggcaatgtctgtctccctcaaaaaagtgtcgggaatcaaagaggaaataaaagagcctgagaacatcaacgcggcactgcaggaaacagaggcgccctacatttctattgcctgtgacctgatcaaagagactaagcttagcgccgagccggcccccgacttttccgattactctgaaatggcaaaggtggagcagcccgtgccggatcactcggaactggtggaggacagttcacctgattcagaaccagtcgatcttttctccgacgatagcatccccgacgtgccccagaagcaggatgagacagttatgctggtaaaagaatctctgactgagacctctttcgagagcatgattgagtatgaaaacaaggaaaagctcagcgccttaccccctgaaggtggaaagccatacctcgagtccttcaaactttccttggacaacactaaggacacacttttacccgacgaggtatcaaccttgagcaagaaagagaaaatcccgctgcagatggaggagcttagtaccgccgtctactctaacgatgacctgttcatatccaaagaagcccagatccgagagacagagacctttagcgattcctcacccatcgagatcatagatgagtttccaactctgatcagcagtaagaccgactcttttagtaaacttgcaagagagtacactgacctagaagttagtcacaaatcagagatagctaacgcccccgacggggccggtagtcttccctgcacggaacttcctcatgatttgagtctgaagaacattcagcctaaagtagaggagaagatatcttttagtgatgactttagcaaaaacgggtctgctacttccaaggtgctgctgctcccaccggatgtctcagcccttgcaacccaggctgagatcgagtccattgtgaaacctaaagtgctggtgaaagaggccgagaaaaaactgccgagtgacactgaaaaggaggacagatccccctcagcgatcttcagtgccgagctctctaaaacttccgtcgttgacctgctttactggagggacatcaaaaagactggtgttgtattcggtgcaagcctgtttctactccttagtttgactgtttttagtatagtctctgtgaccgcctatattgccttagctctgttatccgtcacaatcagcttccgcatttataagggtgttatccaagccattcagaagagcgatgagggccatccctttcgcgcgtacctcgaaagcgaggtggcgatctctgaagagctcgtgcagaagtattcgaactcggctcttggacatgtgaactgcacaattaaggaactccgacggctattcctggtggatgatctggtggattccttgaagttcgcagtgttaatgtgggtttttacctacgtgggcgcactgtttaatggactcactctcctcatcctcgcattgatctctttgtttagcgttcccgttatttacgagcggcaccaggctcagatcgaccactacctgggcctggctaataaaaatgtgaaggacgcaatggccaagatccaggccaaaattccaggtctcaagaggaaggcggaatag

SEQ ID NO: 327280 - DNA, 2961 bp, Artificial Sequence
  derived and/or modified sequence
atggacctgaaggagcagcccggcaacaccatcagcgccggccaggaggatttcccaagcgttctgctggagactgccgcctctctaccctctctgtctcctctcagtgccgcctcctttaaggagcacgaatatttaggaaatctctcgacagtgttacccactgagggcaccttacaggagaacgtgagcgaagctagcaaagaagtgagcgagaaggctaaaactttattgatcgaccgggaccttaccgaattctctgagttggaatacagcgagatgggcagcagtttctcagtgtcccccaaggcagagtctgccgtaattgtcgccaatccaagagaagaaatcatcgtaaagaataaagatgaagaggagaagctcgtctcgaacaatatcctccataatcagcaggagctccccaccgcgctgactaaactagtgaaagaggacgaggtagtctcttccgagaaggccaaggactctttcaatgaaaaacgggttgcagtcgaggcccccatgcgggaggaatacgcagactttaaaccattcgagagagtgtgggaagtcaaggactctaaggaggacagcgatatgttggcagctggcggtaagatcgaatcaaaccttgaaagcaaagtcgacaagaagtgcttcgctgattcactcgaacagacgaaccacgaaaaagattcggagtcttcgaatgacgatacctcatttccttccactccagagggtataaaggaccgcagcggggcatatatcacctgtgcccctttcaatcctgctgccaccgaatcaatagccacaaatattttccccttgctgggcgatcctacctcggaaaataagactgatgagaaaaaaatcgaggagaaaaaggcgcagatcgttaccgaaaaaaatacatccacaaagacaagtaacccatttctcgttgccgcccaggatagcgagactgactacgtaactacggacaacctgaccaaggtcacagaagaggtcgttgcaaatatgccagagggactcacccccgacctcgtccaggaggcttgtgagtctgaactgaacgaagtgactggaacaaagatcgcatacgaaaccaagatggacctcgtccagaccagcgaagtgatgcaggaatccctctatcctgccgcgcagttgtgccctagcttcgaagaaagtgaagcaacacccagccctgttctcccggacatcgtgatggaggcccctctgaattcagctgtgccgagtgcaggggcctccgttatacaaccttcctcaagtcctctagaagcgagctccgtcaattatgaatccataaaacatgagccggaaaaccctcccccatatgaggaagcaatgagtgtgtcattgaaaaaggtgtcaggcatcaaggaggagataaaagagcccgaaaacatcaacgccgccctgcaagagactgaggctccctatatttcgatcgcttgcgacctcattaaggaaaccaagttatctgcggagccagccccggatttttctgactattcagagatggcgaaagtggaacaacctgtcccagatcacagtgagttagtggaagattcaagtcctgatagcgagcccgttgatttattcagtgatgactccatccccgatgtgcctcagaagcaagatgagaccgttatgttagtaaaggaatcgctgactgaaacgtcattcgaaagcatgatcgagtatgagaataaggagaagctcagcgcactgcctcccgagggcggaaagccctaccttgaatcatttaagttgtcgttggacaatactaaggatactttactgcccgacgaagtcagtactttaagcaaaaaggagaagatccccctgcaaatggaagagctgtccaccgccgtctactcaaatgacgatctcttcatctctaaagaagcccaaatccgggaaacagagaccttttctgacagcagccccatcgaaattattgatgagtttcctactctcatttcctcaaagaccgactccttcagcaagctggcgcgggaatatacagacctcgaggttagccataaatccgagatcgcgaacgcccctgacggtgctggaagcctcccatgtaccgaactcccacatgacttgtctttgaaaaacattcaacccaaagtggaagaaaagatatctttctccgatgatttttcaaaaaatggatctgctacctcaaaggtccttttactgccgccagacgtaagtgctctcgctactcaggccgaaatcgagtctattgttaaaccaaaggtgctcgtcaaagaggctgagaaaaaactgccaagcgacaccgagaaggaagatcgttctccaagtgcaattttcagcgctgagctgtctaagaccagcgttgtggatctgctctattggagagatattaagaagactggcgtcgtatttggcgcctccctctttctgctgcttagccttactgtgttctctatcgtgtccgtgacagcttatatagcccttgcccttctgtctgtgacaatttcctttagaatctacaagggcgtgatccaggcaattcaaaagtcggacgagggccacccgtttagagcttatttggagtcggaggtcgccatctcagaggaactggtacagaaatacagcaattcagctctgggacacgtgaactgcacgattaaagaattgaggaggctgtttctggtcgatgacctggtggacagccttaagttcgccgtactgatgtgggtgtttacgtatgtgggggcactcttcaacggattgacgctgcttattctagccctgatctctctgtttagcgtccctgtcatctatgagcggcaccaagcccagatcgatcactacctcggtttagctaacaagaacgttaaagatgctatggctaagatccaggccaagatacccgggctgaagaggaaagccgaatag

SEQ ID NO: 327281 - DNA, 2961 bp, Artificial Sequence
  derived and/or modified sequence
atggacctgaaggagcagcccggcaacaccatcagcgccggccaggaagattttcccagtgtactactggagacagccgcctcactgcctagtctctcaccactgagcgccgcctcgttcaaggagcacgaataccttggtaatctcagcaccgtattaccaacagaaggtacactgcaagagaatgtgtctgaggcatcaaaggaggtgtccgagaaagcaaagacgctgctgatcgatcgggatttaacggaattttccgaactggagtatagcgaaatggggtcgagtttcagcgtgtctcccaaagccgagagcgccgtcatagtggcgaaccctcgggaagagatcattgtgaagaataaggatgaggaagagaagctggtgtctaacaatatcctgcacaatcagcaagagctgccaacagccctgaccaaactggtcaaggaagatgaggtcgtgtcctcagagaaggctaaagattctttcaacgagaaaagagtggctgtggaggctcccatgcgggaggagtacgctgacttcaagccctttgaacgcgtatgggaggtgaaagactctaaggaggactccgatatgctagctgcaggaggtaaaatcgagagtaatctagagagtaaagttgataagaagtgcttcgccgatagcctggagcagactaatcacgagaaggacagcgaaagctctaatgatgatacaagctttccatccactcctgagggtatcaaggatcgaagcggggcctacatcacatgtgcccccttcaaccctgctgcaactgaatccatcgctactaatattttccccctcctgggagacccaacctctgagaacaagaccgacgaaaagaagatcgaagaaaaaaaggcccagatagtcactgagaaaaatacatccactaagacttcgaatccatttttagtggccgcccaagactcagaaaccgactacgtaaccaccgacaatctcaccaaagttactgaggaggtggtggcaaacatgcctgaaggcctcacccctgacctggtccaggaggcttgtgaatccgagctgaacgaggtgacagggacgaagattgcatacgagaccaagatggaccttgtgcagacatcagaagtgatgcaggagtcactttaccccgcagctcaactttgcccatccttcgaggagtccgaagcaacaccatctcccgttcttcctgatattgtgatggaagccccactgaattctgcagtacccagcgccggcgcatctgtcattcagccgtcttcaagcccgctggaagccagcagtgtgaactatgaatctataaagcacgagcccgagaacccacccccctacgaagaagcaatgagtgtctcccttaagaaggtgagcgggattaaggaggaaattaaagaacctgaaaacatcaatgccgctctccaagaaactgaagcgccatacatctctatagcttgcgatctgattaaagagaccaagctcagtgctgagccagcacccgatttctctgactacagcgaaatggctaaagtggaacagcctgtgcccgaccactccgagcttgtggaggactcaagcccggattctgaacccgtcgacctgttcagtgatgactccatcccagacgtcccgcaaaagcaagatgagacagttatgcttgtcaaagaatccctgacggagactagctttgaaagtatgattgaatatgagaacaaggagaagttatcagcactccctcccgaggggggtaagccctacctggagagtttcaagctgagcctggataatacaaaggacacccttttgcctgacgaagtctcaaccctcagcaaaaaggagaaaatacccctacagatggaagaattatcgaccgctgtgtacagcaacgatgatctgttcatcagcaaggaggctcagattagagaaactgaaactttctccgattcgtctcccatagagattatcgacgagttccctacactgatttctagcaagaccgattctttcagtaagttggctagggaatacaccgatctggaggtcagccacaagtctgaaatcgcgaatgcccctgatggcgccggctctctcccctgtactgagctcccacacgatctcagcctcaaaaatatccagccgaaggtcgaagaaaagatctctttcagcgatgacttctcaaagaatgggtcagcaacaagcaaggtgctcctcctgccccccgatgtgagcgcccttgccacccaggccgaaattgagtccatcgtgaagccgaaagtgcttgtgaaggaggcggagaagaaattgccatcagataccgagaaagaagatagatctccatccgctatcttcagtgccgagttgtccaaaacctccgtggtggatctcttgtactggcgggatattaagaagactggggtggtcttcggcgcgagccttttcctgctattgagcctcaccgtgtttagtatcgtttcggtgacagcttatatcgcgcttgccctgttgtcagttactatctccttccggatatataaaggcgtcatccaggccatccagaagtccgacgagggacaccctttccgtgcatatctcgagtctgaagtggccatttctgaggagctagtccagaaatattccaacagcgcactcgggcacgtcaattgcaccatcaaggagctcaggagattgtttctggtggatgatttagtcgactctctcaaatttgccgtgctgatgtgggtgttcacatatgtcggggcacttttcaacggcctgacgctcttgattctggctctgatctccctgttctctgttcccgtaatctacgaacgtcatcaagcacagattgaccactacttagggctggctaacaaaaacgtgaaagacgccatggcaaaaattcaggcgaagattcccggcctcaaacgaaaggcggaatag

SEQ ID NO: 327282 - DNA, 276 bp, Artificial Sequence
  derived and/or modified sequence
atggacctgaaggagcagcccggcaacaccatcagcgccggccaggaggactttccatcggtcctgttggagaccgccgctagtttgccttcgctgagcccattgtctgcagcctccttcaaagagcatgagtatttggggaatctgtctactgtcctgccaaccgagggcactctccaagagaacgtctccgaggcatccaaagaagttagtgagaaggctaagacactgctaatcgatagggacttaactgagtttagcgaactagagtattag

SEQ ID NO: 327283 - DNA, 2883 bp, Artificial Sequence
  derived and/or modified sequence
atggaagacctggatcagagtccacttgtttctagttccgactctcccccacgaccccagccagcgtttaaataccagttcgtgcgagaaccggaagacgaggaagaagaggaagaggaagaggaggaagatgaagatgaggacctcgaggaactcgaggtgttggaacgcaagcagtttagcgaactagaatactcagagatgggctccagcttctcagtgtcccccaaagccgaaagcgccgttatcgtggcaaatccccgagaggagataatcgtgaagaataaagacgaagaagaaaagctggtctccaacaatatcctgcataatcagcaggagctgccgacggccctcactaagctcgtgaaggaagacgaagttgtcagcagtgagaaggcaaaagactcgttcaatgaaaaacgggtggctgtggaagcccctatgagggaggaatacgcggacttcaagccgtttgagcgggtttgggaagtgaaagacagtaaagaagactctgacatgcttgccgctgggggtaagatcgaaagcaacttagaatccaaagtggacaagaaatgcttcgctgactccctcgagcagacaaatcacgagaaagattctgagtcatccaatgatgatactagctttccaagtaccccagaaggcatcaaagatcggtctggtgcctacattacatgtgccccatttaatccggcagctacagagtctatagccaccaatatcttccccttattaggtgaccccacgtccgaaaacaagacagacgagaagaaaatcgaggaaaaaaaggcccagatcgttaccgaaaaaaatacatcgactaaaacatcaaatccttttttagtggccgcacaagacagcgaaacagactatgttacaactgacaatctgactaaggtcaccgaagaagtggtggcaaacatgcctgagggacttacccccgatcttgttcaagaagcctgcgagagtgagctgaacgaagtgacgggtacaaaaattgcctacgagaccaagatggatttggtccaaaccagtgaagtaatgcaggaatccctgtatcccgctgcccagctctgtccatcgttcgaagagtccgaggccaccccgtctccagtacttcccgatatagtgatggaagccccactcaactccgccgttccctcggcaggcgcttctgtaatccagcctagcagttcaccacttgaagcaagttccgttaactacgagtccatcaaacatgagcccgagaatccgcctccatatgaagaggcgatgagcgtgagcctcaaaaaggtgtccgggattaaagaagaaattaaggaacctgaaaatatcaatgccgctctgcaggagacagaagcgccttacatatctattgcctgcgacctgataaaagaaactaagctctctgcagaacccgcacccgatttctcagattacagcgaaatggccaaagtggagcaacctgtgcctgaccacagcgaattggttgaagactcgtctccggacagtgaaccagtggaccttttctctgatgattcaatccctgatgtcccacagaaacaggacgagaccgtcatgttggtgaaagagagcctgaccgaaacatctttcgaaagcatgattgagtacgagaataaggagaaactgtctgccctgccaccagaagggggtaaaccgtatctggaaagtttcaagctgtcgctggataatactaaggatactcttctccctgacgaagtctccaccttgtccaagaaggagaaaattccacttcagatggaggagctgtcaaccgcagtgtactccaatgacgacttgttcattagtaaggaggcccagatccgagaaacggagactttcagcgattccagtcccatcgaaatcatcgatgaatttccgacgcttatctctagtaagactgattccttttccaaactggcacgagaatacaccgacctcgaagtctcccataagtccgaaattgctaacgcgcctgatggtgctggaagcctcccctgcacggagctgccacacgacctgtctttgaaaaacatccaaccgaaagtagaggagaaaatctcattcagtgacgacttcagcaagaacgggtctgccacatccaaggttctgcttttaccacccgacgtatctgccctcgccactcaggccgaaattgagagcatcgtgaagcccaaagtcctggttaaggaggctgaaaaaaagctcccaagcgatacagaaaaagaggacagatccccaagcgccattttttccgcagaattgagcaagacctctgtggtggatctgctgtactggagggatataaagaaaactggtgtggtgtttggggcatcgctgtttttattgttgtccctgactgtcttctcaattgtgtcagtgacggcatacatcgcgctcgccctcctaagcgttacgatctccttcaggatttacaagggcgtaattcaggccatccagaagtcagacgaggggcacccgtttagggcctaccttgagtctgaagtagccatctctgaagagcttgtgcagaaatatagtaattctgctctggggcacgtaaattgtacaataaaagaactgcggagactgttccttgttgatgatcttgtggacagtttgaaattcgctgtgctcatgtgggtgttcacgtatgtgggcgcattgttcaacggattgacccttctgattctcgctttgattagtctgttcagcgttcccgtcatctatgagcgccaccaggcccaaatcgatcattatttggggctcgccaacaaaaacgtcaaagatgctatggctaaaattcaagcgaagattcccggactgaaaaggaaggccgagtag

SEQ ID NO: 327284 - DNA, 2961 bp, Artificial Sequence
  derived and/or modified sequence
atggatctgaaggaacagccaggtaatacaatcagcgccggacaggaagatttcccctccgtccttctggagacagcggcaagtctgcctagcctgtcacctctgtccgccgctagcttcaaggaacatgagtacttaggtaatctgagtacggtgctgccaacagaaggcactctacaagaaaacgtgagcgaggcttctaaagaggtttccgaaaaggctaagacacttctcatcgatagagatcttaccgaatttagcgaacttgagtacagcgagatgggctcaagttttagtgtgagcccgaaggccgaaagcgccgtgatagtggccaacccgagggaggagatcattgtgaaaaataaagatgaggaagaaaagctggtgtcgaacaacattctgcacaaccagcaagaattgcccacggccctgactaagctggtaaaagaggatgaggttgtgtccagcgaaaaggccaaagactcttttaacgaaaagcgagttgctgtcgaagctccaatgagggaggagtatgctgacttcaaaccttttgaacgggtgtgggaggtcaaagactccaaggaagattctgacatgctggccgcagggggaaagattgagtcaaacctggagtcaaaagtggacaaaaagtgtttcgctgatagcctggagcagacaaaccacgagaaggactccgagagcagcaatgacgacacatcttttccttctacacctgagggaattaaagaccgtagcggagcctatattacatgtgcaccattcaaccccgcagcgacagaaagtatcgcaaccaatatctttcccctgctgggtgaccctacgtccgaaaacaaaacggacgagaaaaaaatagaagagaaaaaagcccagatcgttacagagaagaacacctcaacaaaaacgtcgaacccatttctggtggccgctcaggattccgagactgattatgtcaccactgataatctaaccaaggtgacagaggaggtcgtagcaaatatgccagaaggcctgaccccagacctcgtccaggaggcatgcgagtcagagctgaatgaggtgaccggaacaaagatcgcgtacgaaaccaagatggacctggtacaaactagtgaggtcatgcaagaatcactgtaccccgctgctcagctctgtccatcatttgaagaaagcgaagcaaccccaagtcccgtcctgccagacatcgtgatggaggctccactgaacagcgctgtcccatctgcaggcgcttccgtcatccagccaagcagctccccgctggaggcgtcaagtgtgaattacgagtcaataaaacatgagccagaaaatcctcccccatatgaagaagccatgagcgtttcactgaagaaggtgtccggaataaaggaggagatcaaggagccagagaacatcaacgcagcgctccaggagactgaagccccatatatctccatcgcttgtgacctgattaaagaaacgaagttgagcgctgaacccgctcccgacttcagcgactactccgagatggctaaggtggaacaacccgtacccgaccattctgagctagttgaagattcatcacctgactctgaaccagtggaccttttctccgacgattccattccagatgtgccacagaagcaggacgaaactgtcatgctggtgaaggaaagtctgacagagacctcattcgaaagtatgattgaatatgaaaataaagaaaaactctcggccttacctcccgaaggagggaaaccttacctcgaatcctttaagctgtccttagacaacacgaaggatactttgctgccggatgaagtgtcgactctgtcgaagaaggaaaagataccccttcagatggaggagctttccacagctgtatactccaacgacgacctgtttatctccaaggaggcacagatccgcgagactgagactttttccgattcctcacctattgaaatcatcgacgagttccctacattaattagctccaaaactgactctttcagcaaactcgccagagagtacaccgatcttgaggtgagccataaatcagaaattgcaaatgccccagacggtgctggtagcctgccctgtacggagttgcctcacgaccttagcttgaaaaatatacagccaaaggtggaggagaagatcagcttttccgacgatttcagcaaaaacggcagcgccacctccaaagtgttgctgttgcctccagacgtgagcgctctcgccacccaggcagaaatcgaaagcatcgtgaaacctaaggtcctagtgaaagaggctgagaagaagctgcccagcgatactgagaaagaagaccgtagccccagcgcaatcttctcggccgaactgagtaaaacttcggtggtagatttactgtactggagagacataaagaaaacaggagttgtttttggggcttctctgtttttacttctgtccctgaccgtgttctccattgtatcggtcaccgcctacatagctttggctctactttcagttaccatctcatttagaatctataagggcgtgattcaggccatacaaaagtctgacgagggacatccatttcgggcttacctcgaatctgaggtcgccatctccgaagagttagtgcagaagtatagcaactctgccctgggacacgtgaattgtacaattaaggagctccgccgtctcttcctggttgacgatttagtggattctctcaagttcgcagtgctgatgtgggtttttacatatgtgggtgcccttttcaacggcctcacccttctcatcctggctctgatatcactgttttcagtgcccgtcatctacgagcggcaccaggcccagatcgatcattatctcggcctagccaacaagaacgtcaaagatgcaatggcaaaaatccaagctaagatcccaggcctgaaacgcaaagccgaatag

SEQ ID NO: 327285 - DNA, 2961 bp, Artificial Sequence
  derived and/or modified sequence
atggaccttaaggagcagccaggaaatacaatcagtgccggacaggaagactttccgtcggtcctgctggagaccgccgcttcattgccaagtctgtcccccctgtccgctgcgagcttcaaagagcacgaatatttaggcaatctgtccaccgtgctcccgaccgagggaaccttgcaggagaacgtgagtgaggcgtccaaagaagtctccgaaaaggcgaagaccttgctgatcgaccgcgatttgacagagttttcagaactcgagtacagcgagatggggtctagtttttctgtgtcccccaaagcggagtctgctgttatagtggccaacccacgggaggaaattattgtgaagaacaaggacgaagaagagaaattggttagcaacaatatcctgcacaatcaacaggaattacctacagcattgacaaagctggttaaggaagacgaggtagtgtctagtgaaaaggctaaagactctttcaatgagaagagagttgccgtagaagctcccatgcgcgaagagtatgctgattttaaacctttcgaacgagtgtgggaggtgaaggactccaaagaggacagcgatatgctagccgcaggaggaaagatagagagcaacctagaatccaaagttgataagaagtgctttgccgactctttggaacagactaaccatgagaaagacagcgagtccagtaacgacgacacctcatttcctagtactccagagggaatcaaggatcgctctggagcatatataacatgtgccccatttaatccagcagccacagagagcattgccacgaatatcttccccttgctgggcgacccgaccagtgagaacaagacagatgagaagaaaatcgaagagaagaaagcgcagatcgtgaccgagaagaacacctctactaaaacatctaacccgttcctggtcgcagctcaggactctgagacagactacgttacaactgacaatctcacaaaggtgacagaggaagttgtggctaacatgcccgagggcctgacaccagacctcgtgcaagaagcttgtgaatccgaacttaatgaggtgactggaaccaaaattgcctacgagactaagatggacctggtgcagactagcgaggtgatgcaggagtctctgtacccggctgcccagctctgtccaagtttcgaggaatccgaagccaccccttcaccagtacttccggatattgtcatggaggccccactgaactctgccgttccatccgcaggggcttcagtgatccaaccatccagctcaccactggaggctagttccgtgaactacgagtcaatcaagcatgaacccgaaaatcccccaccgtacgaggaagcaatgagtgtgtcactcaagaaggtgtccggaatcaaggaggagatcaaagaacccgagaatatcaatgccgctctgcaggagacagaagcgccatacatcagtatcgcttgtgacctgataaaagagaccaagctatcagctgagcccgctccagatttctcggactatagtgagatggctaaagtagagcagcccgtcccagatcattcagaactcgttgaagattcttctccagattctgagcctgtcgatttattttccgacgacagtattccagacgtcccccaaaaacaggacgagactgtcatgctcgtgaaagagtccttgacagaaacttcttttgaatccatgatagaatacgagaataaagagaaattgtctgccctgccaccagaaggcggtaagccatatctggagtcctttaagctctccttagacaacacaaaggacaccctcttacctgacgaggtaagcaccctctccaaaaaagagaaaattcccctgcagatggaagagctctccactgcagtgtatagcaacgacgacttatttatctcaaaagaggctcagattagggaaaccgagacattcagcgactcctcacctatcgaaataatcgatgagttcccgaccctgattagttcgaagactgacagcttctccaagctcgctagggagtacaccgatttagaggttagtcataaatctgagatcgccaacgccccagatggcgcaggcagcttgccgtgcaccgagctaccacatgatctttcactgaagaacatacagcccaaggtcgaggagaagatatctttctcagatgatttttctaagaacggcagcgccacctctaaggtgctccttttaccccctgatgtttccgcattggccacacaggcggagatcgagtccatcgttaagccaaaagttttagttaaggaagcggaaaaaaagctccctagcgatactgaaaaggaggaccgatcccctagcgccatctttagcgcggagctgagtaagaccagcgtggtagacctactctactggagggacataaagaaaaccggggtagtatttggtgcatcattatttctgctgctcagtctcacagttttctctatcgtctcagtcacagcttatatcgctctggctctgcttagcgtgactatatccttccgcatctacaaaggcgtgatccaggccattcaaaagtccgacgaggggcacccatttagggcctacctcgaaagcgaggtagctatctccgaagagttggtgcaaaaatattcaaattctgctctcggacacgtgaattgcacaataaaggagctgagacgcctgtttctcgttgacgacctggtcgacagcctcaagtttgcagttctgatgtgggtgttcacatacgtgggggctctgttcaacgggctgacccttctgattcttgccctcatctcactgttcagcgtccccgtgatttatgagcgccatcaagctcagattgaccactatctgggactggccaataaaaatgtaaaggatgcgatggccaaaatccaggccaagatccctggcctgaaaagaaaagccgagtag

SEQ ID NO: 327286 - DNA, 2961 bp, Artificial Sequence
  derived and/or modified sequence
atggatcttaaagagcaaccaggcaatactatttctgcaggtcaggaggacttcccctcagtgcttctggagacagccgcttctttgccgtcactgtcccctctgtcagccgcttcttttaaggaacacgaatatttaggtaatctgtcaaccgtcctcccaacagagggcactctccaggaaaacgtaagtgaagcaagtaaggaggtctccgagaaggcaaagactttgctgatcgatcgcgacctgaccgagttctctgagcttgagtacagcgagatgggctcatcattctcagtgagtcctaaggccgagagcgctgtgatcgttgctaaccctcgcgaagagatcatcgtcaagaataaggacgaagaggaaaagttagtttccaataacatactgcataatcagcaagagctcccaacggcgctgacaaagctagtaaaggaggacgaggtggtgtcaagcgagaaggccaaagactctttcaacgaaaaacgggtggccgttgaggcccctatgagggaggagtacgcggactttaaaccttttgaacgtgtgtgggaggtgaaggatagtaaggaagactctgacatgctcgctgcaggcggaaagattgagagtaatctggagagtaaggtggataaaaaatgttttgccgactcgttggaacaaacgaaccacgagaaggacagtgaaagcagcaatgatgacacaagcttccctagcacaccagaaggcataaaggataggtccggggcatacatcacctgtgccccttttaaccccgctgcaactgagtcgatcgcgaccaacatctttccactgctgggtgaccctacatcagagaataagacagacgaaaagaaaatcgaggaaaaaaaagcccagatcgtgaccgagaaaaacacctcaacaaaaacaagcaaccctttcttggtggccgcacaagattccgaaactgactacgtcacaaccgataacttgaccaaggttacggaggaggtcgtcgcaaatatgcccgaggggctgactccagacctggtccaggaggcttgcgagtctgagctcaatgaggtgacggggactaagatcgcctatgagaccaagatggacctggtacaaacaagcgaggttatgcaagaatctctgtaccccgctgcacagttatgtccaagctttgaggaatcagaggccacgccttcacccgtcctgcccgatatcgtgatggaagctccgcttaattccgccgtcccaagtgctggagctagcgtgattcagccctccagtagtcctctggaagcaagctcagtcaactacgagagcatcaagcatgagccggagaatcctcccccatatgaggaagccatgagtgtttctctgaaaaaagtttctggaatcaaggaagaaattaaagagcccgagaatataaacgcagcgctgcaagaaactgaggcaccgtatatttcaatcgcctgcgatttaatcaaggagactaagctgagcgccgagcccgcaccagactttagtgactactctgagatggccaaggttgaacaacctgtcccagaccactcagaactggtggaggattcctcccccgactccgagcccgttgatcttttctctgacgattcaatacccgacgttcctcagaagcaggacgaaaccgtcatgttagtaaaggagtccctgaccgaaaccagcttcgaatcaatgatcgagtacgagaacaaagagaagctgtccgcacttccacccgagggaggaaaaccatatctggagtcttttaaactgtccctggacaatacaaaagacacactacttcccgacgaagtgtccaccctctctaaaaaagaaaagatacctctccagatggaagagctgtcaacagccgtctattctaacgacgacttgttcatcagtaaggaggcacagattagagagacagagaccttttccgactcttctcccatagagataatcgacgaattccccacgctcattagttctaagaccgattctttttcaaagttggctagagagtacaccgacttagaagtatcccataagtctgagattgccaacgccccagatggggcagggtccctgccctgcactgaactcccccacgatctgtcgctcaaaaacattcagcctaaagtggaggagaagatctctttctccgatgatttctccaagaatggcagcgccacttctaaggtcttgctgcttccaccagacgttagtgccttggccacccaggcggagattgagtcgatcgtcaaacctaaggtgctggtgaaggaggctgaaaagaagcttccctctgatactgagaaagaggatagatcccctagcgcaattttttctgcggagcttagcaaaacctcggttgtagatctgctctactggcgggatatcaagaagactggtgttgtgtttggcgcatcgttattcctgctgctttctcttactgtgtttagtatagtgtctgtcactgcatacatcgccctcgcactgctgtcagtgaccatttcctttagaatctacaagggcgtgatacaggccatacagaagagcgacgaaggacaccccttccgggcatatctggagtcagaagtggccatttccgaagagctagtgcagaagtattccaacagtgccctcggtcacgtgaactgcaccatcaaggaattgcggcgactgttcctggttgacgacttagttgatagtctgaagttcgctgtgctgatgtgggtcttcacctatgtgggtgcactgttcaacggactcactttattgattctagcactcatctccctgtttagtgtgcccgtaatctacgaacgacatcaagcccagatcgaccattatctcggcctggctaacaagaacgttaaggatgcaatggctaaaattcaagctaagatccccggactgaagaggaaggccgaatag

SEQ ID NO: 327287 - DNA, 2961 bp, Artificial Sequence
  derived and/or modified sequence
atggacctgaaagagcaacccggaaataccatcagtgcgggtcaggaagattttccatcagtgcttctcgagaccgccgcatcactgccttcactctcgcccttaagcgcagcctctttcaaagagcatgaatacctgggaaatctgtccacagtgctgccaaccgaaggaactctgcaggaaaatgtctcagaagcatctaaagaagtgtctgaaaaagcgaaaacattattaattgaccgggacctaaccgagttctccgagctggaatactctgagatggggagttcattcagcgtgtccccgaaggctgagagtgctgtgatcgttgctaacccacgtgaggaaattattgtgaagaataaagatgaagaggagaaactggtgtccaacaatattcttcacaatcagcaagagctcccaacagccttaacaaagctggtgaaagaggacgaggtggtgagctcagagaaggcgaaggactccttcaatgagaagcgggtggctgtagaagcgcctatgcgagaggaatacgctgacttcaaaccttttgagcgtgtttgggaggtgaaggatagcaaagaggactctgatatgcttgctgctgggggaaagatcgagtcgaatctggagtccaaagttgacaagaagtgcttcgccgattccctggagcagaccaaccatgaaaaagatagcgaaagcagcaacgacgataccagctttccatctacccccgaaggaattaaagatagaagcggggcttacattacctgcgcaccgttcaaccccgctgccaccgagtctatcgcaaccaacatttttccgctccttggagaccctactagcgagaacaaaaccgatgagaaaaagatcgaagaaaagaaggcccagatagttacagaaaaaaatacttctaccaaaacgtcaaacccctttttggtagcagcacaagacagcgagaccgactatgtcacgacagataatctgactaaagtgactgaggaagtggtcgccaatatgcccgagggtctgacacctgatctggttcaggaggcatgtgaatctgagctcaacgaagttacaggaaccaaaatcgcctatgagaccaaaatggatctggtacaaaccagcgaagtcatgcaagagagcctctatcctgctgcccagctgtgtccttctttcgaggaaagcgaagccactcccagcccagtcttgcctgatatcgtgatggaggctcccctcaatagtgcggttccatctgcaggtgcctccgtgatccagcctagcagctcaccccttgaagcatccagcgttaactatgagagcattaaacacgaaccagagaatccccctccttatgaagaagcaatgtctgtgagtcttaaaaaagttagtggcataaaggaggagataaaggagcccgagaatatcaacgcagcgcttcaggagacagaagctccttacatttcaatcgcctgcgatctgatcaaggaaactaaactgagcgcagagcctgccccagacttctcagactactctgagatggcaaaagttgagcagccagttccagatcattcagaattagtagaggatagctcacctgatagtgagcctgttgacctgtttagcgacgactccattccggacgttccccagaagcaagacgagactgttatgctcgtgaaagagtcgctaaccgaaactagttttgagtctatgatcgagtatgagaataaggagaagctcagcgcgttgcctccagaaggtggaaaaccttatttagagtccttcaagctgtctttagataacaccaaagatacgctcctcccagacgaggttagtaccctgagcaaaaaggagaagatccctttgcagatggaagagctgtccacagctgtctattcgaacgacgacttgttcatttcaaaggaagcccagatccgagagaccgaaacattttccgacagcagtccaattgaaataattgacgagtttccaacccttatcagttccaagactgattccttctccaagctggctagggagtacactgatctggaggtcagtcacaaaagcgaaattgctaacgctccagacggagccggatcacttccgtgcaccgagctccctcatgacctcagtcttaagaacattcagcccaaagtagaggagaaaatctcttttagtgacgactttagcaagaatggcagcgcaacgtccaaagttttactcctgcctcccgatgtgagcgcccttgcaacccaagcagagatcgagagtatcgttaagccaaaggtgcttgtaaaggaggctgagaaaaaactgccatccgacacggagaaggaggacaggtcaccgagtgccatctttagcgcagagctgagtaagaccagcgtggtggacctgctctactggagagatatcaaaaaaacaggagttgtgtttggagccagtctgttcctgttgctatctttgacagtattttccatagtgagcgtcaccgcttacatcgcactggcattgctcagtgtgaccatttcttttcggatctataagggagtgatccaggcaattcagaagtctgatgagggccatccttttcgagcatatctggaatctgaagtcgctatttcagaggagcttgtgcagaaatacagcaatagtgccctgggtcatgtaaactgcaccataaaggagttgagaagactcttcttggtggacgacttggtagactccctgaagtttgccgtgcttatgtgggtcttcacttatgttggcgctctgtttaacggactgaccctgcttatactggccctgatcagcctgttttccgtcccggtcatttatgaaaggcaccaggcccagatagatcactacctcggtctcgcgaacaagaacgtcaaggatgcaatggccaagattcaggctaagatcccgggtcttaaaaggaaggcggaatag

SEQ ID NO: 327288 - DNA, 276 bp, Artificial Sequence
  derived and/or modified sequence
atggatcttaaggagcagccaggcaatacaattagcgcaggacaagaagacttcccttccgtccttcttgaaacagctgcctccctcccaagtctgtcccccctctccgcggcatcgttcaaggagcacgagtatctcggaaacctctccaccgtactgcccacagagggcacattacaggagaatgtgtctgaggcctccaaggaggtgagtgaaaaagcgaagaccctcctaatagatagagatctcaccgaattctcagagctggagtattag

SEQ ID NO: 327289 - DNA, 3225 bp, Artificial Sequence
  derived and/or modified sequence
atggaagacctggaccagtctcctctggtctcgtcctcggacagcccaccccggccgcagcccgcgttcaagtaccagttcgtgagggagcccgaggacgaggaggaagaagaggaggaggaagaggaggacgaggacgaagacctggaggagctggaggtgctggagaggaagcagttttcagaattagaatactcagaaatgggatcatcgttcagtgtctctccaaaagcagaatctgccgtaatagtagcaaatcctagggaagaaataatcgtgaaaaataaagatgaagaagagaagttagttagtaataacatccttcataatcaacaagagttacctacagctcttactaaattggttaaagaggatgaagttgtgtcttcagaaaaagcaaaagacagttttaatgaaaagagagttgcagtggaagctcctatgagggaggaatatgcagacttcaaaccatttgagcgagtatgggaagtgaaagatagtaaggaagatagtgatatgttggctgctggaggtaaaatcgagagcaacttggaaagtaaagtggataaaaaatgttttgcagatagccttgagcaaactaatcacgaaaaagatagtgagagtagtaatgatgatacttctttccccagtacgccagaaggtataaaggatcgttcaggagcatatatcacatgtgctccctttaacccagcagcaactgagagcattgcaacaaacatttttcctttgttaggagatcctacttcagaaaataagaccgatgaaaaaaaaatagaagaaaagaaggcccaaatagtaacagagaagaatactagcaccaaaacatcaaacccttttcttgtagcagcacaggattctgagacagattatgtcacaacagataatttaacaaaggtgactgaggaagtcgtggcaaacatgcctgaaggcctgactccagatttagtacaggaagcatgtgaaagtgaattgaatgaagttactggtacaaagattgcttatgaaacaaaaatggacttggttcaaacatcagaagttatgcaagagtcactctatcctgcagcacagctttgcccatcatttgaagagtcagaagctactccttcaccagttttgcctgacattgttatggaagcaccattgaattctgcagttcctagtgctggtgcttccgtgatacagcccagctcatcaccattagaagcttcttcagttaattatgaaagcataaaacatgagcctgaaaaccccccaccatatgaagaggccatgagtgtatcactaaaaaaagtatcaggaataaaggaagaaattaaagagcctgaaaatattaatgcagctcttcaagaaacagaagctccttatatatctattgcatgtgatttaattaaagaaacaaagctttctgctgaaccagctccggatttctctgattattcagaaatggcaaaagttgaacagccagtgcctgatcattctgagctagttgaagattcctcacctgattctgaaccagttgacttatttagtgatgattcaatacctgacgttccacaaaaacaagatgaaactgtgatgcttgtgaaagaaagtctcactgagacttcatttgagtcaatgatagaatatgaaaataaggaaaaactcagtgctttgccacctgagggaggaaagccatatttggaatcttttaagctcagtttagataacacaaaagataccctgttacctgatgaagtttcaacattgagcaaaaaggagaaaattcctttgcagatggaggagctcagtactgcagtttattcaaatgatgacttatttatttctaaggaagcacagataagagaaactgaaacgttttcagattcatctccaattgaaattatagatgagttccctacattgatcagttctaaaactgattcattttctaaattagccagggaatatactgacctagaagtatcccacaaaagtgaaattgctaatgccccggatggagctgggtcattgccttgcacagaattgccccatgacctttctttgaagaacatacaacccaaagttgaagagaaaatcagtttctcagatgacttttctaaaaatgggtctgctacatcaaaggtgctcttattgcctccagatgtttctgctttggccactcaagcagagatagagagcatagttaaacccaaagttcttgtgaaagaagctgagaaaaaacttccttccgatacagaaaaagaggacagatcaccatctgctatattttcagcagagctgagtaaaacttcagttgttgacctcctgtactggagagacattaagaagactggagtggtgtttggtgccagcctattcctgctgctttcattgacagtattcagcattgtgagcgtaacagcctacattgccttggccctgctctctgtgaccatcagctttaggatatacaagggtgtgatccaagctatccagaaatcagatgaaggccacccattcagggcatatctggaatctgaagttgctatatctgaggagttggttcagaagtacagtaattctgctcttggtcatgtgaactgcacgataaaggaactcaggcgcctcttcttagttgatgatttagttgattctctgaagtttgcagtgttgatgtgggtatttacctatgttggtgccttgtttaatggtctgacactactgattttggctctcatttcactcttcagtgttcctgttatttatgaacggcatcaggcacagatagatcattatctaggacttgcaaataagaatgttaaagatgctatggctaaaatccaagcaaaaatccctggattgaagcgcaaagctgaatgaaaacgcccaaaataattagtaggagttcatctttaaaggggatattcatttgattatacgggggagggtcagggaagaacgaaccttgacgttgcagtgcagtttcacagatcgttgttagatctttatttttagccatgcactgttgtgaggaaaaattacctgtcttgactgccatgtgttcatcatcttaagtattgtaagctgctatgtatggatttaaaccgtaatcatatctttttcctatctatctgaggcactggtggaataaaaaacctgtatattttactttgttgcagatagtcttgccgcatcttggcaagttgcagagatggtggagct

SEQ ID NO: 327290 - DNA, 2883 bp, Artificial Sequence
  derived and/or modified sequence
atggaggacctggaccagagccccctggtgagcagcagcgacagcccccccagaccccagcccgccttcaagtaccagttcgtgagagagcccgaggacgaggaggaggaggaggaggaggaggaggaggacgaggacgaggacctggaggagctggaggtgctggagagaaagcagttcagcgagctggagtacagcgagatgggcagcagcttcagcgtgagccccaaggccgagagcgccgtgatcgtggccaaccccagagaggagatcatcgtgaagaacaaggacgaggaggagaagctggtgagcaacaacatcctgcacaaccagcaggagctgcccaccgccctgaccaagctggtgaaggaggacgaggtggtgagcagcgagaaggccaaggacagcttcaacgagaagagagtggccgtggaggcccccatgagagaggagtacgccgacttcaagcccttcgagagagtgtgggaggtgaaggacagcaaggaggacagcgacatgctggccgccggcggcaagatcgagagcaacctggagagcaaggtggacaagaagtgcttcgccgacagcctggagcagaccaaccacgagaaggacagcgagagcagcaacgacgacaccagcttccccagcacccccgagggcatcaaggacagaagcggcgcctacatcacctgcgcccccttcaaccccgccgccaccgagagcatcgccaccaacatcttccccctgctgggcgaccccaccagcgagaacaagaccgacgagaagaagatcgaggagaagaaggcccagatcgtgaccgagaagaacaccagcaccaagaccagcaaccccttcctggtggccgcccaggacagcgagaccgactacgtgaccaccgacaacctgaccaaggtgaccgaggaggtggtggccaacatgcccgagggcctgacccccgacctggtgcaggaggcctgcgagagcgagctgaacgaggtgaccggcaccaagatcgcctacgagaccaagatggacctggtgcagaccagcgaggtgatgcaggagagcctgtaccccgccgcccagctgtgccccagcttcgaggagagcgaggccacccccagccccgtgctgcccgacatcgtgatggaggcccccctgaacagcgccgtgcccagcgccggcgccagcgtgatccagcccagcagcagccccctggaggccagcagcgtgaactacgagagcatcaagcacgagcccgagaacccccccccctacgaggaggccatgagcgtgagcctgaagaaggtgagcggcatcaaggaggagatcaaggagcccgagaacatcaacgccgccctgcaggagaccgaggccccctacatcagcatcgcctgcgacctgatcaaggagaccaagctgagcgccgagcccgcccccgacttcagcgactacagcgagatggccaaggtggagcagcccgtgcccgaccacagcgagctggtggaggacagcagccccgacagcgagcccgtggacctgttcagcgacgacagcatccccgacgtgccccagaagcaggacgagaccgtgatgctggtgaaggagagcctgaccgagaccagcttcgagagcatgatcgagtacgagaacaaggagaagctgagcgccctgccccccgagggcggcaagccctacctggagagcttcaagctgagcctggacaacaccaaggacaccctgctgcccgacgaggtgagcaccctgagcaagaaggagaagatccccctgcagatggaggagctgagcaccgccgtgtacagcaacgacgacctgttcatcagcaaggaggcccagatcagagagaccgagaccttcagcgacagcagccccatcgagatcatcgacgagttccccaccctgatcagcagcaagaccgacagcttcagcaagctggccagagagtacaccgacctggaggtgagccacaagagcgagatcgccaacgcccccgacggcgccggcagcctgccctgcaccgagctgccccacgacctgagcctgaagaacatccagcccaaggtggaggagaagatcagcttcagcgacgacttcagcaagaacggcagcgccaccagcaaggtgctgctgctgccccccgacgtgagcgccctggccacccaggccgagatcgagagcatcgtgaagcccaaggtgctggtgaaggaggccgagaagaagctgcccagcgacaccgagaaggaggacagaagccccagcgccatcttcagcgccgagctgagcaagaccagcgtggtggacctgctgtactggagagacatcaagaagaccggcgtggtgttcggcgccagcctgttcctgctgctgagcctgaccgtgttcagcatcgtgagcgtgaccgcctacatcgccctggccctgctgagcgtgaccatcagcttcagaatctacaagggcgtgatccaggccatccagaagagcgacgagggccaccccttcagagcctacctggagagcgaggtggccatcagcgaggagctggtgcagaagtacagcaacagcgccctgggccacgtgaactgcaccatcaaggagctgagaagactgttcctggtggacgacctggtggacagcctgaagttcgccgtgctgatgtgggtgttcacctacgtgggcgccctgttcaacggcctgaccctgctgatcctggccctgatcagcctgttcagcgtgcccgtgatctacgagagacaccaggcccagatcgaccactacctgggcctggccaacaagaacgtgaaggacgccatggccaagatccaggccaagatccccggcctgaagagaaaggccgagtag

SEQ ID NO: 327291 - DNA, 2961 bp, Artificial Sequence
  derived and/or modified sequence
atggacctgaaggagcagcccggcaacaccatcagcgccggccaggaggacttccccagcgtgctgctggagaccgccgccagcctgcccagcctgagccccctgagcgccgccagcttcaaggagcacgagtacctgggcaacctgagcaccgtgctgcccaccgagggcaccctgcaggagaacgtgagcgaggccagcaaggaggtgagcgagaaggccaagaccctgctgatcgacagagacctgaccgagttcagcgagctggagtacagcgagatgggcagcagcttcagcgtgagccccaaggccgagagcgccgtgatcgtggccaaccccagagaggagatcatcgtgaagaacaaggacgaggaggagaagctggtgagcaacaacatcctgcacaaccagcaggagctgcccaccgccctgaccaagctggtgaaggaggacgaggtggtgagcagcgagaaggccaaggacagcttcaacgagaagagagtggccgtggaggcccccatgagagaggagtacgccgacttcaagcccttcgagagagtgtgggaggtgaaggacagcaaggaggacagcgacatgctggccgccggcggcaagatcgagagcaacctggagagcaaggtggacaagaagtgcttcgccgacagcctggagcagaccaaccacgagaaggacagcgagagcagcaacgacgacaccagcttccccagcacccccgagggcatcaaggacagaagcggcgcctacatcacctgcgcccccttcaaccccgccgccaccgagagcatcgccaccaacatcttccccctgctgggcgaccccaccagcgagaacaagaccgacgagaagaagatcgaggagaagaaggcccagatcgtgaccgagaagaacaccagcaccaagaccagcaaccccttcctggtggccgcccaggacagcgagaccgactacgtgaccaccgacaacctgaccaaggtgaccgaggaggtggtggccaacatgcccgagggcctgacccccgacctggtgcaggaggcctgcgagagcgagctgaacgaggtgaccggcaccaagatcgcctacgagaccaagatggacctggtgcagaccagcgaggtgatgcaggagagcctgtaccccgccgcccagctgtgccccagcttcgaggagagcgaggccacccccagccccgtgctgcccgacatcgtgatggaggcccccctgaacagcgccgtgcccagcgccggcgccagcgtgatccagcccagcagcagccccctggaggccagcagcgtgaactacgagagcatcaagcacgagcccgagaacccccccccctacgaggaggccatgagcgtgagcctgaagaaggtgagcggcatcaaggaggagatcaaggagcccgagaacatcaacgccgccctgcaggagaccgaggccccctacatcagcatcgcctgcgacctgatcaaggagaccaagctgagcgccgagcccgcccccgacttcagcgactacagcgagatggccaaggtggagcagcccgtgcccgaccacagcgagctggtggaggacagcagccccgacagcgagcccgtggacctgttcagcgacgacagcatccccgacgtgccccagaagcaggacgagaccgtgatgctggtgaaggagagcctgaccgagaccagcttcgagagcatgatcgagtacgagaacaaggagaagctgagcgccctgccccccgagggcggcaagccctacctggagagcttcaagctgagcctggacaacaccaaggacaccctgctgcccgacgaggtgagcaccctgagcaagaaggagaagatccccctgcagatggaggagctgagcaccgccgtgtacagcaacgacgacctgttcatcagcaaggaggcccagatcagagagaccgagaccttcagcgacagcagccccatcgagatcatcgacgagttccccaccctgatcagcagcaagaccgacagcttcagcaagctggccagagagtacaccgacctggaggtgagccacaagagcgagatcgccaacgcccccgacggcgccggcagcctgccctgcaccgagctgccccacgacctgagcctgaagaacatccagcccaaggtggaggagaagatcagcttcagcgacgacttcagcaagaacggcagcgccaccagcaaggtgctgctgctgccccccgacgtgagcgccctggccacccaggccgagatcgagagcatcgtgaagcccaaggtgctggtgaaggaggccgagaagaagctgcccagcgacaccgagaaggaggacagaagccccagcgccatcttcagcgccgagctgagcaagaccagcgtggtggacctgctgtactggagagacatcaagaagaccggcgtggtgttcggcgccagcctgttcctgctgctgagcctgaccgtgttcagcatcgtgagcgtgaccgcctacatcgccctggccctgctgagcgtgaccatcagcttcagaatctacaagggcgtgatccaggccatccagaagagcgacgagggccaccccttcagagcctacctggagagcgaggtggccatcagcgaggagctggtgcagaagtacagcaacagcgccctgggccacgtgaactgcaccatcaaggagctgagaagactgttcctggtggacgacctggtggacagcctgaagttcgccgtgctgatgtgggtgttcacctacgtgggcgccctgttcaacggcctgaccctgctgatcctggccctgatcagcctgttcagcgtgcccgtgatctacgagagacaccaggcccagatcgaccactacctgggcctggccaacaagaacgtgaaggacgccatggccaagatccaggccaagatccccggcctgaagagaaaggccgagtag

SEQ ID NO: 327292 - DNA, 276 bp, Artificial Sequence
  derived and/or modified sequence
atggacctgaaggagcagcccggcaacaccatcagcgccggccaggaggacttccccagcgtgctgctggagaccgccgccagcctgcccagcctgagccccctgagcgccgccagcttcaaggagcacgagtacctgggcaacctgagcaccgtgctgcccaccgagggcaccctgcaggagaacgtgagcgaggccagcaaggaggtgagcgagaaggccaagaccctgctgatcgacagagacctgaccgagttcagcgagctggagtactag

SEQ ID NO: 327293 - protein, 418 aa, Artificial Sequence
  derived and/or modified sequence
MFSPDQENHPSKAPVKYGELIVLGYNGSLPNGDRGRRKSRFALFKRPKANGVKPSTVHIACTPQAAKAISNKDQHSISYTLSRAQTVVVEYTHDSNTDMFQIGRSTESPIDFVVTDTVPGSQSNSDTQSVQSTISRFACRIICERNPPFTARIYAAGFDSSKNIFLGEKAAKWKTSDGQMDGLTTNGVLVMHPRNGFTEDSKPGIWREISVCGNVFSLRETRSAQQRGKMVEIETNQLQDGSLIDLCGATLLWRTAEGLSHTPTVKHLEALRQEINAARPQCPVGFNTLAFPSMKRKDVVDEKQPWVYLNCGHVHGYHNWGNKEERDGKDRECPMCRSVGPYVPLWLGCEAGFYVDAGPPTHAFSPCGHVCSEKTTAYWSQIPLPHGTHTFHAACPFCAHQLAGEQGYIRLIFQGPLD

SEQ ID NO: 327294 - DNA, 1257 bp, Artificial Sequence
  derived and/or modified sequence
atgttcagccccgaccaggagaaccaccccagcaaggcccccgtgaagtacggcgagctgatcgtgctgggctacaacggcagcctgcccaacggcgacagaggcagaagaaagagcagattcgccctgttcaagagacccaaggccaacggcgtgaagcccagcaccgtgcacatcgcctgcaccccccaggccgccaaggccatcagcaacaaggaccagcacagcatcagctacaccctgagcagagcccagaccgtggtggtggagtacacccacgacagcaacaccgacatgttccagatcggcagaagcaccgagagccccatcgacttcgtggtgaccgacaccgtgcccggcagccagagcaacagcgacacccagagcgtgcagagcaccatcagcagattcgcctgcagaatcatctgcgagagaaacccccccttcaccgccagaatctacgccgccggcttcgacagcagcaagaacatcttcctgggcgagaaggccgccaagtggaagaccagcgacggccagatggacggcctgaccaccaacggcgtgctggtgatgcaccccagaaacggcttcaccgaggacagcaagcccggcatctggagagagatcagcgtgtgcggcaacgtgttcagcctgagagagaccagaagcgcccagcagagaggcaagatggtggagatcgagaccaaccagctgcaggacggcagcctgatcgacctgtgcggcgccaccctgctgtggagaaccgccgagggcctgagccacacccccaccgtgaagcacctggaggccctgagacaggagatcaacgccgccagaccccagtgccccgtgggcttcaacaccctggccttccccagcatgaagagaaaggacgtggtggacgagaagcagccctgggtgtacctgaactgcggccacgtgcacggctaccacaactggggcaacaaggaggagagagacggcaaggacagagagtgccccatgtgcagaagcgtgggcccctacgtgcccctgtggctgggctgcgaggccggcttctacgtggacgccggcccccccacccacgccttcagcccctgcggccacgtgtgcagcgagaagaccaccgcctactggagccagatccccctgccccacggcacccacaccttccacgccgcctgccccttctgcgcccaccagctggccggcgagcagggctacatcagactgatcttccagggccccctggactag

SEQ ID NO: 327295 - DNA, 3750 bp, Artificial Sequence
  derived and/or modified sequence
ggctagacccctcccctccttgcgagtgtatgtcagtgacccagaggcggtgtgaggcggagggaccgtcggggggcgccgccgccgcctccactagcagcagcggcagcagccctagtcccgcggtgcggtcgaattggtccccagccctccgggagcgcaccacaaagcagccccaacgcctctccctgcgtccgcggctcctcagcgctcggctccgtggtcaacttcccctcgctgggctcggctggcgggcgcggagggcagcggcggaacggcgggctgtctgctcgcgctccccgcgcacaacacttcaccctctcgcctcgggtctcgggggccgctctgggatcccggccaccagcaattgtccggaaataatgcaaaaggtgtcccaaggctcctgaccagtgaacaaagatttgagaaagacagccaagctcatgttttctcctgatcaagaaaatcatccatctaaagcaccagtaaaatatggtgaactcattgtcttagggtataatgggtctctcccaaatggcgatagaggaaggaggaaaagtaggtttgctttgtttaaaagacctaaggcaaatggggtgaagcccagcactgtgcatattgcttgtactcctcaggctgcaaaggcaataagcaacaaagaccagcatagcatatcatatactttatctcgggcccagactgtggtggttgaatatactcatgacagcaacaccgatatgtttcagattggccggtcgactgaaagccccattgattttgtagtaactgacacggttcctggaagtcaaagtaattctgatacacagtcagtacaaagcactatatcaagatttgcctgcagaatcatatgtgaacggaatcctccctttacagcacggatttatgctgcaggatttgactcatcaaaaaacatctttcttggggagaaggctgccaaatggaagacatcagatggacagatggatggcttgaccactaatggtgttcttgtgatgcatccacgcaatgggttcacagaagactccaagcctggaatatggagagaaatatcggtgtgtggaaatgtatttagcctacgtgaaaccagatcggctcagcagagaggaaaaatggtggaaattgaaaccaatcagttacaagatggctcgttaattgacctctgtggtgcaacattgttatggcgtactgcagaaggcctttcccacactcctaccgtgaagcatttagaagctttaagacaggaaatcaatgcagcacgacctcagtgccctgtagggttcaacacactagcatttcctagtatgaagaggaaagacgttgtagatgaaaaacaaccatgggtatatctaaactgcggccatgtacatggctatcataactggggaaacaaagaagaacgtgatggaaaagatcgtgaatgtcctatgtgtaggtctgttggtccctatgttcctctgtggcttggatgtgaagctggattttatgtggacgccggccctccaacccatgcgtttagcccgtgtgggcatgtgtgttcagaaaagacaactgcctattggtcccagatcccacttcctcatggtactcatacttttcatgcagcctgtcccttttgtgcacatcagttggctggtgaacaaggctacatcagacttatttttcaaggacctctagactaacagaccattgtcttgcaggactacattataaatttataagctaagtgagttgggttttcgaacctgttgtccacgtcacagtttttctgctctggtcatttgcattaagatgaagaattttttaaaacatttataataaatagtagcaatttctgagcaaaaatctgggaaactcaagcaaaggaatttctgaaagtatcagtcttctgaattctgagttttgaaaatatattttgaggagaaaaagacatagtctaatttgatgccttccttttagtgtttttgaatcacctatcctcagtgctgaaattgttttgtataactgagggtactgttggttcaaactatgttagtttacagtttgttgcaaacattgtaaaatacagcgacatgtatattaacttttttctatttatctttattatagaaaataccttagaatgttcttgatagagtagcatggtaacgatggtgtcacacccttggtgtgaatggtagcttagtgagcaacctagctcaaggatttgcaaagttaggaagaaggacgagagagcctctctccccaccccaatctaaatatggaatttggtaaattagaatactttgtaatttgtaagaccaaattcatactaattacccgcgtgaaaggtgtttgtttttaacaacattgaagataatcaggaaagattttttcttaatgtttctctcgagcgtagtactataacaaaaacttaatgctaagaaacattttatatgctcctttggatatgcaatttaatctagattatctatttttctcccatgataactaatctgtttttagtatcagcagcatttggcaagtttattttttggatataaactgtggttcatctgttcactgtttctagaaaaaaatcattgccataagaaaaagtataaattagcaagaaaggagagtgacttgatttgcttttggaaaaagaaatgcttaattaattattctgtatttggccttattcgggcattaggaaatctagagatctaaagggttgaatgacaatagtgcccccgtttttagcagaccagccttaactctgggtttgaatcctaaggagattgccacagtgagacttaaggaaatgtttggttggcagatgagcaccaatgactgcagcgtggagtgacgcactgcatggtctgtttattctctaattccaatatgtcttttgcttccagaagcaagaaaagtttcttctctcccctccttcccacccttttttcaaaggcaccacaagtatagacagttgcactacatcaaatctttttttgacacttgtagaaaccagtacacttttagattagacagtatcttcttttaatattttgatttgttttcctttagtttgaaaagttgtataatacttaactgactgtagcaaagttttatatgtggtagcatacctttaatttatcctattacaaaactgttctgaattttcttttggtttttaaaaaacaaaacttgttgcttagaagccatgaattattttattttacttcaactgtcgaaacttccttgttttaaaaaatgatcatttgggttcactcaggaaatgcatgtcaggaaacttgtattataagtttattagttgtgatgtatcagtaactgctgttacccctttttcaaagaaatgtaattgattttgaagttttctagattgtcacatgctttgtgactaatgcaagaaagcaagtcctgtgttgtatttgttctagtcatttttattcaggctatatattgtagcttaatttttatttgcaattaatttatttaaactaagtaaatacttttcaaaatacataattgaattcgtctctgtgagttcatttttgcataatcgagaatgagaaaccagaagtgaaaactgtgaacaactctattccacactccaaaaatactcatttgaaatagatgaagagtttgcatttaatgtaacactttaaagtatctggttcttttttaaaagcatctcttactaataaaggaactttgttagtggttgaataa

SEQ ID NO: 327296 - DNA, 1257 bp, Artificial Sequence
  derived and/or modified sequence
atgttctcacccgaccaggagaatcatccctcgaaagccccagttaagtacggggaactgatagtgctcggctacaatggaagcctgcctaatggggaccgggggcgacgcaaaagcaggtttgccctgtttaaacgccctaaagcgaatggggtcaagccctccacagtgcacatcgcctgcacgccccaggctgccaaagctatcagcaataaagaccagcactccattagctataccctcagccgcgcacaaacagtagtcgtggagtacacgcacgactcaaacactgatatgtttcagattggcagaagcacagaatcccctatcgactttgtggtgacagataccgtgccgggtagtcagagcaattcggacacgcagtcggtgcagtctaccatctccagattcgcttgtaggattatttgcgagcggaacccgccattcacagctaggatctatgctgccggttttgacagcagcaaaaatattttcctgggcgagaaggccgcaaaatggaagaccagcgatggtcagatggatggtcttacgacaaacggagtgctcgtcatgcatccaagaaatggcttcacagaggactccaaacctggcatatggcgcgaaatttctgtgtgtgggaacgtcttctccttgcgggagacgcgctccgcacagcagagagggaaaatggtggaaatcgaaacaaaccagctccaggatgggagtctgatcgacctgtgcggggctacactgctgtggcgtacagctgaaggattgtctcatacacctacggtgaaacacctggaagccctcagacaagaaatcaacgccgctcgcccccagtgcccagtcggcttcaatacactggcgtttccaagtatgaagaggaaggacgttgtggatgaaaagcagccatgggtgtatttaaactgtggccacgtgcacggttatcataactgggggaacaaagaagaacgggacggcaaggatagggagtgccccatgtgcaggtcagtcggtccctacgtgcctctttggctggggtgtgaggccggattttatgtggacgctggtccccctacccatgctttttcgccatgtggacatgtctgcagtgagaagacgactgcctattggtctcagatcccgctgccccacggcacccatacgttccacgccgcctgtcccttctgtgcgcaccagctggccggcgaacagggatacattaggctgatttttcagggccccttagactag

SEQ ID NO: 327297 - DNA, 1257 bp, Artificial Sequence
  derived and/or modified sequence
atgttctccccagaccaggagaaccaccccagcaaggcccctgtgaagtatggagagctgattgtgctgggctacaacggcagcctgcccaatggagaccggggccgcaggaagagcagatttgccctcttcaagaggcccaaggccaacggggtgaagcccagcacagtgcacatcgcctgcaccccccaggccgccaaggccatcagcaacaaggaccagcacagcatctcctacaccctgagccgggcccagacagtggtggtggagtacacccatgacagcaacacagacatgttccagatcggccgcagcacagagagccccatcgactttgtggtgacagacacagtgcccggcagccagagcaacagcgacacccagagcgtgcagagcaccatcagcagatttgcctgccgcatcatctgtgaaagaaatccacccttcaccgcccgcatctatgctgctggctttgacagcagcaagaacatcttcctgggggagaaggccgccaagtggaagaccagtgatggccagatggatggcctgaccaccaacggggtgctggtgatgcaccccagaaatggcttcacagaggacagcaagccaggcatctggagggagatctctgtgtgtggaaatgtgttcagcctgcgggagaccaggtctgcccagcagaggggcaagatggtggagattgagaccaaccagctgcaggacggcagcctgattgacctgtgtggggccaccctgctgtggaggacagctgagggcctgagccacacccccaccgtgaagcacctggaggccctgcggcaggagatcaatgctgcccggccccagtgccctgtgggcttcaacaccctggccttccccagcatgaagaggaaggatgtggtggatgagaagcagccctgggtgtacctgaactgtggccacgtgcacggctaccacaactggggcaacaaggaggagagagatggcaaggaccgggagtgccccatgtgccgctctgtgggcccctacgtgcccctgtggctgggctgtgaggccggcttctacgtggatgctggcccccccacccacgccttcagcccctgtggccacgtgtgcagcgagaagaccacagcctactggagccagatccccctgccccacggcacccacaccttccacgccgcctgccccttctgtgcccaccagctggccggggagcagggctacatccgcctcatcttccagggccccctggactag

SEQ ID NO: 327298 - DNA, 1257 bp, Artificial Sequence
  derived and/or modified sequence
atgttcagccccgaccaggagaaccaccccagcaaggcccccgtgaagtacggagaactgatcgtgctggggtataatggtagcttacccaacggagatcggggcagaagaaagtccagattcgccctcttcaaacgacctaaagcaaacggtgtgaagccctctactgtccacattgcgtgcaccccccaggcggccaaggctatatcaaataaggatcagcatagcatcagttacactctttctcgggcacagactgtggtggtggaatacacacacgacagcaataccgacatgtttcagatcggtcgcagcactgagtccccaatcgatttcgtggtgaccgatactgttccaggctcacagtctaatagcgacactcagagcgtccaaagcacaatctctcgttttgcttgccgaatcatatgtgaaagaaatccccctttcaccgcccgtatttatgctgccggcttcgacagtagtaaaaatattttcctcggggagaaggccgctaaatggaagacatcagacgggcagatggacggactgaccacaaacggagtcttggtgatgcatccaaggaacggtttcacggaggatagtaaaccagggatctggcgggagatcagtgtttgcggtaatgtgttttccttgagggaaactcggtccgcacaacagcgcggaaagatggtcgaaattgaaacaaaccaacttcaggacggctcgctgattgatctgtgcggtgctacactactttggaggacagctgagggtctgagtcatactcccacagtgaagcatctggaggccctgcgacaggaaattaatgctgccaggcctcagtgtccagtgggatttaatacactcgcatttcctagcatgaaaaggaaggacgtggtggatgaaaagcagccttgggtgtatcttaattgtggccatgtccacggctaccacaactgggggaacaaagaggagagagatgggaaggatcgagaatgccccatgtgtcggagcgtggggccatacgtgcctctttggttgggctgcgaggccggcttttatgtcgacgccggtcctcccactcacgcctttagcccttgcggtcatgtctgttcggaaaaaacaacggcatactggtctcaaattccgctgccacacggcacgcatacctttcatgcagcctgtcctttttgtgcccatcaactggccggtgagcagggatacatacggcttatctttcagggcccgttagattag

SEQ ID NO: 327299 - DNA, 1257 bp, Artificial Sequence
  derived and/or modified sequence
atgttttctcccgatcaggagaaccaccccagcaaagcgccagtcaagtatggagagcttatcgtgctcggttataatgggagcctccccaatggtgatcggggaagaaggaaaagccgttttgccttgtttaaaaggccaaaggctaacggagtaaaaccatcaactgtccacatagcatgcactccccaagccgctaaagccatctctaataaggaccagcactctatatcctacactctttcccgggcacagaccgtggtcgtggagtacacccacgactccaataccgacatgttccagatagggagatcgacggaaagccctattgattttgtcgttacagatactgtccccggatcacagagtaattcggacacacagagtgtacaaagcactattagccgttttgcatgcagaatcatctgtgaacgtaatcccccttttacagctaggatttatgccgctggttttgactcatccaagaacatctttctgggggaaaaggccgctaagtggaagacatcagatggtcagatggatggcctgaccacaaacggagttttggtaatgcacccaaggaacggtttcacggaagactctaagcccggtatctggcgcgagatcagcgtttgtggcaacgtgttttcactgagggagacccgctccgctcagcagcggggaaaaatggttgaaatcgaaactaaccaattacaggatgggagtctgatcgatctttgcggcgctactctcctctggcgtacagcagaagggctgagtcatacccctactgtgaaacatttggaggcccttcgacaggagattaacgctgcccgtccccagtgcccagtcggcttcaatacgctcgcgttcccttccatgaaacgtaaggacgtggttgacgagaagcagccatgggtgtaccttaactgcggacacgtgcatgggtatcacaattggggtaacaaggaggagagagacggtaaggaccgggagtgtcctatgtgtcgatctgtaggtccatatgtgccgctgtggttggggtgtgaagccggtttctatgtcgacgcgggtcctccgactcacgccttttctccctgtggacacgtgtgttctgagaagaccacggcatactggtctcagatccccctgccacacggcactcacacatttcacgccgcatgcccattttgtgcgcatcagcttgcgggtgagcaaggatacatccggttgatcttccagggccctctggattag

SEQ ID NO: 327300 - DNA, 441 bp, Artificial Sequence
  derived and/or modified sequence
atggccgccaagggcgcccacggcagctacctgaaggtggagagcgagctggagagatgcagagccgagggccactgggacagaatgcccgagctggtgagacagctgcagaccctgagcatgcccggcggcggcggcaacagaagaggcagccccagcgccgccttcaccttccccgacaccgacgacttcggcaagctgctgctggccgaggccctgctggagcagtgcctgaaggagaaccacgccaagatcaaggacagcatgcccctgctggagaagaacgagcccaagatgagcgaggccaagaactacctgagcagcatcctgaaccacggcagactgagcggcctggccgtgctgctgagactggtgagcaacagctgggcccaggccatcctgctgctgcagccccccgaggccctgggcctgcaggagtag

SEQ ID NO: 327301 - DNA, 441 bp, Artificial Sequence
  derived and/or modified sequence
atggcagccaaaggagcccacggaagctacttgaaggtcgaaagcgagctcgaaagatgtcgcgcagagggccactgggataggatgcctgagctggtgagacaactccaaactctgagtatgcccggcggcggcggaaaccggagaggctcccccagtgcagcttttacctttcccgacaccgatgactttggcaagcttttgctggcagaagcgctgctggaacagtgcctgaaggaaaatcacgcgaagataaaagactcaatgccccttctggaaaagaatgagcctaaaatgtccgaagctaaaaattatctgtcttctatactcaaccatggacgtctgagcggcttggctgtactgctgagactagtttccaactcctgggcccaggccatcttgttattgcaaccccctgaagcattagggctccaagagtag

SEQ ID NO: 327302 - DNA, 441 bp, Artificial Sequence
  derived and/or modified sequence
atggccgccaagggggcccacggcagctacctgaaggtggagagcgagctggagcgctgcagagctgagggccactgggacaggatgcctgagctggtgcggcagctgcagaccctgtccatgcctgggggcggcggcaacagaagaggcagccccagcgctgccttcaccttcccagacacagatgactttgggaagctgctgctggccgaggccctgctggagcagtgcctgaaggagaaccacgccaagatcaaggacagcatgcccctgctggagaagaatgagcccaagatgtctgaggccaagaactacctgagcagcatcctgaaccacggccgcctgagcggcctggccgtgctgctgcggctggtgagcaacagctgggcccaggccatcctgctgctgcagcccccagaggccctgggcctgcaggagtag

SEQ ID NO: 327303 - DNA, 441 bp, Artificial Sequence
  derived and/or modified sequence
atggccgccaagggcgcccacggcagctacctgaaggtggagagcgaactcgaaagatgccgagctgaggggcactgggaccgaatgccggaattagttaggcagctccagacattatctatgccaggcggcggaggcaataggcgtggaagcccttccgccgccttcaccttccccgacaccgacgatttcggcaagctgcttcttgccgaagctctcctcgagcagtgtctgaaggagaatcacgcgaagattaaagactccatgccccttctcgaaaagaacgaacccaagatgtcagaagctaaaaactacctgtctagcatcctgaatcacgggagactctccggtttggccgtattactgaggctcgtctccaacagctgggctcaggctattctcctcctgcaacctccagaggcactcgggctgcaggaatag

SEQ ID NO: 327304 - DNA, 441 bp, Artificial Sequence
  derived and/or modified sequence
atggctgccaagggtgcccatggatcctacctgaaagtggagtccgaactggagaggtgtcgagcagaggggcattgggacagaatgcctgagctagtcagacaactccagaccttaagtatgcccggaggcggtggaaataggagaggtagcccctccgctgcgttcaccttccccgacaccgatgattttggcaagctgttgctggcggaagctctgctggagcagtgcctcaaggagaatcacgcaaaaattaaagattctatgcctctacttgaaaagaatgagcctaagatgtcggaagcaaagaattatctgtcctcaattctcaatcacgggagactgtccggcttagctgttttgttgaggcttgtgagtaatagctgggctcaagccatcctactgctgcaaccacctgaggctttaggtctgcaggagtag

SEQ ID NO: 327305 - DNA, 697 bp, Artificial Sequence
  derived and/or modified sequence
ggttgctcctgtacgcgtacgggccgctcggccggagccgcagcccggaggcgccgggcggtgcgctgggagctgctggtgctgctgctgctgctgctgcccaccctccgccgcccgggcccccgctgccgcccgggccccggctgccgtctgcgcccccgtcgaccccgcccgcgagtgcgccccagccaggacgccgcccccggccgggtctccacttcttggccgcaccttccatgacagcgcccgcgagaagatggctgcgaagggcgcgcacggctcctacctgaaggtggagagcgagctggagcgctgccgcgccgagggccactgggaccgcatgccggagctggtccggcagctgcagacgctgagcatgcccggcggcggaggtaacaggcgaggcagcccgagcgcagcgttcacctttccggacaccgatgactttgggaaattgctgctggctgaggccctcctggagcagtgtttgaaggagaaccatgccaaaataaaagactccatgcctttgctggagaagaatgagccgaagatgagcgaagccaaaaattatctaagcagtatccttaaccatgggaggctctcgggtctcgctgtgttactcaggctggtctccaactcctgggctcaagcgatcctcctacttcagcctcccgaagcgttgggattacaggagtga

SEQ ID NO: 327306 - protein, 559 aa, Artificial Sequence
  derived and/or modified sequence
MTKTHVIAASKEAFYTWQYRVAKKLTALEINQITRSRKEGRERIYHVDDTPSGSMDGVLDYSKTIQGTRDPICAITASDKILIVGRESGTIQRYSLPNVGLIQKYSLNCRAYQLSLNCNSSRLAIIDISGVLTFFDLDARVTDSTGQQVVGELLKLERRDVWDMKWAKDNPDLFAMMEKTRMYVFRNLDPEEPIQTSGYICNFEDLEIKSVLLDEILKDPEHPNKDYLINFEIRSLRDSRALIEKVGIKDASQFIEDNPHPRLWRLLAEAALQKLDLYTAEQAFVRCKDYQGIKFVKRLGKLLSESMKQAEVVGYFGRFEEAERTYLEMDRRDLAIGLRLKLGDWFRVLQLLKTGSGDADDSLLEQANNAIGDYFADRQKWLNAVQYYVQGRNQERLAECYYMLEDYEGLENLAISLPENHKLLPIADEEAKKGSKPLRVKKLYVLSALLIEQYHEQMKNAQRGKVKGKSSEATSALAGLLEEEVLSTTDRFTDNAWRGAEAYHFFILAQRQLYEGCVDTALKTVEKGNCQHALPQEAQSLSINSGCAVYANTVSLLRK

SEQ ID NO: 327307 - DNA, 1680 bp, Artificial Sequence
  derived and/or modified sequence
atgaccaagacccacgtgatcgccgccagcaaggaggccttctacacctggcagtacagagtggccaagaagctgaccgccctggagatcaaccagatcaccagaagcagaaaggagggcagagagagaatctaccacgtggacgacacccccagcggcagcatggacggcgtgctggactacagcaagaccatccagggcaccagagaccccatctgcgccatcaccgccagcgacaagatcctgatcgtgggcagagagagcggcaccatccagagatacagcctgcccaacgtgggcctgatccagaagtacagcctgaactgcagagcctaccagctgagcctgaactgcaacagcagcagactggccatcatcgacatcagcggcgtgctgaccttcttcgacctggacgccagagtgaccgacagcaccggccagcaggtggtgggcgagctgctgaagctggagagaagagacgtgtgggacatgaagtgggccaaggacaaccccgacctgttcgccatgatggagaagaccagaatgtacgtgttcagaaacctggaccccgaggagcccatccagaccagcggctacatctgcaacttcgaggacctggagatcaagagcgtgctgctggacgagatcctgaaggaccccgagcaccccaacaaggactacctgatcaacttcgagatcagaagcctgagagacagcagagccctgatcgagaaggtgggcatcaaggacgccagccagttcatcgaggacaacccccaccccagactgtggagactgctggccgaggccgccctgcagaagctggacctgtacaccgccgagcaggccttcgtgagatgcaaggactaccagggcatcaagttcgtgaagagactgggcaagctgctgagcgagagcatgaagcaggccgaggtggtgggctacttcggcagattcgaggaggccgagagaacctacctggagatggacagaagagacctggccatcggcctgagactgaagctgggcgactggttcagagtgctgcagctgctgaagaccggcagcggcgacgccgacgacagcctgctggagcaggccaacaacgccatcggcgactacttcgccgacagacagaagtggctgaacgccgtgcagtactacgtgcagggcagaaaccaggagagactggccgagtgctactacatgctggaggactacgagggcctggagaacctggccatcagcctgcccgagaaccacaagctgctgcccatcgccgacgaggaggccaagaagggcagcaagcccctgagagtgaagaagctgtacgtgctgagcgccctgctgatcgagcagtaccacgagcagatgaagaacgcccagagaggcaaggtgaagggcaagagcagcgaggccaccagcgccctggccggcctgctggaggaggaggtgctgagcaccaccgacagattcaccgacaacgcctggagaggcgccgaggcctaccacttcttcatcctggcccagagacagctgtacgagggctgcgtggacaccgccctgaagaccgtggagaagggcaactgccagcacgccctgccccaggaggcccagagcctgagcatcaacagcggctgcgccgtgtacgccaacaccgtgagcctgctgagaaagtag

SEQ ID NO: 327308 - DNA, 1680 bp, Artificial Sequence
  derived and/or modified sequence
atgaccaagacacacgtgattgccgctagtaaggaggctttctacacctggcagtaccgcgtggccaagaagttaaccgcccttgaaattaaccagatcaccagatcacgcaaggagggccgagaacggatctaccacgtcgatgatacccctagtgggtctatggatggcgtgctggattactctaaaacaatacagggcacaagggatccaatctgcgccattacagcctccgacaaaattttgattgtgggcagggagtccggtaccatccagcgctatagtttgcctaacgtcgggcttatccagaaatacagcctgaactgtagggcctaccagttatccctgaattgcaactctagcaggctggctatcattgacatcagcggagtactgacatttttcgacctcgatgccagagtcaccgacagcacaggtcagcaggtggtaggcgagctgttaaaactggaacgaagggatgtgtgggacatgaagtgggccaaggataatccagacctgttcgctatgatggagaaaactcgcatgtatgtgttccgcaacctcgacccagaagaacctattcaaactagcggttacatctgtaattttgaggatctggagataaaatccgtcctgctggacgagatcttgaaggaccccgagcacccaaacaaggactatctcattaatttcgagatccgctcactcagggactctcgtgccctaatcgaaaaagtcgggataaaagacgcttcacagtttattgaggacaatccacaccctagactctggaggctgctggccgaagcagctcttcaaaagctggacctctatacagcggagcaagcgtttgtgaggtgcaaggactaccaggggataaagtttgtgaaaaggctcgggaaattgctcagtgagagtatgaagcaggcagaagtggtgggttattttggtaggttcgaagaggctgagcgaacttatctggagatggatcggcgggacctggccataggactgaggttaaagctgggcgactggtttagggtactgcagttgctcaaaactggatcaggggatgctgatgattctctgctggagcaagcaaacaatgccatcggggactattttgccgatcgtcagaagtggctcaatgctgttcagtattacgttcaaggaagaaatcaggagaggctcgctgaatgctattacatgttggaggattacgaaggtcttgagaacctcgccatttcgctacccgaaaatcataagttgctccccatcgcagacgaggaggctaaaaaggggagcaaaccactacgagtgaaaaaactgtacgtgctgtctgcactgttgattgagcagtatcacgaacaaatgaaaaatgctcaacgcgggaaggtgaaaggtaagagctccgaggccacctcagctttggccgggctgctagaggaggaggtattgagcacaactgatagatttacagataacgcctggcggggagcggaagcctaccactttttcatactggcccagaggcaactttatgagggttgcgtggacacagcacttaagactgttgagaaggggaattgccagcatgctctgcctcaggaggcgcagtcactctcaatcaattcaggttgcgccgtttacgccaatacagtatccttactgcggaaatag

SEQ ID NO: 327309 - DNA, 1680 bp, Artificial Sequence
  derived and/or modified sequence
atgaccaagacccacgtgattgctgccagcaaggaggccttctacacctggcagtacagagtggccaagaagctgacagccctggagatcaaccagatcaccaggagcaggaaggagggccgggagcgcatctaccacgtggatgacacccccagcggctccatggatggagtgctggactacagcaagaccatccagggcacccgggaccccatctgtgccatcacagccagtgacaagatcctgattgtgggccgggagagcggcaccatccagcgctacagcctgcccaacgtgggcctcatccagaagtacagcctgaactgccgggcctaccagctgagcctgaactgcaacagcagccggctggccatcatcgacatctctggagtgctgaccttctttgacctggatgcccgggtgacagacagcacaggccagcaggtggtgggggagctgctgaagctggagaggagagatgtgtgggacatgaagtgggccaaggacaacccagacctgtttgccatgatggagaagaccaggatgtatgtgttcaggaacctggaccctgaggagcccatccagaccagcggctacatctgcaactttgaggacctggagatcaagtctgtgctgctggatgagatcctgaaggaccctgagcaccccaacaaggactacctgatcaactttgagatccgcagcctgcgggacagccgggccctgattgagaaggtgggcatcaaggatgccagccagttcatcgaggacaacccccacccccggctgtggaggctgctggccgaggccgccctgcagaagctggacctgtacacagctgagcaggcctttgtgcgctgcaaggactaccagggcatcaagtttgtgaagaggctgggcaagctgctgtctgagagcatgaagcaggccgaggtggtgggctacttcggccgctttgaggaggccgagaggacctacctggagatggacagaagagacctggccatcggcctgcggctgaagctgggggactggttccgggtgctgcagctgctgaagacaggcagcggagatgctgatgacagcctgctggagcaggccaacaatgccatcggggactactttgctgaccggcagaagtggctgaatgctgtgcagtactacgtgcagggcaggaaccaggagcggctggccgagtgctactacatgctggaggactatgagggcctggagaacctggccatcagcctgcctgagaaccacaagctgctgcccatcgcagatgaggaggccaagaagggcagcaagcccctgcgggtgaagaagctgtatgtgctgagcgccctgctgattgagcagtaccacgagcagatgaagaatgcccagaggggcaaggtgaagggcaagagcagcgaggccaccagcgccctggccggcctgctggaggaggaggtgctgagcaccacagaccgcttcacagacaatgcctggagaggagctgaggcctaccacttcttcatcctggcccagaggcagctgtatgagggctgtgtggacacagccctgaagacagtggagaagggcaactgccagcacgccctgccccaggaggcccagagcctgagcatcaacagcggctgtgctgtgtatgccaacacagtgtccctgctgaggaagtag

SEQ ID NO: 327310 - DNA, 1680 bp, Artificial Sequence
  derived and/or modified sequence
atgaccaagacccacgtgatcgccgccagcaaggaggccttctacacatggcagtatcgtgttgctaaaaaactgacagcactggaaatcaaccagataactagatcgagaaaggagggcagggagagaatttaccacgtggatgacactccatccggatctatggacggggtgctggactattctaagacgatccaggggacacgcgaccccatttgtgccatcactgccagcgacaagatcctaatcgtgggtagagagtctggaaccattcagcgatactccttgccaaatgtgggcctgattcagaagtactcacttaattgtcgtgcatatcagctcagtttaaactgcaatagctctagacttgccatcattgacattagtggcgttctgaccttctttgacctggatgctagagtgactgactccacaggtcagcaggtggtgggtgaactgctgaagctggagcggagggacgtgtgggacatgaagtgggccaaagacaatccagacctgttcgcaatgatggaaaagacacgcatgtatgtgtttcgcaaccttgaccctgaggagccgatccagactagcggctacatctgtaatttcgaagatctggagatcaaatctgtgctgctagacgaaatcctgaaggatcccgaacatcctaacaaagattatcttattaacttcgagataaggtctctcagagattctcgcgcactaatcgaaaaggtgggtatcaaagatgcttctcagttcatcgaagacaatccgcatcccagactctggcggctgctcgccgaggccgccttacagaaacttgatctatataccgcggagcaggccttcgtcaggtgtaaggattaccaaggaataaagtttgtgaagcgactgggcaagttactgtctgaatctatgaaacaagctgaggtggtgggctactttggccggtttgaggaagccgaaagaacatatcttgagatggatcggcgggatttggccatcggactacgtttgaagctgggcgattggtttcgcgtgctccaactgttgaagaccggatctggagacgcagatgacagccttctcgagcaagcaaataacgccataggcgattattttgcagataggcagaaatggctcaacgccgttcagtactacgtgcagggccggaaccaggaacgtctcgctgagtgctattacatgctggaagactatgaaggcctcgagaatctcgccattagcctgccggagaatcacaagttacttccgatcgctgacgaggaagcaaagaaaggttcaaagcccctcagagtaaaaaagctttacgtgttgagcgccctcctgatcgagcaataccatgagcagatgaaaaacgcgcaaagggggaaagtgaagggcaaatcatcagaagctacctccgccttggctggcctgctagaggaggaggtgttgtcaaccaccgacaggttcacagataatgcatggagaggcgccgaggcatatcacttcttcatactggctcagcgccagctttatgaaggatgcgtagataccgctttgaagacagtggagaaggggaactgtcaacacgcccttccccaggaggctcagagtctttccattaattccgggtgtgcagtctacgccaacacagtatcactgctgcggaaatag

SEQ ID NO: 327311 - DNA, 1680 bp, Artificial Sequence
  derived and/or modified sequence
atgacaaaaacccatgttattgccgctagcaaggaggctttctacacctggcagtaccgcgtggccaaaaagctgacagcgcttgaaattaatcagatcacccgctcccggaaagagggcagggagcgcatctatcatgttgatgatacaccttcaggttcaatggacggcgtcctcgactattcaaagacaatccagggcacccgcgaccctatctgcgctataaccgctagtgacaaaatcttgatcgttggaagagagtctgggaccattcagagatactccttgcctaatgtcggcctgatacagaagtacagtctgaactgtcgagcttatcaattgtcgctaaactgtaactctagtaggctcgcgatcatcgatatttccggagttttaactttttttgatctggacgcgagggtaaccgacagcacggggcagcaggtagtgggtgagctgctcaaattggaaaggagagacgtatgggacatgaaatgggccaaagataatcccgacctctttgccatgatggaaaagacaaggatgtacgtgtttcgaaatctcgaccccgaagagcctatccagaccagcggatacatctgcaactttgaggaccttgaaattaagagcgtgttattggacgagatccttaaggatccagaacaccctaataaagactatctaattaactttgagattcgctctttacgggactctagagccctgatcgagaaagtggggattaaagatgcgtctcagtttattgaggataacccacatcctcggctgtggcgtctcctggctgaggctgcactgcaaaagctggatctgtacacagccgaacaggccttcgtgcggtgcaaggactatcagggcatcaagtttgtcaagcgactcgggaagctcctcagtgaatctatgaagcaggcagaggtggtgggatattttggacggttcgaggaagctgagcggacgtacctggagatggatcgaagagatctcgcaattggactccgtctgaagctgggagattggtttcgcgtcctgcagctgctcaaaactgggtccggtgacgctgatgattctttacttgagcaggccaacaatgcaataggcgactacttcgccgatcgccaaaaatggttgaacgccgtacagtattatgtacaagggcgaaaccaggaaagactggccgagtgttactacatgttagaggactatgaaggcctggaaaatctcgctatcagcttacccgagaatcacaagcttttgcccattgcggatgaagaagctaagaagggtagcaagcccctccgagtcaagaaactttacgtcttatccgctcttctcattgagcaataccacgagcagatgaagaatgctcagcggggaaaagtaaagggcaagtcttctgaagctacttccgccttggctgggttgttggaggaagaggtgttgtccaccactgaccgattcaccgacaacgcatggagaggcgctgaagcttaccacttttttatcctcgcacagcggcaactttacgagggatgtgttgacacggccctgaaaacagtggagaagggcaactgtcaacatgcactgccccaggaagctcaatcattgagcatcaatagcggctgcgccgtctatgcaaatacagtgagtctgttgcggaagtag

SEQ ID NO: 327312 - protein, 195 aa, Artificial Sequence
  derived and/or modified sequence
MKLVLIGHSIGSYFTLQMLKRVPELPVIRAFLLFPTIERMSESPNGRIATPLLCWFRYVLYVTGYLLLKPCPETIKSLLIRRGLQVMNLENEFSPLNILEPFCLANAAYLGGQEMMEVVKRDDETIKEHLCKLTFYYGTIDPWCPKEYYEDIKKDFPEGDIRLCEKNIPHAFITHFNQEMADMIADSLKDDLSKM

SEQ ID NO: 327313 - protein, 566 aa, Artificial Sequence
  derived and/or modified sequence
MVLKKGIKFFQRLINSKSLRFGENYEDDDLVNSDEVMKKPCPVQIVLAHEDDHNFELDEEALEQILLQEHIRDLNIVVVSVAGAFRKGKSFLLDFMLRYMYNKDSQSWIGGNNEPLTGFTWRGGCERETTGIQVWNEVFVIDRPNGTKVAVLLMDTQGAFDSQSTIKDCATVFALSTMTSSVQVYNLSQNIQEDDLQHLQLFTEYGRLAMEEIYQKPFQTLMFLIRDWSYPYEHSYGLEGGKQFLEKRLQVKQNQHEELQNVRKHIHNCFSNLGCFLLPHPGLKVATNPSFDGRLKDIDEDFKRELRNLVPLLLAPENLVEKEISGSKVTCRDLVEYFKAYIKIYQGEELPHPKSMLQATAEANNLAAVAGARDTYCKSMEQVCGGDKPYIAPSDLERKHLDLKEVAIKQFRSVKKMGGDEFCRRYQDQLEAEIEETYANFIKHNDGKNIFYAARTPATLFAVMFAMYIISGLTGFIGLNSIAVLCNLVMGLALIFLCTWAYVKYSGEFREIGTVIDQIAETLWEQRSPRKVFSKLFEVTRRRMVHRALSSAQRQRLSSNNNKKKN

SEQ ID NO: 327314 - DNA, 1701 bp, Artificial Sequence
  derived and/or modified sequence
atggtgctcaaaaagggcattaagttttttcaaagactgattaactccaaatctttacgctttggggaaaactacgaggatgatgacttagttaatagcgatgaggtcatgaaaaagccatgccccgtgcagatcgttctcgcacatgaggatgaccataattttgaactcgatgaggaagccttagaacagatactcctgcaagaacacatccgagatttaaacattgtggttgtctccgtggctggcgcctttcgaaagggcaagtcctttctgctggattttatgcttcgatacatgtataacaaggatagccagtcttggatcggcgggaataacgagccccttactggcttcacatggagaggtggctgtgaaagggagacaacgggaatccaggtctggaacgaagtttttgtcatagaccggccaaatggcaccaaggtggctgttctgttgatggatactcagggggctttcgatagtcagagtaccattaaggactgcgctactgttttcgcgctgtccacaatgaccagcagcgtgcaagtttataacttatctcagaacattcaggaagacgatctgcagcacctgcaactgttcacagagtacggcagactggcgatggaagaaatctaccagaagcctttccaaactttaatgtttctgatcagggattggtcttatccctatgagcatagttacggcttggaagggggcaaacagttcttggaaaagcgattacaagtgaagcagaaccagcacgaggaactccagaacgtgagaaaacatatacataattgtttctccaaccttggatgcttcctcttgcctcatcccggtttgaaggttgcaaccaatccatcctttgacgggcgtttaaaggatatcgacgaagacttcaaaagagaactcagaaacttggtgccacttctgctggcgcctgaaaatctcgtggagaaggagatcagtggcagcaaagtaacttgccgggacctggtggagtatttcaaggcttatatcaaaatctaccagggcgaagaacttccacatcctaaaagtatgcttcaggcgaccgctgaagctaacaatcttgcggcagtcgccggggccagggacacctactgtaaaagcatggagcaggtttgcggaggcgataaaccttacatcgcaccaagcgacttagaacgcaagcacctggacctgaaggaggtggctatcaaacaatttcggagcgtgaagaagatgggtggtgatgagttctgccgtaggtaccaggatcagctagaggctgaaatcgaagagacatacgctaactttattaagcacaatgatggtaagaacattttctatgctgcccgcactcccgcaactttattcgcagtgatgttcgcaatgtacataatcagtgggctgaccggatttattggactcaacagcatcgccgttttgtgcaaccttgttatggggctcgccctgatcttcctttgtacctgggcttatgttaagtattccggcgaattcagggagattggtaccgtgatcgaccagatagctgaaactctctgggaacaacggagtcccaggaaggtcttcagcaaattgttcgaggtgacgagacggcggatggtccaccgggccttatctagcgcacagagacagaggttgagctccaacaacaataagaaaaagaactag

SEQ ID NO: 327315 - DNA, 1701 bp, Artificial Sequence
  derived and/or modified sequence
atggtgctgaagaagggcatcaagttcttccagaggctcatcaacagcaagagcctgcgctttggagaaaattatgaagatgatgacctggtgaacagtgatgaggtgatgaagaagccctgccctgtgcagatcgtgctggcccatgaagatgaccacaactttgagctggatgaggaggccctggagcagatcctgctgcaggagcacatccgggacctgaacatcgtggtggtgtctgtggccggggccttcaggaagggcaagagcttcctgctggacttcatgctgcgctacatgtacaacaaggacagccagagctggattggaggcaacaatgagcccctgaccggcttcacctggaggggcggctgtgagcgggagaccaccggcatccaggtgtggaatgaggtgtttgtgattgaccggcccaacggcaccaaggtggccgtgctgctgatggacacccagggcgcctttgacagccagagcaccatcaaggactgtgccaccgtgtttgccctgagcaccatgaccagctctgtgcaggtgtacaacctgagccagaacatccaggaggatgacctgcagcacctgcagctgttcacagaatatggccgcctggccatggaggagatctaccagaagcccttccagaccctgatgttcctgatccgggactggagctacccctatgagcacagctatggcctggagggcggcaagcagttcctggagaagaggctgcaggtgaagcagaaccagcacgaggagctgcagaatgtgaggaagcacatccacaactgcttcagcaacctgggctgcttcctgctgccccaccctggcctgaaggtggccaccaaccccagctttgatggccgcctgaaggacattgatgaggacttcaagcgggagctgaggaacctggtgcccctgctgctggcccctgagaacctggtggagaaggagatcagcggcagcaaggtgacctgccgggacctggtggagtacttcaaggcctacatcaagatctaccagggcgaggagctgccccaccccaagtccatgctgcaggccacagctgaggccaacaacctggccgctgtggccggggcccgggacacctactgcaagtccatggagcaggtgtgtggcggggacaagccctacatcgcccccagcgacctggagaggaagcacctggacctgaaggaggtggccatcaagcagttccgctctgtgaagaagatgggaggagatgagttctgccgccgctaccaggaccagctggaggccgagattgaggagacctacgccaacttcatcaagcacaatgatggcaagaacatcttctatgctgcccggaccccagccaccctgtttgctgtgatgtttgccatgtacatcatcagcggcctgaccggcttcatcggcctgaacagcattgctgtgctgtgcaacctggtgatgggcctggccctgatcttcctgtgcacctgggcctacgtgaagtacagcggggagttccgggagatcggcaccgtcatcgaccagattgctgagaccctgtgggagcagaggagccccaggaaggtgttcagcaagctgtttgaggtgaccaggaggaggatggtgcaccgggccctgagcagcgcccagaggcagaggctgagcagcaacaacaacaagaagaagaactag

SEQ ID NO: 327316 - DNA, 1701 bp, Artificial Sequence
  derived and/or modified sequence
atggtgctgaagaagggcatcaagttcttccagcggctgatcaactctaaatccctgaggtttggtgaaaattatgaggacgacgacctggtgaattccgacgaggtgatgaagaagccgtgcccggtacagatcgtgcttgcccacgaagatgatcacaatttcgagctggatgaagaagccttagaacagattttactccaggaacacatcagagatcttaacattgtagtggtgtccgtagcaggcgcatttcggaagggtaaatcctttctcctcgatttcatgctccgttatatgtacaataaggacagccagtcctggattgggggcaacaatgaacccctgaccgggttcacatggcgcgggggatgtgagagagagacgacaggcattcaagtatggaatgaagtgttcgtgatcgatcgtccaaacgggactaaagttgcggtactgcttatggacacccagggcgcctttgattcacagtcgaccatcaaagattgtgctacggtgttcgcgctaagcactatgacctctagcgtccaggtatacaatcttagtcagaacattcaagaggacgatttacagcacctccaactgtttaccgagtacggtcggctggcaatggaagagatttatcaaaaaccgtttcaaacacttatgttcctgattcgggattggtcttatccgtatgagcactcgtatggactggagggcggcaaacagttcctcgagaaaagactgcaagtgaagcagaaccaacacgaggagttacagaatgtgcgcaagcacatacacaactgtttctccaatttgggatgctttcttctgcctcaccccggcctgaaggtagctactaatccctccttcgatgggagattgaaagacatcgacgaggactttaagcgagaacttaggaatttagttcccctgctcctggcacccgaaaacctggtcgaaaaagagatctccggaagcaaggtgacctgtagagacttagtggagtacttcaaagcatacataaaaatctaccagggagaagaactgcctcatccgaaatcgatgctgcaggccacggccgaagccaataatttggcagccgtggcaggagcccgagacacctactgcaaaagcatggagcaagtgtgcggtggagataagccttacatcgccccctcggacctggaacgcaaacacctcgatctaaaggaagtcgcaatcaaacagttcaggtcagtgaagaagatgggtggcgatgagttctgccggcgctatcaagatcagctggaagccgaaatagaagaaacctacgccaatttcatcaagcataatgacggtaaaaacatcttttacgctgccagaactcctgcgactctgtttgcagtgatgttcgctatgtatatcatctccgggctgacaggtttcataggcttaaattcaatcgcagtcctatgcaatctcgttatgggcctcgctctgatttttttgtgcacctgggcctacgtcaagtactcaggtgaatttcgggaaatcggtactgtcatcgatcagattgcagagacgttgtgggagcagcggagtcctaggaaagttttcagcaagcttttcgaggtcacccggagaaggatggttcacagggccttaagttctgcacagagacagaggctgtcaagtaacaataacaagaaaaagaattag

SEQ ID NO: 327317 - DNA, 1701 bp, Artificial Sequence
  derived and/or modified sequence
atggtgctcaagaaaggaataaaatttttccagcggcttatcaactctaaaagtctccgattcggcgaaaactatgaggatgacgatcttgtaaactccgacgaggttatgaaaaagccctgtcctgtccagattgttcttgcccacgaggatgatcataactttgagttggacgaagaagcattggagcaaatcctgctgcaggagcatattagagatctgaatattgtggtcgtaagtgtggccggagccttccggaagggaaagtcttttcttctagattttatgctgcgatatatgtacaataaagactctcaaagctggattggaggtaataacgagcccctcactggctttacctggcggggtggctgtgaacgggaaacaaccggtatccaggtatggaacgaggtctttgtgattgaccggcctaacgggactaaagtggcggtgctcttaatggatacacagggtgcatttgattcacaatccactattaaggattgtgccacggtttttgcacttagcaccatgacatcatccgtgcaggtgtacaacctcagccagaacatccaggaagacgatctgcaacacctgcagctctttaccgaatacggcagattagcaatggaggagatctatcagaagccttttcagacgttgatgttcctgatcagagactggtcctatccatatgaacacagctatggcctggagggtgggaaacagtttctcgaaaagcggctccaggtgaaacagaatcagcacgaagagctgcaaaacgtgcggaaacatattcacaattgtttctctaatcttggctgcttcctactgccccaccccggactaaaggttgccactaatccgagcttcgatgggcgtttgaaagacattgacgaagatttcaaacgggagctgagaaacctggtcccattgctactagcgccagaaaacctggttgagaaggaaatctctggttccaaagtgacctgtagagacctggtggaatactttaaagcatatattaagatttatcagggagaagaactgccacacccaaagagcatgcttcaagccaccgcggaggcaaataatctcgccgctgttgctggagctagagatacttattgtaaatccatggaacaggtatgtggaggcgataagccctatattgcgccatcagacctggaacggaagcacttggaccttaaggaggttgccataaagcagttcaggagtgtgaagaaaatgggaggggatgagttttgtcggagatatcaagaccaactagaagccgaaattgaagagacctatgcaaacttcatcaaacacaacgatggtaagaacatattctacgcggctcgcaccccagccacattgtttgcggttatgtttgccatgtacattatctctggcctgacaggcttcattggtctcaactctatagctgtattatgtaatctggtgatgggtcttgccttgatctttctgtgtacatgggcatatgtgaaatactccggcgagtttagggagatcgggaccgtaatcgaccagatcgctgaaacattgtgggagcagcgcagtcctcgtaaggtgttttcaaaactcttcgaggtcactagacgcaggatggtgcaccgggctctgtcatccgcccagcgacagagactatcttctaacaataataagaagaagaattag

SEQ ID NO: 327318 - DNA, 2360 bp, Artificial Sequence
  derived and/or modified sequence
actgtggtgcgaattgatcgcatgaaatcctgattgaaaattttgatggtacttaagaaaggcataaagttttttcaaaggcttataaatagtaaaagcctacgatttggtgagaattatgaagatgatgacctagtaaattctgatgaggttatgaagaaaccatgtccagtacagattgttcttgctcatgaagatgaccataactttgaacttgatgaagaagctttggagcagatattgctacaggagcacatacgagatcttaacatagtagtggtatctgtggcaggagcttttcgtaaagggaagtcatttctactggacttcatgcttagatacatgtataacaaggattctcaaagttggattggtggaaacaatgaaccattgacaggctttacatggcgaggtggctgtgaaagagaaacaacaggcatacaagtttggaatgaagtatttgtgattgacagacctaatggaactaaagttgctgtgctgcttatggatacccagggtgcctttgatagccagtcaactatcaaagactgtgcaacggtgtttgctctgagcactatgactagctctgtccaggtatataatctgtctcagaatattcaagaagatgatcttcaacatttgcaattatttacagagtatggaagacttgcgatggaagaaatctaccagaaaccatttcagacattaatgtttttgattcgagattggagctatccttatgaacattcatatggtttggaaggtggaaagcaatttcttgaaaagagattacaggtaaaacaaaatcaacatgaagagcttcagaatgtaaggaagcacatacacaattgtttctcaaatcttggttgcttccttttgccacatcctggtcttaaagttgcaactaatcctagttttgatgggagattgaaagatattgatgaagactttaaacgagagcttcgaaatctggttccattgctgcttgcccctgaaaatttggtagaaaaagagataagtggatctaaagtcacttgtagagatcttgtagaatattttaaggcttacatcaaaatctatcaaggagaagaacttccacatccaaagtccatgcttcaggcaacagctgaagctaataatcttgctgcagtagcaggagcaagagatacctattgtaaaagtatggaacaggtatgtggaggggacaagccttacattgcaccttcagatctggagcgaaaacacttggatctcaaggaagtggcgataaaacaatttcgttcagtaaaaaagatgggtggagatgagttctgccgtcgttatcaggaccagcttgaagctgaaattgaagaaacctatgcaaattttataaagcacaatgatggcaaaaatatcttctatgctgctcgtaccccagccacactgtttgcggtcatgtttgctatgtatataatctcaggactgactggcttcattggcctaaactctatagctgtcttgtgtaaccttgtcatggggttagcactgatatttctttgtacttgggcatatgttaaatactctggggagttcagagaaattggaacagtgattgatcagattgctgaaacactatgggaacagaggagtcccaggaaggtgttttccaaactgtttgaagttactagacgtcgaatggttcaccgtgctctttcatcagcacagcgacagagactgtcatccaacaataacaagaagaaaaattagacagtatttttaacctttttctctatctgaagtgttcacacttacacatgtaggacaataagcaggaccgtctgggccggtctgcataaatgctgtatacataccagatttgatgctgcatatagggtatggaattgcacatccatctcataggaattgtaaatggtttgaataagaggaaagtaatttttgttgcattataaaatgtctagtagcatcataagtttttttgagagaagcatctttttatttcccatattcctggttattttcatcattgctttgaattgaatttttatatctatttttatatgtaactctttttttacctcatgtttttgtttgttttgcacatttctcataccacaggtattgaagcccctgggtgataatttgatggaggaaaacataaggcagtctgtaacaaactctatcaaagcaggcctgactgaccaggtgtctcatcatgccagattaaagacagactgacagttcatctcctcacggactccactctctttttttttcatgcttgctgtacaatgagaactcaaataaaaataaaccaaagtttacaatcaactgtagaagtagtttagtgtaactggcttcac

SEQ ID NO: 327319 - DNA, 1701 bp, Artificial Sequence
  derived and/or modified sequence
atggtgctgaagaagggcatcaagttcttccagagactgatcaacagcaagagcctgagattcggcgagaactacgaggacgacgacctggtgaacagcgacgaggtgatgaagaagccctgccccgtgcagatcgtgctggcccacgaggacgaccacaacttcgagctggacgaggaggccctggagcagatcctgctgcaggagcacatcagagacctgaacatcgtggtggtgagcgtggccggcgccttcagaaagggcaagagcttcctgctggacttcatgctgagatacatgtacaacaaggacagccagagctggatcggcggcaacaacgagcccctgaccggcttcacctggagaggcggctgcgagagagagaccaccggcatccaggtgtggaacgaggtgttcgtgatcgacagacccaacggcaccaaggtggccgtgctgctgatggacacccagggcgccttcgacagccagagcaccatcaaggactgcgccaccgtgttcgccctgagcaccatgaccagcagcgtgcaggtgtacaacctgagccagaacatccaggaggacgacctgcagcacctgcagctgttcaccgagtacggcagactggccatggaggagatctaccagaagcccttccagaccctgatgttcctgatcagagactggagctacccctacgagcacagctacggcctggagggcggcaagcagttcctggagaagagactgcaggtgaagcagaaccagcacgaggagctgcagaacgtgagaaagcacatccacaactgcttcagcaacctgggctgcttcctgctgccccaccccggcctgaaggtggccaccaaccccagcttcgacggcagactgaaggacatcgacgaggacttcaagagagagctgagaaacctggtgcccctgctgctggcccccgagaacctggtggagaaggagatcagcggcagcaaggtgacctgcagagacctggtggagtacttcaaggcctacatcaagatctaccagggcgaggagctgccccaccccaagagcatgctgcaggccaccgccgaggccaacaacctggccgccgtggccggcgccagagacacctactgcaagagcatggagcaggtgtgcggcggcgacaagccctacatcgcccccagcgacctggagagaaagcacctggacctgaaggaggtggccatcaagcagttcagaagcgtgaagaagatgggcggcgacgagttctgcagaagataccaggaccagctggaggccgagatcgaggagacctacgccaacttcatcaagcacaacgacggcaagaacatcttctacgccgccagaacccccgccaccctgttcgccgtgatgttcgccatgtacatcatcagcggcctgaccggcttcatcggcctgaacagcatcgccgtgctgtgcaacctggtgatgggcctggccctgatcttcctgtgcacctgggcctacgtgaagtacagcggcgagttcagagagatcggcaccgtgatcgaccagatcgccgagaccctgtgggagcagagaagccccagaaaggtgttcagcaagctgttcgaggtgaccagaagaagaatggtgcacagagccctgagcagcgcccagagacagagactgagcagcaacaacaacaagaagaagaactag

SEQ ID NO: 327320 - DNA, 1764 bp, Artificial Sequence
  derived and/or modified sequence
actgtggtgcgaattgatcgcatgaaatcctgattgaaaattttgatggtacttaagaaaggcataaagttttttcaaaggcttataaatagtaaaagcctacgatttggattctcaaagttggattggtggaaacaatgaaccattgacaggctttacatggcgaggtggctgtgaaagagaaacaacaggcatacaagtttggaatgaagtatttgtgattgacagacctaatggaactaaagttgctgtgctgcttatggatacccagggtgcctttgatagccagtcaactatcaaagactgtgcaacggtgtttgctctgagcactatgactagctctgtccaggtatataatctgtctcagaatattcaagaagatgatcttcaacatttgcaattatttacagagtatggaagacttgcgatggaagaaatctaccagaaaccatttcagacattaatgtttttgattcgagattggagctatccttatgaacattcatatggtttggaaggtggaaagcaatttcttgaaaagagattacaggtaaaacaaaatcaacatgaagagcttcagaatgtaaggaagcacatacacaattgtttctcaaatcttggttgcttccttttgccacatcctggtcttaaagttgcaactaatcctagttttgatgggagattgaaagatattgatgaagactttaaacgagagcttcgaaatctggttccattgctgcttgcccctgaaaatttggtagaaaaagagataagtggatctaaagtcacttgtagagatcttgtagaatattttaaggcttacatcaaaatctatcaaggagaagaacttccacatccaaagtccatgcttcaggcaacagctgaagctaataatcttgctgcagtagcaggagcaagagatacctattgtaaaagtatggaacaggtatgtggaggggacaagccttacattgcaccttcagatctggagcgaaaacacttggatctcaaggaagtggcgataaaacaatttcgttcagtaaaaaagatgggtggagatgagttctgccgtcgttatcaggaccagcttgaagctgaaattgaagaaacctatgcaaattttataaagcacaatgatggcaaaaatatcttctatgctgctcgtaccccagccacactgtttgcggtcatgtttgctatgtatataatctcaggactgactggcttcattggcctaaactctatagctgtcttgtgtaaccttgtcatggggttagcactgatatttctttgtacttgggcatatgttaaatactctggggagttcagagaaattggaacagtgattgatcagattgctgaaacactatgggaacagaggagtcccaggaaggtgttttccaaactgtttgaagttactagacgtcgaatggttcaccgtgctctttcatcagcacagcgacagagactgtcatccaacaataacaagaagaaaaattagacagtatttttaacctttttctctatctgaagtgttcacacttacacatgtaggacaataagcaggaccgtctgggccggtctgcataaatgctgtatacataccagatttgatgctgcatatagggtatggaattgcacatccatctcataggaattgtaaatggtttgaataagaggaaagtaatttttgttgcattataaaatgtctagtagcatcataagtttttttgagagaagcatctttttatttcccatattcct

SEQ ID NO: 327321 - protein, 413 aa, Artificial Sequence
  derived and/or modified sequence
MDTQGAFDSQSTIKDCATVFALSTMTSSVQVYNLSQNIQEDDLQHLQLFTEYGRLAMEEIYQKPFQTLMFLIRDWSYPYEHSYGLEGGKQFLEKRLQVKQNQHEELQNVRKHIHNCFSNLGCFLLPHPGLKVATNPSFDGRLKDIDEDFKRELRNLVPLLLAPENLVEKEISGSKVTCRDLVEYFKAYIKIYQGEELPHPKSMLQATAEANNLAAVAGARDTYCKSMEQVCGGDKPYIAPSDLERKHLDLKEVAIKQFRSVKKMGGDEFCRRYQDQLEAEIEETYANFIKHNDGKNIFYAARTPATLFAVMFAMYIISGLTGFIGLNSIAVLCNLVMGLALIFLCTWAYVKYSGEFREIGTVIDQIAETLWEQRSPRKVFSKLFEVTRRRMVHRALSSAQRQRLSSNNNKKKN

SEQ ID NO: 327322 - DNA, 1242 bp, Artificial Sequence
  derived and/or modified sequence
atggatacccagggcgccttcgattcacagagcaccatcaaagattgtgctaccgtgttcgcgttaagcacaatgacctcctccgttcaggtgtataacttatcccagaatatccaggaagacgatctccaacatctgcagttgtttacagagtacggtcgccttgcgatggaagagatttaccaaaagcccttccagacactgatgtttctcatacgagactggtcctacccctatgaacatagctacggtttggagggcggcaaacagttcctcgaaaaacggctccaggtcaaacagaatcagcacgaggagctgcagaatgtccgcaagcatatccacaactgcttcagcaacctgggatgcttcttactgccccacccgggcctcaaggtggccaccaacccttctttcgatggccggctgaaggacatcgatgaggatttcaaaagggagttgaggaatctggtccctctgctgctggcacccgaaaatttagtggagaaggaaatctctggatctaaggtcacgtgcagggacctggtcgaatatttcaaagcctatatcaaaatctatcaaggggaggaactaccccaccccaaaagcatgctgcaggcgaccgcagaggccaataacctggccgccgtagcaggagcacgcgacacatactgtaagagcatggagcaggtatgcgggggtgataagccctacattgccccaagtgacctggagaggaagcatctcgatcttaaggaggtggcaattaaacagttcagaagcgttaaaaaaatgggcggtgacgaattctgccggcgataccaagaccagcttgaggccgaaattgaggagacgtacgctaacttcattaaacataatgacggtaaaaacatattctatgctgcgaggactcccgccaccctgtttgcagtgatgttcgccatgtatataatttctggacttactgggtttatcggcctgaactcaatcgccgttctgtgcaacctggtgatgggattagctctcatcttcctttgtacctgggcatacgtaaagtactctggagaatttagggagataggaacggtgatcgaccagattgcagagacgctgtgggaacagcgctccccaaggaaagtcttttctaagcttttcgaagtcaccaggcggcgaatggtgcatagagctctctcaagtgcgcagagacagcgactgagtagtaacaataacaaaaagaagaattag

SEQ ID NO: 327323 - DNA, 1242 bp, Artificial Sequence
  derived and/or modified sequence
atggacacccagggcgcctttgacagccagagcaccatcaaggactgtgccaccgtgtttgccctgagcaccatgaccagctctgtgcaggtgtacaacctgagccagaacatccaggaggatgacctgcagcacctgcagctgttcacagaatatggccgcctggccatggaggagatctaccagaagcccttccagaccctgatgttcctgatccgggactggagctacccctatgagcacagctatggcctggagggcggcaagcagttcctggagaagaggctgcaggtgaagcagaaccagcacgaggagctgcagaatgtgaggaagcacatccacaactgcttcagcaacctgggctgcttcctgctgccccaccctggcctgaaggtggccaccaaccccagctttgatggccgcctgaaggacattgatgaggacttcaagcgggagctgaggaacctggtgcccctgctgctggcccctgagaacctggtggagaaggagatcagcggcagcaaggtgacctgccgggacctggtggagtacttcaaggcctacatcaagatctaccagggcgaggagctgccccaccccaagtccatgctgcaggccacagctgaggccaacaacctggccgctgtggccggggcccgggacacctactgcaagtccatggagcaggtgtgtggcggggacaagccctacatcgcccccagcgacctggagaggaagcacctggacctgaaggaggtggccatcaagcagttccgctctgtgaagaagatgggaggagatgagttctgccgccgctaccaggaccagctggaggccgagattgaggagacctacgccaacttcatcaagcacaatgatggcaagaacatcttctacgccgcccggaccccagccaccctgtttgctgtgatgtttgccatgtacatcatcagcggcctgaccggcttcatcggcctgaacagcattgctgtgctgtgcaacctggtgatgggcctggccctgatcttcctgtgcacctgggcctacgtgaagtacagcggggagttccgggagattggaacagtgattgaccagattgctgagaccctgtgggagcagaggagccccaggaaggtgttcagcaagctgtttgaggtgaccaggaggaggatggtgcaccgggccctgagcagcgcccagaggcagaggctgagcagcaacaacaacaagaagaagaactag

SEQ ID NO: 327324 - DNA, 1242 bp, Artificial Sequence
  derived and/or modified sequence
atggacacccagggcgccttcgacagccagagcaccatcaaggactgcgccaccgttttcgcgctatccaccatgaccagcagtgtgcaggtatacaacctgtcccaaaatattcaggaggatgatcttcagcaccttcagttgttcactgaatatggaaggttggccatggaggagatctatcaaaagccgtttcaaaccctgatgttcttaatcagggattggagttacccttacgagcattcttatggccttgaggggggcaagcagtttctggagaagcgcctgcaggtgaaacagaaccagcacgaagagctgcaaaacgtacgtaagcatattcataattgtttttccaacctcggctgcttcctgctcccccacccaggcctgaaggtggccaccaatccgagttttgacggcagactgaaggacattgacgaagactttaagcgcgagctgagaaacctggtccctctgctactggcccccgaaaatctggtcgaaaaggagattagcgggtccaaggtcacctgcagagatttggtcgagtattttaaggcgtatattaagatctatcagggagaggaacttccgcatcctaaaagtatgctgcaggccacagccgaagcaaacaacctggccgccgtcgctggcgcccgcgatacatattgcaaatcgatggagcaggtgtgtggcggcgataaaccatatatcgcaccctctgacctggaacgcaagcatctggatttaaaagaagttgctatcaagcagttccgaagtgtgaagaaaatggggggcgatgagttctgtcgtagataccaggaccagctggaagctgagatagaggagacatacgccaactttattaagcataacgacggcaaaaacatcttctacgccgcgagaacgccagcaactctgttcgctgtgatgtttgccatgtatattattagcggcttgacaggatttattgggttaaatagtattgctgttctgtgtaatctggtgatgggcctcgcgctgatcttcttgtgcacttgggcctacgtgaaatatagcggcgagttcagagaaatcggaacggtaatagatcagattgctgaaaccctttgggagcagagatctccgaggaaagtcttcagtaaactgttcgaggtgactaggcgaagaatggtgcacagggcactgagctccgcccagcggcagagactgagtagtaataacaataagaagaagaattag

SEQ ID NO: 327325 - DNA, 1242 bp, Artificial Sequence
  derived and/or modified sequence
atggatactcagggtgcctttgactcccaatccacaatcaaggactgcgcaaccgtgtttgccctgagcaccatgacctccagcgttcaggtgtataacctgagccaaaacatccaggaggacgatctacagcacctgcaattgttcactgaatatggcaggcttgccatggaagagatttaccagaaacccttccagaccttaatgttcctgatcagggattggagctacccttatgagcactcatatggtcttgaggggggtaaacaatttcttgagaaaagactccaggtgaagcaaaaccaacatgaagaactccagaatgttaggaaacacatccacaactgcttctctaacctggggtgcttcttgctcccacaccctggtctcaaggtggcaacaaatcccagtttcgacggcaggctcaaagacatagacgaggactttaaacgagagcttcgaaaccttgtccctctgctgcttgctccagagaatttggtggaaaaggaaatttctgggtcaaaagtgacctgtcgggatctcgtggagtattttaaggcgtacataaaaatctaccaaggcgaggagttacctcatcccaaaagtatgctgcaggctaccgcagaagccaacaacctcgctgccgttgcaggagcgcgagacacctattgcaagagcatggaacaggtctgcggaggtgacaagccatacattgccccatcggacctggagaggaaacatctggacttgaaagaggtggctattaagcagtttcgctctgtgaagaagatggggggagatgagttttgccggaggtaccaggaccagctggaggcagaaatcgaggagacgtacgctaattttatcaagcacaacgatggaaagaatatcttctacgccgctcggaccccagcgacattattcgctgtcatgttcgcaatgtatatcattagcggtctaacagggttcattgggctgaacagcatcgcggtactttgcaacctggttatggggctggccctgatcttcctctgtacgtgggcctacgtgaagtattcgggagaattccgggagatcggtaccgttatcgaccagattgctgaaaccctttgggagcagaggtctccgcgaaaggtgttttcaaagctattcgaagtaaccagacgccgtatggtgcacagagccctgagctccgcgcagagacaaaggctcagcagcaacaataacaaaaagaagaactag

SEQ ID NO: 327326 - DNA, 1242 bp, Artificial Sequence
  derived and/or modified sequence
atggacacccagggcgccttcgacagccagagcaccatcaaggactgcgccaccgtgttcgccctgagcaccatgaccagcagcgtgcaggtgtacaacctgagccagaacatccaggaggacgacctgcagcacctgcagctgttcaccgagtacggcagactggccatggaggagatctaccagaagcccttccagaccctgatgttcctgatcagagactggagctacccctacgagcacagctacggcctggagggcggcaagcagttcctggagaagagactgcaggtgaagcagaaccagcacgaggagctgcagaacgtgagaaagcacatccacaactgcttcagcaacctgggctgcttcctgctgccccaccccggcctgaaggtggccaccaaccccagcttcgacggcagactgaaggacatcgacgaggacttcaagagagagctgagaaacctggtgcccctgctgctggcccccgagaacctggtggagaaggagatcagcggcagcaaggtgacctgcagagacctggtggagtacttcaaggcctacatcaagatctaccagggcgaggagctgccccaccccaagagcatgctgcaggccaccgccgaggccaacaacctggccgccgtggccggcgccagagacacctactgcaagagcatggagcaggtgtgcggcggcgacaagccctacatcgcccccagcgacctggagagaaagcacctggacctgaaggaggtggccatcaagcagttcagaagcgtgaagaagatgggcggcgacgagttctgcagaagataccaggaccagctggaggccgagatcgaggagacctacgccaacttcatcaagcacaacgacggcaagaacatcttctacgccgccagaacccccgccaccctgttcgccgtgatgttcgccatgtacatcatcagcggcctgaccggcttcatcggcctgaacagcatcgccgtgctgtgcaacctggtgatgggcctggccctgatcttcctgtgcacctgggcctacgtgaagtacagcggcgagttcagagagatcggcaccgtgatcgaccagatcgccgagaccctgtgggagcagagaagccccagaaaggtgttcagcaagctgttcgaggtgaccagaagaagaatggtgcacagagccctgagcagcgcccagagacagagactgagcagcaacaacaacaagaagaagaactag

SEQ ID NO: 327327 - protein, 480 aa, Artificial Sequence
  derived and/or modified sequence
MCILGSSGSGKTTLLDAMSGRLGRAGTFLGEVYVNGRALRREQFQDCFSYVLQSDTLLSSLTVRETLHYTALLAIRRGNPGSFQKKVEAVMAELSLSHVADRLIGNYSLGGISTGERRRVSIAAQLLQDPMDLTSVDTQSKEREIETSKRVQMIESAYKKSAICHKTLKNIERMKHLKTLPMVPFKTKDSPGVFSKLGVLLRRVTRNLVRNKLAVITRLLQNLIMGLFLLFFVLRVRSNVLKGAIQDRVGLLYQFVGATPYTGMLNAVNLFPVLRAVSDQESQDGLYQKWQMMLAYALHVLPFSVVATMIFSSVCYWTLGLHPEVARFGYFSAALLAPHLIGEFLTLVLLGIVQNPNIVNSVVALLSIAGVLVGSGFLRNIQEMPIPFKIISYFTFQKYCSEILVVNEFYGLNFTCGSSNVSVTTNPMCAFTQGIQFIEKTCPGATSRFTMNFLILYSFIPALVILGIVVFKIRDHLISR

SEQ ID NO: 327328 - protein, 256 aa, Artificial Sequence
  derived and/or modified sequence
MGLFLLFFVLRVRSNVLKGAIQDRVGLLYQFVGATPYTGMLNAVNLFPVLRAVSDQESQDGLYQKWQMMLAYALHVLPFSVVATMIFSSVCYWTLGLHPEVARFGYFSAALLAPHLIGEFLTLVLLGIVQNPNIVNSVVALLSIAGVLVGSGFLRNIQEMPIPFKIISYFTFQKYCSEILVVNEFYGLNFTCGSSNVSVTTNPMCAFTQGIQFIEKTCPGATSRFTMNFLILYSFIPALVILGIVVFKIRDHLISR

SEQ ID NO: 327329 - DNA, 1443 bp, Artificial Sequence
  derived and/or modified sequence
atgtgcatcctgggttcaagtggcagtggcaagaccactctgctcgacgcaatgtccggtaggctgggacgcgcagggactttcctcggagaggtctacgtgaatgggcgggccctgcgacgcgagcagtttcaggattgttttagctatgtcctgcagagcgatacgttattatccagccttactgtcagggaaacactacactatactgccctgctcgctatccgccgaggaaatcccgggtccttccagaaaaaggttgaggccgtcatggccgagctgagtcttagccacgttgctgacaggttgattgggaactatagtctggggggaatttctacgggtgagaggcgtcgcgtctccattgccgctcaattgttacaggatccaatggatctcacctctgtggatacccagtccaaggaaagggagatcgagacttctaaaagagtgcagatgatcgagagcgcttacaaaaaaagcgcaatatgccataaaaccctgaagaatatcgagcgtatgaagcacttaaagacactgccaatggtgccctttaagactaaggatagtcccggcgtcttttctaagctaggtgtgcttctcaggagggtaacacggaacctggtgcggaataagcttgcagtaatcacgagactgttgcagaatttgataatggggctgttcctcctctttttcgtgctccgggttcgaagcaacgtgttaaaaggggccatccaggacagggtcggcttgctttaccagtttgtgggtgctacaccttatacaggcatgttaaacgccgtcaatttgtttcccgtgctgagagctgtgtctgaccaagagtctcaagacggcctctaccagaagtggcaaatgatgctcgcctacgccttgcatgtgctaccgtttagcgttgttgccaccatgatattcagttccgtgtgctactggacactcgggctccatccagaagtggccaggttcgggtatttctccgccgccctgcttgcccctcatctgattggcgagttccttactctggtattattgggaattgtgcagaatcctaacatcgtcaattctgtagtggcccttctgagtatcgcgggggtgttagtgggaagcgggtttctgagaaatatccaggagatgcccattcccttcaagataatatcttactttacgttccagaaatattgctctgaaatcttagtggtcaatgagttctatggtttgaactttacttgtggatcctccaatgtgtctgtgacaaccaaccctatgtgtgcattcactcaagggattcaattcattgaaaagacttgccccggggccacttcacgatttacaatgaacttcctcatcctctacagctttatccctgcattagtcattctgggtattgtggtattcaagattcgagatcatctgatctccagatag

SEQ ID NO: 327330 - DNA, 1443 bp, Artificial Sequence
  derived and/or modified sequence
atgtgcatcctgggcagcagcggcagcggcaagaccaccctgctggatgccatgagcggccgcctgggccgggccggcaccttcctgggggaggtgtatgtgaatggccgggccctgcggcgggagcagttccaggactgcttctcctatgtgctgcagagcgacaccctgctgagcagcctgactgtgcgggagaccctgcactacacagccctgctggccatccggcggggcaaccctggcagcttccagaagaaggtggaggccgtgatggccgagctgagcctgagccacgtggccgacaggctcatcggcaactacagcctgggcggcatcagcactggagagcggcggcgggtgtccattgctgcccagctgctgcaggaccccatggacctgacctctgtggacacccagagcaaggagcgggagattgagaccagcaagagggtgcagatgattgagagcgcctacaagaagagcgccatctgccacaagaccctgaagaacattgaaagaatgaagcacctgaagaccctgcccatggtgcccttcaagaccaaggacagccctggggtcttcagcaagctgggcgtgctgctgcggcgggtgaccaggaacctggtgaggaacaagctggccgtcatcacccggctgctgcagaacctgatcatgggcctcttcctgctcttctttgtgctgcgggtgcgcagcaatgtgctgaagggggccatccaggacagagtgggcctgctgtaccagtttgtgggcgccaccccctacacaggcatgctgaatgctgtgaacctcttccctgtgctgcgggctgtgtctgaccaggagagccaggacggcctgtaccagaagtggcagatgatgctggcctatgccctgcacgtgctgcccttctctgtggtggccaccatgatcttcagctctgtgtgctactggaccctgggcctgcaccctgaggtggcccgcttcggctacttctctgctgccctgctggccccccacctgattggagagttcctgaccctggtgctgctgggcatcgtgcagaaccccaacatcgtgaacagcgtggtggccctgctgagcattgctggggtgctggtgggcagcggcttcctgaggaacatccaggagatgcccatccccttcaagatcatctcctacttcaccttccagaagtactgcagcgagatcctggtggtgaatgagttctacggcctgaacttcacctgtggcagcagcaatgtgtctgtgaccaccaaccccatgtgtgccttcacccagggcatccagttcatcgagaagacctgccctggggccaccagccgcttcaccatgaacttcctgatcctgtacagcttcatcccagccctggtgatcctgggcatcgtggtgttcaagatccgggaccacctgatcagcaggtag

SEQ ID NO: 327331 - DNA, 1443 bp, Artificial Sequence
  derived and/or modified sequence
atgtgcatcctgggcagcagcggcagcggcaagaccaccctgctggacgccatgtcaggacggctcggaagagccggcaccttccttggggaggtgtacgtcaatggacgcgctctccgtagagagcagttccaggattgtttcagctacgtactacagtctgatactctgctgtctagtctcactgtcagggagaccctccattatacggctctgctagcaattaggcggggcaatccaggttctttccagaaaaaggtagaggcagtgatggcagagctctctctcagccacgtggcggatcggttgatcggaaactacagtcttggcggcatatctaccggtgagcgtcggcgcgtttccattgccgcccagcttctacaagatcctatggacttgaccagcgtggatacacagagcaaggagagggagatcgaaaccagcaagcgggtacagatgatcgaatctgcttacaaaaaaagcgcaatttgccacaagacactcaaaaacatcgaacgtatgaagcacctgaagaccctgcctatggtgccgtttaagactaaggatagcccgggggtgttttcaaagttaggggtgctccttagacgggttactcgaaacctggtccgcaacaagcttgcagtgattactcgtctgctccaaaatctcataatggggctgtttctactgttttttgtcctccgggtgcggagcaatgttttgaagggggcaattcaggatcgcgtggggctcctgtatcaattcgtaggagctaccccttacacaggaatgctgaatgccgtgaacctgtttcccgttcttcgcgccgtgagcgaccaagaatcccaagacggcctctatcagaagtggcaaatgatgctggcatacgccctgcacgtgctaccgtttagcgtggtggcaacaatgatcttttcaagcgtctgttactggacactcggtctgcacccagaggttgctaggttcgggtatttctcagctgccctcttggcaccacatctaatcggagaattcctgactctggtgctgctcgggatagtgcagaaccctaatatcgttaacagcgtggtggctctcctgagcattgctggtgttcttgtgggctccggatttctaagaaacattcaggaaatgcctataccattcaagattatttcctactttaccttccaaaagtattgctctgagatacttgtggtgaacgaattctatgggttgaactttacctgtggcagtagtaacgtatcggttaccaccaatcccatgtgcgcctttacgcagggaatccagtttatagaaaagacatgcccgggagctacctcgcgcttcacaatgaacttcctgattttatactccttcattccagcactggtcattttgggaattgtagtgttcaagatccgggaccacctgattagcagatag

SEQ ID NO: 327332 - DNA, 1443 bp, Artificial Sequence
  derived and/or modified sequence
atgtgtattctgggatccagcggaagcggtaaaaccacactgttggacgccatgagtgggaggctaggtagagcgggaaccttcctgggcgaggtctacgtcaatggccgagccctgcggcgagaacagtttcaggactgcttctcttatgttctccagagtgatactctgttgagcagcctaaccgtgagagagacacttcactacaccgccctcctcgctatccgaagaggcaatccagggagctttcagaagaaagtcgaggccgtgatggccgagctcagcctgtctcacgtggcagatcggctcatcgggaactattctctggggggtatttccaccggagaaaggaggcgcgtgagcatcgcagcacaactgttgcaggatcctatggacctgacctccgttgacacacagtccaaagagcgggagatagagaccagtaagcgcgtccaaatgatcgagagtgcttataagaagtcggccatatgccacaagacattgaagaacatcgaaagaatgaagcacctgaagacactcccgatggtgcctttcaaaacaaaggactcccccggtgtgttctcaaagcttggtgtccttttgcgtcgcgtgacgagaaacctggttcggaataaactggctgtcataaccagactcctccaaaacctcatcatgggcctctttctcctcttttttgttctcagagtcagaagtaacgtgttaaaaggtgcaatccaggatagagtaggccttctgtatcaattcgtgggggcaaccccctacactggcatgcttaacgctgtgaatctcttccctgtccttcgcgctgtgtctgaccaggagagtcaggatgggctgtatcagaaatggcagatgatgctcgcatacgccctgcatgtcttgcctttcagcgtcgtggccaccatgatttttagttccgtctgctattggaccttgggcctgcacccagaagtggcccgatttggctatttttctgcagcactgctcgcaccccatttaataggcgagtttctaacactggtacttcttggtatcgtgcagaatcctaacattgtcaatagcgtcgtggccttgttgtcgatcgctggtgtcctggttggcagtggatttctgagaaacatccaggagatgcccattccattcaagattatcagctacttcactttccagaagtattgctcagaaattcttgtggtgaacgagttttacgggctaaacttcacatgtggaagcagtaatgtgtcggtcactaccaatccaatgtgtgcgtttacccagggtattcaatttatcgagaaaacatgtccaggtgcaacatccagattcaccatgaacttcctcatcctgtactctttcatccccgcattagtcattctcggcatcgtggtattcaaaatccgagaccacctgattagtaggtag

SEQ ID NO: 327333 - DNA, 2896 bp, Artificial Sequence
  derived and/or modified sequence
gctccccaactgaagccactctggggagggtccggccaccagaaaatttgcccagctttgctgcctgttggccatgggtgacctctcatctttgacccccggagggtccatgggtctccaagtaaacagaggctcccagagctccctggagggggctcctgccaccgccccggagcctcacagcctgggcatcctccatgcctcctacagcgtcaggtaaggcagagcccttgctgctgctgctcccccaggagtgcggggcccggcgctcacccctctgctgcctttcttcactctttaagtgccagtctgggcacttcgggctccctctttagtggatcgggtggagagaggagagggagaagggctgtgctgggaaacatggagcgacagtgaatggcccctccccctgcccagggaagggcctgggcataaacaaagtggcagcagtgccctgccaacccagtgtctacggcctgccctctgtggatgggaatgggggtactgcgaatgcaaggagtcttgaaacctggtgaaagaatgcagggacagccacctcgcagccaaacggacaggacattcagagcaactccagcacaggccccctccctacgtggcagacagcctcagtcgctatctgccaggttctacagaggagggcgcagagactgaaacacgttaggagcctgtccggagactactggggtggggcacaggtaggatcaatgctggggacctgggtgtggccccttccagggccccaagctgcctttgccttcctggggtttcctttaaagccaccgcgtgaggccctggtgggacatcacatcttgccggcagcagtggaccaggcagatcctcaaagatgtctccttgtacgtggagagcgggcagatcatgtgcatcctaggaagctcaggctccgggaaaaccacgctgctggacgccatgtccgggaggctggggcgcgcggggaccttcctgggggaggtgtatgtgaacggccgggcgctgcgccgggagcagttccaggactgcttctcctacgtcctgcagagcgacaccctgctgagcagcctcaccgtgcgcgagacgctgcactacaccgcgctgctggccatccgccgcggcaatcccggctccttccagaagaaggtggaggccgtcatggcagagctgagtctgagccatgtggcagaccgactgattggcaactacagcttggggggcatttccacgggtgagcggcgccgggtctccatcgcagcccagctgctccaggatcctatggacctgacgtcagtggatacccaaagcaaggaacgggaaatagaaacctccaagagagtccagatgatagaatctgcctacaagaaatcagcaatttgtcataaaactttgaagaatattgaaagaatgaaacacctgaaaacgttaccaatggttcctttcaaaaccaaagattctcctggagttttctctaaactgggtgttctcctgaggagagtgacaagaaacttggtgagaaataagctggcagtgattacgcgtctccttcagaatctgatcatgggtttgttcctccttttcttcgttctgcgggtccgaagcaatgtgctaaagggtgctatccaggaccgcgtaggtctcctttaccagtttgtgggcgccaccccgtacacaggcatgctgaacgctgtgaatctgtttcccgtgctgcgagctgtcagcgaccaggagagtcaggacggcctctaccagaagtggcagatgatgctggcctatgcactgcacgtcctccccttcagcgttgttgccaccatgattttcagcagtgtgtgctactggacgctgggcttacatcctgaggttgcccgatttggatatttttctgctgctctcttggccccccacttaattggtgaatttctaactcttgtgctacttggtatcgtccaaaatccaaatatagtcaacagtgtagtggctctgctgtccattgcgggggtgcttgttggatctggattcctcagaaacatacaagaaatgcccattccttttaaaatcatcagttattttacattccaaaaatattgcagtgagattcttgtagtcaatgagttctacggactgaatttcacttgtggcagctcaaatgtttctgtgacaactaatccaatgtgtgccttcactcaaggaattcaattcattgagaaaacctgcccaggtgcaacatctagattcacaatgaactttctgattttgtattcatttattccagctcttgtcatcctaggaatagttgttttcaaaataagggatcatctcattagcaggtagtgaaagccatggctgggaaaatggaagtgaagctgccgactgtgcatgactgctctgaacgtctgaaatgagagtgccatgtatttctttcttgacaggacatctcaagtcttttaaccattaagactccatttgtgcctcttggatccaagcaggccttgaatgcaatggaagtggtttatagtcccttgctcttacaacttgcagggacatgtggttatttggaaattgtgactgagcggacccaagaatgtaaataatattcataaacctatgggagactcgtgtgactattttttttccttgttctaggcacagaaaaaaataggtcagcttaaaaatatgtttacattggataaaggattaggcaaaaataaaatgtttcaaggattcctgaccataagtgacagagaaagagagttgtgggtttagatgaagcaaggttatcatgcagaattgggtaagaatgcttctgttcctggaagacccagagttaaatgcagatgtccacacgaggggtcggagttacctgatcacatcgagagagtgctgggca

SEQ ID NO: 327334 - DNA, 1443 bp, Artificial Sequence
  derived and/or modified sequence
atgtgcatcctgggcagcagcggcagcggcaagaccaccctgctggacgccatgagcggcagactgggcagagccggcaccttcctgggcgaggtgtacgtgaacggcagagccctgagaagagagcagttccaggactgcttcagctacgtgctgcagagcgacaccctgctgagcagcctgaccgtgagagagaccctgcactacaccgccctgctggccatcagaagaggcaaccccggcagcttccagaagaaggtggaggccgtgatggccgagctgagcctgagccacgtggccgacagactgatcggcaactacagcctgggcggcatcagcaccggcgagagaagaagagtgagcatcgccgcccagctgctgcaggaccccatggacctgaccagcgtggacacccagagcaaggagagagagatcgagaccagcaagagagtgcagatgatcgagagcgcctacaagaagagcgccatctgccacaagaccctgaagaacatcgagagaatgaagcacctgaagaccctgcccatggtgcccttcaagaccaaggacagccccggcgtgttcagcaagctgggcgtgctgctgagaagagtgaccagaaacctggtgagaaacaagctggccgtgatcaccagactgctgcagaacctgatcatgggcctgttcctgctgttcttcgtgctgagagtgagaagcaacgtgctgaagggcgccatccaggacagagtgggcctgctgtaccagttcgtgggcgccaccccctacaccggcatgctgaacgccgtgaacctgttccccgtgctgagagccgtgagcgaccaggagagccaggacggcctgtaccagaagtggcagatgatgctggcctacgccctgcacgtgctgcccttcagcgtggtggccaccatgatcttcagcagcgtgtgctactggaccctgggcctgcaccccgaggtggccagattcggctacttcagcgccgccctgctggccccccacctgatcggcgagttcctgaccctggtgctgctgggcatcgtgcagaaccccaacatcgtgaacagcgtggtggccctgctgagcatcgccggcgtgctggtgggcagcggcttcctgagaaacatccaggagatgcccatccccttcaagatcatcagctacttcaccttccagaagtactgcagcgagatcctggtggtgaacgagttctacggcctgaacttcacctgcggcagcagcaacgtgagcgtgaccaccaaccccatgtgcgccttcacccagggcatccagttcatcgagaagacctgccccggcgccaccagcagattcaccatgaacttcctgatcctgtacagcttcatccccgccctggtgatcctgggcatcgtggtgttcaagatcagagaccacctgatcagcagatag

SEQ ID NO: 327335 - DNA, 771 bp, Artificial Sequence
  derived and/or modified sequence
atggggctgtttctcctctttttcgttctgagggttagatctaacgtgctaaagggcgctattcaggaccgggtcggtctcttatatcagtttgtgggggcaacaccctatactggcatgctcaacgcggtcaatctcttccccgtgctgagggctgtgtctgatcaggaatctcaggacgggctgtatcagaaatggcaaatgatgctggcatacgccctgcacgtcctgccgttcagtgtggtggcaaccatgattttttcttccgtgtgctattggacccttggcctgcacccagaagtcgcaaggtttggctatttttctgccgccctcttagcacctcacctcatcggagagtttctgactctcgtcctgctgggaatcgtccaaaatcctaatattgtgaattctgtggtggctctgttgagtattgctggagtccttgtgggctctggtttcctcagaaacattcaagagatgccaataccgttcaagatcatttcctacttcacgtttcagaaatattgctctgagatactggttgtgaacgagttctacggcttgaatttcacttgtggtagctcgaatgtatcagttaccaccaatcctatgtgcgccttcacgcagggaattcagtttatcgaaaagacctgcccaggagccacctctcgcttcaccatgaactttctcatcctctacagctttattcccgccctggtcattttgggcattgtggttttcaagatcagggatcatttaatctcaagatag

SEQ ID NO: 327336 - DNA, 771 bp, Artificial Sequence
  derived and/or modified sequence
atgggcctcttcctgctcttctttgtgctgcgggtgcgcagcaatgtgctgaagggggccatccaggacagagtgggcctgctgtaccagtttgtgggcgccaccccctacacaggcatgctgaatgctgtgaacctcttccctgtgctgcgggctgtgtctgaccaggagagccaggacggcctgtaccagaagtggcagatgatgctggcctatgccctgcacgtgctgcccttctctgtggtggccaccatgatcttcagctctgtgtgctactggaccctgggcctgcaccctgaggtggcccgcttcggctacttctctgctgccctgctggccccccacctgattggagagttcctgaccctggtgctgctgggcatcgtgcagaaccccaacatcgtgaacagcgtggtggccctgctgagcattgctggggtgctggtgggcagcggcttcctgaggaacatccaggagatgcccatccccttcaagatcatctcctacttcaccttccagaagtactgcagcgagatcctggtggtgaatgagttctacggcctgaacttcacctgtggcagcagcaatgtgtctgtgaccaccaaccccatgtgtgccttcacccagggcatccagttcatcgagaagacctgccctggggccaccagccgcttcaccatgaacttcctgatcctgtacagcttcatcccagccctggtgatcctgggcatcgtggtgttcaagatccgggaccacctgatcagcaggtag

SEQ ID NO: 327337 - DNA, 771 bp, Artificial Sequence
  derived and/or modified sequence
atgggcctgttcctgctgttcttcgtgctgcgggtgcggagcaacgtcctcaaaggtgccatccaagaccgggtgggcctgctttatcaattcgtgggagcaacaccgtacacaggaatgctcaacgctgtgaacttgttcccggttctgagagcagtgtccgaccaggagtcccaagacggactgtaccagaagtggcaaatgatgttggcctacgcactgcacgtactgccgttcagcgtcgtcgccacgatgatttttagtagtgtctgctactggactctgggactgcatcccgaggtggcgaggttcgggtatttctcggccgctttgctcgccccccatctaattggggagttccttaccctggtactgcttggaattgtgcagaatccaaatatcgttaactccgtggtggcactgctgtccatcgccggcgtgctagtggggagtggcttcttgagaaacatccaagagatgcccatcccatttaaaattatcagttactttacatttcaaaaatactgttcagaaattctcgtggtgaacgaattttacggactgaattttacctgcggatcttcaaacgtaagcgttactaccaaccctatgtgcgccttcacgcaggggatccagttcatcgaaaagacttgtcctggagcaacatccagattcactatgaattttctgattctgtattctttcatccccgctctggtcatcttgggaattgtggttttcaagatccgggaccacctgataagcagatag

SEQ ID NO: 327338 - DNA, 771 bp, Artificial Sequence
  derived and/or modified sequence
atgggattattcctccttttctttgtgcttagagtccggtccaacgtccttaagggcgctatccaggatcgtgtaggactgctctaccagtttgtaggcgcaacaccctacaccggaatgctgaatgcagtcaacctcttcccggttctgcgtgcagtgagtgatcaggaatcacaggacggcctgtaccaaaagtggcaaatgatgcttgcttatgcactgcatgtgcttccattttctgtagtggcaaccatgatcttctccagcgtgtgctactggactctgggtctccaccccgaggtcgctcgcttcggctattttagcgcggctctgctggcaccccacctgatcggtgagttcctaactctggttctccttggcattgtccagaaccctaacatcgtgaatagtgtggtagcattactctcgatcgcgggagtcctggtgggctccggctttctacggaatatccaagaaatgcctataccctttaagataatttcctattttacctttcaaaaatactgctctgagatccttgtggttaacgagttctacgggctcaatttcacatgtggcagctccaatgtgtctgtaactaccaatcctatgtgtgcgttcacgcaggggattcagttcattgaaaaaacttgtcccggagcaacaagccgcttcaccatgaacttcctgatcctgtactcctttatcccagccctcgtcatcctgggtatcgtcgtgttcaagattcgggatcatcttatctcccgctag

SEQ ID NO: 327339 - DNA, 3033 bp, Artificial Sequence
  derived and/or modified sequence
tccccaactgaagccactctggggagggtccggccaccagaaaatttgcccagctttgctgcctgttggccatgggtgacctctcatctttgacccccggagggtccatgggtctccaagtaaacagaggctcccagagctccctggagggggctcctgccaccgccccggagcctcacagcctgggcatcctccatgcctcctacagcgtcaggtaaggcagagcccttgctgctgctgctcccccaggagtgcggggcccggcgctcacccctctgctgcctttcttcactctttaagtgccagtctgggcacttcgggctccctctttagtggatcgggtggagagaggagagggagaagggctgtgctgggaaacatggagcgacagtgaatggcccctccccctgcccagggaagggcctgggcataaacaaagtggcagcagtgccctgccaacccagtgtctacggcctgccctctgtggatgggaatgggggtactgcgaatgcaaggagtcttgaaacctggtgaaagaatgcagggacagccacctcgcagccaaacggacaggacattcagagcaactccagcacaggccccctccctacgtggcagacagcctcagtcgctatctgccaggttctacagaggagggcgcagagactgaaacacgttaggagcctgtccggagactactggggtggggcacaggtaggatcaatgctggggacctgggtgtggccccttccagggccccaagctgcctttgccttcctggggtttcctttaaagccaccgcgtgaggccctggtgggacatcacatcttgccggcagcagtggaccaggcagatcctcaaagatgtctccttgtacgtggagagcgggcagatcatgtgcatcctaggaagctcaggctccgggaaaaccacgctgctggacgccatgtccgggaggctggggcgcgcggggaccttcctgggggaggtgtatgtgaacggccgggcgctgcgccgggagcagttccaggactgcttctcctacgtcctgcagagcgacaccctgctgagcagcctcaccgtgcgcgagacgctgcactacaccgcgctgctggccatccgccgcggcaatcccggctccttccagaagaagagacagggtctctctttgttgcccaagctggtctcaaactcctggcctcaagcaattctccctcctcagccttccaaagtattgggattacaggcatgagccactgcacccagcctctggggacgttttaaaaaattcatattatttatttaaatctgacacatgtattacgatttaagccgaattggatcatattattatcaaagacatgctttccccagggtgtggtgagtctggaagtggcccttggattcttgggcggtgtgctgcctctttcatgtcctccccagcccatgaattgaaatagcagccacagagactcccagccttcctgtaatttgtgtctcctgcaggtggaggccgtcatggcagagctgagtctgagccatgtggcagaccgactgattggcaactacagcttggggggcatttccacgggtgagcggcgccgggtctccatcgcagcccagctgctccaggatcctagagagtgacaagaaacttggtgagaaataagctggcagtgattacgcgtctccttcagaatctgatcatgggtttgttcctccttttcttcgttctgcgggtccgaagcaatgtgctaaagggtgctatccaggaccgcgtaggtctcctttaccagtttgtgggcgccaccccgtacacaggcatgctgaacgctgtgaatctgtttcccgtgctgcgagctgtcagcgaccaggagagtcaggacggcctctaccagaagtggcagatgatgctggcctatgcactgcacgtcctccccttcagcgttgttgccaccatgattttcagcagtgtgtgctactggacgctgggcttacatcctgaggttgcccgatttggatatttttctgctgctctcttggccccccacttaattggtgaatttctaactcttgtgctacttggtatcgtccaaaatccaaatatagtcaacagtgtagtggctctgctgtccattgcgggggtgcttgttggatctggattcctcagaaacatacaagaaatgcccattccttttaaaatcatcagttattttacattccaaaaatattgcagtgagattcttgtagtcaatgagttctacggactgaatttcacttgtggcagctcaaatgtttctgtgacaactaatccaatgtgtgccttcactcaaggaattcaattcattgagaaaacctgcccaggtgcaacatctagattcacaatgaactttctgattttgtattcatttattccagctcttgtcatcctaggaatagttgttttcaaaataagggatcatctcattagcaggtagtgaaagccatggctgggaaaatggaagtgaagctgccgactgtgcatgactgctctgaacgtctgaaatgagagtgccatgtatttctttcttgacaggacatctcaagtcttttaaccattaagactccatttgtgcctcttggatccaagcaggccttgaatgcaatggaagtggtttatagtcccttgctcttacaacttgcagggacatgtggttatttggaaattgtgactgagcggacccaagaatgtaaataatattcataaacctatgggagactcgtgtgactattttttttccttgttctaggcacagaaaaaaataggtcagcttaaaaatatgtttacattggataaaggattaggcaaaaataaaatgtttcaaggattcctgaccataagtgacagagaaagagagttgtgggtttagatgaagcaaggttatcatgcagaattgggtaagaatgcttctgttcctggaagacccagagttaaatgcagatgtccacacgaggggtcggagttacctgatcacatcgagagagtgctgggca

SEQ ID NO: 327340 - DNA, 771 bp, Artificial Sequence
  derived and/or modified sequence
atgggcctgttcctgctgttcttcgtgctgagagtgagaagcaacgtgctgaagggcgccatccaggacagagtgggcctgctgtaccagttcgtgggcgccaccccctacaccggcatgctgaacgccgtgaacctgttccccgtgctgagagccgtgagcgaccaggagagccaggacggcctgtaccagaagtggcagatgatgctggcctacgccctgcacgtgctgcccttcagcgtggtggccaccatgatcttcagcagcgtgtgctactggaccctgggcctgcaccccgaggtggccagattcggctacttcagcgccgccctgctggccccccacctgatcggcgagttcctgaccctggtgctgctgggcatcgtgcagaaccccaacatcgtgaacagcgtggtggccctgctgagcatcgccggcgtgctggtgggcagcggcttcctgagaaacatccaggagatgcccatccccttcaagatcatcagctacttcaccttccagaagtactgcagcgagatcctggtggtgaacgagttctacggcctgaacttcacctgcggcagcagcaacgtgagcgtgaccaccaaccccatgtgcgccttcacccagggcatccagttcatcgagaagacctgccccggcgccaccagcagattcaccatgaacttcctgatcctgtacagcttcatccccgccctggtgatcctgggcatcgtggtgttcaagatcagagaccacctgatcagcagatag

SEQ ID NO: 327341 - protein, 973 aa, Artificial Sequence
  derived and/or modified sequence
MYNMRRLSLSPTFSMGFHLLVTVSLLFSHVDHVIAETEMEGEGNETGECTGSYYCKKGVILPIWEPQDPSFGDKIARATVYFVAMVYMFLGVSIIADRFMSSIEVITSQEKEITIKKPNGETTKTTVRIWNETVSNLTLMALGSSAPEILLSVIEVCGHNFTAGDLGPSTIVGSAAFNMFIIIALCVYVVPDGETRKIKHLRVFFVTAAWSIFAYTWLYIILSVISPGVVEVWEGLLTFFFFPICVVFAWVADRRLLFYKYVYKRYRAGKQRGMIIEHEGDRPSSKTEIEMDGKVVNSHVENFLDGALVLEVDERDQDDEEARREMARILKELKQKHPDKEIEQLIELANYQVLSQQQKSRAFYRIQATRLMTGAGNILKRHAADQARKAVSMHEVNTEVTENDPVSKIFFEQGTYQCLENCGTVALTIIRRGGDLTNTVFVDFRTEDGTANAGSDYEFTEGTVVFKPGDTQKEIRVGIIDDDIFEEDENFLVHLSNVKVSSEASEDGILEANHVSTLACLGSPSTATVTIFDDDHAGIFTFEEPVTHVSESIGIMEVKVLRTSGARGNVIVPYKTIEGTARGGGEDFEDTCGELEFQNDEIVKTISVKVIDDEEYEKNKTFFLEIGEPRLVEMSEKKALLLNELGGFTITGKYLFGQPVFRKVHAREHPILSTVITIADEYDDKQPLTSKEEEERRIAEMGRPILGEHTKLEVIIEESYEFKSTVDKLIKKTNLALVVGTNSWREQFIEAITVSAGEDDDDDECGEEKLPSCFDYVMHFLTVFWKVLFAFVPPTEYWNGWACFIVSILMIGLLTAFIGDLASHFGCTIGLKDSVTAVVFVALGTSVPDTFASKVAATQDQYADASIGNVTGSNAVNVFLGIGVAWSIAAIYHAANGEQFKVSPGTLAFSVTLFTIFAFINVGVLLYRRRPEIGGELGGPRTAKLLTSCLFVLLWLLYIFFSSLEAYCHIKGF

SEQ ID NO: 327342 - DNA, 2922 bp, Artificial Sequence
  derived and/or modified sequence
atgtacaacatgagaagactgagcctgagccccaccttcagcatgggcttccacctgctggtgaccgtgagcctgctgttcagccacgtggaccacgtgatcgccgagaccgagatggagggcgagggcaacgagaccggcgagtgcaccggcagctactactgcaagaagggcgtgatcctgcccatctgggagccccaggaccccagcttcggcgacaagatcgccagagccaccgtgtacttcgtggccatggtgtacatgttcctgggcgtgagcatcatcgccgacagattcatgagcagcatcgaggtgatcaccagccaggagaaggagatcaccatcaagaagcccaacggcgagaccaccaagaccaccgtgagaatctggaacgagaccgtgagcaacctgaccctgatggccctgggcagcagcgcccccgagatcctgctgagcgtgatcgaggtgtgcggccacaacttcaccgccggcgacctgggccccagcaccatcgtgggcagcgccgccttcaacatgttcatcatcatcgccctgtgcgtgtacgtggtgcccgacggcgagaccagaaagatcaagcacctgagagtgttcttcgtgaccgccgcctggagcatcttcgcctacacctggctgtacatcatcctgagcgtgatcagccccggcgtggtggaggtgtgggagggcctgctgaccttcttcttcttccccatctgcgtggtgttcgcctgggtggccgacagaagactgctgttctacaagtacgtgtacaagagatacagagccggcaagcagagaggcatgatcatcgagcacgagggcgacagacccagcagcaagaccgagatcgagatggacggcaaggtggtgaacagccacgtggagaacttcctggacggcgccctggtgctggaggtggacgagagagaccaggacgacgaggaggccagaagagagatggccagaatcctgaaggagctgaagcagaagcaccccgacaaggagatcgagcagctgatcgagctggccaactaccaggtgctgagccagcagcagaagagcagagccttctacagaatccaggccaccagactgatgaccggcgccggcaacatcctgaagagacacgccgccgaccaggccagaaaggccgtgagcatgcacgaggtgaacaccgaggtgaccgagaacgaccccgtgagcaagatcttcttcgagcagggcacctaccagtgcctggagaactgcggcaccgtggccctgaccatcatcagaagaggcggcgacctgaccaacaccgtgttcgtggacttcagaaccgaggacggcaccgccaacgccggcagcgactacgagttcaccgagggcaccgtggtgttcaagcccggcgacacccagaaggagatcagagtgggcatcatcgacgacgacatcttcgaggaggacgagaacttcctggtgcacctgagcaacgtgaaggtgagcagcgaggccagcgaggacggcatcctggaggccaaccacgtgagcaccctggcctgcctgggcagccccagcaccgccaccgtgaccatcttcgacgacgaccacgccggcatcttcaccttcgaggagcccgtgacccacgtgagcgagagcatcggcatcatggaggtgaaggtgctgagaaccagcggcgccagaggcaacgtgatcgtgccctacaagaccatcgagggcaccgccagaggcggcggcgaggacttcgaggacacctgcggcgagctggagttccagaacgacgagatcgtgaagaccatcagcgtgaaggtgatcgacgacgaggagtacgagaagaacaagaccttcttcctggagatcggcgagcccagactggtggagatgagcgagaagaaggccctgctgctgaacgagctgggcggcttcaccatcaccggcaagtacctgttcggccagcccgtgttcagaaaggtgcacgccagagagcaccccatcctgagcaccgtgatcaccatcgccgacgagtacgacgacaagcagcccctgaccagcaaggaggaggaggagagaagaatcgccgagatgggcagacccatcctgggcgagcacaccaagctggaggtgatcatcgaggagagctacgagttcaagagcaccgtggacaagctgatcaagaagaccaacctggccctggtggtgggcaccaacagctggagagagcagttcatcgaggccatcaccgtgagcgccggcgaggacgacgacgacgacgagtgcggcgaggagaagctgcccagctgcttcgactacgtgatgcacttcctgaccgtgttctggaaggtgctgttcgccttcgtgccccccaccgagtactggaacggctgggcctgcttcatcgtgagcatcctgatgatcggcctgctgaccgccttcatcggcgacctggccagccacttcggctgcaccatcggcctgaaggacagcgtgaccgccgtggtgttcgtggccctgggcaccagcgtgcccgacaccttcgccagcaaggtggccgccacccaggaccagtacgccgacgccagcatcggcaacgtgaccggcagcaacgccgtgaacgtgttcctgggcatcggcgtggcctggagcatcgccgccatctaccacgccgccaacggcgagcagttcaaggtgagccccggcaccctggccttcagcgtgaccctgttcaccatcttcgccttcatcaacgtgggcgtgctgctgtacagaagaagacccgagatcggcggcgagctgggcggccccagaaccgccaagctgctgaccagctgcctgttcgtgctgctgtggctgctgtacatcttcttcagcagcctggaggcctactgccacatcaagggcttctag

SEQ ID NO: 327343 - DNA, 2922 bp, Artificial Sequence
  derived and/or modified sequence
atgtacaacatgcgccgcttgagcctgagccctaccttttcaatggggttccacctgctcgtcacagtttcactgctgttttcccacgtcgaccacgtgatcgccgagactgagatggagggggaaggtaatgaaaccggcgaatgcacgggttcttattattgtaagaagggggtaattctcccaatctgggaacctcaggaccccagtttcggagacaagatcgcccgggctacggtgtatttcgttgccatggtgtatatgtttttaggagttagcatcatagctgaccggtttatgagctccatcgaggttatcacatcacaggaaaaggagattactattaaaaaaccaaacggagaaacgacaaaaaccacagttcggatttggaacgagaccgtgagcaatttgaccttgatggcactagggagctccgccccagagattttactgagtgtgatcgaggtgtgtggccacaatttcactgcaggcgatctggggccttccactatagtgggcagcgcagcttttaatatgtttataatcattgctttgtgtgtatatgttgttcccgacggcgagaccaggaaaatcaaacacctgcgcgtgttctttgtcaccgcagcgtggtccatattcgcttacacatggctctatataatcctatccgtaatctccccaggagtggtagaggtgtgggagggcctcctgacattcttcttcttcccgatttgcgttgtcttcgcttgggtagccgatcggagactcctgttctacaagtatgtgtacaaaagatacagggccggtaagcaacggggaatgatcatcgagcacgaaggggatcggccgtcttccaaaactgagatcgagatggatgggaaagtcgtgaattctcacgtggagaactttctcgatggcgcactagtgttggaggtggatgagcgcgaccaagacgacgaggaggcaaggagagagatggcaagaatcttaaaggagctgaagcagaagcaccccgacaaagagattgagcagctgatagaactcgccaactaccaggtgctgagtcaacagcagaaatcccgagctttctacaggatccaagcaactagactgatgacgggcgccggcaatatcctgaaaaggcatgctgctgatcaggcccgcaaagcggtgtctatgcacgaagttaacacagaggtcaccgaaaatgatccggtgtcaaagatcttttttgaacaggggacttaccagtgtttggagaattgcggcaccgttgcactcacaataatccggcgtggaggggacctcactaataccgtttttgtagacttcagaaccgaggacggaaccgccaacgccgggtcggactatgagtttactgaagggacagtggtttttaagcccggggatacacagaaagagattcgcgtcggcatcattgatgacgatattttcgaggaggatgagaactttttggtgcacttatccaatgtgaaagtctctagcgaggcctccgaggatggcatcctggaggccaaccacgtgtcaacactcgcctgcttagggagcccctccactgccacagttactatctttgacgacgaccatgctggaatcttcactttcgaagagcctgtaacacatgtaagtgaaagtatcggaattatggaggtcaaggtcctgcgcaccagcggggctagagggaatgttatcgttccatataagactatagaaggaaccgcacgggggggaggagaggattttgaggacacatgtggtgaattggaattccagaacgatgaaatagtgaagacgatctcagtcaaggttattgacgatgaagagtacgaaaaaaataagacattcttcttggagattggcgaacctcggcttgtggaaatgagtgaaaagaaagctctcctactgaacgagcttggcggatttactataacaggaaagtatctcttcggacaacccgttttccgcaaagtgcacgcccgtgagcatcctatactctcgactgttatcacgattgctgacgagtacgacgacaaacagcccctgaccagcaaggaagaggaagagcgccggatcgctgaaatgggacgaccgattttaggagagcacactaagctcgaagtgattattgaagaatcgtatgagttcaaatctacagtggataaactgattaagaagactaacctggccctcgttgtcgggacaaattcctggagagagcaatttatagaagctatcactgtgtctgccggtgaggacgacgatgatgacgagtgcggcgaggaaaagttaccaagctgctttgattacgtgatgcatttccttactgtgttttggaaggtccttttcgctttcgtgccacccaccgagtattggaacgggtgggcctgtttcattgtatccatccttatgattggactgcttacagcattcataggcgatctagcctcacatttcggttgcactatcggtttgaaggactcagtgactgccgtggtcttcgtggcactgggaactagcgtccccgatacttttgctagcaaagttgcagcaactcaggaccagtacgcagatgcttcaatcggaaatgtaaccgggtccaatgcggtcaatgttttcctgggcatcggcgtcgcctggtccattgctgcaatctatcatgccgctaatggagaacagttcaaggtctccccgggcaccctggctttttccgtgaccttgttcactatcttcgccttcatcaatgtcggcgtgctgctataccggcgacgtcccgagattgggggggaactgggtggaccccggactgccaaactgcttacttcttgcctattcgtgctcctctggctgctctacatctttttcagcagtttggaggcatattgtcacattaaaggtttctag

SEQ ID NO: 327344 - DNA, 2922 bp, Artificial Sequence
  derived and/or modified sequence
atgtacaatatgagaaggttgagcctgtctccgaccttcagcatgggttttcacttgctcgtgaccgtgtccctgctgttttcgcatgtcgaccacgtgattgccgagactgagatggagggcgaagggaatgaaactggggagtgtacagggagttattactgtaaaaagggagtgatcctgcccatttgggaaccacaggatccctcctttggcgacaagatagcgcgagccaccgtgtacttcgttgccatggtgtatatgtttctgggagtgtccatcattgctgaccgcttcatgtcctctattgaggtgattacatcccaggagaaggagataacaattaaaaaacccaacggcgaaaccaccaagactacagtgcgtatctggaatgaaaccgtatcaaatctaactcttatggcattagggtccagcgcccccgagattctgctctccgtgatcgaggtgtgtggacataatttcaccgccggggatttgggcccaagtactattgttggaagcgccgcttttaatatgttcattattattgcactatgcgtgtatgtagtacccgatggcgaaacacgcaaaatcaagcacctgcgtgttttttttgtcacggctgcatggtctatcttcgcgtacacctggttatacattatcctaagcgtgatttcacctggcgtggtggaagtgtgggagggtcttctcaccttcttcttttttcccatctgcgtcgtttttgcctgggtggcagatagacggctcttgttttataagtacgtctacaaacgctaccgcgcaggaaagcagcgcggcatgattatagagcacgaaggcgaccgcccgagctcaaaaactgaaattgaaatggacggaaaggtggtcaatagccacgtcgagaatttccttgacggggctctcgttctggaagtggacgaacgggatcaagacgacgaggaagcgagacgggagatggcccgaatccttaaggagttgaaacaaaaacaccctgataaggaaatcgaacagctgatcgagctcgcaaattatcaggtcctgagtcaacagcagaaatccagggcattttaccggatccaagccaccaggcttatgactggagccggcaatattctgaaacgccatgccgcggaccaggctcgtaaggcggttagcatgcatgaagtgaatactgaagtcactgagaatgacccggtatccaagatattcttcgagcagggcacttaccagtgtctcgaaaactgcgggactgtggcgctcacaatcatcagaaggggtggagacctcacgaacacggtcttcgttgatttcagaactgaagacgggacagccaatgcaggctctgactacgaatttactgaaggcacagtcgttttcaagcccggcgatacccaaaaagagataagggtgggaattatcgatgacgacatcttcgaggaggatgagaactttctggttcatctctccaacgtcaaggtctcttccgaagcatctgaggacgggatcctggaggccaatcatgtgtcgacattggcatgtctgggctcaccaagtacagccaccgttactatttttgatgacgatcacgctggaatttttactttcgaggaacccgtgacgcacgtgtccgagagtatcgggataatggaagtgaaagtgctgcgaacatccggggcgagaggaaacgttatagtcccatacaagaccattgagggtactgcaaggggtggaggggaggattttgaggacacctgcggcgagctagagtttcagaatgatgagatagttaagaccattagtgtgaaggtgatcgacgatgaggagtacgaaaaaaataaaacattctttctggaaatcggggaacctcggctggtcgaaatgtctgagaagaaagcattactattgaacgaactgggaggatttactattacagggaaatatctgttcggccagccagtcttcagaaaagtccatgcaagagagcatccaatcttgtcaacagtgataactattgcggatgaatatgacgacaaacaacccttaacatcaaaagaggaggaggagaggagaatcgcagaaatgggcagacccattcttggggagcatacgaagctagaggttatcatcgaggaaagctacgaatttaaatctacggttgataaacttattaaaaaaacaaaccttgccttagtagtggggaccaattcgtggcgcgaacagttcattgaagctatcactgtatccgctggcgaagatgatgacgatgatgaatgtggagaagagaaattaccttcttgcttcgattacgttatgcatttccttacggtcttctggaaagtactgtttgcttttgtcccccctactgagtattggaatggttgggcttgtttcattgtgtccatcctcatgatcgggcttctgacagcattcattggagacttagctagccacttcggatgtaccatcgggctgaaagactctgtgaccgctgtcgtgttcgtggccctgggcacatctgtccccgataccttcgccagcaaagtagccgctacccaggaccagtatgccgacgcctctattggcaacgtgactggatcaaatgccgtgaacgtcttcctgggaattggggtggcctggtctatcgctgctatctatcatgcagccaacggagaacagtttaaagtcagccccgggactctcgcatttagcgtgacattattcacaatcttcgcctttatcaacgtgggggttctgctgtaccggcgtcgacctgaaatcggcggagaactcggcggacctcggactgccaagctgctgactagctgtctttttgtgctgctgtggctgctttacatcttcttcagcagcctggaggcctattgccatatcaagggcttctag

SEQ ID NO: 327345 - DNA, 2922 bp, Artificial Sequence
  derived and/or modified sequence
atgtacaacatgcggaggctcagtctatcacccacatttagcatgggtttccacctgctcgtaacagtgtcattgctgttcagtcacgtggaccatgtaatcgccgagactgaaatggagggtgagggcaacgagactggggaatgcacggggagttattattgcaaaaaaggcgtgatactgccaatatgggaaccccaggacccaagcttcggggacaagattgctcgtgcaactgtctactttgtcgccatggtttacatgtttctgggtgtgtcgatcatagccgatagatttatgagttcgatcgaggtgattacgtctcaggaaaaggaaatcaccattaaaaagcctaacggagagacaaccaagacaaccgtgcgaatatggaatgagaccgtatcaaacctgactttgatggcactgggctccagcgccccagaaatcctgttgtccgtaattgaagtgtgcggacataacttcacggcgggcgatctaggaccctctaccatagtaggaagcgccgctttcaatatgttcattattatcgccctttgcgtctatgtggtcccagacggggaaactagaaagatcaagcatttgcgcgtgttctttgtcactgccgcatggagcattttcgcctatacatggttatacattatactctcagtgatttcccccggtgtggtggaggtatgggaaggactcctgaccttcttcttctttcccatatgtgtcgtgttcgcatgggtcgcagatcggcgcctcttattttataaatatgtgtataagcgataccgcgcaggcaagcaaagggggatgattatcgagcatgaaggagatcgacccagcagtaagactgagattgaaatggacggaaaggtcgttaactctcatgtggaaaactttctcgacggtgctctggttcttgaagttgacgagcgggatcaggatgatgaggaagccagacgggagatggctagaatcctcaaagaattaaagcagaagcaccccgacaaggagatcgagcagcttatcgaactggccaattaccaagtgctgtctcaacagcagaagagccgtgccttctatcgtattcaggcaacacgtctaatgaccggagcaggcaacattctgaagcgccatgcagccgaccaagcacgcaaggccgtttccatgcacgaagtgaacaccgaagttacagagaatgacccggtgagcaagattttttttgagcagggaacataccagtgtttggagaactgtgggaccgtggcgctgacaatcatcagacgcgggggagacctgactaacaccgtgtttgtggatttcaggaccgaagacggtaccgccaacgccggttcggactacgagtttaccgaaggaactgtcgttttcaaacccggagacacgcagaaagagattcgggtgggcattatagacgacgacatctttgaggaggacgaaaacttcctcgttcatctatccaatgtcaaagtgtcaagtgaggccagcgaggatgggatattggaggcaaatcatgtgagcactttggcatgtctgggctcccccagcacagccacagtgacaatcttcgatgatgatcacgcaggcattttcacctttgaagaacctgtcacacatgtgagcgagtctataggtatcatggaggtgaaagtgctacggacctcaggagctcgggggaacgtcatcgtcccatataagacaattgagggaactgccagaggaggaggggaagacttcgaagatacatgcggcgagctcgaattccaaaatgacgaaattgtgaagactattagcgttaaggttattgatgacgaagaatatgaaaagaacaagacattctttctcgagattggcgagccacgactggtggaaatgtccgagaaaaaagccttactgctgaatgagctgggaggcttcacaatcacaggtaagtatctcttcggccagcctgtctttcgtaaggtacacgccagggaacaccctattctgtctaccgtaattactatcgctgacgaatacgacgataaacagcctctcacctcaaaagaggaagaagaaaggcggattgccgaaatgggacgccccatcctgggagagcacacgaaactggaggtgataattgaggagagctatgagttcaagtccaccgtggacaagttaataaagaagacgaatcttgcactcgtcgtaggcaccaattcatggcgggagcagttcatcgaggctatcacagtctccgccggggaggacgatgacgacgacgaatgcggagaagagaaactgcccagctgtttcgactacgtgatgcatttcttgactgtgttctggaaggttctgtttgcctttgtgccgcccaccgagtactggaatggctgggcttgtttcatagtcagtattttaatgattggcctgctgacggcctttatcggggacctcgcctcacacttcggatgtaccatcggacttaaggactccgtgactgccgtcgtttttgtagctctgggcacgtctgtgcccgacacgttcgcttccaaagtagctgctacacaggatcagtatgcggacgcatctatcggcaacgttacggggagtaatgcagtaaacgtctttctgggcattggcgtggcttggagcatagccgccatctaccacgcagctaacggcgagcagttcaaggtgagccctgggaccctggccttctcagtaaccctgtttacaattttcgcctttatcaatgtgggcgtgctgctgtacaggcggaggcccgagattggaggagaacttgggggtcctcgcacagccaagctgttgacctcctgtctttttgtgcttctttggttattgtacatttttttctcatccctggaggcctactgtcatataaagggattttag

SEQ ID NO: 327346 - DNA, 2922 bp, Artificial Sequence
  derived and/or modified sequence
atgtacaacatgaggcggctgagcctgagccccaccttctccatgggcttccacctgctggtgacagtgtccctgctcttcagccacgtggaccacgtgattgctgagacagagatggagggggagggcaatgagaccggggagtgcaccggcagctactactgcaagaagggcgtcatcctgcccatctgggagccccaggaccccagctttggagacaagatcgcccgggccaccgtgtactttgtggccatggtgtacatgttcctgggcgtgtccatcatcgctgaccgcttcatgagcagcattgaagtcatcaccagccaggagaaggagatcaccatcaagaagcccaatggagagaccaccaagaccaccgtgcgcatctggaatgaaacagtgagcaacctgaccctgatggccctgggcagcagcgcccctgagatcctgctgagcgtcatcgaggtgtgtggccacaacttcaccgctggggacctgggccccagcaccatcgtgggcagcgctgccttcaacatgttcatcatcatcgccctgtgtgtgtatgtggtgcctgatggagagaccaggaagatcaagcacctgcgggtcttctttgtgacagctgcctggagcatctttgcctacacctggctgtacatcatcctgagcgtcatcagccctggggtggtggaggtgtgggagggcctgctgaccttcttcttcttccccatctgtgtggtgtttgcctgggtggccgaccggcggctgctcttctacaagtatgtgtacaagcgctaccgggccggcaagcagaggggcatgatcatcgagcacgagggggaccggcccagcagcaagacagaaattgagatggatggcaaggtggtgaacagccacgtggagaacttcctggatggagccctggtgctggaggtggatgagcgggaccaggatgatgaggaggcccggcgggagatggcccgcatcctgaaggagctgaagcagaagcacccagacaaggagattgagcagctgattgagctggccaactaccaggtgctgagccagcagcagaagagccgggccttctaccgcatccaggccacccggctgatgactggagctggcaacatcctgaagagacatgctgctgaccaggccaggaaggctgtgtccatgcatgaggtgaacacagaggtgacagaaaatgaccctgtgtccaagatcttctttgagcagggcacctaccagtgcctggagaactgtggcaccgtggccctgaccatcatcagaagaggaggagacctgaccaacacagtgtttgtggacttcagaacagaagatggaacagccaatgccggcagtgactatgagttcacagagggcaccgtggtgttcaagccaggggacacccagaaggagatccgggtgggcatcattgatgatgacatctttgaagaagatgagaacttcctggtgcacctgagcaatgtgaaggtgagcagcgaggcctctgaagatggcatcctggaggccaaccacgtgtccaccctggcctgcctgggcagccccagcacagccaccgtgaccatctttgatgatgaccatgctggcatcttcacctttgaggagcctgtgacccacgtgtctgagagcatcggcatcatggaggtgaaggtgctgcggaccagcggggcccggggaaatgtgattgtgccctacaagaccatcgagggcacagcccggggcggcggggaggactttgaggacacctgtggggagctggagttccagaatgatgagatcgtgaagaccatctctgtgaaggtgattgatgatgaggagtatgagaagaacaagaccttcttcctggagatcggggagccccggctggtggagatgtctgagaagaaggccctgctgctgaatgagctgggcggcttcaccatcaccgggaagtacctgtttggccagcctgtgttcaggaaggtgcacgcccgggagcaccccatcctgagcaccgtcatcaccatcgcagatgaatatgatgacaagcagcccctgaccagcaaggaggaggaggagaggagaattgctgagatgggccggcccatcctgggggagcacaccaagctggaggtgatcatcgaggagagctatgagttcaagagcacagtggacaagctgatcaagaagaccaacctggccctggtggtgggcaccaacagctggagggagcagttcatcgaggccatcaccgtgtctgctggggaggatgatgatgatgatgaatgtggggaggagaagctgcccagctgctttgattatgtgatgcacttcctgaccgtcttctggaaggtgctgtttgcctttgtgcccccaacagagtactggaatggctgggcctgcttcatcgtgtccatcctgatgattggcctgctgacagccttcatcggggacctggccagccacttcggctgcaccatcggcctgaaggacagcgtgacagctgtggtgtttgtggccctgggcacctctgtgcctgacacctttgccagcaaggtggccgccacccaggaccagtatgcagatgccagcattggaaatgtgacaggcagcaatgctgtgaatgtgttcctgggcatcggcgtggcctggagcattgctgccatctaccacgccgccaacggggagcagttcaaggtgtccccaggcaccctggccttctctgtgaccctcttcaccatctttgccttcatcaacgtgggcgtgctgctgtacagaagaagacctgagattggaggagagctgggcggccccaggacagccaagctgctgaccagctgcctgtttgtgctgctgtggctgctgtacatcttcttcagcagcctggaggcctactgccacatcaagggcttctag

SEQ ID NO: 327347 - DNA, 2922 bp, Artificial Sequence
  derived and/or modified sequence
atgtacaacatgcggcggctgagcctgagccccaccttcagcatgggcttccacctgcttgtaactgttagcctcctgttcagccatgtggaccacgtgatcgccgagaccgagatggaaggcgagggcaatgaaacaggggaatgcaccgggtcttattactgtaagaaaggagtgattctccccatctgggaacctcaagacccatccttcggtgataaaatagcaagagccaccgtttatttcgtggcgatggtgtacatgtttctgggagtgtccattatcgctgatcgcttcatgtcttcgatcgaggtcataaccagccaagaaaaagagataaccattaaaaagcccaacggcgagaccactaagactaccgtcaggatctggaacgaaacagtgtctaatctcaccctgatggctctaggatcgagcgcccccgaaattttgctctccgtcatagaggtgtgcggccataactttaccgcaggggacctcggcccttccacaatcgtaggcagtgccgcgtttaatatgttcatcatcatcgccctgtgtgtgtatgttgtcccagatggtgaaacccggaagatcaagcacctccgcgtcttttttgtcactgccgcttggagtatctttgcttacacctggttgtacattattctgtccgttatttctcctggggtggtagaagtttgggagggactgttgacttttttcttttttccaatatgcgtggtcttcgcatgggttgccgacagacggctcttgttctataaatacgtctacaaacgataccgggcgggcaagcagagggggatgatcatcgagcacgagggtgaccggccaagttccaagactgagatagaaatggacggcaaggtggttaattctcacgtcgagaatttcttggatggcgcacttgtgcttgaagtcgatgaacgcgatcaagatgatgaagaagctagacgtgagatggccagaattctgaaggagctgaaacagaagcatccagataaggaaattgaacagctcatagaactcgccaattatcaagtcctcagccagcaacagaagtcgcgggcattttaccgcattcaggctacaaggttgatgacgggggcgggaaacatactcaaacgccacgcagcggaccaggctcgaaaagctgtgagcatgcacgaggtgaataccgaggtgaccgaaaatgatcctgtctctaaaattttttttgagcagggcacctaccaatgtctcgagaactgtggaacagtggccctcacaatcattcgccggggtggcgatctgactaacactgtgttcgtggatttcagaacagaggacggaaccgctaacgccggttctgactacgagttcaccgaaggaactgttgttttcaaacccggcgacacacagaaagagattagggtgggcatcattgacgatgatattttcgaagaagacgaaaacttcctggtccacctgtcaaatgtaaaggtgagctcggaggcttcggaagatgggatcctggaagccaatcacgttagcaccttggcctgtcttggctccccctcaacagctactgtcactatctttgatgatgatcacgcagggatttttaccttcgaggaacccgtgacacatgtctcagagtccatcgggatcatggaagtcaaggtgctgaggacttcaggcgcaagaggcaacgtcatcgtgccctataagaccatcgaaggcacagctcggggaggcggcgaggacttcgaggacacctgcggtgaattagagtttcagaacgacgagatcgtgaaaaccatatctgtaaaagtcattgacgacgaagaatatgaaaaaaacaaaacctttttcctggagatcggcgagccaaggttagtggaaatgagcgaaaaaaaagctctcttgcttaacgagctggggggattcactatcactggtaagtacctcttcggccagccagtcttccggaaagtgcacgcccgggagcacccaatactctcgaccgtaattaccatcgcagacgaatacgatgacaagcagcccctgacttcgaaagaggaggaggaaaggagaattgccgagatgggtcggccaattttaggcgagcacaccaagctggaggtgatcatagaagagtcctacgagttcaagtcgactgtggataagcttataaagaagacaaacctcgccctggtcgtgggaaccaattcgtggagggagcagtttattgaggctatcactgtaagcgccggcgaagacgacgatgacgatgaatgtggtgaggaaaagttgccctcgtgtttcgactacgtgatgcatttcctgaccgtcttctggaaggtgctcttcgcctttgttccccccactgagtactggaacggctgggcttgttttatcgtttccattctaatgatcggcctccttacagcctttattggggacctggcttcccacttcggatgtacaatcggtctgaaggattctgtgacagctgtggtatttgttgccctcgggacgtccgtcccagacaccttcgccagcaaagttgccgctactcaagaccagtacgcagatgccagcatcggcaacgtgactggctctaatgccgtgaacgtgttcttagggatcggcgttgcatggtctattgcggcgatatatcatgctgctaacggggaacagtttaaggtttcccccggtactctggccttctcagtgaccctattcacgatttttgcattcattaacgtgggtgtcttgctgtatcgtcggcgcccagaaattggaggagaactcggcggcccacggacagccaaacttctgactagttgcctttttgtacttctttggctcctctatatcttcttcagctccctggaagcgtactgtcacatcaagggcttttag

SEQ ID NO: 327348 - DNA, 2922 bp, Artificial Sequence
  derived and/or modified sequence
atgtacaacatgcggcggctgagcctgagccccaccttcagcatgggcttccacctactggtgaccgtctccctgctgttttcacacgtagatcatgtgatcgctgagacggagatggagggtgagggcaacgaaaccggggagtgcactggatcgtactactgtaagaagggggtgatcctgcctatatgggagccacaggacccttcctttggggataagatcgcccgagctaccgtgtactttgtggcaatggtttatatgtttctgggggtgtcaattatagcagacaggttcatgtcctccatcgaggttataacatcccaagagaaagagattacaattaaaaagccaaacggcgagaccacgaaaacgactgtgcgcatttggaacgaaaccgttagtaacctaaccctgatggccctgggctcctctgcgcccgagatcctattatctgtgatagaagtgtgcggacataatttcacagccggtgacctgggcccatcaaccatcgtgggaagcgcggccttcaatatgttcataattatcgcactatgtgtttacgttgtgccagacggagaaacccgtaagattaagcacttaagagtcttttttgtgaccgccgcatggtccatcttcgcctatacgtggctctatatcatcctgagcgtgatctctcccggcgtggtcgaggtgtgggaagggctcctgacattttttttctttccaatctgcgtggtgtttgcctgggtagccgatcggagactgcttttttacaaatacgtgtacaagcgctaccgagcaggcaagcagagggggatgattatcgagcacgagggggacagaccgtcaagtaaaacagaaattgaaatggacgggaaagtggtgaactctcacgtcgaaaattttctggatggggcgctcgtgctggaagtcgacgaaagagaccaagatgatgaagaagcaaggagggagatggcccgaattctgaaggagctgaagcagaagcatccagataaagagatcgaacagctcattgaacttgcaaactatcaggtcctgtctcagcagcagaaaagccgtgcattctacaggatccaggccacgcgcttaatgacgggcgctggaaacatccttaagaggcatgctgctgaccaggctaggaaagccgtgtctatgcacgaggtgaacacagaggtgacagagaacgaccccgtctctaaaatattcttcgaacaaggtacatatcaatgcctggagaactgcggcactgttgcacttaccatcatacggcgcggtggcgatttgactaatacagtgtttgtggactttcggaccgaggatggcaccgccaatgccggctcagattacgagttcacagaagggactgtggtcttcaagcctggtgatacccagaaggagatcagagtgggaattattgacgacgacattttcgaagaagacgagaacttcctggtccacctgtcaaatgttaaggtatccagcgaggcatctgaggatggcatcttagaggccaatcacgtgtctacactcgcctgcctgggctctccaagtactgccactgtgacaatcttcgatgatgatcatgctgggatattcacctttgaagagcctgtgactcatgtgtctgagtctattggcattatggaagtcaaagtcctgagaactagtggagctagagggaatgtcatcgttccttacaagactatagaaggtaccgctcgaggaggtggcgaggactttgaggatacctgtggagagctggagtttcagaatgatgagattgtgaagactatcagtgtgaaagtaatcgatgacgaagagtatgagaagaataaaaccttcttcttagaaatcggagaaccgcgcttggttgaaatgtccgaaaaaaaggccctgcttctgaatgaactgggagggttcaccatcaccggcaagtatttgtttggtcaaccagtattcagaaaggtacacgcccgcgagcacccaattttgagtacagttatcaccatcgctgatgaatatgatgacaaacagccgcttaccagtaaagaggaggaggaacggcgcatcgccgaaatgggccggccaatactgggagagcacacaaaactggaggtcatcattgaggaatcctacgagttcaagtccactgttgacaagctgattaagaaaacaaatcttgctctggtggtgggcactaattcttggagagaacaattcatcgaagctattaccgttagcgctggggaagacgacgatgatgacgaatgcggagaagaaaaacttccatcgtgctttgactatgttatgcactttttgactgtgttctggaaggtgctgttcgcgtttgtgccacctaccgaatactggaatgggtgggcttgttttatcgtgagcatattaatgatcggactgctgaccgccttcataggggatctggcttctcactttggatgcacgatcgggctgaaggacagtgttacagccgtggtgtttgtagcactcgggacttccgtccccgacactttcgcaagtaaggtggccgccacccaggatcaatatgcagatgcttcaatcgggaatgtcacaggctctaacgcagtgaacgtattcttgggtatcggggttgcatggagtattgccgccatttatcacgccgcaaacggcgagcagtttaaggtgtctcccggtacactagcatttagcgttacacttttcaccatcttcgccttcatcaacgtaggagtgttgttatatagacgccgacccgaaattggcggcgagctgggcgggccccggactgctaagcttttgacctcctgtctatttgtcctgctctggctgctttatatctttttcagtagtctggaagcctattgccacattaagggcttttag

SEQ ID NO: 327349 - DNA, 2922 bp, Artificial Sequence
  derived and/or modified sequence
atgtacaacatgcggcggctgagcctgagccccaccttcagcatgggttttcatcttctcgtcacggtcagcttgctcttcagccacgtggatcacgtgattgcagagacggagatggagggagagggcaatgagacaggcgagtgtacaggcagctactactgcaagaagggggtcatcttgccaatctgggagccccaggacccaagtttcggggataaaattgctagagccacagtatatttcgttgccatggtgtacatgttcttaggcgtgagcatcatcgcggaccggttcatgagctccattgaggtgattactagtcaggaaaaagagatcacgatcaagaagcccaacggtgaaaccacaaagacgactgtcaggatatggaacgagaccgtgagtaacctaacactgatggctttgggatccagcgcgcccgaaatccttctgagcgtgatcgaggtgtgcggacacaattttactgcaggtgatctgggcccctccaccatcgtcggcagcgctgccttcaacatgttcattatcatcgcactgtgcgtatacgtggtgccggacggtgaaacacgcaagattaaacacttgagagtcttctttgtgactgccgcctggagcatttttgcctacacgtggctgtatattatcctgtccgttatttcccccggagtggtggaggtttgggaaggcctactcacgtttttttttttcccaatctgcgtcgtgtttgcgtgggtagcagacagaaggcttcttttctacaaatacgtttacaagagataccgagccggaaaacagcgtggaatgattatagagcacgagggcgatcggcccagtagcaaaacggagatcgaaatggatggcaaagtagttaactcccatgtggagaactttctggatggagctctggtgttggaggtggacgaaagagaccaggatgatgaggaggctcgacgggaaatggctcgtatcctgaaggaattgaaacagaagcatcccgacaaagagatagagcagctaattgaactggcaaactaccaggttctttcccaacagcagaaaagcagagcattctatcgtatccaggctactagactgatgactggcgcaggaaacattctgaagagacatgcggccgaccaagcgagaaaagcagtctccatgcatgaggtcaacacagaggtgaccgaaaacgatccagtatctaaaattttctttgaacagggcacatatcaatgtctggaaaattgcgggactgtggctctgaccattataaggagaggaggtgacctgacaaacacagtgtttgtggattttcgaacggaagatggcacggccaatgccgggtcagattacgagtttacagagggaacggtggtgttcaaaccaggtgacacccagaaagaaatcagagtgggcattatagacgatgatatcttcgaagaagatgaaaattttttagtccacctgagcaatgtgaaggtcagttcagaagcatccgaggatgggatcctcgaggctaatcatgtgtccacgctggcttgcttagggagtccatcgacggccacagtgaccattttcgatgacgatcatgccggtatatttacattcgaagagcctgtgacccacgtgagcgagagcattggcattatggaagtgaaagttctgcgtacttctggagccaggggcaatgtgatcgtcccttacaagactattgagggcacagcgagggggggcggagaagacttcgaggacacatgtggcgaactcgaatttcagaacgacgaaatcgtaaaaaccatcagcgtgaaggtaatcgatgacgaagaatatgagaagaataaaacgtttttcctggagattggagagcccaggttggttgaaatgtctgaaaagaaagccctgcttctgaacgaactcggtggctttactatcacaggaaaatacctgtttggccagccagtttttagaaaggtgcatgcgagagaacatccaattctgtcaaccgtcattacaatcgcagatgaatacgatgataaacagcccctgacgagtaaggaggaggaggagcggagaatcgctgagatggggcgccccatcttaggtgagcacacaaaattggaggtgattatcgaggagtcctatgaatttaagagcaccgtagacaagttgataaaaaagactaaccttgccctggttgtgggaacaaacagttggagggagcagtttatcgaagcaattacagtatctgctggagaagacgacgacgatgatgaatgtggggaagagaagctgcccagctgctttgactatgttatgcattttctgaccgtattttggaaggtcctcttcgccttcgttccacctactgaatattggaatggctgggcctgctttatcgtgagcatcttgatgataggcctgctaactgcgttcatcggtgatctggcatctcatttcggatgtaccattggtctcaaggatagtgtaactgccgtggtgtttgtggcccttggcacatccgttccagacacatttgcgtcaaaggttgcagctactcaggaccaatatgcagatgcaagcatcggcaacgtgaccggctcaaatgcagttaacgtattcctgggaattggcgtcgcgtggtcaatagcagcaatttaccacgcagcgaacggggaacagttcaaagtgagtcctggaaccctggccttcagcgtcaccctgtttactatatttgcatttatcaacgttggtgtgctgttgtatcgccgccgccccgagatcgggggtgaactcggggggcccagaactgcaaagcttctcacttcttgcctctttgtgcttctttggctgctttatatcttcttcagctccttagaagcctattgccacataaagggtttctag

SEQ ID NO: 327350 - DNA, 2922 bp, Artificial Sequence
  derived and/or modified sequence
atgtataacatgcgaagactcagccttagcccaaccttttcaatgggattccatttgctcgtaaccgtttccctgctgttcagccatgtcgatcatgttatcgctgagactgaaatggaaggcgagggaaacgagactggagagtgtaccggatcctactactgtaagaagggagtgatccttccaatatgggagccacaggatccaagttttggggataagatcgccagagctacggtctactttgttgcaatggtgtatatgttcctgggcgtgtctataattgccgacagattcatgtctagcatcgaggtgataacctcccaagagaaggagatcacaattaagaagcccaatggagagactacaaaaacgacagtccggatctggaacgagactgtgagcaatctgaccctcatggcccttggctccagtgcccctgagattctgctgagtgttatcgaagtgtgcggtcacaacttcactgccggagacctggggccttccacaatcgttggaagcgccgcatttaacatgtttataatcatagcattgtgcgtttatgttgtgcccgacggagagacacgaaaaattaagcacttgcgcgtctttttcgtgacagcagcctggtccattttcgcttacacatggctgtatataatcttgagcgttattagcccaggcgttgtcgaggtgtgggaaggcctgttgactttctttttcttcccaatctgcgtcgtgttcgcttgggttgcagaccggagactgttgttctacaagtacgtatacaaaagatacagggccggtaagcagaggggaatgattattgagcacgaaggcgatcgtccctcaagcaaaaccgaaatcgagatggacggcaaggtagtgaacagtcacgtagagaatttcctggacggcgctctggtcctcgaagttgatgaacgggaccaggacgacgaggaggcgcgtagagaaatggcaaggatacttaaggagttaaagcagaagcaccctgataaggagattgagcagctgattgagttagctaactatcaggttctcagtcagcagcagaaaagcagagctttttatcgaatacaggctaccagactcatgaccggcgctggcaacattctgaagagacatgccgcagaccaggctcgcaaggctgtgagtatgcatgaggtcaacactgaagtgactgaaaacgaccccgttagtaagatctttttcgagcagggtacctaccagtgcttggaaaactgcgggacagtggctttaacaatcatcaggcgcggaggcgatctaacaaataccgttttcgtcgattttaggactgaagatggcacagcgaacgctgggtctgattatgagttcactgaggggactgtggtctttaagcccggtgacactcagaaagagatacgggtgggcattatcgatgacgatatatttgaagaggatgagaacttccttgtccacctcagtaacgtcaaagtttcttccgaggcatccgaggatggtatcctcgaggccaaccacgtgagtacactggcatgtttgggctcaccgtcgactgcaaccgtcacgatttttgatgacgaccacgccggtatattcactttcgaagagccagtcacacacgtttccgagtctataggtatcatggaagtaaaggtgcttagaacaagtggagctcggggaaatgtgatcgttccttacaagaccatcgagggcacagctcgtgggggtggcgaggacttcgaggacacgtgtggagagctagaattccaaaatgatgagatcgtcaagaccatatctgtaaaggtaatcgacgacgaggagtatgagaagaacaagactttctttctcgagattggcgagcccagactggtcgaaatgtcggaaaagaaagctcttctactgaacgagctgggcggtttcacgataacgggcaaatatctgtttggtcagcccgtgttcaggaaggtgcacgcaagggaacaccctatactgagcacggtcattacaatcgccgatgaatatgacgataaacagcctctgaccagcaaggaggaggaagaacgcagaatcgccgaaatgggccgtccaatcctgggcgaacacactaagctggaggtgatcattgaggaatcttatgaattcaagagtacagtagacaagctgataaaaaaaactaacctggccctggttgtcggaactaacagctggcgggaacaatttatcgaagccatcaccgtgtctgcgggagaggatgacgatgatgatgaatgtggagaggagaagctgccctcttgtttcgattatgtcatgcacttcttaaccgttttctggaaagttcttttcgccttcgtgccgccaaccgaatattggaatggctgggcatgctttatcgtttcaatccttatgatcggcctgctcacagccttcatcggggatttggcttcacacttcggctgtaccataggcttaaaagattcagtgactgccgtcgtgtttgtggccctgggcactagtgtcccggataccttcgcctctaaagttgccgcaacccaagaccagtacgccgacgcttcaatcggcaacgtcactgggtccaacgcggtgaatgtcttccttggtattggcgtggcctggagtatagctgcgatttaccacgccgctaacggagagcagttcaaggtgtcccccggtactcttgcatttagcgtgacactatttaccatttttgcatttatcaatgtcggagtacttctgtacagacggcgtccagagatcggtggggagctcgggggacctcggaccgctaaactcctcaccagctgcctgtttgtgctcctgtggttgttgtacatttttttttcatccctggaagcttactgccatatcaagggcttttag

SEQ ID NO: 327351 - DNA, 2922 bp, Artificial Sequence
  derived and/or modified sequence
atgtataacatgcgcaggctgtctctttcaccgacatttagcatgggattccatcttctggtcacagtgtccctcctcttctcccatgtcgatcatgtgatcgccgagacagaaatggagggcgagggaaacgaaactggggagtgcactggatcttactactgcaaaaaaggagtcattctcccaatctgggagcctcaggacccctctttcggcgacaaaatcgccagagctaccgtatacttcgttgccatggtttacatgttcttgggagtgtctattatcgccgataggtttatgtcctcgattgaggttatcacatcccaggagaaggagataaccattaagaagcccaacggggagaccaccaagactactgtccgaatttggaacgaaaccgtcagtaatctcacactcatggcactcggatctagtgccccagagattcttctgtccgtaattgaggtgtgtggccataacttcacagccggagacctgggcccatccactattgtgggcagcgccgcttttaacatgttcatcatcatagcactgtgtgtgtatgtagtcccagacggtgagaccagaaagatcaaacatctgagagtgttctttgttaccgccgcttggtcaatcttcgcctatacctggctctatatcatactatcggtaataagccctggcgtggttgaggtctgggaaggcctgctaactttcttcttcttccccatctgcgtagtgtttgcctgggtagcagatcgtcggcttcttttttataaatacgtgtacaaacggtaccgcgcaggcaaacagagaggcatgatcatcgagcacgaaggtgatcggccatcaagtaaaacagaaatcgagatggacgggaaagttgttaactcccatgtagaaaacttcctggacggggctctggtcctggaagtggatgaacgggaccaggacgatgaggaggccaggagagaaatggccaggattctcaaggaactcaagcaaaaacatcccgataaggagattgagcaactcattgaattagctaattatcaggtgttatcccagcaacagaaaagccgcgctttttacagaatacaagcgacgagactcatgacaggagcaggaaatatcctcaaacgtcacgctgccgaccaagctcgtaaagctgtgagcatgcatgaggtgaacacagaagtgaccgagaacgacccagtttccaaaattttttttgaacagggaacttatcagtgcctagaaaattgtggtacggtagcgctgactattatccgcaggggcggagatcttacaaacactgtattcgtggacttccggacagaagatggcactgcaaacgctggatcagactatgaattcactgaaggaacagttgtgtttaagcctggggatactcagaaggagatacgggtcggaatcattgacgatgacatctttgaagaggacgagaatttccttgtacatctctctaacgtgaaggtgagcagcgaggcttccgaagatggcatcttagaagccaaccacgtctctacccttgcatgtttgggttccccatctactgccacggtaacgatctttgatgacgaccacgccggaattttcaccttcgaggaacccgttacccacgtatctgagagcattgggatcatggaggtgaaggttctgcgcacttccggagcaaggggaaacgtcatagttccttacaaaactatagaagggactgctcgaggcggtggcgaagatttcgaggacacgtgcggagagcttgagtttcagaacgatgagattgtcaagaccatctctgtgaaggtcatcgacgacgaggagtacgagaaaaacaaaaccttcttcctcgaaattggcgaacccaggctcgtggaaatgtcagagaaaaaagcactattgctgaacgaactgggtggctttacaatcactgggaagtacttgtttgggcagcctgtcttccgcaaggttcacgctcgggaacaccctattcttagcactgtcatcacgatcgcggacgagtatgatgacaagcagcccctaacgagcaaggaagaagaggagcgccgtattgccgagatggggcgaccgattctgggggagcacactaagttagaagtcataatcgaagaatcctacgagtttaaatctactgttgataagctgatcaagaagaccaatctggcgctcgttgtaggcaccaattcctggcgtgagcagtttatagaggccattaccgtctcagccggagaagacgacgatgacgacgaatgtggggaggagaaactaccctcgtgctttgactatgttatgcacttcctaacggtattttggaaggtactcttcgccttcgtgccccctaccgaatactggaatggctgggcctgctttatcgtgtctatcttaatgatcgggctgttgaccgctttcatcggggacttagcttcacatttcgggtgtaccatcggactaaaagatagtgtgaccgccgtagtattcgtggccttgggcactagtgtacctgacacctttgctagcaaggtggccgctactcaagatcaatatgctgacgccagtatcggaaacgtgaccggctcaaacgccgttaacgtttttctggggattggagtggcttggtccatcgccgcaatctatcatgcagctaacggagagcaatttaaggtgagccctggaactctggcgttttcagtgaccctcttcacaatctttgcttttatcaacgtcggcgtcctcctgtatcgtaggcggcctgaaatcggtggcgaacttggcggaccgagaaccgccaaactcctaacgtcttgtctattcgtccttctctggctgttgtatatattcttctcaagtttggaagcttattgtcatattaaaggcttttag

SEQ ID NO: 327352 - DNA, 2922 bp, Artificial Sequence
  derived and/or modified sequence
atgtacaacatgcgaaggctgtctctctcaccaacctttagcatggggttccacttattagtcacggtttcacttctgttctcacacgtggatcacgtgattgcagagaccgagatggaaggcgaaggcaatgaaaccggggagtgcaccgggtcttattactgcaagaagggcgtaattctccccatctgggagccacaggatccttccttcggcgataagatcgcccgtgccacggtgtatttcgtggcaatggtgtacatgttcctgggggtatccatcattgcagatcgctttatgtcttcaatcgaagtaatcacttctcaagagaaagagatcaccatcaaaaagccgaacggagaaaccacgaaaacaacggtgcgcatatggaatgagaccgtgtctaatctaacgctgatggccttgggctcctccgcccctgaaattctacttagcgtgatagaagtctgcggccataactttaccgcgggagatctaggtccttctaccatcgtcggctcagcagcgttcaatatgtttataattatcgctctgtgtgtctacgtcgtgcctgacggtgaaactcgaaaaattaaacatctccgtgtgttctttgttacagcagcctggtcaatttttgcctatacctggctctacattatcttatccgtcatcagccctggtgtggtcgaggtctgggaaggcctgcttacttttttcttttttcctatctgcgtggtctttgcatgggttgcagataggcgacttttattttacaagtacgtctacaagcggtaccgcgctgggaaacaaagggggatgattatcgaacacgaaggcgataggccctccagcaagacagagatcgagatggatggaaaggtagtcaactcccacgttgagaattttctggacggagctctagtcctggaagtagatgaacgcgaccaggacgacgaagaagccaggcgtgagatggctcggatactgaaagaactgaaacagaaacatccggacaaggaaatcgagcagctgatagagctggccaactaccaggttctctcccagcagcaaaaatccagggccttctatcggattcaagcaactcgccttatgacgggggctgggaatatcctcaagagacatgcggcagatcaggcgaggaaggccgtttcaatgcacgaagtgaacactgaggttaccgaaaacgatcctgtaagcaagatctttttcgagcaaggcacataccagtgcctcgaaaactgcgggactgttgccttgaccataattagacgcggaggcgacttgactaatactgtgtttgtggacttccgtactgaggacggcactgcaaacgcaggttctgattacgaattcacagagggtactgttgtgttcaaacccggagacacacagaaggagattcgcgtggggattatagacgacgatatctttgaagaggacgagaatttcctggttcacctcagtaacgtaaaggtcagttccgaggcaagtgaggacggcatccttgaagccaaccacgtttccaccttagcctgtcttggctctccttctactgccacagtcacaatcttcgatgacgatcacgcaggcatctttacgtttgaggaacccgtgacccacgtgtccgaaagcattggaatcatggaggtcaaggtcttgagaacctcaggggcacgcggtaacgttattgtgccttataagaccatcgaggggaccgccaggggtggcggagaggactttgaagacacatgtggcgaacttgagtttcaaaatgacgagatagtgaaaacaatttcagttaaagtgatagatgatgaggaatacgaaaagaataaaaccttcttcttggagatcggtgagcccaggcttgtggaaatgtccgaaaagaaggcactgctcctgaatgagctcggaggatttaccattaccgggaagtatttgttcggccagcctgtgtttcgcaaggtgcacgccagagaacaccccatcctgtctacggttatcacgattgcggacgaatacgatgacaaacagccgctgacctcaaaggaggaagaagagaggagaattgctgagatgggaaggcctatccttggcgagcataccaagcttgaagtcattattgaggagtcttacgaattcaagtctaccgtcgacaaactgatcaaaaaaactaacctggcattagtggtcggaacaaacagctggagggaacaatttatcgaggcaatcaccgtcagcgcaggcgaagatgacgatgacgatgagtgtggagaagaaaagctaccctcttgcttcgattatgtgatgcactttctgactgtcttctggaaagtcctctttgccttcgtgccccctactgaatactggaacggatgggcctgtttcatcgtctcaatactgatgatcggccttctcactgcgtttattggcgatctggcaagccatttcggctgtaccattgggctgaaagacagtgttaccgccgtcgtgttcgtggccctggggacgtcagtccccgacacatttgctagtaaagtggcagcgacacaggaccagtacgcagatgcctcgatcggaaatgtaaccggatcaaatgcagtaaacgtttttcttggcatcggcgtggcctggagtattgcagctatctatcatgctgctaatggtgagcaattcaaggtgtctcccggaacactggccttcagcgtgacactctttacgatattcgcttttatcaatgtaggtgtgctgttatatcgaagacgccctgagatcggaggcgagctaggaggccctcggacggccaaattgctcactagctgcctgttcgtgcttctctggctgctgtacattttcttctctagcttggaggcatattgccatatcaagggcttttag

SEQ ID NO: 327353 - DNA, 2922 bp, Artificial Sequence
  derived and/or modified sequence
atgtacaacatgcggcgattaagtctttcacccaccttttcaatgggatttcatctgttagttactgtgagtctcttattttcccatgtggaccatgtaattgctgagacagaaatggaaggagaaggaaatgaaactggtgaatgtactggatcatattactgtaagaaaggggtgattttgcccatttgggaaccccaagacccttcttttggggacaaaattgctagagctactgtgtattttgtggccatggtctacatgtttcttggagtctctatcatagctgatcggttcatgtcctctatagaagtcatcacatctcaagaaaaagaaataaccataaagaaacccaatggagagaccaccaagacaactgtgaggatctggaatgaaacagtttctaacctgaccttgatggccctgggatcttctgctcctgagattctcctttcagtaattgaagtgtgtggccataacttcactgcaggagacctcggtcctagcaccatcgtgggaagtgctgcattcaatatgttcatcattattgcactctgtgtttatgtggtgcctgacggagagacaaggaagattaagcatttgcgtgtcttctttgtgacagcagcctggagcatctttgcctacacctggctttacattattttgtctgtcatatctcctggtgttgtggaggtctgggaaggtttgcttactttcttcttctttcccatctgtgttgtgttcgcttgggtagcggataggagacttctgttttacaagtatgtctacaagaggtatcgagctggcaagcagagggggatgattattgaacatgaaggagacaggccatcttctaagactgaaattgaaatggacgggaaagtggtcaattctcatgttgaaaatttcttagatggtgctctggttctggaggtggatgagagggaccaagatgatgaagaagctaggcgagaaatggctaggattctgaaggaacttaagcagaagcatccagataaagaaatagagcaattaatagaattagctaactaccaagtcctaagtcagcagcaaaaaagtagagcattttatcgcattcaagctactcgcctcatgactggagctggcaacattttaaagaggcatgcagctgaccaagcaaggaaggctgtcagcatgcacgaggtcaacactgaagtgactgaaaatgaccctgttagtaagatcttctttgaacaagggacatatcagtgtctggagaactgtggtactgtggcccttaccattatccgcagaggtggtgatttgactaacactgtgtttgttgacttcagaacagaggatggcacagcaaatgctgggtctgattatgaatttactgaaggaactgtggtgtttaagcctggtgatacccagaaggaaatcagagtgggtatcatagatgatgatatctttgaggaggatgaaaatttccttgtgcatctcagcaatgtcaaagtatcttctgaagcttcagaagatggcatactggaagccaatcatgtttctacacttgcttgcctcggatctccctccactgccactgtaactatttttgatgatgaccacgcaggcatttttacttttgaggaacctgtgactcatgtgagtgagagcattggcatcatggaggtgaaagtattgagaacatctggagctcgaggaaatgttatcgttccatataaaaccatcgaagggactgccagaggtggaggggaggattttgaggacacttgtggagagctcgaattccagaatgatgaaattgtcaaaacaatatcagtcaaggtaattgatgatgaggagtatgagaaaaacaagaccttcttccttgagattggagagccccgcctggtggagatgagtgagaagaaagccctgttattgaatgagcttggtggcttcacaataacaggaaaatacctgtttggccaacctgtcttcaggaaggttcatgctagagaacatccgattctctctactgtaatcaccattgcagacgaatatgatgacaagcagccactgaccagcaaagaggaagaggagaggcgcattgcagaaatggggcgccccatcctgggagagcacaccaagttggaagtgatcattgaagaatcctatgaattcaagagtactgtggacaaactcattaagaagacaaacctggcccttgtggttgggactaacagctggagagaacagttcattgaagctatcactgtcagtgctggggaagatgatgacgacgatgaatgtggggaagagaagctgccctcctgtttcgattacgtgatgcactttctgactgtgttctggaaggtcctgtttgccttcgtcccccctactgaatactggaatggctgggcgtgtttcattgtctccatcctcatgattggcctactgacagctttcattggagacctggcttcccactttggctgcaccattggcctgaaagattctgtgactgcagtcgtgttcgtcgcacttggaacatcagtgccagacacatttgccagcaaagtggcagccacccaggaccagtatgcagacgcctccataggtaacgtcacgggcagcaacgcggtgaatgtcttcctgggaatcggtgtggcctggtccatcgctgccatctaccacgcagccaatggggaacagttcaaagtgtcccctggcacactagctttctctgtcactctcttcaccatttttgctttcatcaatgtgggggtgctgctgtatcggcggaggccagaaatcggaggtgagctgggtgggccccggactgccaagctcctcacatcctgcctctttgtgctcctatggctcttgtacattttcttctcctccctggaggcctactgccacataaaaggcttctaa

SEQ ID NO: 327354 - DNA, 6053 bp, Artificial Sequence
  derived and/or modified sequence
taggttgtgacagttggaagtgtcatgtacaacatgcggcgattaagtctttcacccaccttttcaatgggatttcatctgttagttactgtgagtctcttattttcccatgtggaccatgtaattgctgagacagaaatggaaggagaaggaaatgaaactggtgaatgtactggatcatattactgtaagaaaggggtgattttgcccatttgggaaccccaagacccttcttttggggacaaaattgctagagctactgtgtattttgtggccatggtctacatgtttcttggagtctctatcatagctgatcggttcatgtcctctatagaagtcatcacatctcaagaaaaagaaataaccataaagaaacccaatggagagaccaccaagacaactgtgaggatctggaatgaaacagtttctaacctgaccttgatggccctgggatcttctgctcctgagattctcctttcagtaattgaagtgtgtggccataacttcactgcaggagacctcggtcctagcaccatcgtgggaagtgctgcattcaatatgttcatcattattgcactctgtgtttatgtggtgcctgacggagagacaaggaagattaagcatttgcgtgtcttctttgtgacagcagcctggagcatctttgcctacacctggctttacattattttgtctgtcatatctcctggtgttgtggaggtctgggaaggtttgcttactttcttcttctttcccatctgtgttgtgttcgcttgggtagcggataggagacttctgttttacaagtatgtctacaagaggtatcgagctggcaagcagagggggatgattattgaacatgaaggagacaggccatcttctaagactgaaattgaaatggacgggaaagtggtcaattctcatgttgaaaatttcttagatggtgctctggttctggaggtggatgagagggaccaagatgatgaagaagctaggcgagaaatggctaggattctgaaggaacttaagcagaagcatccagataaagaaatagagcaattaatagaattagctaactaccaagtcctaagtcagcagcaaaaaagtagagcattttatcgcattcaagctactcgcctcatgactggagctggcaacattttaaagaggcatgcagctgaccaagcaaggaaggctgtcagcatgcacgaggtcaacactgaagtgactgaaaatgaccctgttagtaagatcttctttgaacaagggacatatcagtgtctggagaactgtggtactgtggcccttaccattatccgcagaggtggtgatttgactaacactgtgtttgttgacttcagaacagaggatggcacagcaaatgctgggtctgattatgaatttactgaaggaactgtggtgtttaagcctggtgatacccagaaggaaatcagagtgggtatcatagatgatgatatctttgaggaggatgaaaatttccttgtgcatctcagcaatgtcaaagtatcttctgaagcttcagaagatggcatactggaagccaatcatgtttctacacttgcttgcctcggatctccctccactgccactgtaactatttttgatgatgaccacgcaggcatttttacttttgaggaacctgtgactcatgtgagtgagagcattggcatcatggaggtgaaagtattgagaacatctggagctcgaggaaatgttatcgttccatataaaaccatcgaagggactgccagaggtggaggggaggattttgaggacacttgtggagagctcgaattccagaatgatgaaattgtcaaaacaatatcagtcaaggtaattgatgatgaggagtatgagaaaaacaagaccttcttccttgagattggagagccccgcctggtggagatgagtgagaagaaagccctgttattgaatgagcttggtggcttcacaataacaggaaaatacctgtttggccaacctgtcttcaggaaggttcatgctagagaacatccgattctctctactgtaatcaccattgcagacgaatatgatgacaagcagccactgaccagcaaagaggaagaggagaggcgcattgcagaaatggggcgccccatcctgggagagcacaccaagttggaagtgatcattgaagaatcctatgaattcaagagtactgtggacaaactcattaagaagacaaacctggcccttgtggttgggactaacagctggagagaacagttcattgaagctatcactgtcagtgctggggaagatgatgacgacgatgaatgtggggaagagaagctgccctcctgtttcgattacgtgatgcactttctgactgtgttctggaaggtcctgtttgccttcgtcccccctactgaatactggaatggctgggcgtgtttcattgtctccatcctcatgattggcctactgacagctttcattggagacctggcttcccactttggctgcaccattggcctgaaagattctgtgactgcagtcgtgttcgtcgcacttggaacatcagtgccagacacatttgccagcaaagtggcagccacccaggaccagtatgcagacgcctccataggtaacgtcacgggcagcaacgcggtgaatgtcttcctgggaatcggtgtggcctggtccatcgctgccatctaccacgcagccaatggggaacagttcaaagtgtcccctggcacactagctttctctgtcactctcttcaccatttttgctttcatcaatgtgggggtgctgctgtatcggcggaggccagaaatcggaggtgagctgggtgggccccggactgccaagctcctcacatcctgcctctttgtgctcctatggctcttgtacattttcttctcctccctggaggcctactgccacataaaaggcttctaaaggaactatcagatatagtaaatttatatatatacatatatatacataaaaattatgtataatggacagaggaaactgacatttgtcatgttcacttacctgctgatggaatccagcttcaagagcatactctgtactagggccgaagtaaaaaaccatcacctcccattcccaggggcatcatcatgttcaacaaggcatggaggcagggccatctttgcagctcagtctagaagggctgcactctctccaggttgataaatccttaaggctttgatttgttttgtttttggttttgttttcagtggagctggggaggtagttaatgtttggctttatttttgttattttgttttgttttgtttttttgggagagtcagggttgttgcttttctttgtggaaagtgaaaccatccaaatgtaaatgggttttggtaaaaatttaaatcattagtattccccctcacctcccccaatcactttaaaacttattttggattaagaaaaaatctgggcatggaagaagaaagaagcatgtcttcatcgtattaccaaagttcatgcttatctccggaatgtgagtggaggtgaagctgcctccaagaagaagcataaaagtggaatggagccaggaaatccgatggttctagaaatagtctgatatttaaacatgtgatacctggcagtctcgtttaacaggtacaaggaaaacgtgcctagattcccaggaacgtgcaaaatcctttctttcttatctctttagctctggactgtgattggcaaggtccttcttccagcattcagcccagctaagcccccaggtgccccatcccaaccctgttcctcctgtccacctgccatcccctatgcaaacagtaagaataaccccattcaaaaagcacatcatcgttttccatttgcattaacatgtgtctcagtcccatgttgccgttgcttgggattgtctgtcagttttattttcaaaggcatccatggcttgcacaatcctgttccagtcatgactgaacatttgctccttcttcatgtgccgttcggaaatgttgttgtgatacctgttacacagtgcatggtgaaaaacaaataaaacaaaacaaagagtatctgtatatagtagagtatagtacatactgttctcccatttggcaatgttgattggacattgaagacataagtgagttttcttttcacctgagttgttacttttgtgctgttattgagtttgattaattactagggataaaaggagaaaatggattattgttcacggttctgcacattcatttctaagaagcaataactgtcatgtggggagaagttaaagctattgagaggatagcaggcaaactacaaagatcttcatggaaaattagccatgtggaacacatcagaggcctctaaaaatcacccattaattcaggaaggccaaggagaaaggccttatagagacgttgatatgttggatgtgcctaggctttcagagccaccctttccacaacacccctccctgcaaagtatttatttcacatctgcactgtctggcacagatggtagatagtgctggtttgttcattttatttttttacttaaaaggctattttgagccctgtttctttcactgtccagtctagtcctctttgattatatcagtagttgctgagtaagaaagaagccagggtgaccaacgggcctttaaaagtgttgtctcctctacttatgctgaaagagaaggcaattaaataagactagtacctcccaggaggattggactgggatatttttaaccctttaaaaagaatagctgtttctatgttaaaataccaaagaacatggataaacccaacattccaaagtagtgagtccactaatgagaaaaataatagaatgactttggtcacctctcggagacttctgtgtctataaggaatcccaggctggagacattcctagccctctgtattgattcaaaaatacttaataaattaaagctgttgagacttattttttcttctgtcactcagtaaccatgatccttcctcatttaataaacatttggtgactgaatgagtaattaaatgctggttacccacttaatgtgccaggtagtatgatactttctggggactaagccatgaacaaaacagtctagatccctgccctcagaagggttacagtttatgtgattactattttcatgagtaaaagtgaagaaagccatatggaaagatttttatcttgcaagaaaaaacaattatgaaactcttttaacataaacacactgaaactgtatcaaagcaattgtccaaattgtatttatacccaagaatttctttaactaagagagcataaggcatatgtttggaaaaccaccctctttatctttgaccgacttgcagataaatatatctctccattttaaaccaagaagggcaatcatgttggtgatccagatcactgagaaagcccagtgtatcccatcttttatctttgttggcaatggaacttttctatggcccacactttacaattctttgtcattctaacccatccttcccatccttattttttttttttttgagaattgctaaatggaaagctagcctagaagcaccaagtaaatatattcaaggaatataagttgtttaaacattagaaaaatttttgcactcattttttagctgtattaggaatgtcaataatcctgtagcaaattttcacagagaactttaagaaattcttgcattggtcgatttcaatttgaaagctttttggtttgtttgctttttaaattttcatgttctaggaaactatgattctggttgttcaggattgttattattatagttgtgtaaaattattttattttgtgtgtattgtgcacagcttggggggggggcgggaaatgcactaattgtgctcttccttataaatggtacatattactgacacagacaaataaagtttctaattgtttctgatttaatcactagtgatacagcatattctgtatgaaatgttttctcctttctcattgtcatctacttcattttttgttttcatgttttgaagaaataaaaaccaaaatggta

SEQ ID NO: 327355 - DNA, 3178 bp, Artificial Sequence
  derived and/or modified sequence
aagcttgacagaggttgtgacagttggaagtgtcatgtacaacatgcggcgattaagtctttcacccaccttttcaatgggatttcatctgttagttactgtgagtctcttattttcccatgtggaccatgtaattgctgagacagaaatggaaggagaaggaaatgaaactggtgaatgtactggatcatattactgtaagaaaggggtgattttgcccatttgggaaccccaagacccttcttttggggacaaaattgctagagctactgtgtattttgtggccatggtctacatgtttcttggagtctctatcatagctgatcggttcatgtcctctatagaagtcatcacatctcaagaaaaagaaataaccataaagaaacccaatggagagaccaccaagacaactgtgaggatctggaatgaaacagtttctaacctgaccttgatggccctgggatcttctgctcctgagattctcctttcagtaattgaagtgtgtggccataacttcactgcaggagacctcggtcctagcaccatcgtgggaagtgctgcattcaatatgttcatcattattgcactctgtgtttatgtggtgcctgacggagagacaaggaagattaagcatttgcgtgtcttctttgtgacagcagcctggagcatctttgcctacacctggctttacattattttgtctgtcatatctcctggtgttgtggaggtctgggaaggtttgcttactttcttcttctttcccatctgtgttgtgttcgcttgggtagcggataggagacttctgttttacaagtatgtctacaagaggtatcgagctggcaagcagagggggatgattattgaacatgaaggagacaggccatcttctaagactgaaattgaaatggacgggaaagtggtcaattctcatgttgaaaatttcttagatggtgctctggttctggaggtggatgagagggaccaagatgatgaagaagctaggcgagaaatggctaggattctgaaggaacttaagcagaagcatccagataaagaaatagagcaattaatagaattagctaactaccaagtcctaagtcagcagcaaaaaagtagagcattttatcgcattcaagctactcgcctcatgactggagctggcaacattttaaagaggcatgcagctgaccaagcaaggaaggctgtcagcatgcacgaggtcaacactgaagtgactgaaaatgaccctgttagtaagatcttctttgaacaagggacatatcagtgtctggagaactgtggtactgtggcccttaccattatccgcagaggtggtgatttgactaacactgtgtttgttgacttcagaacagaggatggcacagcaaatgctgggtctgattatgaatttactgaaggaactgtggtgtttaagcctggtgatacccagaaggaaatcagagtgggtatcatagatgatgatatctttgaggaggatgaaaatttccttgtgcatctcagcaatgtcaaagtatcttctgaagcttcagaagatggcatactggaagccaatcatgtttctacacttgcttgcctcggatctccctccactgccactgtaactatttttgatgatgaccacgcaggcatttttacttttgaggaacctgtgactcatgtgagtgagagcattggcatcatggaggtgaaagtattgagaacatctggagctcgaggaaatgttatcgttccatataaaaccatcgaagggactgccagaggtggaggggaggattttgaggacacttgtggagagctcgaattccagaatgatgaaattgtcaaaacaatatcagtcaaggtaattgatgatgaggagtatgagaaaaacaagaccttcttccttgagattggagagccccgcctggtggagatgagtgagaagaaagccctgttattgaatgagcttggtggcttcacaataacaggaaaatacctgtttggccaacctgtcttcaggaaggttcatgctagagaacatccgattctctctactgtaatcaccattgcagacgaatatgatgacaagcagccactgaccagcaaagaggaagaggagaggcgcattgcagaaatggggcgccccatcctgggagagcacaccaagttggaagtgatcattgaagaatcctatgaattcaagagtactgtggacaaactcattaagaagacaaacctggcccttgtggttgggactaacagctggagagaacagttcattgaagctatcactgtcagtgctggggaagatgatgacgacgatgaatgtggggaagagaagctgccctcctgtttcgattacgtgatgcactttctgactgtgttctggaaggtcctgtttgccttcgtcccccctactgaatactggaatggctgggcgtgtttcattgtctccatcctcatgattggcctactgacagctttcattggagacctggcttcccactttggctgcaccattggcctgaaagattctgtgactgcagtcgtgttcgtcgcacttggaacatcagtgccagacacatttgccagcaaagtggcagccacccaggaccagtatgcagacgcctccataggtaacgtcacgggcagcaacgcggtgaatgtcttcctgggaatcggtgtggcctggtccatcgctgccatctaccacgcagccaatggggaacagttcaaagtgtcccctggcacactagctttctctgtcactctcttcaccatttttgctttcatcaatgtgggggtgctgctgtatcggcggaggccagaaatcggaggtgagctgggtgggccccggactgccaagctcctcacatcctgcctctttgtgctcctatggctcttgtacattttcttctcctccctggaggcctactgccacataaaaggcttctaaaggaactatcagatatagtaaatttatatatatacatatatatacataaaaattatgtataatggacagaggaaactgacatttgtcatgttcacttacctgctgatggaatccagcttcaagagcatactctgtactagggccgaagtaaaaaaccatcacctcccattcccaggggcatcatcatgttcaacaaggcatggaggcagggccatctttgca

SEQ ID NO: 327356 - DNA, 4597 bp, Artificial Sequence
  derived and/or modified sequence
ctttctggtaaatttagagaaggcatcatactgggatcttttttcacatccagcccatgcggactgagcagccaaagcttgacagagtaggttgtgacagttggaagtgtcatgtacaacatgcggcgattaagtctttcacccaccttttcaatgggatttcatctgttagttactgtgagtctcttattttcccatgtggaccatgtaattgctgagacagaaatggaaggagaaggaaatgaaactggtgaatgtactggatcatattactgtaagaaaggggtgattttgcccatttgggaaccccaagacccttcttttggggacaaaattgctagagctactgtgtattttgtggccatggtctacatgtttcttggagtctctatcatagctgatcggttcatgtcctctatagaagtcatcacatctcaagaaaaagaaataaccataaagaaacccaatggagagaccaccaagacaactgtgaggatctggaatgaaacagtttctaacctgacctgatggccctgggatcttctgctcctgagattctcctttcagtaattgaagtgtgtggccataacttcactgcaggagacctcggtcctagcaccatcgtgggaagtgctgcattcaatatgttcatcattattgcactctgtgtttatgtggtgcctgacggagagacaaggaagattaagcatttgcgtgtcttctttgtgacagcagcctggagcatctttgcctacacctggctttacattattttgtctgtcatatctcctggtgttgtggaggtctgggaaggtttgcttactttcttcttctttcccatctgtgttgtgttcgcttgggtagcggataggagacttctgttttacaagtatgtctacaagaggtatcgagctggcaagcagagggggatgattattgaacatgaaggagacaggccatcttctaagactgaaattgaaatggacgggaaagtggtcaattctcatgttgaaaatttcttagatggtgctctggttctggaggtggatgagagggaccaagatgatgaagaagctaggcgagaaatggctaggattctgaaggaacttaagcagaagcatccagataaagaaatagagcaattaatagaattagctaactaccaagtcctaagtcagcagcaaaaaagtagagcattttatcgcattcaagctactcgcctcatgactggagctggcaacattttaaagaggcatgcagctgaccaagcaaggaaggctgtcagcatgcacgaggtcaacactgaagtgactgaaaatgaccctgttagtaagatcttctttgaacaagggacatatcagtgtctggagaactgtggtactgtggcccttaccattatccgcagaggtggtgatttgactaacactgtgtttgttgacttcagaacagaggatggcacagcaaatgctgggtctgattatgaatttactgaaggaactatgatatatattaaatttatatatatacatatatatacataaaaattatgtataatggacagaggaaactgacatttgtcatgttcacttacctgctgatggaatccagcttcaagagcatactctgtactagggccgaagtaaaaaaccatcacctcccattcccaggggcatcatcatgttcaacaaggcatggaggcagggccatctttgcagctcagtctagaagggctgcactctctccaggttgataaatccttaaggctttgatttgttttgtttttggttttgttttcagtggagctggggaggtagttaatgtttggctttatttttgttattttgttttgttttgtttttttgggagagtcagggttgttgcttttctttgtggaaagtgaaaccatccaaatgtaaatgggttttggtaaaaatttaaatcattagtattccccctcacctcccccaatcactttaaaacttattttggattaagaaaaaatctgggcatggaagaagaaagaagcatgtcttcatcgtattaccaaagttcatgcttatctccggaatgtgagtggaggtgaagctgcctccaagaagaagcataaaagtggaatggagccaggaaatccgatggttctagaaatagtctgatatttaaacatgtgatacctggcagtctcgtttaacaggtacaaggaaaacgtgcctagattcccaggaacgtgcaaaatcctttctttcttatctctttagctctggactgtgattggcaaggtccttcttccagcattcagcccagctaagcccccaggtgccccatcccaaccctgttcctcctgtccacctgccatcccctatgcaaacagtaagaataaccccattcaaaaagcacatcatcgttttccatttgcattaacatgtgtctcagtcccatgttgccgttgcttgggattgtctgtcagttttattttcaaaggcatccatggcttgcacaatcctgttccagtcatgactgaacatttgctccttcttcatgtgccgttcggaaatgttgttgtgatacctgttacacagtgcatggtgaaaaacaaataaaacaaaacaaagagtatctgtatatagtagagtatagtacatactgttctcccatttggcaatgttgattggacattgaagacataagtgagttttcttttcacctgagttgttacttttgtgctgttattgagtttgattaattactagggataaaaggagaaaatggattattgttcacggttctgcacattcatttctaagaagcaataactgtcatgtggggagaagttaaagctattgagaggatagcaggcaaactacaaagatcttcatggaaaattagccatgtggaacacatcagaggcctctaaaaatcacccattaattcaggaaggccaaggagaaaggccttatagagacgttgatatgttggatgtgcctaggctttcagagccaccctttccacaacacccctccctgcaaagtatttatttcacatctgcactgtctggcacagatggtagatagtgctggtttgttcattttatttttttacttaaaaggctattttgagccctgtttctttcactgtccagtctagtcctctttgattatatcagtagttgctgagtaagaaagaagccagggtgaccaacgggcctttaaaagtgttgtctcctctacttatgctgaaagagaaggcaattaaataagactagtacctcccaggaggattggactgggatatttttaaccctttaaaaagaatagctgtttctatgttaaaataccaaagaacatggataaacccaacattccaaagtagtgagtccactaatgagaaaaataatagaatgactttggtcacctctcggagacttctgtgtctataaggaatcccaggctggagacattcctagccctctgtattgattcaaaaatacttaataaattaaagctgttgagacttattttttcttctgtcactcagtaaccatgatccttcctcatttaataaacatttggtgactgaatgagtaattaaatgctggttacccacttaatgtgccaggtagtatgatactttctggggactaagccatgaacaaaacagtctagatccctgccctcagaagggttacagtttatgtgattactattttcatgagtaaaagtgaagaaagccatatggaaagatttttatcttgcaagaaaaaacaattatgaaactcttttaacataaacacactgaaactgtatcaaagcaattgtccaaattgtatttatacccaagaatttctttaactaagagagcataaggcatatgtttggaaaaccaccctctttatctttgaccgacttgcagataaatatatctctccattttaaaccaagaagggcaatcatgttggtgatccagatcactgagaaagcccagtgtatcccatcttttatctttgttggcaatggaacttttctatggcccacactttacaattctttgtcattctaacccatccttcccatccttattttttttttttttgagaattgctaaatggaaagctagcctagaagcaccaagtaaatatattcaaggaatataagttgtttaaacattagaaaaatttttgcactcattttttagctgtattaggaatgtcaataatcctgtagcaaattttcacagagaactttaagaaattcttgcattggtcgatttcaatttgaaagctttttggtttgtttgctttttaaattttcatgttctaggaaactatgattctggttgttcaggattgttattattatagttgtgtaaaattattttattttgtgtgtattgtgcacagcttggggggggggcgggaaatgcactaattgtgctcttccttataaatggtacatattactgacacagacaaataaagtttctaattgtttctgatttaatcactagtgatacagcatattctgtatgaaatgttttctcctttctcattgtcatctacttcattttttgttttcatgttttgaagaaataaaaaccaaaatgg

SEQ ID NO: 327357 - protein, 664 aa, Artificial Sequence
  derived and/or modified sequence
MRRLSLSPTFSMGFHLLVTVSLLFSHVDHVIAETEMEGEGNETGECTGSYYCKKGVILPIWEPQDPSFGDKIARATVYFVAMVYMFLGVSIIADRFMSSIEVITSQEKEITIKKPNGETTKTTVRIWNETVSNLTLMALGSSAPEILLSVIEVCGHNFTAGDLGPSTIVGSAAFNMFIIIALCVYVVPDGETRKIKHLRVFFVTAAWSIFAYTWLYIILSVISPGVVEVWEGLLTFFFFPICVVFAWVADRRLLFYKYVYKRYRAGKQRGMIIEHEGDRPSSKTEIEMDGKVVNSHVENFLDGALVLEVDERDQDDEEARREMARILKELKQKHPDKEIEQLIELANYQVLSQQQKSRAFYRIQATRLMTGAGNILKRHAADQARKAVSMHEVNTEVTENDPVSKIFFEQGTYQCLENCGTVALTIIRRGGDLTNTVFVDFRTEDGTANAGSDYEFTEGTVVFKPGDTQKEIRVGIIDDDIFEEDENFLVHLSNVKVSSEASEDGILEANHVSTLACLGSPSTATVTIFDDDHAGIFTFEEPVTHVSESIGIMEVKVLRTSGARGNVIVPYKTIEGTARGGGEDFEDTCGELEFQNDEIVKTISVKVIDDEEYEKNKTFFLEIGEPRLVEMSEKKGRSLPLEYLTVRNMRKSAVSPLCLRNQNG

SEQ ID NO: 327358 - protein, 73 aa, Artificial Sequence
  derived and/or modified sequence
MYNMRRLSLSPTFSMGFHLLVTVSLLFSHVDHVIAETEMEGEGNETGECTGSYYCKKGVILPIWEPQDPSFGD

SEQ ID NO: 327359 - protein, 87 aa, Artificial Sequence
  derived and/or modified sequence
MYNMRRLSLSPTFSMGFHLLVTVSLLFSHVDHVIAETEMEGEGNETGECTGSYYCKKGVILPIWEPQDPSFGDKIARATVYFVAMVY

SEQ ID NO: 327360 - protein, 138 aa, Artificial Sequence
  derived and/or modified sequence
MYNMRRLSLSPTFSMGFHLLVTVSLLFSHVDHVIAETEMEGEGNETGECTGSYYCKKGVILPIWEPQDPSFGDKIARATVYFVAMVYMFLGVSIIADRFMSSIEVITSQEKEITIKKPNGETTKTTVRIWNETVSNLT

SEQ ID NO: 327361 - DNA, 1995 bp, Artificial Sequence
  derived and/or modified sequence
atgagaagactgagcctgagccccaccttcagcatgggcttccacctgctggtgaccgtgagcctgctgttcagccacgtggaccacgtgatcgccgagaccgagatggagggcgagggcaacgagaccggcgagtgcaccggcagctactactgcaagaagggcgtgatcctgcccatctgggagccccaggaccccagcttcggcgacaagatcgccagagccaccgtgtacttcgtggccatggtgtacatgttcctgggcgtgagcatcatcgccgacagattcatgagcagcatcgaggtgatcaccagccaggagaaggagatcaccatcaagaagcccaacggcgagaccaccaagaccaccgtgagaatctggaacgagaccgtgagcaacctgaccctgatggccctgggcagcagcgcccccgagatcctgctgagcgtgatcgaggtgtgcggccacaacttcaccgccggcgacctgggccccagcaccatcgtgggcagcgccgccttcaacatgttcatcatcatcgccctgtgcgtgtacgtggtgcccgacggcgagaccagaaagatcaagcacctgagagtgttcttcgtgaccgccgcctggagcatcttcgcctacacctggctgtacatcatcctgagcgtgatcagccccggcgtggtggaggtgtgggagggcctgctgaccttcttcttcttccccatctgcgtggtgttcgcctgggtggccgacagaagactgctgttctacaagtacgtgtacaagagatacagagccggcaagcagagaggcatgatcatcgagcacgagggcgacagacccagcagcaagaccgagatcgagatggacggcaaggtggtgaacagccacgtggagaacttcctggacggcgccctggtgctggaggtggacgagagagaccaggacgacgaggaggccagaagagagatggccagaatcctgaaggagctgaagcagaagcaccccgacaaggagatcgagcagctgatcgagctggccaactaccaggtgctgagccagcagcagaagagcagagccttctacagaatccaggccaccagactgatgaccggcgccggcaacatcctgaagagacacgccgccgaccaggccagaaaggccgtgagcatgcacgaggtgaacaccgaggtgaccgagaacgaccccgtgagcaagatcttcttcgagcagggcacctaccagtgcctggagaactgcggcaccgtggccctgaccatcatcagaagaggcggcgacctgaccaacaccgtgttcgtggacttcagaaccgaggacggcaccgccaacgccggcagcgactacgagttcaccgagggcaccgtggtgttcaagcccggcgacacccagaaggagatcagagtgggcatcatcgacgacgacatcttcgaggaggacgagaacttcctggtgcacctgagcaacgtgaaggtgagcagcgaggccagcgaggacggcatcctggaggccaaccacgtgagcaccctggcctgcctgggcagccccagcaccgccaccgtgaccatcttcgacgacgaccacgccggcatcttcaccttcgaggagcccgtgacccacgtgagcgagagcatcggcatcatggaggtgaaggtgctgagaaccagcggcgccagaggcaacgtgatcgtgccctacaagaccatcgagggcaccgccagaggcggcggcgaggacttcgaggacacctgcggcgagctggagttccagaacgacgagatcgtgaagaccatcagcgtgaaggtgatcgacgacgaggagtacgagaagaacaagaccttcttcctggagatcggcgagcccagactggtggagatgagcgagaagaagggcagaagcctgcccctggagtacctgaccgtgagaaacatgagaaagagcgccgtgagccccctgtgcctgagaaaccagaacggctag

SEQ ID NO: 327362 - DNA, 1995 bp, Artificial Sequence
  derived and/or modified sequence
atgagaaggctcagcctttcaccgacattctcaatgggattccacctgctagtcaccgtctctctcctgtttagccacgtcgaccacgttatcgcggagaccgagatggaaggggaagggaacgaaaccggggagtgcactgggagttattattgcaaaaagggcgtgatcctgccgatctgggagccccaggatccatccttcggcgataaaattgcgcgcgccaccgtatatttcgtcgcaatggtgtacatgttcttaggggtgagtattatcgccgaccgatttatgtcttctattgaggtcattacatcacaggagaaggaaatcactatcaaaaaacctaacggggagacgaccaaaacaactgtacgtatatggaacgagaccgtgtccaatttgacactgatggccctcgggagtagcgcacccgaaattttgctgagtgttattgaggtgtgcggacacaactttaccgcgggcgacctgggcccctctactattgtgggaagcgcagcctttaatatgtttatcattatagctctttgcgtttatgtcgtccccgacggtgaaacaaggaaaattaaacacctgagggtgttctttgtcacggctgcttggtcaatcttcgcatacacctggctttacatcatcctgagcgtaatatcccctggagtggtggaggtgtgggaaggtctgctgacgttttttttctttcccatctgtgtagttttcgcatgggttgccgacaggcgactcctgttctataagtatgtgtataagaggtaccgggctggtaaacagcgtggaatgatcattgaacatgagggagataggcctagttccaagaccgagattgagatggatgggaaagtggtcaactcccacgtggagaactttttggacggagccctggtgctggaggtggacgagcgggaccaggatgacgaggaagccagacgcgagatggcccgcatcttgaaagagctgaaacaaaagcaccctgacaaggagatcgagcagttgatcgaactggccaattatcaggtgctgtcccagcagcagaagagtagagcattctatcgaatccaggccaccaggctaatgaccggtgcgggtaacatactgaagcgccacgccgcggaccaggctcgcaaagcagtaagcatgcatgaggtgaatactgaagtaactgaaaacgatccagtatctaaaatttttttcgagcagggaacataccagtgcttggaaaattgtggcacagtggcactgacaattatccgccgaggcggcgatcttaccaataccgtcttcgtggactttagaacagaggatggcacagccaatgcgggctctgactacgaattcaccgaggggaccgtggtgtttaaacctggtgacacccaaaaagaaattagagtcgggattatcgacgacgatatcttcgaggaagacgagaacttccttgtgcacttaagcaatgtgaaggtcagctcagaggctagtgaggacggtatcttagaggctaaccatgtgtcaacattggcttgtttgggcagcccttcgacagcaaccgtcactatctttgacgacgaccatgccggaatattcaccttcgaggagcccgtgactcacgtaagcgagtccataggtattatggaagtgaaagttctccgtactagcggtgcccgagggaacgtcattgtcccctataagaccatagaagggactgcacggggaggcggggaagactttgaagatacgtgtggggaacttgagtttcagaatgacgaaatcgtgaagactatcagcgtcaaagttatagacgatgaagaatatgaaaagaacaagacgttcttcttggagataggcgagcctcggcttgtggagatgtctgaaaagaagggcagaagtcttcccctggaatatctaaccgtgcggaacatgcgaaaatccgcagtgagtccgctctgtctgagaaaccagaatggatag

SEQ ID NO: 327363 - DNA, 1995 bp, Artificial Sequence
  derived and/or modified sequence
atgaggcggctgagcctgagccccaccttctccatgggcttccacctgctggtgacagtgtccctgctcttcagccacgtggaccacgtgattgctgagacagagatggagggggagggcaatgaaacaggagaatgtacaggcagctactactgcaagaagggcgtcatcctgcccatctgggagccccaggaccccagctttggagacaagatcgcccgggccaccgtgtactttgtggccatggtgtacatgttcctgggcgtgtccatcatcgctgaccgcttcatgagcagcattgaggtgatcaccagccaggagaaggagatcaccatcaagaagcccaacggggagaccaccaagaccaccgtgcgcatctggaatgagaccgtgagcaacctgaccctgatggccctgggcagcagcgcccctgagatcctgctgtctgtgattgaggtgtgtggccacaacttcaccgctggggacctgggccccagcaccatcgtgggcagcgctgccttcaacatgttcatcatcatcgccctgtgtgtgtatgtggtgcctgatggagagaccaggaagatcaagcacctgcgggtcttctttgtgacagctgcctggagcatctttgcctacacctggctgtacatcatcctgagcgtcatcagccctggggtggtggaggtgtgggagggcctgctgaccttcttcttcttccccatctgtgtggtgtttgcctgggtggccgaccggcggctgctcttctacaagtatgtgtacaagcgctacagagctgggaagcagaggggcatgatcattgaacatgaaggagaccggcccagcagcaagacagaaattgagatggatggcaaggtggtgaacagccacgtggagaacttcctggatggagccctggtgctggaggtggatgagcgggaccaggatgatgaggaggcccggcgggagatggcccgcatcctgaaggagctgaagcagaagcacccagacaaggagattgagcagctgattgagctggccaactaccaggtgctgagccagcagcagaagagccgggccttctaccgcatccaggccacccggctgatgaccggggccggcaacatcctgaagagacatgctgctgaccaggccaggaaggctgtgtccatgcatgaggtgaacacagaggtgacagaaaatgaccctgtgtccaagatcttctttgagcagggcacctaccagtgcctggagaactgtggcaccgtggccctgaccatcatccggcggggcggggacctgaccaacacagtgtttgtggacttcagaacagaagatggaacagccaatgccggcagtgactatgagttcacagagggcaccgtggtgttcaagccaggggacacccagaaggagatccgggtgggcatcattgatgatgacatctttgaggaggatgagaacttcctggtgcacctgagcaatgtgaaggtgtcctctgaggcctctgaagatggcatcctggaggccaaccacgtgtccaccctggcctgcctgggcagccccagcacagccaccgtgaccatctttgatgatgaccacgccggcatcttcacctttgaggagcctgtgacccacgtgtctgagagcatcggcatcatggaggtgaaggtgctgcggaccagcggggcccggggaaatgtcatcgtgccctacaagaccatcgagggcacagcccggggcggcggagaagattttgaggacacctgtggggagctggagttccagaatgatgaaattgtgaagaccatctctgtgaaggtgattgatgatgaggagtatgagaagaacaagaccttcttcctggagattggagagccccggctggtggagatgtctgagaagaagggccgcagcctgcccctggagtacctgactgtgaggaacatgaggaagtctgctgtgagccccctgtgcctgaggaaccagaatggatag

SEQ ID NO: 327364 - DNA, 1995 bp, Artificial Sequence
  derived and/or modified sequence
atgcggcggctgagcctgagccccaccttcagcatgggcttccacctgttggtgaccgttagccttctgttttcccatgtcgatcatgtcatcgctgagacggagatggagggggagggcaacgaaaccggggagtgcaccggatcctattattgtaaaaaaggagtgatcttgcccatatgggaacctcaggatccatccttcggagacaaaatcgcacgggcgactgtctactttgtggccatggtatatatgttccttggagtttctatcattgctgatagattcatgtcatctatcgaggtgattacctcacaggaaaaggagatcacaataaaaaagccaaatggtgagaccacaaagacaacagtgagaatctggaacgaaaccgtcagcaatctgacgctgatggcactcggttcatccgctccagaaattctactgtcagtgatcgaggtgtgcggacacaatttcacagctggagacctgggcccctcaactatcgtcggctctgcggcatttaatatgttcatcattatcgctctgtgcgtgtatgtggtcccagacggagaaacacgcaaaatcaagcatctgagggtgtttttcgtcaccgcagcctggtccatttttgcatacacctggctttatataatcctgagcgttatttctcccggggttgtcgaagtgtgggaagggttgctgacttttttcttctttccaatttgtgttgtgtttgcttgggtggccgaccgcaggctcttgttctacaagtatgtctataagcgctaccgtgctgggaaacagagaggcatgatcattgaacacgagggtgatcgcccttccagtaagaccgagattgagatggacgggaaagtggtgaatagccacgtcgagaatttcctggatggggcactcgtccttgaggtggacgaaagggatcaggatgacgaggaagccaggagagagatggcaagaattctgaaagaacttaaacagaagcatccagacaaagagatcgagcagttgatcgagctggccaattaccaggtgctttcacagcagcagaaaagtcgcgctttttatcggattcaagcaacccgactcatgacaggcgccggaaacatcctcaaacggcacgccgctgatcaggctagaaaagctgtgagcatgcacgaagttaatacagaagttactgaaaatgaccctgtgagcaaaattttctttgagcaagggacctaccaatgtctcgagaactgtggcacggtagcgttgacgatcatccggcgcggtggcgatctgactaacaccgtgttcgtcgatttccgaactgaggacggcaccgcaaacgccggatcggactacgagtttacagaggggaccgttgtcttcaagccgggcgacacacagaaggaaatacgcgttggaatcattgatgatgacatctttgaggaagacgaaaacttcctggtgcatctgtcgaatgtgaaagtctccagcgaggcctctgaggatggtatattagaagctaatcatgtgtcaacattagcctgcctcggctctccaagcacagctacggtgactatcttcgacgacgatcatgccggcatcttcacttttgaggagccagtgacacatgtctcagagtctatcggcattatggaggttaaggtgctgcggacatccggcgctagaggcaacgtgatcgttccttacaagaccattgagggcactgcccggggagggggagaggatttcgaagacacctgtggagagctggagtttcagaatgacgagatcgttaagacaatttctgtgaaggttattgatgacgaggagtacgaaaaaaacaagaccttcttcctggagatcggcgagccacggctggttgagatgtccgagaagaagggccgctctctgcccttagaatacctcaccgtgcggaacatgcggaaatcagccgtcagccctctgtgtctgaggaaccaaaacggctag

SEQ ID NO: 327365 - DNA, 1995 bp, Artificial Sequence
  derived and/or modified sequence
atgagaaggctgtcgctgtctccaacttttagcatgggatttcacttgctggtgactgtctcactgctgttctcacacgttgatcacgtcatcgccgagaccgagatggaaggagagggcaatgaaacaggggagtgcaccggaagctactactgcaaaaagggcgtcattctgcccatttgggaaccacaagatcccagcttcggagataagattgcgagagcaactgtctattttgttgccatggtgtacatgttcttgggcgtgagtatcatcgctgaccgattcatgagtagcatagaagtaattacctctcaggaaaaggagattacaattaaaaaacccaacggcgagacaactaaaactaccgtcagaatttggaatgaaacggtcagtaacctgacattgatggctttgggctccagtgctccagagatcctgctgtctgtcattgaagtctgcggacataactttacagcgggagacctaggaccgtctactatcgtcgggtctgccgctttcaatatgtttatcatcatagccctgtgcgtgtatgtggtcccagacggcgaaaccaggaagattaaacacctgcgggtcttctttgtgacagctgcttggagtatctttgcatacacctggttatatattattctctcagtgattagcccaggggttgtggaagtgtgggaggggttgctgacttttttcttcttccctatctgcgtcgttttcgcatgggttgctgaccgcaggctgttgttttataagtacgtgtacaaaaggtaccgagcaggcaagcagagagggatgatcatcgaacacgaaggggatcgtccgagcagcaaaaccgaaatcgaaatggacggcaaggtagtgaacagccacgtagaaaatttccttgatggtgccttagtgctggaggtagacgagagagaccaggatgatgaagaggctaggagggagatggccaggattctgaaggagctaaaacagaaacacccagacaaggagatcgagcaattaatcgagcttgccaactaccaagtgctgtcacaacagcagaagtccagagccttttatcgtattcaagctacacgccttatgactggggcagggaatattctgaaacggcatgccgcagatcaggccagaaaagctgtatcaatgcacgaggttaatactgaggttacggaaaatgaccctgtaagcaaaatcttctttgaacagggaacataccagtgtctagagaattgtggtacggtagcattgaccatcatcagaaggggcggtgacttaacgaacacagtttttgtggacttccggaccgaagatggcaccgcaaatgccggatcagattacgaatttacagagggaactgtggtctttaaacctggagatacgcagaaagaaatccgcgtgggaatcattgacgacgacatcttcgaggaggacgaaaatttcctggtgcacctcagcaacgtgaaagttagcagcgaggccagcgaggatggcatcctggaagccaatcacgtgagtaccctggcttgcctcggctctccatccacagctaccgtgacaatctttgacgatgaccatgcgggaatcttcacgtttgaggagcctgtgacccacgtgtctgagagcattggaataatggaggtcaaggtgctgaggaccagcggtgccagaggcaatgtgatcgtcccgtataaaaccattgagggaacagccagaggaggaggcgaagattttgaagatacctgtggagagttggagtttcagaatgatgaaatcgttaaaacgatctcggttaaagtgatagacgatgaggagtatgagaagaataagacctttttcttggaaatcggggaaccaagattggtggagatgagtgaaaagaaggggagatcgctgcccttagaatacctcaccgtgcgaaatatgcggaaaagcgccgtgtcgccactgtgtctccggaaccagaacggctag

SEQ ID NO: 327366 - DNA, 3434 bp, Artificial Sequence
  derived and/or modified sequence
atgcggcgattaagtctttcacccaccttttcaatgggatttcatctgttagttactgtgagtctcttattttcccatgtggaccatgtaattgctgagacagaaatggaaggagaaggaaatgaaactggtgaatgtactggatcatattactgtaagaaaggggtgattttgcccatttgggaaccccaagacccttcttttggggacaaaattgctagagctactgtgtattttgtggccatggtctacatgtttcttggagtctctatcatagctgatcggttcatgtcctctatagaagtcatcacatctcaagaaaaagaaataaccataaagaaacccaatggagagaccaccaagacaactgtgaggatctggaatgaaacagtttctaacctgaccttgatggccctgggatcttctgctcctgagattctcctttcagtaattgaagtgtgtggccataacttcactgcaggagacctcggtcctagcaccatcgtgggaagtgctgcattcaatatgttcatcattattgcactctgtgtttatgtggtgcctgacggagagacaaggaagattaagcatttgcgtgtcttctttgtgacagcagcctggagcatctttgcctacacctggctttacattattttgtctgtcatatctcctggtgttgtggaggtctgggaaggtttgcttactttcttcttctttcccatctgtgttgtgttcgcttgggtagcggataggagacttctgttttacaagtatgtctacaagaggtatcgagctggcaagcagagggggatgattattgaacatgaaggagacaggccatcttctaagactgaaattgaaatggacgggaaagtggtcaattctcatgttgaaaatttcttagatggtgctctggttctggaggtggatgagagggaccaagatgatgaagaagctaggcgagaaatggctaggattctgaaggaacttaagcagaagcatccagataaagaaatagagcaattaatagaattagctaactaccaagtcctaagtcagcagcaaaaaagtagagcattttatcgcattcaagctactcgcctcatgactggagctggcaacattttaaagaggcatgcagctgaccaagcaaggaaggctgtcagcatgcacgaggtcaacactgaagtgactgaaaatgaccctgttagtaagatcttctttgaacaagggacatatcagtgtctggagaactgtggtactgtggcccttaccattatccgcagaggtggtgatttgactaacactgtgtttgttgacttcagaacagaggatggcacagcaaatgctgggtctgattatgaatttactgaaggaactgtggtgtttaagcctggtgatacccagaaggaaatcagagtgggtatcatagatgatgatatctttgaggaggatgaaaatttccttgtgcatctcagcaatgtcaaagtatcttctgaagcttcagaagatggcatactggaagccaatcatgtttctacacttgcttgcctcggatctccctccactgccactgtaactatttttgatgatgaccacgcaggcatttttacttttgaggaacctgtgactcatgtgagtgagagcattggcatcatggaggtgaaagtattgagaacatctggagctcgaggaaatgttatcgttccatataaaaccatcgaagggactgccagaggtggaggggaggattttgaggacacttgtggagagctcgaattccagaatgatgaaattgtcaaaacaatatcagtcaaggtaattgatgatgaggagtatgagaaaaacaagaccttcttccttgagattggagagccccgcctggtggagatgagtgagaagaaaggaagatcattaccattagaatatttgaccgtgaggaatatgagaaagagtgcagtttctcccttgtgcttgaggaaccaaaatggataagaagaggaatgaaaggtggcttcacaataacagacgaatatgatgacaagcagccactgaccagcaaagaggaagaggagaggcgcattgcagaaatggggcgccccatcctgggagagcacaccaagttggaagtgatcattgaagaatcctatgaattcaagagtactgtggacaaactcattaagaagacaaacctggcccttgtggttgggactaacagctggagagaacagttcattgaagctatcactgtcagtgctggggaagatgatgacgacgatgaatgtggggaagagaagctgccctcctgtttcgattacgtgatgcactttctgactgtgttctggaaggtcctgtttgccttcgtcccccctactgaatactggaatggctgggcgtgtttcattgtctccatcctcatgattggcctactgacagctttcattggagacctggcttcccactttggctgcaccattggcctgaaagattctgtgactgcagtcgtgttcgtcgcacttggaacatcagtgccagacacatttgccagcaaagtggcagccacccaggaccagtatgcagacgcctccataggtaacgtcacgggcagcaacgcggtgaatgtcttcctgggaatcggtgtggcctggtccatcgctgccatctaccacgcagccaatggggaacagttcaaagtgtcccctggcacactagctttctctgtcactctcttcaccatttttgctttcatcaatgtgggggtgctgctgtatcggcggaggccagaaatcggaggtgagctgggtgggccccggactgccaagctcctcacatcctgcctctttgtgctcctatggctcttgtacattttcttctcctccctggaggcctactgccacataaaaggcttctaaaggaactatcagatatagtaaatttatatatatacatatatatacataaaaattatgtataatggacagaggaaactgacatttgtcatgttcacttacctgctgatggaatccagcttcaagagcatactctgtactagggccgaagtaaaaaaccatcacctcccattcccaggggcatcatcatgttcaacaaggcatggaggcagggccatctttgcagctcagtctagaagggctgcactctctccaggttgataaatccttaaggctttgatttgttttgtttttggttttgttttcagtggagctggggaggtagttaatgtttggctttatttttgttattttgttttgttttgtttttttgggagagtcagggttgttgcttttctttgtggaaagtgaaaccatccaaatgtaaatgggttttggtaaaaatttaaatcattagtattccccctcacctcccccaatcactttaaaacttattttggattaagaaaaaatctgggcatggaa

SEQ ID NO: 327367 - protein, 314 aa, Artificial Sequence
  derived and/or modified sequence
MLCQAQPRSASDVEERVQKSFPHPIDKWAIADAQSAIEKRKRRNPLSLPVEKIHPLLKEVLGYKIDHQVSVYIVAVLEYISADILKLVGNYVRNIRHYEITKQDIKVAMCADKVLMDMFHQDVEDINILSLTDEEPSTSGEQTYYDLVKAFMAEIRQYIRELNLIIKVFREPFVSNSKLFSANDVENIFSRIVDIHELSVKLLGHIEDTVEMTDEGSPHPLVGSCFEDLAEELAFDPYESYARDILRPGFHDRFLSQLSKPGAALYLQSIGEGFKEAVQYVLPRLLLAPVYHCLHYFELLKFPFGDLSRLRDSV

SEQ ID NO: 327368 - protein, 157 aa, Artificial Sequence [sequence omitted]

SEQ ID NO: 327369 - DNA, 945 bp, Artificial Sequence
  derived and/or modified sequence
atgctgtgccaggcccagcccagaagcgccagcgacgtggaggagagagtgcagaagagcttcccccaccccatcgacaagtgggccatcgccgacgcccagagcgccatcgagaagagaaagagaagaaaccccctgagcctgcccgtggagaagatccaccccctgctgaaggaggtgctgggctacaagatcgaccaccaggtgagcgtgtacatcgtggccgtgctggagtacatcagcgccgacatcctgaagctggtgggcaactacgtgagaaacatcagacactacgagatcaccaagcaggacatcaaggtggccatgtgcgccgacaaggtgctgatggacatgttccaccaggacgtggaggacatcaacatcctgagcctgaccgacgaggagcccagcaccagcggcgagcagacctactacgacctggtgaaggccttcatggccgagatcagacagtacatcagagagctgaacctgatcatcaaggtgttcagagagcccttcgtgagcaacagcaagctgttcagcgccaacgacgtggagaacatcttcagcagaatcgtggacatccacgagctgagcgtgaagctgctgggccacatcgaggacaccgtggagatgaccgacgagggcagcccccaccccctggtgggcagctgcttcgaggacctggccgaggagctggccttcgacccctacgagagctacgccagagacatcctgagacccggcttccacgacagattcctgagccagctgagcaagcccggcgccgccctgtacctgcagagcatcggcgagggcttcaaggaggccgtgcagtacgtgctgcccagactgctgctggcccccgtgtaccactgcctgcactacttcgagctgctgaagttccccttcggcgacctgagcagactgagagacagcgtgtag

SEQ ID NO: 327370 - DNA, 945 bp, Artificial Sequence
  derived and/or modified sequence
atgttgtgccaagctcagcctcgcagcgctagcgacgtagaggaaagagtgcaaaagagcttccctcaccctatcgacaaatgggccatagcagacgcacagagtgcaattgaaaagaggaaacgccgcaaccccttgtctttgccagtcgaaaagatccaccctctgctgaaggaagttctggggtacaagattgatcaccaggtgtcggtctacatcgtggcggtgctcgagtacatcagcgcagatatcctcaaactggtaggcaattatgtgcgcaacatcagacattatgagatcacaaaacaggacatcaaggtcgccatgtgtgccgacaaggtgctgatggatatgtttcaccaggacgtggaggatatcaatatcctttccctgaccgacgaggagcctagcacatcaggcgaacaaacttactatgaccttgttaaagcctttatggcagagattcgacaatacattcgcgaactgaatctgatcattaaggtctttcgtgaaccttttgtatcaaattcgaagcttttctcagctaacgacgtcgagaacattttttctagaatcgttgatatccacgaactatccgtcaagctactgggccatatcgaggatacagtcgagatgaccgacgaaggcagcccccatcccctcgtcggcagctgttttgaggacctcgctgaagagctggccttcgatccttacgagagctatgcgcgcgatatactgcggccgggatttcacgacaggttcctgtcccaactgtcaaaaccaggagccgccctgtatctgcagagcatcggagaaggcttcaaagaagctgtgcagtacgtccttccccgtcttttgttagccccagtttaccactgtctgcactacttcgagcttctgaagtttccctttggcgatctgtcccgtttgcgagatagcgtgtag

SEQ ID NO: 327371 - DNA, 945 bp, Artificial Sequence
  derived and/or modified sequence
atgctgtgccaggcccagcccaggtctgccagtgatgtggaggagcgggtgcagaagagcttcccccaccccatcgacaagtgggccatcgcagatgcccagagcgccatcgagaagaggaagagaagaaaccccctgagcctgcctgtggagaagatccaccccctgctgaaggaggtgctgggctacaagattgaccaccaggtgtctgtgtacatcgtggccgtgctggagtacatctctgctgacatcctgaagctggtgggcaactacgtgaggaacatccgccactatgagatcaccaagcaggacatcaaggtggccatgtgtgccgacaaggtgctgatggacatgttccaccaggatgtggaggacatcaacatcctgagcctgacagatgaggagcccagcaccagcggggagcagacctactatgacctggtgaaggccttcatggccgagatccggcagtacatccgggagctgaacctgatcatcaaggtgttccgggagccctttgtgagcaacagcaagctgttcagcgccaatgatgtggagaacatcttcagccgcatcgtggacatccacgagctgtctgtgaagctgctgggccacattgaagatactgtggagatgacagatgagggcagcccccaccccctggtgggcagctgctttgaggacctggccgaggagctggcctttgacccctatgagagctatgcccgggacatcctgcggcccggcttccatgaccgcttcctgagccagctgagcaagccaggagctgccctgtacctgcagagcatcggggagggcttcaaggaggccgtgcagtatgtgctgccccggctgctgctggcccctgtgtaccactgcctgcactactttgagctgctgaagttcccctttggagacctgagccggctgcgggacagcgtgtag

SEQ ID NO: 327372 - DNA, 945 bp, Artificial Sequence
  derived and/or modified sequence
atgctgtgccaggcccagccccggagcgccagcgacgtggaggagcgagttcagaagtcctttccccaccccattgataagtgggctatcgcagatgcacagtccgccatcgagaagaggaaaaggaggaatcccctgagtttgccagttgaaaaaatccacccactgctgaaagaagtgcttgggtataagatcgatcatcaggtcagtgtttacattgttgctgtactggaatacatttctgccgatattttaaagttagtaggcaattacgtgcgcaacattcgacactatgaaattacgaaacaagacattaaagtggcgatgtgtgccgacaaagtgctcatggatatgttccaccaggacgtggaagatattaatattctttccttaaccgacgaagagccctccacatcaggggaacagacatactatgacctcgtgaaagcgtttatggccgaaataaggcaatacatcagagagttaaatctgatcattaaagtgtttcgcgagccgtttgtttctaattccaagctgtttagtgcaaacgatgtggagaacatctttagtcgtattgtggatatacacgagttgtccgtcaaactactgggtcacatcgaggatacagtggaaatgactgatgagggaagtccccatcccctcgtgggctcttgcttcgaggatctggccgaagaactggcttttgatccgtatgagagctacgcccgcgatatcctccggcccggattccatgacagatttctctctcagttgtctaagccaggagctgccctttacctacagtccattggcgaaggttttaaagaggctgtccagtacgtacttcctcgacttttgctcgccccagtctatcactgcctgcattacttcgagctgcttaagtttccttttggcgatctatcccgcctacgcgacagtgtgtag

SEQ ID NO: 327373 - DNA, 945 bp, Artificial Sequence
  derived and/or modified sequence
atgctgtgccaggctcagccccgaagtgcctcagatgtcgaggagcgcgttcagaaaagctttccacacccgattgacaagtgggcaattgccgacgctcaatcagccatcgaaaaacggaaaaggcgaaaccccttgtccctgcctgtggagaagattcacccccttcttaaggaagttctcggatataagatcgaccaccaagtttcagtgtacattgtcgctgtgctggagtacatctcagcggatattctaaaacttgtcgggaattatgtgcgtaacattagacactacgagatcacgaagcaggatatcaaggtagcgatgtgcgcagacaaagtgctaatggatatgtttcaccaggacgtagaagatattaacatcctttcattgaccgacgaagagccatcaacgagtggcgaacagacatactatgatctcgtgaaagcctttatggccgaaatacgtcagtacatcagggagctgaacctgatcattaaggtattcagagagccattcgtgtcaaacagtaaactcttttcggctaatgacgttgagaatatttttagtaggatcgttgacatccatgagctttcggtgaaacttctgggccatattgaggatacagtggagatgacggatgaagggagcccccaccccctggtggggtcctgtttcgaagacctcgccgaagaactcgcattcgacccttatgaatcatatgccagagatattctccggccaggctttcacgaccggttcttgtcacagttatccaagcccggagcagccctctacctgcagtcaattggagaggggttcaaggaagccgtccagtacgtgctgccacgcctgctgctggccccagtttaccattgtttacattatttcgagctgctgaagttccccttcggagatctgtccagactccgagatagtgtgtag

SEQ ID NO: 327374 - DNA, 1469 bp, Artificial Sequence
  derived and/or modified sequence
aagaagcctctgcgcctgcgccagggcgcacccgtcggcggtaaaagctgaggggctggcgcgggggattggtgggcgacacttttacgtctacacgtgcctacccgtctgcacgtttctgagtccgcacggttgtcttctcttgctgaatggacataggtgttttgttttgtcccaagagatacaggtccaggggcaagttcatcctactctcgagtctaatgatgatgctcttcagtatgttgaagaattaattttgcaattattaaatatgctatgccaagctcagccccgaagtgcttcagatgtagaggaacgtgttcaaaaaagtttccctcatccaattgataaatgggcaatagctgatgcccaatcagctattgaaaagaggaagcgaagaaaccctttatctctcccagtagaaaaaattcatcctttattaaaggaggtcctaggttataaaattgaccaccaggtttctgtttacatagtagcagtcttagaatacatttctgcagacattttaaagctggttgggaattatgtaagaaatatacggcattatgaaattacaaaacaagatattaaagtggcaatgtgtgctgacaaggtattgatggatatgtttcatcaagatgtagaagatattaatatattatctttaactgacgaagagccttccacctcaggagaacaaacttactatgatttggtaaaagcatttatggcagaaattcgacaatatataagggaactaaatctaattataaaagtttttagagagccctttgtctccaattcaaaattgttttcagctaatgatgtagaaaatatatttagtcgcatagtagatatacatgaacttagtgtaaagttactgggccatatagaagatacagtagaaatgacagatgaaggcagtccccatccactagtaggaagctgctttgaagacttagcagaggaactggcatttgatccatatgaatcgtatgctcgagatattttgcgacctggttttcatgatcgtttccttagtcagttatcaaagcctggggcagcactttatttgcagtcaataggcgaaggtttcaaagaagctgttcaatatgttttacccaggctgcttctggcccctgtttaccactgtctccattactttgaacttttgaagtttccatttggggacctcagcagactcagggactcagtgtgaggataagggagccagtgtgaggataaggccaaagtaatggggaagcagttagaagaaaaaagtgaagatcaagaagacaaggaatgtttaaaacaagcaataacagctttgcttaatgttcagagtggtatggaaaaaatatgttctaaaagtcttgcaaaacgaagactgagtgaatctgcatgtcggttttatagtcagcaaatgaaggggaaacaactagcaatcaagaagatgaacgagattcagaaga

SEQ ID NO: 327375 - DNA, 474 bp, Artificial Sequence
  derived and/or modified sequence
atggccccccaggcccagcccctgcccctgctgggcaagtgcaaggcctcaaacgcacccactccacgcccccctaggcgccctacctggaaacgcaaatccggaaaagtgagtactacagtacctcaaccacaaactgtccctgggtcctggccaagggagagggagcgcaagcgcgagagggatcgcatcaattctcttctgctacagatcatcgggcattctaagcaggctttacctgggccaggcgaaccggctcagcgtctgacacctgcccctgccgatccggggggcaggggagaacagggtggagtcgccgcacagggtgcgggcctggctgcaggacggcgctcagccgtaggtcctagtaaactgtgcaacctggtgtcagcctcaggagcactggctgtgttctcaatcaccggtatgtgccctggtagggatgtgtccgacggcctgaggatggggcagtag

SEQ ID NO: 327376 - DNA, 243 bp, Artificial Sequence
  derived and/or modified sequence
atgtgcctgatcagcctgtgcgtgagcttcaccagcgtgaacaagagagagcagaacaagcccaagatcctgatcctgctgaagaagagactgagcggctgcttcatcaaggaggccagaggcaccagactgaagggcaaccagctggccgtgaccaaggccagagacgacggcggcctggccgaggacggcgacagcggcggcggcaaggtgatcagattctggatctacttcgagggctag

SEQ ID NO: 327377 - DNA, 4250 bp, Artificial Sequence
  derived and/or modified sequence
actgaagctgcggcttgcggttcagcgggttctagggcgccgggcgctcgggcctcggccatggctcacaggccgaaaaggacttttcggcagcgcgcggctgattccagcgacagcgatggcgccgaggagtcgcctgctgagcctggggcgccgagggaacttccggtcccgggttctgcggaggaagagccgccctctggaggaggccgcgcgcaggtggcgggactgccccaccgggttcggggccctcgtggccggggccgggtctgggcgagctcccggcgtgccaccaaagcggctccccgcgcggacgaaggctcagaatccagaacccttgatgtgtccacagatgaagaggataaaatacatcactcctcagaaagtaaggatgatcagggtttgtcttctgacagttctagctctcttggagaaaaagaactttcatcaacagttaagatcccagatgcagcttttattcaggcagcccgcagaaaacgtgaattggccagggcccaagatgactatatttctttggatgtacaacatacctcctccatctctggtatgaagagagagagcgaagatgaccctgagagtgagcctgatgaccatgaaaagagaataccatttactctaagacctcaaacacttagacaaaggatggctgaggaatcaataagcagaaatgaagaaacaagtgaagaaagtcaggaagatgaaaagcaagatacttgggaacaacagcaaatgaggaaagcagttaaaatcatagagattaacattactacaggaaactcaccgctcacacctgagggagtatgaaaaatacgtacaagatgtcaaaagctcaaagagtaccatccagaacctagagagttcatcaaatcaagctctaaattgtaaattctataaaagcatgaaaatttatgtggaaaatttaattgactgccttaatgaaaagattatcaacatccaagaaatagaatcatccatgcatgcactccttttaaaacaagctatgacctttatgaaacgcaggcaagatgaattaaaacatgaatcaacgtatttacaacagttatcacgcaaagatgagacatccacaagtggaaacttctcagtagatgaaaaaactcagtggattttagaagagattgaatctcgaaggacaaaaagaagacaagcaagggtgctttctgggaattgtaaccatcaggaaggaacatctagtgatgatgaactgccttcagcagagatgattgacttccaaaaaagccaaggtgacattttacagaaacagaagaaagtttttgaagaagtgcaagatgatttttgtaacatccagaatattttgttgaaatttcagcaatggcgagaaaagtttcctgactcctattatgaagctttcattagtttatgcataccaaagcttttaaatcccctaatacgagttcagttgattgattggaatcctcttaagttggaatccacaggtttaaaagagatgccatggttcaaatctgtagaagaatttatggatagcagtgtggaagattcaaagaaggaaagtagttcagataaaaaagtcttgtctgcaatcatcaacaaaacaattattccccgacttacagactttgtagaattcctttgggatcctttgtcaacctcacagacaacaagtttaataacacattgcagagtgattcttgaagaacattccacttgtgaaaatgaagttagtaaaagcagacaggatttacttaaatccattgtttcaagaatgaaaaaggcagtagaagatgatgtttttattcctctgtatccaaagagtgctgtagaaaacaaaacatcacctcattcaaagttccaagaaagacagttctggtcaggcctaaagctcttccgcaatattcttctttggaatggactccttacagatgacaccttgcaagaactaggactagggaagctgctaaatcgttaccttattatagcacttctcaatgccacacctgggccagatgtggttaaaaagtgcaaccaggtagcagcatgtctaccagaaaaatggtttgaaaattctgccatgaggacatctattccacagctagaaaacttcattcagtttttattgcagtctgcacataaattatctagaagtgaattcagggatgaagtcgaagaaataattcttattttggtgaaaataaaagctttgaatcaagcagaatccttcataggagagcatcacctagaccatcttaaatcactaattaaagaagattgaataaactttattggaaaatgctaaaattttaatatagttacactcagttcctttgtttgagaagaagctggtgcctctctcttctttattccctgtaatagaaggtaggatttgaaaaaaagcaggactccacctctgtattcccccgtgctttaccttctggcatcatgaaaagctgccatgattctgtggtgttctaaggaattaaatgcactggagctttaagagctcaacgtgtttccctttgattcttttggctggtctttcaattttcttaagaggggaactggagaaaccttgctaaaggttttagcttaagtgagcatgctactaagtcttctgtcctgaaccacaataatatcttttagttctctttaactacctttatttaaaaataagtcaatatgaaaatctcagttggagtgaattatttgctaagtattaaatgattaaggcatgtgccgattgtcaaattatccttcagaaatctgtaccaatttaatgtaccaacataagcataagtgagtgccaatgaatccctaccagcagtagttattatcctttttaaaaatgcattgaaaatttgaaaggtaaaaatcttattttaatagcgtattttgtgttggctattagagagtaaacatattggttttggccatttgtaattatttctgaaatatccatctttttcttatggactttaagacctttatatttttaaagatattgattttttgcccatgcttgtggcagaagttttccttatttgccatttttcttttattttttttttaattgtattttttgagacagggtctggctctgtcacccaggctggagagtagtggcacaatctcggctcactgcaacctctgccttctgggctcaagcaatcctcccacttcaacctcccaagtagctgggactataggcatgcgccaccatgcccagctgatttttgtaattttttgtagagatggggtttcgtgacattgcccaggctggtctcgaactcttgagctcaagcagtctacccaccttgacctcccaaagtgctgggattacaggcttgagcaaccatgtttggcctttcttttaaatttgttgatgttttttgaagcattaagtcattacttattagcaagttactattttgtttttttgtcattggtggtaggactaagaaggaaacagatattttaaatactcacaacatgtgattcattttctgataaaatatttgtctaataaaacagaggcaagataatttaatcaaaagaaattaagaaaattttccaaaaatgttagtttactagtaatttttctaagtctacttattaaataacttaagggaaactgtaaatatattttgcaaattgttgttcaaaagataattggaaaaaattgaatatattgtaggatttgaatatacagcctacttttatgtcacctctaccttcaaaactacatataatttattttaggagttggatttgttatgtctgttgcagtgaggacttgtgattcactggtatgaagaattttttgatgtttatattagtaacaaaattatacaaggatagaatctcatctagaaaatgcaaactattgttgaaaagcagttagcatttccacacaaccgctgtccccagagataactgctgttttcattttaatgttatccttttagaccttttctctatttacaaaaatgttacgtgtttctatgtgtacatagttttgggttttttttttttttttacgtaagtggcagacactttattgcacatgaaatttgtaatttttttctatttaagtacacatttggaaattatcctctgacttttggatttttaactaaatatgttggacgtgttcctttatatatttaagttcagcacagaaactttcctacctttttgtggaagataaaatattaaaactgctttcaaaactacaa

SEQ ID NO: 327378 - DNA, 765 bp, Artificial Sequence
  derived and/or modified sequence
atggctcaccgtcccaagcggaccttcagacagcgggctgcagatagttctgatagcgacggagccgaggaaagccccgctgaaccaggagcaccacgagagctccccgttccaggttctgccgaggaagaacctccatcaggtggtggccgcgcccaggtcgcaggactgcctcaccgcgttagaggacctagagggcgtggccgggtctgggcctctagcaggagagccacaaaggctgcccctcgtgctgacgaagggtctgaatcccgaaccttggacgtttcaaccgacgaggaggacaaaattcaccactctagtgagtcgaaagacgatcaaggactctccagcgactcctcatcctcgctgggagagaaagaactgagtagcacagttaaaatccccgatgcagcttttatccaggctgcaaggcggaagagggagctcgcgcgcgcccaggacgattacatctctttagacgttcagcacacatcctccatctcaggtatgaagcgcgaatctgaggatgaccccgagagtgagccagacgatcacgagaaacgaatacccttcacgcttcgtccacaaaccctgaggcagcgcatggcagaggagtccatcagccggaatgaagagacaagcgaggagagccaagaggatgaaaagcaagatacctgggagcaacagcagatgcgaaaagccgtgaagattattgagattaacattactaccgggaactctccactcacgccagaaggcgtctag

SEQ ID NO: 327379 - DNA, 765 bp, Artificial Sequence
  derived and/or modified sequence
atggcccaccggcccaagaggaccttccggcagagagctgctgacagcagtgacagtgatggagctgaggagagccctgctgagcccggggccccccgggagctgcctgtgcccggcagcgctgaggaggagcccccatctgggggcggccgggcccaggtggccggcctgccccaccgggtgcggggcccccggggccggggccgggtgtgggccagcagcagaagagccaccaaggccgcccccagggcagatgagggcagcgagagcaggaccctggatgtgtccacagatgaggaggacaagatccaccacagcagcgagagcaaggatgaccagggcctgagcagtgacagcagcagcagcctgggggagaaggagctgagcagcacagtgaagatcccagatgctgccttcatccaggccgcccggaggaagcgggagctggcccgggcccaggatgactacatcagcctggatgtgcagcacaccagcagcatcagcggcatgaagcgggagagtgaagatgatcctgagagcgagccagatgaccacgagaagaggatccccttcaccctgcggccccagaccctgcggcagaggatggccgaggagagcatcagcagaaatgaggagaccagcgaggagagccaggaggatgagaagcaggacacctgggagcagcagcagatgaggaaggctgtgaagatcatcgagatcaacatcaccaccggcaacagccccctgaccccagagggcgtgtag

SEQ ID NO: 327380 - DNA, 765 bp, Artificial Sequence
  derived and/or modified sequence
atggcccaccggcccaagcggaccttccggcagcgggccgccgactcaagtgattcagacggggccgaggagagtccagccgaacccggggctcccagggagctgccagttcctggatctgcagaggaggaacctccttcagggggcggacgggctcaggtcgccgggctgccgcatagagttcgtggtccacgcggccggggacgagtctgggcaagtagccggcgcgcaactaaagccgctcctagagccgatgaagggagcgaatccagaacgctcgatgtcagcactgacgaagaagacaaaatccatcactcttctgagagcaaagacgatcagggcctctctagtgatagctctagttccttgggggaaaaggaactttcctctaccgttaaaattcccgatgcggcctttattcaggctgctaggcgcaagcgagagctggccagggcacaagacgattacatttcgctcgacgtccaacatactagcagtatttccggcatgaagcgtgagagcgaggatgatccggagagcgagccggacgaccatgaaaaacggatcccattcacactgcgcccgcagaccctacgccagagaatggcagaagagtctatctcccgcaatgaagagacttccgaagagtctcaagaggacgaaaagcaggatacatgggaacagcaacaaatgcgcaaggctgtcaaaattattgaaataaatattaccactgggaatagccctttgacccccgagggcgtttag

SEQ ID NO: 327381 - DNA, 765 bp, Artificial Sequence
  derived and/or modified sequence
atggctcaccgaccaaaacgcacatttcgccagcgtgccgcagattcttcagactctgatggggcagaagaaagccctgcggaacccggagctccgcgagagctgccagtgcccggatcggcagaggaagagcccccttccggcggaggcagagctcaagttgcgggactaccgcaccgcgtgcgtggccctcggggaagggggagggtctgggcctccagccgacgtgccaccaaggctgctccaagagctgacgagggatccgagtcgcgaacgcttgatgtctccacggatgaagaagataagattcaccattcaagcgagagtaaagatgatcaggggttatcgtctgacagtagctcctctcttggcgagaaggagctgtctagcactgtaaagatcccggatgccgcattcattcaggccgctcggaggaaacgcgaactcgccagggcccaggatgactacatcagcctggatgtgcagcacacatccagtatttctgggatgaagagagagtccgaagacgacccagagagcgagcccgatgaccatgagaaacgaatcccttttaccctgaggccccaaacactgagacagcgaatggctgaagaatctatctcacggaatgaggaaacaagcgaggaatctcaggaggacgagaagcaagatacttgggagcaacagcagatgcgcaaggcagtgaagatcatcgagattaatatcactactggaaattcaccactaaccccggaaggcgtttag

SEQ ID NO: 327382 - DNA, 765 bp, Artificial Sequence
  derived and/or modified sequence
atggcccacagacccaagagaaccttcagacagagagccgccgacagcagcgacagcgacggcgccgaggagagccccgccgagcccggcgcccccagagagctgcccgtgcccggcagcgccgaggaggagccccccagcggcggcggcagagcccaggtggccggcctgccccacagagtgagaggccccagaggcagaggcagagtgtgggccagcagcagaagagccaccaaggccgcccccagagccgacgagggcagcgagagcagaaccctggacgtgagcaccgacgaggaggacaagatccaccacagcagcgagagcaaggacgaccagggcctgagcagcgacagcagcagcagcctgggcgagaaggagctgagcagcaccgtgaagatccccgacgccgccttcatccaggccgccagaagaaagagagagctggccagagcccaggacgactacatcagcctggacgtgcagcacaccagcagcatcagcggcatgaagagagagagcgaggacgaccccgagagcgagcccgacgaccacgagaagagaatccccttcaccctgagaccccagaccctgagacagagaatggccgaggagagcatcagcagaaacgaggagaccagcgaggagagccaggaggacgagaagcaggacacctgggagcagcagcagatgagaaaggccgtgaagatcatcgagatcaacatcaccaccggcaacagccccctgacccccgagggcgtgtag

SEQ ID NO: 327383 - protein, 463 aa, Artificial Sequence
  derived and/or modified sequence
PLVSRETPLSCSHNRLNDLGGSEGQGAGPGGAAATAAAMEDEMPKTLYVGNLSRDVTEALILQLFSQIGPCKNCKMIMDTAGNDPYCFVEFHEHRHAAAALAAMNGRKIMGKEVKVNWATTPSSQKKDTSSSTVVSTQRSQDHFHVFVGDLSPEITTEDIKAAFAPFGRISDARVVKDMATGKSKGYGFVSFFNKWDAENAIQQMGGQWLGGRQIRTNWATRKPPAPKSTYECRCIGEEKEMWNFGEKYARFCSRRLIAEIDEKQIKTTIQKSNTKQLSYDEVVNQSSPSNCTVYCGGVTSGLTEQLMRQTFSPFGQIMEIRVFPDKGYSFVRFNSHESAAHAIVSVNGTTIEGHVVKCYWGKETLDMINPVQQNQIGYPQPYGQWGQWYGNAQQIGQYMPNGWQVPAYGMYGQAWNQQGFNQTQSSAPWMGPNYGVQPPQGQNGSMLPNQPSGYRVAGYETQ

SEQ ID NO: 327384 - DNA, 4770 bp, Artificial Sequence
  derived and/or modified sequence
gctcctaggctcccggctcgccgccatcttgtattggggtttcattgttcccgctgggccgggcggtttagtgtaattgccgccggaggaggaggcggagtaacctctggtcagccgagaaaccccactatcctgtagccataaccgcttaaacgatttgggaggtagtgaagggcagggagctggacctggaggcgccgccgcgacagcagcagccatggaggacgagatgcccaagactctatacgtcggtaacctttccagagatgtgacagaagctctaattctgcaactctttagccagattggaccttgtaaaaactgcaaaatgattatggatacagctggaaatgatccctattgttttgtggagtttcatgagcatcgtcatgcagctgcagcattagctgctatgaatggacggaagataatgggtaaggaagtcaaagtgaattgggcaacaacccctagcagtcaaaagaaagatacaagcagtagtaccgttgtcagcacacagcgttcacaagatcatttccatgtctttgttggtgatctcagcccagaaattacaactgaagatataaaagctgcttttgcaccatttggaagaatatcagatgcccgagtggtaaaagacatggcaacaggaaagtctaagggatatggctttgtctcctttttcaacaaatgggatgctgaaaacgccattcaacagatgggtggccagtggcttggtggaagacaaatcagaactaactgggcaacccgaaagcctcccgctccaaagagtacatatgagtgtaggtgtattggagaagaaaaggaaatgtggaattttggagaaaaatacgctagattttgttcccggagacttattgcagaaatagatgagaagcaaatcaagactactattcaaaaatcaaataccaaacagctatcatatgatgaggttgtaaatcagtctagtccaagcaactgtactgtatactgtggaggtgttacttctgggctaacagaacaactaatgcgtcagactttttcaccatttggacaaataatggaaattcgagtctttccagataaaggatattcatttgttcggttcaattcccatgaaagtgcagcacatgcaattgtttctgttaatggtactaccattgaaggtcatgttgtgaaatgctattggggcaaagaaactcttgatatgataaatcccgtgcaacagaatcaaattggatatccccaaccttatggccagtggggccagtggtatggaaatgcacaacaaattggccagtatatgcctaatggttggcaagttcctgcatatggaatgtatggccaggcatggaaccagcaaggatttaatcagacacagtcttctgcaccatggatgggaccaaattatggagtgcaaccgcctcaagggcaaaatggcagcatgttgcccaatcagccttctgggtatcgagtggcagggtatgaaacccagtgaataaggactccagaatctaaagccagtggcttgaggctacagggagtgtagtaaagccgttgtttacttaaagatttatcaaatcagtcagtgcaaatgtcagatacaatgtatttatttaaaagattcatttttaatcatgaaattacttatcatccacattgttttaaaaagaaacaagatgctggatgtctgccaatttttgccttcattaccttttttgataaagtttctcagatccttgtttcaaacacaaatgcagggattgctgccactttttaactattaagaggcagaaaattgcacaatattgaacttttttccactgaagtagtgtgcagttctagtttgcattcctgatatgatttaaaacatgtaatataaagatgttaaaaaaaaaaaccaaaactgtgcagagtctagaagttgtttgtcatcttcagcttgtgcacaattctgttttaggttaaaaaaaggcattgtttgagctgtcccatctccactgttatccctttggggttttttaatataaattattagtttacatcatttttgtatctacatcttttttcacaaatttgtcttgccttattaaagttctgtaaaatatacttaaatggaaaaaatgatgttcatttagattgaaaacttttctcagatggattgataattgcattcatcttgtgttttatatgagaaggtgcctcaagaatttcctgttggatttgtttaaaaggatttttatctttcgtgataaactttgctgtgtaccaggaactataaaaacaaaaacttgttactaaagaaaatatctgaaatgtgataagttcttatgccatgttaatttcatgtgtcaacttcaacatttacatgtattatttcattatgtaaaatgttttagcaatttaatattttgcacagttagcaaactttgtatgtcatttccttcaaggcatcatgcagagttgacatgagatttataaggttttaagttgtttgcatgtgaaaatcaaatacatactttggtagtctttgaatacaaagtcatctgctcttgtttttcaagaattttgagacacaaagttgtatgtaaaggaatatattaatttgccgttttctaggtagatttgctcaaaaagagtgaatcaacttaatatgtacaaatgatagctgtgaaactgtagaatatctttgtgtcaggcttggagttcattgtgacctccaaattttgcctgaaggaccagctgggcaaagcatcttttaaatgttcagaggccaaaagataaacaaaaaaaaaaccttaaaatcctacctctttaaacagccttcagataagagaatcctcagtgcaatcattattttgattcgtttggtacctgttttcctggagttcccgattttattattttggggtggctccaagcattaagaggtttaatctttgatggcattgttctagttttgaaatttctagtatatttcagagtctcttagaagacttgtgtgggaagtttcactttgttttcagtgaagatcacaaacctccttcttcctttactcaagaggaaaggtcccagtatacatatttgaatggttgatggttttcaagaccttcagggagctccctgcattttacctagaaacagaaaaggcccgcaaaatcttaagtttcctggcctgcatttcccgggtaggggcaaatgactccaagctggtctctaagccaatacccttataaaccagagcccaggaaagacagctcgagtgtataattctctggagctcaattctatgcagttgtgctgatatttcattaagtcactgtgtatttttaagtgttgatacattaaaagtcgctttatggaagatgagtaaattttttaaatacttggaaattttatttccttgttaacttctacagatcagggcatgcaaccaaaagcagcttaaatgaaatattttaaaataaaatatcaggaagctatttttagatttcttctggcttatgtttctactttaggaccctcattgttctcttattaaaaaaaattatttcctgtgcatctcatggactgcagggtaaattatttgggcataaataatttaaatagttttctttcattttgactatctccagtaataacagtttttattatccagcatattggcttattgcacaaatcttaaaatgtacattgactactttctgagaagaaagtggtatcagtactcatgatgaaaaggttactactgaacaaattcacatttcaggaacacctctatctttggtttaaatcttactcttagtttttccgtctaaaaatcatactggtattagtatcaggtaaggaaattaaagtttttaaaatggtttcattctctgcaatatgcaaaatttagattttactttctggtactgtaaagaacctgaagtgatttacacttaatgggtgattaatccagtattctttaccctgaatgtttggatattaaagttcctttatgttttctataacctgtgggatcttcttgcagtgattattgtgtgtgagattttttttctttttggtctatccatattgttatattcactcaggtattttttttttaatcttattccagaatcagtggtttatattgggttactgtttaacaccaaatggaattggcattctgcagatttaattaattatgaaaccagggtctcattttccttgctgatacttgttgaaaatgagattcacattctagtctttattttcctcctgttttgtccctgtgcttgtacatcttccttttatttgtgtgttatagttctattccatttgagaaggcagttggtaagaactagattgcatgtacaaagacaggtttactaagtgctgtacagtggtcctgaggttacagttgaattagaaaaacgaaatgtacttacaggaaataagaaagcaaacctttcaaatgagagtgatgatttctttaaaaaaaatcagtttttttctctcaaataatgttctttatttcacgaaatcgtcaatcttaagcatgagcagggataaacaactcctagaaggaactcaattcattcttcctggattttctctgttgttaaatcacaaaaatgatagtccccaatcgtttctttataggaggttattacatttcattacagtcactgcattttgactgttgtgtttagaatttgaatgtacatccaaaatgatgagtttcaatttaagagccttaataaaatgtgtgagtgtgtctcaattgaa

SEQ ID NO: 327385 - DNA, 1392 bp, Artificial Sequence
  derived and/or modified sequence
cccctggtgagcagagagacccccctgagctgcagccacaacagactgaacgacctgggcggcagcgagggccagggcgccggccccggcggcgccgccgccaccgccgccgccatggaggacgagatgcccaagaccctgtacgtgggcaacctgagcagagacgtgaccgaggccctgatcctgcagctgttcagccagatcggcccctgcaagaactgcaagatgatcatggacaccgccggcaacgacccctactgcttcgtggagttccacgagcacagacacgccgccgccgccctggccgccatgaacggcagaaagatcatgggcaaggaggtgaaggtgaactgggccaccacccccagcagccagaagaaggacaccagcagcagcaccgtggtgagcacccagagaagccaggaccacttccacgtgttcgtgggcgacctgagccccgagatcaccaccgaggacatcaaggccgccttcgcccccttcggcagaatcagcgacgccagagtggtgaaggacatggccaccggcaagagcaagggctacggcttcgtgagcttcttcaacaagtgggacgccgagaacgccatccagcagatgggcggccagtggctgggcggcagacagatcagaaccaactgggccaccagaaagccccccgcccccaagagcacctacgagtgcagatgcatcggcgaggagaaggagatgtggaacttcggcgagaagtacgccagattctgcagcagaagactgatcgccgagatcgacgagaagcagatcaagaccaccatccagaagagcaacaccaagcagctgagctacgacgaggtggtgaaccagagcagccccagcaactgcaccgtgtactgcggcggcgtgaccagcggcctgaccgagcagctgatgagacagaccttcagccccttcggccagatcatggagatcagagtgttccccgacaagggctacagcttcgtgagattcaacagccacgagagcgccgcccacgccatcgtgagcgtgaacggcaccaccatcgagggccacgtggtgaagtgctactggggcaaggagaccctggacatgatcaaccccgtgcagcagaaccagatcggctacccccagccctacggccagtggggccagtggtacggcaacgcccagcagatcggccagtacatgcccaacggctggcaggtgcccgcctacggcatgtacggccaggcctggaaccagcagggcttcaaccagacccagagcagcgccccctggatgggccccaactacggcgtgcagcccccccagggccagaacggcagcatgctgcccaaccagcccagcggctacagagtggccggctacgagacccagtag

SEQ ID NO: 327386 - DNA, 1392 bp, Artificial Sequence
  derived and/or modified sequence
ccgctggtctctagagagactccactctcatgtagtcacaataggctgaatgaccttggaggttccgaagggcagggagccgggcccggcggtgccgctgcaactgctgctgcaatggaggatgagatgccaaaaactttgtacgtggggaatctttctagagacgttaccgaggcactgatccttcaactcttcagccagataggcccttgcaagaactgcaagatgattatggacactgccgggaacgacccgtactgttttgtggagttccatgaacatcggcacgctgcggctgccttagccgctatgaatggaagaaagataatgggtaaagaggtaaaggtcaactgggctaccactcccagtagtcagaagaaggatacatcaagctccacagtggtcagtacacagcggagccaagatcactttcacgtgtttgtgggagacctctcccccgagattaccaccgaagatattaaagccgcgtttgcccccttcggtcgaatctccgacgcccgagtggtcaaagatatggctaccggaaagtccaaaggctatggctttgtgtctttttttaacaaatgggacgccgagaacgctatccagcagatgggcggccagtggctggggggacgtcaaatcaggaccaactgggcgacacgaaagcctcctgccccaaaatccacctatgagtgtagatgcatcggtgaagaaaaggagatgtggaattttggagagaagtacgcccgcttctgctcgaggagactcatagccgaaattgatgagaaacagatcaagacaaccatccaaaagagcaacaccaagcagctctcttatgacgaagtcgtgaatcagagctctccatctaactgcacagtgtactgtggcggagttacttcaggcctgaccgagcagctcatgagacagacattctcgccatttggtcagatcatggagatccgcgtgttcccggacaaaggatattccttcgttcgatttaattcacacgagagcgccgcccacgctatcgtttccgttaatgggactacaattgagggtcacgtggtcaaatgttactgggggaaagagactcttgatatgatcaaccctgttcagcagaaccagattggctacccccagccatacgggcagtgggggcagtggtatgggaacgcacaacaaatcggacaatatatgccgaacggatggcaggtaccagcgtacgggatgtacgggcaggcatggaatcagcagggctttaatcagacacagagcagcgcaccttggatggggcccaattatggggttcaaccacctcagggacagaatggcagcatgctacccaaccaaccttccgggtatagagtggccgggtatgagacccagtag

SEQ ID NO: 327387 - DNA, 1392 bp, Artificial Sequence
  derived and/or modified sequence
cccctggtgtcccgggagacccccctgagctgcagccacaaccggctgaatgacctgggcggcagcgagggccagggcgccggccctggaggagctgctgccacagctgctgccatggaggatgagatgcccaagaccctgtatgtgggcaacctgagcagagatgtgacagaggccctgatcctgcagctgttcagccagatcggcccctgcaagaactgcaagatgatcatggacacagctggaaatgacccctactgctttgtggagttccacgagcacagacatgctgctgctgccctggccgccatgaatggaaggaagatcatgggcaaggaggtgaaggtgaactgggccaccacccccagcagccagaagaaggacaccagcagcagcacagtggtgtccacccagaggagccaggaccacttccacgtgtttgtgggggacctgagccctgagatcaccacagaggacatcaaggccgcctttgcccccttcggccgcatcagtgatgcccgggtggtgaaggacatggccaccgggaagagcaagggctacggctttgtgtccttcttcaacaagtgggatgctgaaaatgccatccagcagatgggcggccagtggctgggcggccggcagatccgcaccaactgggccaccaggaagcccccagcccccaagagcacctatgagtgccgctgcatcggggaggagaaggagatgtggaactttggagagaagtatgcccgcttctgcagccggcggctgattgctgagattgatgagaagcagatcaagaccaccatccagaagagcaacaccaagcagctgtcctatgatgaggtggtgaaccagagcagccccagcaactgcaccgtgtactgcggcggcgtgaccagcggcctgacagagcagctgatgaggcagaccttcagccccttcggccagatcatggagatccgggtcttcccagacaagggctacagctttgtgcgcttcaacagccatgaatctgctgcccacgccatcgtgtctgtgaatggcaccaccatcgagggccacgtggtgaagtgctactggggcaaggagaccctggacatgatcaaccctgtgcagcagaaccagatcggctacccccagccctacggccagtggggccagtggtatggaaatgcccagcagatcggccagtacatgcccaacggctggcaggtgcctgcctacggcatgtatggccaggcctggaaccagcagggcttcaaccagacccagagcagcgccccctggatgggccccaactatggagtgcagcccccccagggccagaatggctccatgctgcccaaccagcccagcggctacagagtggccggctatgagacccagtag

SEQ ID NO: 327388 - DNA, 1392 bp, Artificial Sequence
  derived and/or modified sequence
cccctggtgagccgggagacccccctgagctgcagccacaaccggctcaatgatttgggcggcagtgagggacagggtgccggccccggtggggctgccgccacggccgccgccatggaggacgagatgccaaagaccctgtacgtcggtaacctttcaagagatgttacggaagctttgattcttcagctctttagccagattggcccctgcaagaactgcaaaatgatcatggacacagctggcaacgacccatactgctttgtggaatttcatgagcacaggcatgccgccgcagctctggcggcaatgaacggcagaaaaatcatgggaaaggaggtgaaagtaaattgggcgaccacacctagtagtcaaaagaaagacacaagctcatccacggtcgtcagtacccagaggtctcaggaccacttccacgtgttcgtcggcgaccttagccctgaaataactacagaggacatcaaggccgcctttgcccccttcggccgtataagcgacgcgcgagtggtcaaagatatggccactgggaagtcaaagggttacggattcgtgtccttctttaataaatgggacgccgagaacgccatccagcagatgggcgggcaatggctcggtggcaggcagatcaggacaaactgggctacccgcaagccacccgcccccaaaagcacctacgagtgcagatgcatcggcgaggaaaaggaaatgtggaattttggggagaaatatgctcgcttttgctcacgtcgcttgatcgccgagattgatgaaaagcagattaaaacaactattcagaagtcaaacacaaaacagctctcatatgatgaggtcgttaatcagtcaagtccctcaaattgtactgtgtattgcggaggagtgacgtccggacttaccgagcaactgatgcggcagacgttctctccctttgggcagataatggagattagggtctttcccgacaagggctatagctttgttaggttcaatagccacgaaagcgccgcccatgccatcgtgtccgttaacggcacaacaatagagggacacgtggtgaaatgttattggggcaaagagaccctggacatgatcaaccctgtgcagcaaaatcaaataggataccctcaaccttatgggcagtggggccagtggtatgggaatgcccagcaaatcggtcagtatatgccaaacggctggcaggtgcctgcttatggaatgtacggccaggcctggaatcagcaagggttcaaccagactcagtcatctgccccttggatggggcccaattacggcgttcagcctccacagggacagaacggaagtatgctcccaaatcaaccctctgggtatagggtcgcgggctacgaaactcaatag

SEQ ID NO: 327389 - DNA, 1392 bp, Artificial Sequence
  derived and/or modified sequence
cccttggttagccgggaaaccccgctgagttgtagtcacaaccgcctcaacgacttggggggaagcgaaggccaaggcgctggtcccggaggcgctgctgccactgcagccgcaatggaagacgagatgccaaaaactctctacgttggtaatctgagcagggacgtgacagaggcactcatcctgcagctgttttcacagattggcccttgcaaaaattgcaaaatgatcatggatacggccggtaacgacccctactgttttgtggagtttcacgaacaccggcacgctgcagctgcgctggcagccatgaacgggagaaagattatgggcaaagaagtgaaagttaactgggctaccacaccctcctctcaaaagaaggacacgtcttccagtactgtagtgtccacccagagatctcaagaccacttccacgtgttcgtcggcgacctgagcccagaaattactacggaggatattaaagctgcgtttgcacccttcggaaggatctccgatgcaagggttgtgaaagatatggctacaggaaaaagcaagggctatggcttcgtttccttctttaacaaatgggacgctgaaaatgccattcagcaaatgggcggacagtggctgggcggtagacaaatacggacgaactgggccactaggaaacccccagctccaaagtccacctatgagtgcagatgcataggcgaggagaaagagatgtggaatttcggggaaaaatacgctcgcttttgcagtcgtaggctgatcgccgagattgatgagaaacagatcaaaacaactattcagaaaagcaatactaagcaattaagctatgacgaggtggttaaccagtcttctccatccaattgtactgtgtattgtggtggagtgacctctggccttacggagcagctgatgagacagacttttagccccttcgggcaaatcatggagatacgggtattcccagacaaaggctactcattcgtacgctttaattcccacgagagcgctgcacacgccattgtgtccgtgaacggtacaacgatcgaagggcacgttgtcaagtgctactggggcaaagaaaccctcgatatgatcaatcctgttcagcagaatcagattggatatcctcagccatacgggcagtggggtcaatggtacgggaacgcccagcagattggccaatatatgcctaacgggtggcaggtgccagcctatggcatgtatgggcaggcatggaatcagcaagggttcaaccaaacccagagcagtgcaccctggatgggaccaaattacggtgttcagcctccccaggggcagaacgggtccatgcttcccaaccagccgagcgggtacagagtggctggctacgagacccagtag

SEQ ID NO: 327390 - DNA, 1935 bp, Artificial Sequence
  derived and/or modified sequence
atgctgatgagaagagaccaggtgctcaaggtctgcgctaaccattggattacgactacaatgaatctcaaacctttgagcggtagcgaccgcgcttggatgtggctcgcgtccgacttttcagacggcgatgccaagttagaaaggcttgcagcccagttcaaaactcccgaactcgcagaagagttcaagcaaaaattcgaggaatgtcagcgcctgttgctggacatcccgttgcaaactcctcataaattagtggatacagggagggcggccaagctcatccagagagcagaggagatgaagtctggcctcaaggatttcaaaacattcttaaccaatgatcagacaaaggtgaccgaggaagagaacaagggctcaggcacaggagccgctggcgcatctgacacaactatcaaacctaaccccgagaacactggtccaaccctggaatgggacaactatgatcttcgcgaagatgcacttgacgacaatgtatcctctagctctgtacatgactccccccttgctagctcacccgtgcggaagaatatttttcggtttgacgagagcaccacaggcttcaatttctccttcaagagtgctttgagtctttctaaatctccagccaagctgaatcagtctgggacatctgtggggacagacgaagagtctgatgtgacccaggaagaagagcgcgatggccagtattttgaacccgtggttcccctgcccgatttggttgaagtcagctccggcgaagaaaacgagcaagtggtcttcagccacatggctgaactttaccgatatgacaaggacgtgggccaatggaaggaaagaggaattggtgacatcaaaatcttgcagaattacgataataaacaggtgaggatagtgatgcgccgagaccaggttctaaagctgtgcgcgaatcacaggatcacaccggatatgagccttcagaatatgaagggcacagagcgcgtgtgggtctggacagcatgtgacttcgctgacggagagcggaaagtagagcatctcgccgttcgctttaaactgcaagacgtggctgacagctttaagaagatcttcgatgaagcaaagactgctcaggagaaagactcacttatcacaccccatgtcagtcggagctctacaccacgtgagtcgccatgcggcaagattgccgtggcagtcttagaggaaacaacaagagagcgtactgacgtaattcaaggtgatgacgttgcagatgcggcctccgaggtggaggtatcatccacctctgaaacaacaaccaaagctgtggtttcacctccaaagtttgtttttggctctgagtccgtaaaacggatcttttcttccgaaaagtccaacccatttgcatttggcaatagctctgcaactgggagtctgttcggtttttcctttaatgccccactcaaatccaatgattcggagacgtcaagtgttgcacagagcggatcagagagcaaggtagagccgaaaaagtgcgaactgagcaagaacagcgacatagaacagtctagtgattcaaaagtgaagaatctgtcggcttcattccctatggaagagtcctctatcaattacaccttcaagacccccgaaaaggagccaccactgtggcatgccgaattcacaaaggaggagctagtccagaaactgagttccaccactaagtcagccgatcagcttaatggactgctgagagagactgaggccactagtgccgtattgatggagcagatcaaattgctcaaaagcgagattcggcgcctcgaacggaatcaggaggagtccgctgctaacgtggagcatctgaagaatgtgctgctgcagtttatcttccttaagcccgggtcggagcgcgagcccagcagttgctacaaatacgacgtagctgcacagccatag

SEQ ID NO: 327391 - DNA, 1935 bp, Artificial Sequence
  derived and/or modified sequence
atgctgatgaggcgggaccaggtgctgaaggtgtgtgccaaccactggatcaccaccaccatgaacctgaagcccctgagcggcagtgaccgggcctggatgtggctggccagtgacttcagtgatggagatgccaagctggagcggctggccgcccagttcaagaccccagagctggccgaggagttcaagcagaagtttgaggagtgccagaggctgctgctggacatccccctgcagaccccccacaagctggtggacaccggccgggccgccaagctgatccagagagctgaggagatgaagagcggcctgaaggacttcaagaccttcctgaccaatgaccagaccaaggtgacagaggaggagaacaagggcagcggcactggagctgctggggccagtgacaccaccatcaagcccaaccctgagaacacaggccccaccctggagtgggacaactatgacctgagagaagatgccctggatgacaacgtgagcagcagctctgtgcatgacagccccctggccagcagccctgtgaggaagaacatcttccgctttgatgagagcaccaccggcttcaacttctccttcaagagcgccctgagcctgagcaagagccctgccaagctgaaccagagcggcacctctgtgggcacagatgaggagagtgatgtgacccaggaggaggagagagatggccagtactttgagcctgtggtgcccctgcctgacctggtggaggtgagcagcggggaggagaatgagcaggtggtgttcagccacatggccgagctgtaccgctatgacaaggatgtgggccagtggaaggagcggggcatcggggacatcaagatcctgcagaactatgacaacaagcaggtgcgcatcgtgatgagaagagaccaggtgctgaagctgtgtgccaaccaccgcatcaccccagacatgagcctgcagaacatgaagggcacagagcgggtgtgggtgtggacagcctgtgactttgctgatggagagaggaaggtggagcacctggccgtgcgcttcaagctgcaggatgtggccgacagcttcaagaagatctttgatgaggccaagacagcccaggagaaggacagcctcatcaccccccacgtgagccgcagcagcaccccccgggagagcccctgtgggaagattgctgtggccgtgctggaggagaccacccgggagaggacagatgtgatccagggagatgatgtggctgatgctgccagcgaggtggaggtgagcagcaccagcgagaccaccaccaaggctgtggtgtccccacccaagtttgtgtttggcagcgagagcgtgaagaggatcttcagcagcgagaagagcaacccctttgcctttggaaacagcagcgccaccggcagcctgtttggcttctccttcaatgcccccctgaagagcaatgacagcgagaccagctctgtggcccagagcggcagcgagagcaaggtggagcccaagaagtgtgagctgagcaagaacagcgacatcgagcagagcagtgacagcaaggtgaagaacctgagcgccagcttccccatggaggagagcagcatcaactacaccttcaagaccccagagaaggagccccccctgtggcatgctgagttcaccaaggaggagctggtgcagaagctgagcagcaccaccaagtctgctgaccagctgaatggcctgctgcgggagacagaggccaccagcgctgtgctgatggagcagatcaagctgctgaagtctgagatccggcggctggagaggaaccaggaggagagcgctgccaacgtggagcacctgaagaatgtgctgctgcagttcatcttcctgaagccaggcagcgagcgggagcccagcagctgctacaagtatgatgtggccgcccagccctag

SEQ ID NO: 327392 - DNA, 1935 bp, Artificial Sequence
  derived and/or modified sequence
atgctgatgcggcgggaccaggtgctgaaggtgtgcgccaaccactggattactacaactatgaatcttaaacctttgagcggctctgaccgtgcgtggatgtggctcgccagcgacttctctgacggggacgcgaaactcgagagactggcagcacagttcaagactcccgaactcgccgaggagttcaaacaaaagttcgaagagtgtcagcgtctgctgctcgacatcccccttcagactccacataagctggtagatacagggagagccgccaagcttatccagcgcgcagaggagatgaaatccggcttaaaagacttcaagactttcctaaccaacgatcagaccaaggtgaccgaagaggagaataaaggctccggcacaggcgcggccggcgcaagcgacaccacgataaagcccaacccagaaaacactggcccaactctcgaatgggataactatgatctgcgcgaggatgcccttgacgataacgtgtcttcctctagcgtgcacgacagcccactcgcaagcagtcctgtgcgcaagaatattttccggttcgacgagtctaccaccggcttcaacttcagtttcaagtccgctctttcccttagtaagagtcctgccaagttaaatcagagcggaacatctgtagggactgacgaggaatccgatgtcacccaggaggaagagagggatggccagtactttgagcccgtagtgcccctaccagacctggtcgaggtgagtagtggggaggagaatgaacaggtcgtgttctctcacatggccgaactctaccgctatgataaagatgtagggcagtggaaggagcggggtataggagacatcaagatcctccagaattacgacaacaagcaggtacgtattgtgatgcgacgagaccaggtcctgaagctttgcgccaatcatcgcattacccccgacatgtcattacagaacatgaaaggcaccgaacgggtatgggtgtggaccgcctgcgactttgccgacggcgagagaaaggtagagcatctggcagtgcgttttaaactacaggacgtcgccgactcttttaaaaagatatttgacgaggccaaaaccgcccaggagaaggactctcttattacacctcacgtatccaggtcctctaccccgcgagaatccccttgcggcaaaattgctgtggctgttctggaggagactaccagggagcgcaccgacgtgattcaaggagacgatgtcgcggatgcagctagcgaagtggaagtgagtagcacctcagagaccaccaccaaggccgtggtaagcccacctaaatttgtgttcggttctgaaagtgtgaagcgtatcttcagctcagaaaaatcaaatccctttgcttttggtaactcttcagcgaccgggagcctgtttggtttttcctttaacgctcctcttaaatcaaatgatagtgagactagcagcgtagctcaatctggctcggaatccaaagtagaacccaaaaagtgtgaactatcaaaaaactcggacatagaacagtcctccgacagtaaggtcaagaatttgtcagcttcatttcctatggaagagagttccatcaactacacctttaaaacgcctgagaaggaacctcccctttggcacgccgagttcacgaaggaggaattagtccagaagctaagctccactacaaagagtgctgatcagctgaacggactgctgagggagacagaggctacctccgctgtgctgatggaacagattaagctgcttaaatcggagatcaggaggctggaacggaaccaggaggagagtgcggcgaatgtcgagcaccttaagaatgtcctcctgcagtttatttttttgaaaccaggtagtgaacgggagccgtcttcgtgctataagtacgatgtcgctgctcagccttag

SEQ ID NO: 327393 - DNA, 1935 bp, Artificial Sequence
  derived and/or modified sequence
atgctgatgcggcgagatcaagtcctcaaagtgtgtgcaaatcactggatcactacaactatgaatctgaagccccttagtggttccgatagagcatggatgtggcttgcttcggatttctctgacggcgatgcgaagctggagaggctggccgcacagttcaagactcctgagctggcagaagaattcaagcaaaagttcgaggagtgtcagcggcttcttcttgatattccattacagactcctcacaagctggtagatacaggccgtgccgcaaagctgatacagagggccgaggagatgaagtccggcctcaaagacttcaagactttcctgacaaacgatcaaacgaaggtgaccgaggaagagaataaaggttcaggcacaggggcagctggcgcaagcgacacgactatcaagcccaatccagagaacactggccctacgctagaatgggacaattatgacctccgcgaggacgccctggacgacaacgtttcttcctcctccgtccatgattcacccctggcctcatctccagtgcgcaaaaatatcttcagattcgatgaatcgaccactggcttcaacttcagctttaaatcagctctgtccttgtctaagagtccagccaaattgaaccagagtggcacctccgtgggcactgacgaagagagcgacgtgacgcaagaggaggaaagggacggacagtattttgaaccagtcgtgcctctgcccgatctggtggaagtatcttcaggagaggaaaacgagcaggtcgtgttttctcacatggctgaactgtacagatacgacaaggacgtaggacaatggaaagaaaggggaattggtgacatcaaaatcctacaaaattacgataacaagcaggtccggattgtaatgcgcagggaccaggtgcttaaattgtgcgctaatcaccggattacacccgacatgtccttacagaatatgaaggggaccgagcgtgtctgggtgtggaccgcatgcgattttgcagacggtgagcgcaaagtcgagcacctcgccgtccggttcaagcttcaagatgtcgcagatagctttaagaagatcttcgatgaggccaagacggcccaggaaaaagattcgctcatcacaccacatgtctcaagatcgtccacaccgagagaaagtccgtgcggtaaaatcgcagtagcagtactcgaagagacaactagagaacggacagatgtcatacagggtgacgatgtggcagacgcagcatcggaggtggaggtgtcctctacttcagagacaaccacaaaagccgtcgttagcccaccaaagttcgtctttggttccgagtccgttaagcgcatattcagctcagagaagagcaatcccttcgcatttggcaactcaagcgcaactggcagtctgtttgggttcagcttcaatgctcccctcaaatcgaatgattctgagaccagttccgtggctcagagtggctccgagagcaaggtggaacctaagaagtgtgagctatccaaaaacagtgatatcgagcagagttcagactctaaggttaagaacctgtctgcatccttcccaatggaagaaagcagcattaactacacattcaagactcctgaaaaggagcccccactttggcatgcggagttcacaaaagaagagttagtgcagaagctctcctccaccacaaagagcgctgatcaattgaatggtctgctgcgggaaactgaagctaccagcgccgtcctaatggaacagattaagctgctgaaaagcgagatccggagacttgagaggaatcaggaggagtccgctgcaaatgtggaacatctgaagaacgtgctcctccagtttatatttctcaagcccggaagtgagagagaaccttcctcttgttacaaatacgatgtagctgcacagccctag

SEQ ID NO: 327394 - DNA, 2453 bp, Artificial Sequence
  derived and/or modified sequence
tatttagatttgatgctgagataagtcagtggaaagaaaggggcttggggaacttaaaaattctcaaaaatgaggtcaatggcaaaccaagaatgctgatgcgaagagaccaagtactaaaagtgtgtgctaatcattggataacaactacaatgaacctgaagcccctctctggatcagatagagcatggatgtggttagccagtgatttctctgatggtgatgccaaactagagcggttggcagcacaatttaaaacaccagagctggctgaagaattcaagcagaaatttgaggaatgccagcggcttctgttagacataccacttcaaactccccataaacttgtagatactggcagagctgccaagctaatacagagagctgaagaaatgaagagtggactgaaagatttcaaaacgtttttgacaaatgatcaaacaaaagtcactgaggaagaaaataagggttcaggtacaggtgcagccggtgcctcagacacaacaataaaacccaatcctgaaaacactgggcccacattagaatgggataactatgatttaagggaagatgctttggatgataatgttagtagtagctcagtacatgattctccgttggcaagtagccctgtgagaaaaaatattttccgctttgatgagtcaacaacaggatttaacttcagttttaaatctgctttgagtctatctaagtctcctgccaagttgaatcagagtgggacttcagttggcactgatgaagaatctgatgttactcaagaagaagagagagatggacagtactttgaacctgttgttcctttacctgatctagttgaagtatccagtggtgaggaaaatgaacaagttgtttttagtcacatggcagaactctacagatatgataaagatgttggtcaatggaaagaaaggggcattggtgatataaagattttacagaattatgataataagcaagttcgtatagtgatgagaagggaccaagtattaaaactttgtgccaatcacagaataactccagacatgagtttgcaaaatatgaaagggacagaaagagtatgggtgtggactgcatgtgattttgcagatggagaaagaaaagtagagcatttagctgttcgttttaaactacaggatgttgcagactcatttaagaaaatttttgatgaagcaaaaacagcccaggaaaaagattctttgataacacctcatgtttctcggtcaagcactcccagagagtcaccatgtggcaaaattgctgtagctgtattagaagaaaccacaagagagaggacagatgttattcagggtgatgatgtagcagatgcagcttcagaagttgaagtgtctagcacatctgaaacaacaacaaaagcagtggtttctcctccaaagtttgtatttggttcagagtctgttaaaagaatttttagtagtgaaaaatcaaacccatttgcatttggcaacagttctgccactgggtctttgtttggatttagttttaatgcacctttgaaaagtaacgatagtgaaactagttcagtagcccagagtggatctgaaagcaaagtggaacctaaaaaatgtgaactgtcaaagaactctgatatcgaacagtcttcagatagcaaagtcaaaaatctctctgcttcctttccaatggaagaatcttcaatcaactacacatttaaaacaccagaaaaggagcctccattatggcatgctgaatttaccaaagaagaattggttcagaagctcagttccaccacaaaaagtgcagatcagttaaacggcctgcttcgggaaacagaggcaaccagtgcagtccttatggagcaaattaagcttctcaaaagtgaaataagaagattggaaaggaatcaagaggagtctgcagctaacgtggaacacttgaagaacgtcttgctgcagttcattttcttgaagccaggtagtgagagagagccttcttcctgttataaatacgatgttgcagctcagccctgaagaaaagggaaaacttgctgcggttgctcaaggtcttcaagaaacctccatacccaagaaaaaatagaaagcaaccatgttctactatggtgccaaaaatagttgaacatcgacatcaaaaagattctttctgtctgcttattcacatattctggtttgaattaaaagtgatgaaattatcctaaatacagttggccctctgtatccatgggttccacatccacaaattcaaccaactgtggatggaaaagacttgaaaaagatgagagaaaataacaatatgacaataaaacataatacaaataaaaacaatacagtataacaacgattacatagcatttacattatattagggattgcacaagagaaggtatgtaggttatatgcaaatactgcaccattttacataagggacttgagaagcat

SEQ ID NO: 327395 - DNA, 1935 bp, Artificial Sequence
  derived and/or modified sequence
atgctgatgagaagagaccaggtgctgaaggtgtgcgccaaccactggatcaccaccaccatgaacctgaagcccctgagcggcagcgacagagcctggatgtggctggccagcgacttcagcgacggcgacgccaagctggagagactggccgcccagttcaagacccccgagctggccgaggagttcaagcagaagttcgaggagtgccagagactgctgctggacatccccctgcagaccccccacaagctggtggacaccggcagagccgccaagctgatccagagagccgaggagatgaagagcggcctgaaggacttcaagaccttcctgaccaacgaccagaccaaggtgaccgaggaggagaacaagggcagcggcaccggcgccgccggcgccagcgacaccaccatcaagcccaaccccgagaacaccggccccaccctggagtgggacaactacgacctgagagaggacgccctggacgacaacgtgagcagcagcagcgtgcacgacagccccctggccagcagccccgtgagaaagaacatcttcagattcgacgagagcaccaccggcttcaacttcagcttcaagagcgccctgagcctgagcaagagccccgccaagctgaaccagagcggcaccagcgtgggcaccgacgaggagagcgacgtgacccaggaggaggagagagacggccagtacttcgagcccgtggtgcccctgcccgacctggtggaggtgagcagcggcgaggagaacgagcaggtggtgttcagccacatggccgagctgtacagatacgacaaggacgtgggccagtggaaggagagaggcatcggcgacatcaagatcctgcagaactacgacaacaagcaggtgagaatcgtgatgagaagagaccaggtgctgaagctgtgcgccaaccacagaatcacccccgacatgagcctgcagaacatgaagggcaccgagagagtgtgggtgtggaccgcctgcgacttcgccgacggcgagagaaaggtggagcacctggccgtgagattcaagctgcaggacgtggccgacagcttcaagaagatcttcgacgaggccaagaccgcccaggagaaggacagcctgatcaccccccacgtgagcagaagcagcacccccagagagagcccctgcggcaagatcgccgtggccgtgctggaggagaccaccagagagagaaccgacgtgatccagggcgacgacgtggccgacgccgccagcgaggtggaggtgagcagcaccagcgagaccaccaccaaggccgtggtgagcccccccaagttcgtgttcggcagcgagagcgtgaagagaatcttcagcagcgagaagagcaaccccttcgccttcggcaacagcagcgccaccggcagcctgttcggcttcagcttcaacgcccccctgaagagcaacgacagcgagaccagcagcgtggcccagagcggcagcgagagcaaggtggagcccaagaagtgcgagctgagcaagaacagcgacatcgagcagagcagcgacagcaaggtgaagaacctgagcgccagcttccccatggaggagagcagcatcaactacaccttcaagacccccgagaaggagccccccctgtggcacgccgagttcaccaaggaggagctggtgcagaagctgagcagcaccaccaagagcgccgaccagctgaacggcctgctgagagagaccgaggccaccagcgccgtgctgatggagcagatcaagctgctgaagagcgagatcagaagactggagagaaaccaggaggagagcgccgccaacgtggagcacctgaagaacgtgctgctgcagttcatcttcctgaagcccggcagcgagagagagcccagcagctgctacaagtacgacgtggccgcccagccctag

SEQ ID NO: 327396 - protein, 1071 aa, Artificial Sequence
  derived and/or modified sequence
MPAIMTMLADHAARQLLDFSQKLDINLLDNVVNCLYHGEGAQQRMAQEVLTHLKEHPDAWTRVDTILEFSQNMNTKYYGLQILENVIKTRWKILPRNQCEGIKKYVVGLIIKTSSDPTCVEKEKVYIGKLNMILVQILKQEWPKHWPTFISDIVGASRTSESLCQNNMVILKLLSEEVFDFSSGQITQVKSKHLKDSMCNEFSQIFQLCQFVMENSQNAPLVHATLETLLRFLNWIPLGYIFETKLISTLIYKFLNVPMFRNVSLKCLTEIAGVSVSQYEEQFVTLFTLTMMQLKQMLPLNTNIRLAYSNGKDDEQNFIQNLSLFLCTFLKEHDQLIEKRLNLRETLMEALHYMLLVSEVEETEIFKICLEYWNHLAAELYRESPFSTSASPLLSGSQHFDVPPRRQLYLPMLFKVRLLMVSRMAKPEEVLVVENDQGEVVREFMKDTDSINLYKNMRETLVYLTHLDYVDTERIMTEKLHNQVNGTEWSWKNLNTLCWAIGSISGAMHEEDEKRFLVTVIKDLLGLCEQKRGKDNKAIIASNIMYIVGQYPRFLRAHWKFLKTVVNKLFEFMHETHDGVQDMACDTFIKIAQKCRRHFVQVQVGEVMPFIDEILNNINTIICDLQPQQVHTFYEAVGYMIGAQTDQTVQEHLIEKYMLLPNQVWDSIIQQATKNVDILKDPETVKQLGSILKTNVRACKAVGHPFVIQLGRIYLDMLNVYKCLSENISAAIQANGEMVTKQPLIRSMRTVKRETLKLISGWVSRSNDPQMVAENFVPPLLDAVLIDYQRNVPAAREPEVLSTMAIIVNKLGGHITAEIPQIFDAVFECTLNMINKDFEEYPEHRTNFFLLLQAVNSHCFPAFLAIPPTQFKLVLDSIIWAFKHTMRNVADTGLQILFTLLQNVAQEEAAAQSFYQTYFCDILQHIFSVVTDTSHTAGLTMHASILAYMFNLVEEGKISTSLNPGNPVNNQIFLQEYVANLLKSAFPHLQDAQVKLFVTGLFSLNQDIPAFKEHLRDFLVQIKEFAGEDTSDLFLEEREIALRQADEEKHKRQMSVPGIFNPHEIPEEMCD

SEQ ID NO: 327397 - protein, 95 aa, Artificial Sequence
  derived and/or modified sequence
MPAIMTMLADHAARQLLDFSQKLDINLLDNVVNCLYHGEGAQQRMAQEVLTHLKEHPDAWTRVDTILEFSQNMNTKYYGLQILENVIKTRWKILP

SEQ ID NO: 327398 - protein, 59 aa, Artificial Sequence
  derived and/or modified sequence
MPAIMTMLADHAARQLLDFSQKLDINLLDNVVNCLYHGEGAQQRMAQEVLTHLKEHPDA

SEQ ID NO: 327399 - protein, 179 aa, Artificial Sequence
  derived and/or modified sequence
MPAIMTMLADHAARQLLDFSQKLDINLLDNVVNCLYHGEGAQQRMAQEVLTHLKEHPDAWTRVDTILEFSQNMNTKYYGLQILENVIKTRWKILPRNQCEGIKKYVVGLIIKTSSDPTCVEKEKVYIGKLNMILVQILKQEWPKHWPTFISDIVGASRTSESLCQNNMVILKLLSEEVF

SEQ ID NO: 327400 - protein, 94 aa, Artificial Sequence
  derived and/or modified sequence
MPAIMTMLADHAARQLLDFSQKLDINLLDNVVNCLYHGEGAQQRMAQEVLTHLKEHPDAWTRVDTILEFSQNMNTKYYGLQILENVIKTRWKIL

SEQ ID NO: 327401 - DNA, 4915 bp, Artificial Sequence
  derived and/or modified sequence
caaccggttccgagtttgaggcactaggaggagggggagaagcggctgcagcggccgcggcaggagcagcgggagctacagcatcagcaagagcaacagtagctacagccccggcggcggtgcctgttccagtctttgctgctgcagtccgtgcaaccacccagagggggaggggggaaccaccagtcgctgaggaacaagagaaggggggaaagtttaggcgagccttgggggggggggggccagcgccggagccgcgtgagagagggagccgtgttttggtaggggggagtcggactgcaactggcagcagagcgtctccccggccgtgtggactctacaccccctactcctgccgcttctgctgctgcctgtggctggagggtccccctggggctgaatctttgggacttgaccccgttccctcccccttccctcactccccagccgggcgggagcatttattccccagattaattccccttttgggggggggcgggtgtgtgtgtgtgtgtgtgtgtgtgtgtgtgttgggggaagcgtccctgaaatagtaaatattattgagctctttttgcccttttcctgtccgtttttttaatttccttttttgaggtgggaaaactgaaacccaccttgattcgtcccctctcccccctccccaccttccctcgccctaatcccccaacgaggaaggaaggagcagttggttcaatctctggtaatctatgccagcaattatgacaatgttagcagaccatgcagctcgtcagctgcttgatttcagccaaaaactggatatcaacttattagataatgtggtgaattgcttataccatggagaaggagcccagcaaagaatggctcaagaagtactgacacatttaaaggagcatcctgatgcttggacaagagtcgacacaattttggaattttctcagaatatgaatacgaaatactatggactacaaattttggaaaatgtgataaaaacaaggtggaagattcttccaaggaaccagtgcgaaggaataaaaaaatacgttgttggcctcattatcaagacgtcatctgacccaacttgtgtagagaaagaaaaggtgtatatcggaaaattaaatatgatccttgttcagatactgaaacaagaatggcccaaacattggccaacttttatcagtgatattgttggagcaagtaggaccagcgaaagtctctgtcaaaataatatggtgattcttaaactcttgagtgaagaagtatttgatttctctagtggacagataacccaagtcaaatctaagcatttaaaagacagcatgtgcaatgaattctcacagatatttcaactgtgtcagtttgtaatggaaaattctcaaaatgctccacttgtacatgcaaccttggaaacattgctcagatttctgaactggattcccctgggatatatttttgagaccaaattaatcagcacattgatttataagttcctgaatgttccaatgtttcgaaatgtctctctgaagtgcctcactgagattgctggtgtgagtgtaagccaatatgaagaacaatttgtaacactatttactctgacaatgatgcaactaaagcagatgcttcctttaaataccaatattcgacttgcgtactcaaatggaaaagatgatgaacagaacttcattcaaaatctcagtttgtttctctgcacctttcttaaggaacatgatcaacttatagaaaaaagattaaatctcagggaaactcttatggaggcccttcattatatgttgttggtatctgaagtagaagaaactgaaatctttaaaatttgtcttgaatactggaatcatttggctgctgaactctatagagagagtccattctctacatctgcctctccgttgctttctggaagtcaacattttgatgttcctcccaggagacagctatatttgcccatgttattcaaggtccgtttattaatggttagtcgaatggctaaaccagaggaagtattggttgtagagaatgatcaaggagaagttgtgagagaattcatgaaggatacagattccataaatttgtataagaatatgagggaaacattggtttatcttactcatctggattatgtagatacagaaagaataatgacagagaagcttcacaatcaagtgaatggtacagagtggtcatggaaaaatttgaatacattgtgttgggcaataggctccattagtggagcaatgcatgaagaggacgaaaaacgatttcttgttactgttataaaggatctattaggattatgtgaacagaaaagaggcaaagataataaagctattattgcatcaaatatcatgtacatagtaggtcaatacccacgttttttgagagctcactggaaatttctgaagactgtagttaacaagctgttcgaattcatgcatgagacccatgatggagtccaggatatggcttgtgatactttcattaaaatagcccaaaaatgccgcaggcatttcgttcaggttcaggttggagaagtgatgccatttattgatgaaattttgaacaacattaacactattatttgtgatcttcagcctcaacaggttcatacgttttatgaagctgtggggtacatgattggtgcacaaacagatcaaacagtacaagaacacttgatagaaaagtacatgttactccctaatcaagtgtgggatagtataatccagcaggcaaccaaaaatgtggatatactgaaagatcctgaaacagtcaagcagcttggtagcattttgaaaacaaatgtgagagcctgcaaagctgttggacacccctttgtaattcagcttggaagaatttatttagatatgcttaatgtatacaagtgcctcagtgaaaatatttctgcagctatccaagctaatggtgaaatggttacaaagcaaccattgattagaagtatgcgaactgtaaaaagggaaactttaaagttaatatctggttgggtgagccgatccaatgatccacagatggtcgctgaaaattttgttccccctctgttggatgcagttctcattgattatcagagaaatgtcccagctgctagagaaccagaagtgcttagtactatggccataattgtcaacaagttagggggacatataacagctgaaatacctcaaatatttgatgctgtttttgaatgcacattgaatatgataaataaggactttgaagaatatcctgaacatagaacgaactttttcttactacttcaggctgtcaattctcattgtttcccagcattccttgctattccacctacacagtttaaacttgttttggattccatcatttgggctttcaaacatactatgaggaatgtcgcagatacgggcttacagatactttttacactcttacaaaatgttgcacaagaagaagctgcagctcagagtttttatcaaacttatttttgtgatattctccagcatatcttttctgttgtgacagacacttcacatactgctggtttaacaatgcatgcatcaattcttgcatatatgtttaatttggttgaagaaggaaaaataagtacatcattaaatcctggaaatccagttaacaaccaaatctttcttcaggaatatgtggctaatctccttaagtcggccttccctcacctacaagatgctcaagtaaagctctttgtgacagggcttttcagcttaaatcaagatattcctgctttcaaggaacatttaagagatttcctagttcaaataaaggaatttgcaggtgaagacacttctgatttgtttttggaagagagagaaatagccctacggcaggctgatgaagagaaacataaacgtcaaatgtctgtccctggcatctttaatccacatgagattccagaagaaatgtgtgattaaaatccaaattcatgctgttttttttctctgcaactcgttagcagaggaaaacagcatgtgggtatttgtcgaccaaaatgatgccaatttgtaaattaaaatgtcacctagtggccctttttcttatgtgtttttttgtataagaaattttctgtgaaatatccttccattgtttaagcttttgttttggtcatctttatttagtttgcatgaagttgaaaattaaggcatttttaaaaattttacttcatgcccatttttgtggctgggctggggggaggaggcaaattcgatttgaacatatacttgtaattctaatgcaaaattatacaatttttcctgtaaacaataccaatttttaattagggagcattttccttctagtctatttcagcctagaagaaaagataatgagtaaaacaaattgcgttgtttaaaggattatagtgctgcattgtctgaagttagcacctcttggactgaatcgtttgtctagactacatgtattacaaagtctctttggcaagattgcagcaagatcatgtgcatatcatcccattgtaaagcgacttcaaaaatatgggaacacagttagttatttttacacagttctttttgtttttgtgtgtgtgtgctgtcgcttgtcgacaacagctttttgttttcctcaatgaggagtgttgctcatttgtgagccttcattaactcgaagtgaaatggttaaaaatatttatcctgttagaataggctgcatctttttaacaactcattaaaaaacaaaacaactctggcttttgagatgacttatactaatttacattgtttaccaagctgtagtgctttaagaacactacttaaaaagcaaaataaacttggtttacatttatttttcctttattgactcatttattcctatattaatgatagtgggtatttgtgtttaagcatcaagtaacattttaaatgaagtt

SEQ ID NO: 327402 - DNA, 4105 bp, Artificial Sequence
  derived and/or modified sequence
agcttgggatgggggagggaggggctgccgactccctgttcctccagcaaggaaactcgaaagctctccggttttgcagagtggcatgtgaagtaggaaagatcagtttttcaggggcctgcacatgggattccgtcttgtagttccttttcaggggtttgaatgtgataagttggttaaaccatttactgttggccttgtacagtggaggatgccctgattctccttcattccgatgtctgtgagtttgggttgggtgggaggaagtggtgtagtagaggaagcattcagtactggctcagcccggacctcctctgatcacgccgaggccatgctgcatagagaaaggggcggtgaacttaaggcgcctggtctaaatgcctcctccgagtaagggcgggtaatctatgccagcaattatgacaatgttagcagaccatgcagctcgtcagctgcttgatttcagccaaaaactggatatcaacttattagataatgtggtgaattgcttataccatggagaaggagcccagcaaagaatggctcaagaagtactgacacatttaaaggagcatcctgatgcttggacaagagtcgacacaattttggaattttctcagaatatgaatacgaaatactatggactacaaattttggaaaatgtgataaaaacaaggtggaagattcttccaaggaaccagtgcgaaggaataaaaaaatacgttgttggcctcattatcaagacgtcatctgacccaacttgtgtagagaaagaaaaggtgtatatcggaaaattaaatatgatccttgttcagatactgaaacaagaatggcccaaacattggccaacttttatcagtgatattgttggagcaagtaggaccagcgaaagtctctgtcaaaataatatggtgattcttaaactcttgagtgaagaagtatttgatttctctagtggacagataacccaagtcaaatctaagcatttaaaagacagcatgtgcaatgaattctcacagatatttcaactgtgtcagtttgtaatggaaaattctcaaaatgctccacttgtacatgcaaccttggaaacattgctcagatttctgaactggattcccctgggatatatttttgagaccaaattaatcagcacattgatttataagttcctgaatgttccaatgtttcgaaatgtctctctgaagtgcctcactgagattgctggtgtgagtgtaagccaatatgaagaacaatttgtaacactatttactctgacaatgatgcaactaaagcagatgcttcctttaaataccaatattcgacttgcgtactcaaatggaaaagatgatgaacagaacttcattcaaaatctcagtttgtttctctgcacctttcttaaggaacatgatcaacttatagaaaaaagattaaatctcagggaaactcttatggaggcccttcattatatgttgttggtatctgaagtagaagaaactgaaatctttaaaatttgtcttgaatactggaatcatttggctgctgaactctatagagagagtccattctctacatctgcctctccgttgctttctggaagtcaacattttgatgttcctcccaggagacagctatatttgcccatgttattcaaggtccgtttattaatggttagtcgaatggctaaaccagaggaagtattggttgtagagaatgatcaaggagaagttgtgagagaattcatgaaggatacagattccataaatttgtataagaatatgagggaaacattggtttatcttactcatctggattatgtagatacagaaagaataatgacagagaagcttcacaatcaagtgaatggtacagagtggtcatggaaaaatttgaatacattgtgttgggcaataggctccattagtggagcaatgcatgaagaggacgaaaaacgatttcttgttactgttataaaggatctattaggattatgtgaacagaaaagaggcaaagataataaagctattattgcatcaaatatcatgtacatagtaggtcaatacccacgttttttgagagctcactggaaatttctgaagactgtagttaacaagctgttcgaattcatgcatgagacccatgatggagtccaggatatggcttgtgatactttcattaaaatagcccaaaaatgccgcaggcatttcgttcaggttcaggttggagaagtgatgccatttattgatgaaattttgaacaacattaacactattatttgtgatcttcagcctcaacaggttcatacgttttatgaagctgtggggtacatgattggtgcacaaacagatcaaacagtacaagaacacttgatagaaaagtacatgttactccctaatcaagtgtgggatagtataatccagcaggcaaccaaaaatgtggatatactgaaagatcctgaaacagtcaagcagcttggtagcattttgaaaacaaatgtgagagcctgcaaagctgttggacacccctttgtaattcagcttggaagaatttatttagatatgcttaatgtatacaagtgcctcagtgaaaatatttctgcagctatccaagctaatggtgaaatggttacaaagcaaccattgattagaagtatgcgaactgtaaaaagggaaactttaaagttaatatctggttgggtgagccgatccaatgatccacagatggtcgctgaaaattttgttccccctctgttggatgcagttctcattgattatcagagaaatgtcccagctgctagagaaccagaagtgcttagtactatggccataattgtcaacaagttagggggacatataacagctgaaatacctcaaatatttgatgctgtttttgaatgcacattgaatatgataaataaggactttgaagaatatcctgaacatagaacgaactttttcttactacttcaggctgtcaattctcattgtttcccagcattccttgctattccacctacacagtttaaacttgttttggattccatcatttgggctttcaaacatactatgaggaatgtcgcagatacgggcttacagatactttttacactcttacaaaatgttgcacaagaagaagctgcagctcagagtttttatcaaacttatttttgtgatattctccagcatatcttttctgttgtgacagacacttcacatactgctggtttaacaatgcatgcatcaattcttgcatatatgtttaatttggttgaagaaggaaaaataagtacatcattaaatcctggaaatccagttaacaaccaaatctttcttcaggaatatgtggctaatctccttaagtcggccttccctcacctacaagatgctcaagtaaagctctttgtgacagggcttttcagcttaaatcaagatattcctgctttcaaggaacatttaagagatttcctagttcaaataaaggaatttgcaggtgaagacacttctgatttgtttttggaagagagagaaatagccctacggcaggctgatgaagagaaacataaacgtcaaatgtctgtccctggcatctttaatccacatgagattccagaagaaatgtgtgattaaaatccaaattcatgctgttttttttctctgcaactcgttagcagaggaaaacagcatgtgggtatttgtcgaccaaaatgatgccaatttgtaaattaaaatgtcacctagtggccctttttcttatgtgtttttttgtataagaaattttctgtgaaatatccttccattgtttaagcttttgttttggtcatctttatttagtttgcatgaagttgaaaattaaggcatttttaaaaattttacttcatgcccatttttgtggctgggctggggggaggaggcaaattcgatttgaacatatacttgtaattctaatgcaaaattatacaatttttcctgtaaacaataccaatttttaattagggagcattttccttctagtctatttcagcctagaagaaaagataatgagtaaaacaaattgcgttgtttaaaggattatagtgctgcattgtctgaagttagcacctcttggactg

SEQ ID NO: 327403 - DNA, 3479 bp, Artificial Sequence
  derived and/or modified sequence
ggagaagcggctgcagcggccgcggcaggagcagcgggagctacagcatcagcaagagcaacagtagctacagccccggcggcggtgcctgttccagtctttgctgctgcagaaggagcagttggttcaatctctggtaatctatgccagcaattatgacaatgttagcagaccatgcagctcgtcagctgcttgatttcagccaaaaactggatatcaacttattagataatgtggtgaattgcttataccatggagaaggagcccagcaaagaatggctcaagaagtactgacacatttaaaggagcatcctgatgcttggacaagagtcgacacaattttggaattttctcagaatatgaatacgaaatactatggactacaaattttggaaaatgtgataaaaacaaggtggaagattcttccaaggaaccagtgcgaaggaataaaaaaatacgttgttggcctcattatcaagacgtcatctgacccaacttgtgtagagaaagaaaaggtgtatatcggaaaattaaatatgatccttgttcagatactgaaacaagaatggcccaaacattggccaacttttatcagtgatattgttggagcaagtaggaccagcgaaagtctctgtcaaaataatatggtgattcttaaactcttgagtgaagaagtatttgatttctctagtggacagataacccaagtcaaatctaagcatttaaaagacagcatgtgcaatgaattctcacagatatttcaactgtgtcagtttgtaatggaaaattctcaaaatgctccacttgtacatgcaaccttggaaacattgctcagatttctgaactggattcccctgggatatatttttgagaccaaattaatcagcacattgatttataagttcctgaatgttccaatgtttcgaaatgtctctctgaagtgcctcactgagattgctggtgtgagtgtaagccaatatgaagaacaatttgtaacactatttactctgacaatgatgcaactaaagcagatgcttcctttaaataccaatattcgacttgcgtactcaaatggaaaagatgatgaacagaacttcattcaaaatctcagtttgtttctctgcacctttcttaaggaacatgatcaacttatagaaaaaagattaaatctcagggaaactcttatggaggcccttcattatatgttgttggtatctgaagtagaagaaactgaaatctttaaaatttgtcttgaatactggaatcatttggctgctgaactctatagagagagtccattctctacatctgcctctccgttgctttctggaagtcaacattttgatgttcctcccaggagacagctatatttgcccatgttattcaaggtccgtttattaatggttagtcgaatggctaaaccagaggaagtattggttgtagagaatgatcaaggagaagttgtgagagaattcatgaaggatacagattccataaatttgtataagaatatgagggaaacattggtttatcttactcatctggattatgtagatacagaaagaataatgacagagaagcttcacaatcaagtgaatggtacagagtggtcatggaaaaatttgaatacattgtgttgggcaataggctccattagtggagcaatgcatgaagaggacgaaaaacgatttcttgttactgttataaaggatctattaggattatgtgaacagaaaagaggcaaagataataaagctattattgcatcaaatatcatgtacatagtaggtcaatacccacgttttttgagagctcactggaaatttctgaagactgtagttaacaagctgttcgaattcatgcatgagacccatgatggagtccaggatatggcttgtgatactttcattaaaatagcccaaaaatgccgcaggcatttcgttcaggttcaggttggagaagtgatgccatttattgatgaaattttgaacaacattaacactattatttgtgatcttcagcctcaacaggttcatacgttttatgaagctgtggggtacatgattggtgcacaaacagatcaaacagtacaagaacacttgatagaaaagtacatgttactccctaatcaagtgtgggatagtataatccagcaggcaaccaaaaatgtggatatactgaaagatcctgaaacagtcaagcagcttggtagcattttgaaaacaaatgtgagagcctgcaaagctgttggacacccctttgtaattcagcttggaagaatttatttagatatgcttaatgtatacaagtgcctcagtgaaaatatttctgcagctatccaagctaatggtgaaatggttacaaagcaaccattgattagaagtatgcgaactgtaaaaagggaaactttaaagttaatatctggttgggtgagccgatccaatgatccacagatggtcgctgaaaattttgttccccctctgttggatgcagttctcattgattatcagagaaatgtcccagctgctagagaaccagaagtgcttagtactatggccataattgtcaacaagttagggggacatataacagctgaaatacctcaaatatttgatgctgtttttgaatgcacattgaatatgataaataaggactttgaagaatatcctgaacatagaacgaactttttcttactacttcaggctgtcaattctcattgtttcccagcattccttgctattccacctacacagtttaaacttgttttggattccatcatttgggctttcaaacatactatgaggaatgtcgcagatacgggcttacagatactttttacactcttacaaaatgttgcacaagaagaagctgcagctcagagtttttatcaaacttatttttgtgatattctccagcatatcttttctgttgtgacagacacttcacatactgctggtttaacaatgcatgcatcaattcttgcatatatgtttaatttggttgaagaaggaaaaataagtacatcattaaatcctggaaatccagttaacaaccaaatctttcttcaggaatatgtggctaatctccttaagtcggccttccctcacctacaagatgctcaagtaaagctctttgtgacagggcttttcagcttaaatcaagatattcctgctttcaaggaacatttaagagatttcctagttcaaataaaggaatttgcaggtgaagacacttctgatttgtttttggaagagagagaaatagccctacggcaggctgatgaagagaaacataaacgtcaaatgtctgtccctggcatctttaatccacatgagattccagaagaaatgtgtgattaaaatccaaattcatgctgttttttttctctgcaactcgttagcagaggaaaacagcatgtgggtatttgtcgaccaaaatgatgccaatttgtaaattaaaatgtcacctagtggcccttt

SEQ ID NO: 327404 - DNA, 3216 bp, Artificial Sequence
  derived and/or modified sequence
atgcctgctatcatgaccatgctggcggaccacgctgctcgacagttgcttgatttttcgcagaaactggatataaacctcttggataatgttgtgaactgtctgtatcacggagagggggctcaacagaggatggcccaggaggtgttaactcatctgaaggaacaccccgacgcctggactcgcgtggacactattttagagttctcccagaacatgaatactaaatactatggtttgcagatcctcgagaatgtaatcaagacacgatggaaaatcctacctcgcaatcagtgtgagggcatcaagaaatacgtcgttggtctgatcataaaaacctcttccgacccaacgtgcgtggaaaaagagaaagtgtatatcggcaagctgaatatgattctggtccagattctaaaacaggagtggccgaaacattggcctacctttatcagtgatattgtcggcgcctctaggacatctgaatcactctgtcaaaacaacatggtcatccttaaactgctctccgaagaagtgtttgactttagttcgggacagatcacacaggtcaagagcaagcatttaaaggactcaatgtgcaacgaattcagccaaattttccagttatgccagttcgtgatggaaaattcacagaacgctccgttagttcacgccactctagaaactcttctgagatttctcaattggatccctctggggtatatattcgaaaccaaactgatttccacactgatttacaaatttctcaatgtacccatgtttcgcaatgtgtctctcaagtgcctaaccgaaatcgcaggcgtaagcgtgagtcagtacgaagaacagttcgtcacactgttcaccctgaccatgatgcagctgaagcaaatgctgccgctgaacactaatataagattagcttatagtaatgggaaagatgacgagcagaactttattcagaatctgtccttgtttctgtgtacatttctcaaggaacacgatcagctgatcgaaaaaaggctgaatcttcgcgagacactgatggaagccctgcattacatgctattggtttccgaagtggaggagactgagatttttaagatctgtttggaatactggaatcatcttgccgctgagttgtatcgcgaatccccattctcgacaagcgcatcgcctctactttcagggagccagcatttcgatgtacctcctcgccgtcagctgtacttacccatgttgtttaaagtgaggttactgatggttagccgcatggcaaagcctgaggaggttctggtcgttgagaacgatcagggagaagtggttagagagtttatgaaagacacagatagcataaatctatataagaacatgcgcgaaaccctggtctacctgacacacttggactacgtagataccgagagaattatgacggaaaagcttcataaccaggtgaatggcaccgaatggtcctggaagaacctcaacacgttatgttgggccatcggctcaatctcgggcgctatgcatgaagaagatgagaagaggtttttagtcacagtcattaaggacctgctgggcctgtgtgaacagaagcgaggcaaagacaacaaggctatcattgcctctaatataatgtatatagtcggccagtacccccgctttcttcgggcccactggaagttcctaaagaccgtggtcaacaagttgttcgaatttatgcacgaaacccacgacggagtccaagacatggcatgtgatacattcataaagatcgcccagaaatgccgccggcacttcgtccaggttcaggttggggaggtgatgcctttcatcgatgagatcttaaataatattaatactattatttgcgacctgcagccacagcaggtgcatacgttttacgaagccgtcggctatatgataggcgcccaaactgaccagacagttcaggagcacctcattgaaaagtacatgctgttgccaaaccaggtttgggactctatcatacagcaggcaactaagaatgtggacattctgaaggaccctgaaactgttaagcagctgggaagtatcctcaagacgaatgtacgagcgtgtaaagcggtggggcatcctttcgtgatccaactaggtcgaatttacctagatatgctgaacgtgtacaagtgtctgagtgaaaacatttctgcagccattcaagcaaatggagaaatggtgacgaagcagccgctcatcagatctatgagaacggtcaagcgagaaactctgaagctgatttccggctgggtttcacgctctaatgatccacagatggtcgccgagaactttgtgccgccactcctggacgctgtgttaatcgattaccaacggaacgttcccgccgcccgtgaacctgaagtcctgagcacgatggctatcatcgttaataaactgggaggccacatcactgcggagatcccacagattttcgacgccgtgttcgaatgtacgttaaacatgataaacaaagatttcgaagagtatcccgagcatcggaccaatttcttcctcctcctgcaggcagtgaattcgcattgcttcccagcattcttggcgatcccaccaacacaatttaagctggttctagatagcataatttgggccttcaagcacacaatgcgaaacgtagccgacactggactgcagatcctgtttacactactgcagaacgtggcacaggaggaggccgctgcccagagcttctatcagacttacttctgcgacatcctgcaacacatatttagtgtcgtaacagacacttctcacacagcaggactgaccatgcacgcaagcatccttgcctatatgttcaatctggtagaagagggcaagattagcacatcgctcaacccagggaatcccgtgaataaccagatctttttgcaggaatacgtggcaaacttgcttaagtctgctttcccgcacctgcaagacgcccaagtgaaactctttgtcaccgggctgttctctctgaaccaggacattcctgcttttaaggagcatctgcgtgacttccttgtacagatcaaggagtttgcaggggaggacactagcgatctgtttctagaggagcgggagatagccctgcggcaggcagatgaggagaaacataaacggcagatgtccgtgcccggaatttttaaccctcacgaaattccagaggaaatgtgtgattag

SEQ ID NO: 327405 - DNA, 3216 bp, Artificial Sequence
  derived and/or modified sequence
atgcccgccataatgactatgcttgctgaccatgctgcgcgccagctgctcgatttcagtcagaagttggatattaatctccttgacaatgtggtcaactgcctgtatcatggagagggcgcccagcagcggatggcccaagaggtccttacacacctgaaagagcacccggatgcatggactcgtgtcgacacaatcctcgaattcagtcagaatatgaacacaaagtactatggacttcaaatactggagaatgttatcaaaaccaggtggaaaattcttccccggaatcagtgcgagggaatcaaaaaatatgtcgtcggattgattatcaagacctcttcggaccccacctgcgtggaaaaagagaaagtatacatcggcaaactgaatatgatcctggtccagatcctgaagcaggagtggcctaaacattggcctacttttattagcgacatcgtcggggcgtctagaacaagtgagagtctgtgccaaaacaatatggttatactcaaactcctgtctgaggaagtttttgattttagttctgggcagatcacgcaggtgaagagcaagcatttgaaggacagcatgtgtaacgaatttagtcagatttttcaactgtgccagttcgtaatggagaactcccaaaatgctcccctcgtacacgccacccttgagacgcttctgcggttcctaaattggatcccccttgggtatattttcgaaactaagctgatatctacactaatttacaagttcctcaacgttccgatgttccgaaatgtgtccctgaagtgcttaaccgaaatcgctggggttagtgtaagccagtacgaagagcagtttgtgacgctgttcaccctgacaatgatgcagctaaagcagatgctgccactgaacactaacatcaggttggcatattctaatggcaaagacgacgaacagaatttcattcagaacctatctctgttcctgtgcactttcctgaaagagcatgatcaactgattgaaaaaagactgaacctgcgggagaccctgatggaagcgttacactatatgctactcgtgagtgaagtcgaagagacagagattttcaaaatttgcttggaatactggaatcacctggctgccgagctctatagagaaagtccattcagcaccagcgccagccctctgttgtccgggtctcagcactttgacgtgcctccgcgcagacagctttacctgcctatgctctttaaggtccggctgttaatggtaagccggatggcaaagccagaggaggttctggttgtggaaaacgaccagggcgaggttgtccgcgagttcatgaaagacactgacagtattaacctgtataaaaatatgagagagaccctggtatatctgacccacctcgattacgtcgataccgagaggatcatgacggagaagctgcacaaccaggtcaatggaacagaatggtcttggaagaacctaaatactctatgttgggccattggcagcatcagtggggccatgcacgaagaggacgagaaaagatttctagtgacagtgattaaggacctgctgggattgtgcgaacagaaacggggcaaggataacaaggccatcatcgcatctaacatcatgtatatagtgggccagtatcccagatttctgagggctcattggaagttcttgaaaacagtggtcaataagctgtttgaatttatgcacgaaacacacgatggtgtgcaggacatggcctgtgacacattcattaaaatagcccagaagtgtagaagacacttcgtacaggtccaggtgggcgaagttatgcctttcatcgacgaaattctcaacaatatcaacaccataatttgcgatctgcaaccgcagcaagtccacaccttctacgaagccgttgggtatatgatcggagcccagacagatcagactgtgcaggaacatttaattgagaaatacatgcttctgccaaatcaggtgtgggattcaataatccagcaggcaactaagaatgtagacatcctgaaggatcctgagactgtgaaacaactcggatcaatcctcaaaaccaacgtcagagcgtgcaaagccgtcggtcacccttttgtgatacagcttggcagaatttatctggacatgcttaacgtgtacaagtgtctgagtgagaacattagcgctgccatccaggctaatggagagatggtaaccaaacaaccgctgattaggagcatgcggaccgtcaagagagagaccttaaagttgataagcggttgggtgtcacggagcaatgatccacagatggtggccgagaatttcgtcccgcctctgttagatgcggtgctgatcgactatcagaggaacgttccagctgcccgcgagcccgaggtcctgtccacgatggctatcatagtcaacaaacttggcgggcacatcaccgctgagattccacagatttttgatgcagtcttcgaatgcaccctgaatatgattaacaaggactttgaggagtaccctgagcaccggacaaacttctttctgctgttgcaagctgtgaacagccactgctttccggcattcctggctattccgccgactcagtttaagctggtgcttgattcaattatttgggccttcaagcacaccatgcggaacgtcgctgatacaggactgcaaatcctgttcacactgcttcagaatgtggcacaagaggaggccgccgctcagtctttctatcaaacctacttctgtgatatcctgcagcatattttctccgtggtgaccgatacctctcacaccgcaggactgacaatgcacgcatcaatcctggcctacatgtttaacttagtggaagagggaaagatctctacaagccttaaccccggaaaccctgtaaataatcagatcttcctgcaggagtatgttgcaaacctacttaaaagtgctttcccacacctccaggacgcccaagtgaagttgtttgtgacaggtcttttctccctcaaccaggatattcccgccttcaaagagcaccttcgcgattttctcgttcagattaaagagttcgcgggagaggacacatcagacttgttcctggaggaaagagagatcgcactacggcaggccgatgaagaaaagcacaagagacagatgtctgtacctggcatattcaaccctcatgaaatcccagaagagatgtgtgactag

SEQ ID NO: 327406 - DNA, 3216 bp, Artificial Sequence
  derived and/or modified sequence
atgcctgcgattatgacaatgctcgccgatcacgcagcccgccaactgttggatttctctcagaaactggacatcaacttgttagacaacgtcgtgaactgcctgtaccacggtgagggggcacagcagcggatggcccaggaggttctaacgcacttgaaagagcatccggacgcctggaccagggtcgacaccatcctggaattttcacagaatatgaacaccaagtattacgggctccaaattctggagaatgtgattaaaactcgctggaaaattttacccaggaaccagtgtgaaggaatcaaaaagtatgtcgttggcctcattatcaaaaccagctccgatcccacttgtgtcgagaaagaaaaagtgtatataggcaaacttaacatgatcttggtccaaatcttaaaacaggagtggcctaagcactggccaacctttatcagtgacatcgttggcgcctcccgtactagtgagtccttatgccagaataacatggtgatcctgaaattgctgagcgaagaagtattcgattttagttcaggccagattactcaggttaagtccaagcatctaaaggactcgatgtgcaatgagtttagccaaattttccagctttgtcagttcgttatggagaacagccagaatgcgcccctcgtccatgctactcttgaaactctgctgaggttcctgaactggatcccccttggttacattttcgagacaaagctgataagtacactgatatacaagtttctgaatgttcccatgttcaggaatgtttcactaaagtgtctgacggaaattgccggcgtttcagtgtctcaatacgaggagcagtttgttacattgtttactttgactatgatgcaactgaagcagatgctgccactaaatacaaatatccggctggcttacagcaacggtaaagacgatgaacaaaactttattcagaatctgagcctatttttatgtactttcctcaaggagcacgaccaactgatcgagaagcgcctaaacctgcgggaaactttgatggaagctctgcattatatgctgctcgtgagcgaggtcgaagaaacagagatctttaaaatttgcctggagtactggaatcacctcgcggcggagctgtacagagaaagtccattttcaacaagtgcgagccctcttctctctgggagccagcacttcgatgtgcctccaaggcgccagctgtacctccccatgctgtttaaggtacgactactgatggtctccagaatggccaaaccagaagaggtgctggtcgtggagaacgatcagggcgaggtcgtgagagagttcatgaaggataccgacagcatcaacttgtataagaatatgcgggaaacactcgtatatctgacacatttggactacgtggacactgaacgaatcatgactgaaaagcttcacaaccaggtgaatgggaccgaatggtcttggaagaatcttaatacactctgttgggcaattggatcgatatcgggagctatgcacgaggaggatgagaagcggtttctggtcacagttattaaagatctgttaggtctgtgtgagcagaaaaggggcaaggacaataaggccattatcgcctccaacataatgtatattgtgggacagtacccccgattcctgagagcccattggaagttcctgaagaccgtggtaaacaaattgttcgaattcatgcatgaaacacacgatggggtgcaggacatggcttgtgacacattcattaaaatcgcgcagaagtgcaggaggcacttcgtgcaggtgcaggtaggagaggtgatgccattcattgacgagattctgaataacataaacacaattatttgtgacttgcagcctcagcaggttcacacattttacgaggccgtcggttatatgatcggagcccagacagaccagacagtgcaggagcatctgattgaaaagtacatgctgctcccaaatcaggtatgggattctattattcagcaggctactaagaacgtcgatatcctgaaggaccctgagacggtcaagcagctgggaagtattttaaagaccaatgtccgtgcctgcaaagctgttgggcaccccttcgtgatacagttagggcgcatctatttggatatgctgaatgtttacaagtgcctttccgagaatatatcggccgcaatccaggccaatggggagatggttacaaaacagccgttaatcaggtctatgcggactgttaagagggaaactctgaagctgatatccggctgggtttctagatccaacgacccgcagatggtggccgagaattttgtacctccactgctggacgccgtcctcatagattaccagcggaacgtgcccgccgctcgggagcccgaagtactgtccaccatggccatcatcgtgaataagctaggagggcatatcaccgcagaaatccctcagatcttcgacgctgtgttcgagtgtaccctgaacatgatcaacaaagacttcgaagagtacccagagcacagaacgaattttttcctgctcctccaggccgtcaactcacactgcttcccagcgttcctggcaatcccccccacccaatttaaacttgttcttgattctattatctgggctttcaagcacacaatgaggaatgtggctgacacaggattacagatcctctttacgctgctgcagaacgttgcacaggaagaagctgccgcccagtcattctaccagacttacttctgcgatattctccaacatatatttagcgtggtgactgacacttctcacacagcagggcttaccatgcacgcatctattcttgcctatatgttcaatctcgtggaagaggggaaaatcagcacgagtctgaatccagggaatccagtaaataaccagatctttctgcaggaatacgtagccaatcttcttaaatccgcattcccccacctgcaggatgcccaagtcaagttattcgtgacaggcctttttagtttaaaccaggatatcccagcctttaaggagcacctacgcgatttccttgtacagattaaagagttcgcgggtgaggatacgagtgatctgttcctggaggagcgcgagatagcgcttcggcaggctgacgaagagaaacacaaacggcaaatgagtgtgcctgggatcttcaatcctcacgagataccggaggagatgtgtgattag

SEQ ID NO: 327407 - DNA, 180 bp, Artificial Sequence
  derived and/or modified sequence
atgcctgcaattatgacgatgctagctgatcacgccgcccgacagttgctagacttctctcagaaactggacattaatctcttagacaacgtcgttaattgtctctaccacggtgaaggcgcacagcaacggatggcgcaagaggtgctcacacatctaaaagagcaccctgatgcttag

SEQ ID NO: 327408 - DNA, 3216 bp, Artificial Sequence
  derived and/or modified sequence
atgcctgccatcatgaccatgctggccgaccacgccgcccggcagctgctggacttcagccagaagctggacatcaacctgctggacaacgtggtgaactgcctgtaccatggagagggcgcccagcagaggatggcccaggaggtgctgacccacctgaaggagcacccagatgcctggaccagggtggacaccatcctggagttcagccagaacatgaacaccaagtactacggcctgcagatcctggagaatgtcatcaagacccgctggaagatcctgcccaggaaccagtgtgagggcatcaagaagtatgtggtgggcctcatcatcaagaccagcagtgaccccacctgtgtggagaaggagaaggtgtacatcggcaagctgaacatgatcctggtgcagatcctgaagcaggagtggcccaagcactggcccaccttcatcagtgacatcgtgggcgccagcaggaccagcgagagcctgtgccagaacaacatggtgatcctgaagctgctgtctgaggaggtgtttgacttcagcagcggccagatcacccaggtgaagagcaagcacctgaaggacagcatgtgcaatgagttcagccagatcttccagctgtgccagtttgtgatggagaacagccagaatgcccccctggtgcacgccaccctggagaccctgctgcgcttcctgaactggatccccctgggctacatctttgagaccaagctgatcagcaccctcatctacaagttcctgaatgtgcccatgttcagaaatgtgtccctgaagtgcctgacagaaattgctggggtgtctgtgtcccagtatgaggagcagtttgtgaccctcttcaccctgaccatgatgcagctgaagcagatgctgcccctgaacaccaacatccggctggcctacagcaatggcaaggatgatgagcagaacttcatccagaacctgagcctcttcctgtgcaccttcctgaaggagcatgaccagctgattgagaagaggctgaacctgcgggagaccctgatggaggccctgcactacatgctgctggtgtctgaggtggaggagacagagatcttcaagatctgcctggagtactggaaccacctggccgctgagctgtaccgggagagccccttcagcaccagcgccagccccctgctgagcggcagccagcactttgatgtgcccccccggcggcagctgtacctgcccatgctgttcaaggtgcggctgctgatggtgtccaggatggccaagccagaggaggtgctggtggtggagaatgaccagggcgaggtggtgcgggagttcatgaaggacacagacagcatcaacctgtacaagaacatgagggagaccctggtgtacctgacccacctggactatgtggacacagagcgcatcatgacagagaagctgcacaaccaggtgaatggaacagagtggagctggaagaacctgaacaccctgtgctgggccatcggcagcatcagcggggccatgcatgaagaagatgagaagcgcttcctggtgaccgtcatcaaggacctgctgggcctgtgtgagcagaagaggggcaaggacaacaaggccatcatcgccagcaacatcatgtacatcgtgggccagtacccccgcttcctgcgggcccactggaagttcctgaagacagtggtgaacaagctgtttgagttcatgcatgagacccatgatggagtgcaggacatggcctgtgacaccttcatcaagatcgcccagaagtgccgccgccactttgtgcaggtgcaggtgggggaggtgatgcccttcattgatgagatcctgaacaacatcaacaccatcatctgtgacctgcagccccagcaggtgcacaccttctatgaggccgtgggctacatgattggagcccagacagaccagacagtgcaggagcacctgattgagaagtacatgctgctgcccaaccaggtgtgggacagcatcatccagcaggccaccaagaatgtggacatcctgaaggaccctgagaccgtgaagcagctgggcagcatcctgaagaccaacgtgcgggcctgcaaggctgtgggccaccccttcgtcatccagctgggccgcatctacctggacatgctgaatgtgtacaagtgcctgtctgagaacatctctgctgccatccaggccaatggagagatggtgaccaagcagcccctcatccgctccatgaggacagtgaagcgggagaccctgaagctgatcagcggctgggtgagccgcagcaatgacccccagatggtggccgagaactttgtgccccccctgctggatgctgtgctgattgactaccagagaaatgtgcctgctgcccgggagcctgaggtgctgagcaccatggccatcatcgtgaacaagctgggcggccacatcacagctgagatcccccagatctttgatgctgtgtttgagtgcaccctgaacatgatcaacaaggactttgaggagtacccagagcacaggaccaacttcttcctgctgctgcaggccgtgaacagccactgcttccctgccttcctggccatcccccccacccagttcaagctggtgctggacagcatcatctgggccttcaagcacaccatgagaaatgtggccgacaccggcctgcagatcctcttcaccctgctgcagaatgtggcccaggaggaggccgccgcccagagcttctaccagacctacttctgtgacatcctgcagcacatcttctctgtggtgacagacaccagccacacagctggcctgaccatgcacgccagcatcctggcctacatgttcaacctggtggaggagggcaagatcagcaccagcctgaaccctggcaaccctgtgaacaaccagatcttcctgcaggagtatgtggccaacctgctgaagagcgccttcccccacctgcaggatgcccaggtgaagctgtttgtgacaggcctcttcagcctgaaccaggacatcccagccttcaaggagcacctgcgggacttcctggtgcagatcaaggagtttgctggggaggacaccagtgacctcttcctggaggagcgggagatcgccctgcggcaggctgatgaggagaagcacaagaggcagatgtctgtgcccggcatcttcaacccccatgagatccctgaggagatgtgtgactag

SEQ ID NO: 327409 - DNA, 180 bp, Artificial Sequence
  derived and/or modified sequence
atgcctgccatcatgaccatgctggccgaccacgccgcccggcagctgctggacttcagccagaagctggacatcaacctgctggacaacgtggtgaactgcctgtaccatggagagggcgcccagcagaggatggcccaggaggtgctgacccacctgaaggagcacccagatgcctag

SEQ ID NO: 327410 - DNA, 3216 bp, Artificial Sequence
  derived and/or modified sequence
atgcccgccatcatgaccatgctggccgaccacgccgcccggcagttactcgacttttcgcaaaaactggacatcaacctgctggacaatgtggtgaattgcttgtatcatggagagggagcccagcagaggatggcccaggaggtactaactcaccttaaggaacatcccgacgcgtggacacgggtggacactattcttgagttttcccaaaacatgaacactaaatactacggtctgcagatacttgagaatgtgatcaagactcgatggaaaattctgcccagaaaccagtgcgaaggtattaagaaatacgttgtgggactgattattaagacgagctccgaccctacctgcgtggagaaggaaaaagtctacattgggaagctgaacatgatcctcgttcaaattctcaagcaggaatggccaaagcactggccaacattcatcagtgacattgttggcgcttcacggacgtctgaatccctgtgtcaaaataatatggtgatcctcaagttgttatcggaggaggtgttcgattttagctccggtcagatcacgcaggtgaaaagtaagcacctcaaggactctatgtgtaacgagttctcccagatttttcagctctgtcagttcgtcatggagaacagccaaaacgcacctctagtgcatgcaactttagagacactcctaagatttcttaactggatcccattgggatatattttcgagacaaagcttatcagtacactgatctacaagttcttgaacgtccccatgttccgaaacgtgagcttgaaatgcctgaccgagatagctggagtgtcagtgtcacagtatgaagaacagttcgtgacattattcaccctgactatgatgcagcttaagcaaatgctcccacttaatacaaatatcaggctggcttacagcaacggcaaagatgatgagcaaaattttattcagaacctgagcttgtttttgtgcaccttcttaaaggagcacgatcagctaatcgagaagcggctgaacttgcgcgagacattgatggaggctcttcactacatgctcctggtcagcgaggtcgaggagactgagatctttaagatctgtctggagtattggaaccacctggccgctgagctgtatagagagtcaccatttagtaccagcgcctctcccttactatcaggcagtcagcactttgatgtgcctccccggagacagctgtaccttccgatgttgtttaaagtgcggcttctgatggtgtccaggatggcgaagcccgaggaagtacttgtggttgaaaatgaccagggagaagttgtgcgcgagtttatgaaagatacggacagtataaacctgtataaaaacatgcgggagaccttggtctatttgactcacctggactacgtagacacagaaagaataatgacagaaaaactccataaccaagtcaatggcacagaatggtcctggaaaaatctgaatacgctttgttgggccatcggcagcatttctggcgcaatgcacgaggaagatgaaaaacgcttccttgtcactgtaattaaagacctgctgggcttatgcgagcagaagagaggaaaggataacaaagcaatcatcgcgagcaatataatgtatatagtcggccaataccctcgcttccttcgcgctcattggaagttcttgaagactgtcgtgaacaaactctttgaattcatgcatgaaacacacgacggagtgcaggatatggcctgcgacaccttcatcaagatcgctcagaaatgtcggcgacatttcgtgcaggtgcaggtgggcgaggtcatgcccttcattgacgagattctgaataacatcaatactattatttgcgacctgcaaccccagcaggtccataccttctacgaagcagtgggatacatgattggcgcccagacagatcagacggtgcaggagcatctcatcgagaagtatatgctgctgcccaaccaggtgtgggactcaatcatccagcaagctacaaaaaacgtagacatcctgaaggatccggagactgtcaaacaacttggctcaatcctgaaaactaacgttcgggcatgcaaggcagtcggacaccctttcgtaatacaactcggcagaatctacctggacatgctgaacgtgtacaaatgcttgtccgagaacatttccgcggctattcaggccaatggcgagatggttaccaagcagcctctaatcaggtctatgcgcacagtcaaacgggagacactgaagcttatcagcgggtgggtttctcgctcaaacgatccgcagatggtggccgagaacttcgtcccccccctcttggatgcagtcctcatcgactaccagcgaaatgtgccagccgcacgtgagcctgaggtcctcagcacaatggctatcattgtgaataagctcggcgggcacatcacggctgaaattccccaaatatttgacgctgtgttcgagtgcactctcaacatgatcaacaaggatttcgaggagtatcctgaacataggacaaacttcttcctcctgttgcaggctgttaactctcattgttttccagcctttcttgctattccaccaacccaatttaagctggtcctggattctatcatctgggccttcaagcacactatgaggaatgtcgcagataccgggttgcagatcctttttaccctgctgcaaaacgttgctcaggaggaagccgccgctcagagcttttaccaaacgtacttttgtgacattttgcagcacatcttctctgtggtgacagacacatctcacacggcaggcctgacgatgcacgcctccatcttagcctatatgttcaaccttgtggaggaaggaaagattagcacatctctgaacccagggaatcctgttaataatcagattttcctgcaggagtatgtcgcaaacctactcaagtctgcttttccacatcttcaggacgcccaagtgaaactctttgttaccgggttgttttccctgaatcaggatattcctgcatttaaagaacatttgcgcgatttcctggtacagatcaaggaatttgccggcgaggatacctccgatctattcctggaggaaagagaaattgccctgcggcaggcggacgaggaaaaacacaaaaggcagatgtccgtcccgggtatcttcaatccacacgagatcccggaggagatgtgcgactag

SEQ ID NO: 327411 - DNA, 3216 bp, Artificial Sequence
  derived and/or modified sequence
atgcccgccatcatgaccatgctggccgaccacgccgcccggcagctgctggatttcagccagaaactggacatcaatctgttagataacgtcgtcaattgcctgtatcacggagaaggtgcgcagcagaggatggctcaggaagtcttgacccatctcaaagaacaccctgatgcttggacacgggtcgacaccatcctggagttttcccagaatatgaataccaagtattatggattgcagatcttggaaaatgtcatcaagaccagatggaagattctgccccgcaatcagtgcgaaggtatcaagaagtacgttgtgggactgattattaagacgtcctcggaccctacctgcgtggaaaaagagaaggtctatattggaaagttgaacatgattctcgtccagatcctgaagcaggaatggccgaagcattggcccacttttatctccgacattgttggagctagtcggacgagcgaatcgctctgtcagaacaatatggttattttaaagctcttgtctgaagaagtttttgatttttccagcggccaaataacacaggtgaagagcaagcacctgaaggattctatgtgcaacgaattcagccagatcttccagctgtgtcaattcgtgatggaaaactcccagaacgcaccactagttcacgccacacttgagaccctgctccggtttctgaactggattccattggggtacatatttgaaaccaagcttatctctactcttatctacaagttcctgaatgtgccaatgtttagaaacgttagtctaaaatgtctgacagaaattgctggtgtgagcgtgtctcaatacgaagaacagttcgtgacactttttactctgacgatgatgcagcttaagcagatgttgcccctaaacacaaatattaggctggcttattccaacgggaaggacgatgaacagaattttatccaaaacctctctctgttcctctgcacttttctcaaagaacatgatcaactgatcgagaagagattaaatctgcgagaaaccctgatggaggcgttgcactacatgctgctggttagcgaggtcgaagagactgagattttcaagatctgtttggagtactggaaccacctggccgccgaactctatagagagtcccccttctccacgtctgctagccctctgttgagcgggagtcagcacttcgacgtcccgccccggaggcagttgtatctaccaatgcttttcaaggtgaggctactcatggtgagccggatggccaaaccagaggaagtgttggtagttgagaatgatcagggggaggtcgtgagggaatttatgaaggataccgattcaatcaacctgtacaagaacatgcgagagactctggtctatttaacacatttagattacgttgatacggaacgaatcatgacagaaaagcttcacaaccaggttaacggaaccgagtggtcatggaagaatctcaacactctttgctgggccatcggaagcatttctggggccatgcatgaagaggacgaaaaacggtttctggtcaccgttataaaggacctgctgggtctgtgcgagcagaaaagggggaaagataataaagctatcattgctagcaacatcatgtatatagtgggacagtaccccagatttcttcgcgcacactggaagttcctcaagacagtggtgaacaagctgtttgaattcatgcacgagacacatgatggagttcaggacatggcgtgcgacacctttataaagatagcgcagaagtgtaggaggcattttgtgcaagtgcaggtgggggaggtgatgccgttcattgacgagatcctcaataatataaatacgatcatctgtgacttgcagcctcagcaggtgcacaccttttatgaggcagtcggttacatgatcggcgctcaaactgaccagaccgttcaggagcacttaatagagaagtacatgctgctccctaaccaggtatgggattctataattcagcaggctactaaaaacgtggacatcctgaaagaccccgagaccgtcaaacagctgggaagtatcttgaagactaacgttcgcgcttgcaaagcagttggccatccctttgttatccagctgggcagaatttacttggatatgctgaacgtgtataagtgcctgagcgagaatatatccgccgccatccaggccaatggcgaaatggtgaccaaacagccactgatcagaagtatgcggacggtgaaaagagagaccctgaaactgatctccggttgggtgtctaggtcaaacgacccccagatggtggcagaaaatttcgtgccgcctctgttggacgccgttctgatcgattaccagcgaaatgtaccggccgcccgagagcctgaagtgctgagcacaatggccattatagttaataagctggggggacacatcaccgccgagatccctcagatctttgatgcagtcttcgagtgtacactgaacatgatcaataaagactttgaagaatacccagaacataggaccaatttttttctgctacttcaggccgttaactctcattgttttcctgcatttctggcaattccacccacgcagttcaagctggtcctagactccataatctgggcattcaagcatacgatgaggaacgttgctgatactgggttacagatcctatttacactgctacaaaacgtggcacaagaagaagccgcggcccagtctttttaccagacgtatttctgcgacatcctccagcatatcttctctgttgtgacagatacaagtcatacagccggccttaccatgcacgctagtatcctcgcgtacatgtttaatctggtggaagaagggaaaattagcacaagccttaatccagggaatcccgtcaacaatcagatttttctacaagagtatgtcgccaacttgttgaaatctgctttcccacatctccaggacgcccaggttaagttgttcgtaaccggtctgttttctctgaatcaggacatccccgcatttaaagagcatctgagagacttcctcgtccaaattaaagaattcgctggagaagatacctctgatctgtttctggaagagcgtgagatcgcactgcgccaggccgatgaggagaaacataagcgtcaaatgagcgtgccaggcatctttaaccctcacgagatccctgaagaaatgtgtgactag

SEQ ID NO: 327412 - DNA, 3216 bp, Artificial Sequence
  derived and/or modified sequence
atgcccgccatcatgaccatgctggccgaccacgccgcccggcagctactcgactttagccagaaactggatatcaacctgctggacaacgtggttaattgtctctaccacggtgagggtgcacagcagcgcatggcccaagaggttctcacccaccttaaggagcacccggacgcctggaccagagtggacaccatactcgagttctcacaaaatatgaacactaagtactacggattgcaaattttggaaaacgtgattaagactcgctggaaaatactccccagaaaccaatgcgaggggattaaaaaatacgtggttggattaataataaaaactagctcagatccaacctgcgtggagaaggagaaagtgtatatcggcaaactgaatatgatccttgttcaaattctgaagcaagagtggcccaaacactggccaacctttatttctgatatagtgggcgcatctaggacctccgagtcactgtgccagaacaacatggtgatacttaaactgctgtcagaggaagtgttcgacttctcttccggacaaattactcaggtgaagtcgaagcacttaaaggattcaatgtgcaacgaattttctcagatctttcagctgtgtcaattcgtaatggagaattcccagaatgctccactagttcacgcaaccttggagactctgctaaggttcttgaactggattcctctgggctatatttttgaaaccaagctcatttctacactaatttacaagttccttaatgtccctatgttccgaaatgtcagtcttaaatgcctcactgagatcgccggcgtgagtgtatcccaatatgaagagcagttcgtcacactctttactcttaccatgatgcagttaaagcagatgcttccattgaacactaatatccgactggcatactccaatgggaaagatgacgaacaaaacttcatacaaaatctgtcccttttcctctgtacattcctgaaggagcatgatcagcttattgaaaagcgcctcaatctccgtgaaacactaatggaggctctgcactatatgctgctggtcagcgaggtcgaggagactgagatcttcaagatttgtctcgagtattggaatcacttagcagctgagctgtatagagaatctcctttctccacgtcagcttcccctctcctgagcgggagccagcactttgatgtcccaccacgcagacagctgtatttaccaatgctgtttaaggtgaggttgctgatggtgtctcgaatggctaagccggaggaagtactggttgtggagaacgaccagggcgaggttgtgcgggagtttatgaaggataccgacagcattaacttatataaaaatatgcgggaaaccctcgtgtacttgacacacttggactacgtggataccgagagaatcatgactgagaaactgcataaccaggtgaatgggactgagtggagttggaaaaatctcaatacattgtgctgggcgatcggatctatctctggcgcaatgcacgaggaggatgaaaaacgttttctggtgacggttattaaggacctgcttggactgtgcgagcagaaacgcggcaaagataataaagccattattgcgagcaatattatgtatattgtggggcagtatcctcgatttcttagggctcactggaaatttttaaaaaccgttgttaataagctgtttgagtttatgcacgagactcacgatggcgttcaggacatggcgtgcgacacgtttatcaagatagcacagaaatgcaggcggcattttgtgcaggtacaagtgggagaggtgatgccatttattgatgagatactaaacaatataaatacaatcatctgcgatctccagccgcagcaggttcacaccttttacgaggcagtgggctatatgattggcgcccagaccgaccaaacggtgcaggagcacttgatcgagaagtatatgctgttgcctaatcaggtgtgggattctattatacagcaggccactaaaaacgttgatatcctgaaggaccccgagacagttaagcagctgggcagtatactgaaaacaaatgtgcgagcctgtaaggccgtaggccacccattcgtaatccagctgggcagaatctacctggatatgttgaacgtgtacaagtgcctgtccgagaatatcagcgctgccattcaggcaaacggggaaatggtgactaaacagccgttgattaggagcatgcgcaccgttaagcgggaaaccctaaaactgatctccgggtgggtgtcccgctccaatgacccccagatggtggcagaaaacttcgtccccccccttctagacgctgtgctgattgattatcagagaaacgtccccgccgcccgggagcctgaagtgctctccaccatggcaataatagttaacaagctaggaggacatatcaccgcagagatcccacaaatcttcgatgcagtgttcgaatgcaccttgaatatgataaacaaagattttgaagaatatcctgaacatcggacaaactttttcctcctgctccaagcagtgaactctcactgcttcccagccttccttgcaatccctcctacccagtttaagttagtgctagactctatcatatgggcttttaaacatacaatgcgcaacgtagccgatacaggactgcagatcctgttcacactactgcagaacgttgcccaagaagaggctgcagcccagtccttttatcagacatatttctgtgatattctgcaacacattttttccgtggtgactgacacctcacacaccgcgggcttaactatgcatgccagcattctcgcctacatgtttaaccttgtagaggagggcaaaatttcgacatccctcaatcctggtaatcccgttaataaccaaattttcctccaggagtacgtcgctaatctgctgaagtcggcctttccacaccttcaggacgcccaggtgaaacttttcgtgaccgggctgttctcactgaatcaggacatccccgccttcaaagagcacttgagggattttttagtgcagattaaagaatttgcaggcgaggacacttctgatttgttcttagaagagcgcgagatcgcactgcgccaggctgacgaggagaagcacaagcgacagatgagcgttcccggtatctttaacccacacgagatcccggaagaaatgtgcgactag

SEQ ID NO: 327413 - DNA, 180 bp, Artificial Sequence
  derived and/or modified sequence
atgcccgccatcatgaccatgctggccgaccacgccgcccggcagctgctggatttcagtcaaaaactggatatcaatcttcttgacaacgtggtcaattgtctttaccacggagagggagctcagcagcgcatggcccaggaggtcctcacgcatctgaaggagcaccctgacgcctag

SEQ ID NO: 327414 - DNA, 3216 bp, Artificial Sequence
  derived and/or modified sequence
atgcctgccataatgaccatgctggccgaccacgccgcacgtcaactccttgatttctctcaaaagttagacattaatctgcttgacaatgttgttaactgtctctatcacggcgagggcgctcagcagcggatggcccaagaggtgctgacacaccttaaagaacaccccgatgcctggacaagggttgataccatcctggaattctcccagaatatgaatacaaaatactacggtctgcagatcctggagaacgtgataaagacccgatggaagatattacctcgcaatcagtgcgaagggattaaaaaatacgttgtgggcctgatcatcaaaacatccagtgaccccacatgcgtggaaaaagagaaagtgtacattgggaaactcaacatgatcctggtgcagattctgaaacaagaatggcccaagcactggcccacttttatatcagacatcgtcggggcttctagaaccagtgaatccctatgtcagaacaatatggttattttaaaactgcttagcgaggaggtgtttgactttagctctgggcaaattactcaggttaagtctaagcaccttaaagactctatgtgcaacgaattcagtcagatatttcagttatgccaatttgtaatggagaactctcagaatgcgccacttgtgcacgctacccttgaaacactcctcagatttctgaactggattccactcggttacatctttgaaactaaattgatcagcaccctgatctacaagttccttaatgtgcccatgttccgaaatgtaagtctcaagtgcttgacagagattgccggagtctcagtgagccagtatgaggaacagttcgtcactctgtttacccttactatgatgcagctgaaacaaatgctaccccttaacactaatatccggcttgcttacagcaacggtaaggacgatgaacaaaactttattcaaaatttgtcactgtttctgtgtacgttcctgaaggagcacgatcaactcatcgagaagaggctgaacctgcgcgagaccctcatggaggcccttcactatatgctcctcgtgagcgaggtggaagaaactgaaatatttaagatctgcctcgaatactggaaccatctggccgctgaactctatcgcgaatcaccattcagtacttctgcttcccctctgctctctggatcacagcatttcgatgttccccctaggagacagctgtaccttccgatgttgttcaaggttcgcctcctgatggtgtcccggatggccaaaccagaggaagtattggtcgtggagaacgatcaaggagaggtcgtacgcgagttcatgaaagatacagattctatcaatctctataaaaacatgcgcgagaccctggtttatcttacccatcttgactacgtcgataccgaacggataatgacagaaaaactgcataatcaagtgaacggaacggagtggtcctggaagaacctgaatactctatgttgggcaatagggagtatcagcggagccatgcacgaggaggatgagaaacgatttctcgtaacagtcatcaaggatcttttgggtctctgtgaacagaaaagggggaaggataacaaagctattatcgccagcaacattatgtacatagtgggtcagtatccacggttcctccgcgcacattggaaattcctgaagactgtggtaaacaaactgttcgagttcatgcacgagacacacgacggcgtgcaggacatggcctgtgacacttttatcaaaattgcccagaaatgtcggaggcatttcgtccaagtccaggtgggcgaagttatgcccttcatcgacgaaatcctcaataatattaatacaattatttgtgatctgcagccgcagcaggtgcataccttctacgaggctgtcgggtacatgatcggagcccagacggaccaaacggtgcaagaacacctgatagaaaagtacatgctcctcccaaatcaagtatgggactccatcatacaacaagccacaaaaaacgttgatatcctgaaggatcccgagacggtgaaacagttggggtccattctcaaaacaaacgtccgggcttgtaaggcagtgggacatccattcgtaatccagcttggcaggatttatctggatatgctgaatgtatacaagtgcctttctgagaatatttctgccgctatccaggctaacggcgaaatggtgaccaaacagccgctcattcgttctatgagaacagtaaaaagagaaacactgaagttaataagcggctgggtaagtagatcaaatgaccctcaaatggttgcggagaactttgtgccacctcttctcgacgccgtcttgatcgattatcagcgtaacgtgccagcagcgagagagcccgaggtcctgagcaccatggcaattattgtaaataaactgggaggacacattactgcagagatcccacagatttttgacgctgtattcgagtgtactctaaatatgattaacaaggatttcgaagaatatccagagcataggactaactttttccttctcctgcaggccgtgaactcccactgttttccagccttccttgcgataccacccacccagtttaaactggtgcttgactcaattatctgggctttcaaacatacaatgaggaacgttgccgacacaggcttgcaaatcctcttcaccctgctccagaatgtcgcccaggaggaggcagcagcccaaagtttctaccaaacctatttctgtgatattctacagcatatattctcagtcgtgactgacacgtctcacaccgctggcctgaccatgcatgcttccatcctggcatatatgtttaatctcgttgaggaggggaagatcagtacgagtctaaatccgggaaatccggttaataatcaaattttcctgcaagagtacgtggcgaatttgctgaaaagcgcttttcctcatctgcaggacgctcaggtgaagcttttcgtaactggactattttcactgaaccaggatattccggcatttaaagagcacctccgggacttcctagtgcagatcaaggaatttgccggagaggacaccagcgacttgttcttggaagaaagagagattgcgctgcgacaggccgacgaggagaagcataagcggcagatgtccgtgcccggaatttttaacccacacgaaatccctgaagaaatgtgcgactag

SEQ ID NO: 327415 - DNA, 3216 bp, Artificial Sequence
  derived and/or modified sequence
atgcccgctattatgactatgctggcagaccacgcagctcggcaactgctagatttctcccaaaagttagatataaacttactcgataacgtggtcaattgcctgtaccacggcgagggggcacagcagaggatggcccaagaggtcctgacgcatctgaaagaacatcctgacgcgtggacacgagtcgataccattttggagttcagccaaaatatgaatacaaaatactatggcctgcagattcttgaaaatgtcatcaagacgcgctggaaaattctgcccagaaatcagtgtgaggggattaagaaatatgtagtgggccttattattaagacctccagcgacccaacctgtgtagagaaggagaaggtttacatcgggaaattaaacatgattctagtgcagatcctgaagcaggagtggccaaagcattggccgacctttatatctgatatagtgggggcttcgcgcacctccgagagcttgtgtcagaacaacatggtcatattaaaattactctcggaggaggtttttgacttttcaagtgggcaaattacacaggtgaaatccaagcatctgaaagactccatgtgcaacgagttctcgcagatattccagctgtgtcagtttgttatggagaacagtcagaacgcaccattagtacacgctacgctcgaaacccttcttcgatttttgaattggatccctctcggctatattttcgagaccaaactcatttcaaccttgatctacaagtttctgaacgtccctatgtttcgaaacgtaagcttgaaatgtctgaccgaaattgccggagtctctgtgtcacagtacgaagaacaattcgtcactcttttcaccctcacaatgatgcagttaaagcagatgctgccactgaatacaaacatcagactagcttacagcaatggtaaggatgacgaacaaaatttcatacaaaatctctcgctgtttctatgtacgtttctgaaggagcatgaccagctgatcgagaaaagactcaacctcagagagaccctgatggaggcactgcactacatgcttcttgtctccgaggttgaggaaactgagatttttaaaatctgcctcgagtactggaatcaccttgctgctgaactgtaccgcgagagtccattcagcacttcggctagtcccttactctcgggttctcagcactttgacgtcccacccaggaggcagctgtacttgcccatgctgtttaaagttagactcctgatggtgtccagaatggccaaacctgaagaggtgctcgtagtggaaaatgatcagggtgaggtcgtaagagaatttatgaaggacacagattccattaacctatacaagaatatgcgcgaaactctggtgtatctgacccacctggactatgttgatacagaacgaattatgacagaaaaactgcataaccaggttaacggcacggagtggtcttggaaaaacctcaacaccctgtgttgggccatcgggtccatttcaggagccatgcatgaagaagatgagaaacgcttcctggttaccgttatcaaggacctgttgggactgtgtgagcagaagaggggaaaagacaataaggctataattgcatccaacattatgtatatcgtcggtcagtatcccagatttttgcgtgcacattggaaatttctgaaaacagtggttaataaacttttcgagttcatgcatgaaacccacgacggggtgcaggatatggcatgtgacacttttatcaagatcgctcagaagtgtcggcgtcatttcgtgcaagtgcaagtgggcgaggttatgcctttcatcgatgagatcctgaacaatattaacaccattatctgcgacctccagcctcagcaagtgcacactttctacgaagccgtgggatatatgataggcgcacagaccgatcaaaccgtgcaggagcacctgattgagaaatacatgctgctgcctaaccaggtatgggattctattatccagcaggctacaaagaatgtggacatactgaaagaccctgaaaccgtcaaacaattgggcagtatcttaaaaactaacgtcagggcttgcaaggcagtgggtcatccatttgtcatccagttagggaggatctatttggacatgctcaatgtctacaagtgcctgagtgaaaacatcagcgctgccattcaggctaacggtgagatggttacaaaacagcctttaattaggtcaatgagaactgttaaacgcgaaacactgaagctcatttctggctgggtgagcaggtccaatgatcctcagatggtcgcagaaaactttgtgcccccactccttgatgcggttctcatcgactaccagaggaatgtaccggctgcgagagagcctgaggtgctctccaccatggctattatcgttaacaaacttgggggtcacatcacagcagagatcccacagatatttgatgctgtttttgaatgcacgttaaatatgatcaataaagatttcgaagaataccctgagcatcgcacgaacttcttcctgctactccaggcagtaaacagccactgtttccccgcattcctagccataccaccaacccagttcaagttggtcctggacagcatcatatgggcgtttaagcacacaatgaggaacgttgccgacacggggctccagatccttttcacattgctgcagaatgtggctcaggaggaggcagccgctcagagtttttatcagacgtacttctgcgacatcctacagcacatcttcagcgttgtgactgacacaagccacactgctggcctgacgatgcatgccagcatcctggcctacatgtttaacctagtcgaagaaggaaaaatctcaacatctctcaacccaggtaatcccgtgaataaccagatcttcctccaagaatacgtggccaatctcttgaaatcagcttttcctcatctgcaggacgcccaggtgaagctgtttgtcacgggactcttcagtctgaaccaggacatacccgcattcaaggaacacctgagagatttcctagtgcaaatcaaagagtttgccggagaggacacttccgatcttttcctcgaggagcgagagattgcactgagacaagccgacgaggagaagcacaaacgccagatgagcgtgcccggtatatttaatcctcacgagatcccagaggaaatgtgtgattag

SEQ ID NO: 327416 - DNA, 3216 bp, Artificial Sequence
  derived and/or modified sequence
atgccagccattatgaccatgctggccgatcatgcagctcgtcagctgttggatttctctcagaagctcgatatcaatctgctggacaatgtagtaaactgcctgtaccatggcgaaggagcccagcagcgtatggcacaggaggtcctgacgcacctcaaggaacatcccgacgcttggaccagggtagacactatcctcgaattctcacagaatatgaataccaagtactacggcctgcagatactggagaatgtgatcaagactcgttggaagatacttccacggaaccaatgcgagggaatcaaaaagtacgttgtgggcctgatcataaagacttcctcagaccctacttgcgtcgaaaaggagaaggtgtacatcgggaagctgaacatgattttggtgcagatattgaaacaggaatggccgaagcactggccaacttttatctcagatatcgtgggtgctagccggacttccgaaagcctctgccagaataacatggtgatcctcaagttgctcagcgaggaagtattcgatttttcaagtgggcagataacgcaggtcaagtccaaacatctaaaagattcaatgtgcaacgagttctcgcagatctttcaactgtgtcaatttgtaatggagaacagtcagaacgcgcctctggtgcatgcaaccttggaaacactgctcaggtttctgaattggatcccactcgggtacatcttcgaaacaaaattgatctccacacttatttataagttcctgaacgtgcctatgttccgcaacgtgtccctgaaatgtctcaccgagatcgccggtgttagtgtgtctcagtatgaggagcagttcgtgaccctcttcacactcacgatgatgcagctcaagcagatgctgcccctcaacaccaacatcagattggcatattctaatggaaaagacgatgaacagaacttcatccagaacctgtcgctgttcctgtgcacctttttaaaggagcacgaccagctgatcgaaaagcgactgaacctcagagaaacactcatggaagcactgcactatatgctgctcgtgtccgaagtggaggagactgagatcttcaagatttgcctcgagtactggaatcacctcgcagcggaactgtacagggaatcccctttcagcaccagcgcgagccccctgcttagtggctcccagcactttgacgttcccccacggaggcagctctacctgcccatgctattcaaagtgcggctgttaatggtgtctcggatggcaaaaccagaggaagttttggtggtcgagaacgaccagggggaagtggtccgcgagtttatgaaagacacagatagcatcaacttgtacaagaacatgagggagactctcgtgtatctcacccatctggattacgtcgatacagagcgcatcatgaccgagaagttgcacaatcaggttaatgggacagagtggagctggaaaaatctgaacaccctttgttgggccattggaagcatctcaggcgctatgcacgaggaggatgaaaagaggttcctggtcactgttattaaagacctgctgggcttgtgtgaacagaaacgaggtaaggacaacaaggccatcatcgcgagtaatataatgtatatcgtgggacagtatcccaggttcctgagggctcattggaagtttttaaaaactgtggtgaataagctattcgaattcatgcacgaaacacacgacggagtccaagatatggcgtgtgatacctttattaaaatagcacagaaatgtagaaggcactttgtacaagtccaggtcggcgaggtcatgcccttcatcgacgaaatcctgaacaatatcaacacaataatctgcgacctgcaaccacaacaagtccatactttctacgaggcagtgggatacatgataggcgcacagacggaccagaccgttcaagaacacttgatcgagaaatacatgctattaccgaatcaggtgtgggattctattatccaacaggcgaccaagaacgtcgacatcttgaaggaccctgagacagtgaaacagctcggatcaattttgaagaccaatgttagggcatgcaaagccgtcggtcatcccttcgtgattcaactgggacgaatataccttgacatgttaaatgtctataagtgtctaagcgagaacatttctgctgccattcaggcaaacggggagatggtcacaaagcagccactgatcaggtccatgagaaccgtcaaacgggagaccctcaagcttatcagtggctgggtttctagaagcaacgatccacagatggttgctgagaactttgtgccacctctccttgacgccgtcctaatcgactatcagaggaatgtacctgcagctagggagccagaagtgctcagtaccatggcaattatcgtgaataagttggggggtcatataactgccgagatccctcagatctttgacgcagtattcgagtgtacactaaacatgatcaacaaagatttcgaggaataccctgagcataggacaaacttttttctcctcctccaggcagtgaacagccactgctttccagccttcctagccatcccgcctacccaattcaagctggtgctcgactctattatatgggcctttaagcacactatgcgtaatgtggccgatacagggttgcaaatactgttcacccttctccaaaacgtggcacaagaggaggcagccgctcagagcttctatcagacttatttttgcgatatactgcaacatattttctcagttgtgactgacacttcgcacacagctggtctaacgatgcatgcatcgattctcgcttacatgtttaacctcgtggaggaagggaagatcagcacctccttgaatcccggaaaccccgtgaataatcagatattcctccaggagtacgtcgccaatcttttgaagtccgccttccctcacctccaggatgcccaagtgaaactctttgttacaggacttttttctcttaaccaggacattccagcattcaaagaacatctcagggatttcctcgtgcagattaaagaattcgcgggtgaagatactagtgatttgtttctggaggagcgagagatcgccctgcggcaagcagatgaggaaaaacacaaaagacagatgtcagtgccgggtatttttaaccctcacgagattcccgaagagatgtgcgactag

SEQ ID NO: 327417 - DNA, 180 bp, Artificial Sequence
  derived and/or modified sequence
atgcccgcaattatgacaatgctagcagatcacgccgctcggcagttgctggacttcagtcagaagctggacattaatttgcttgacaatgtcgttaattgtctttaccacggcgaaggtgcccagcaaagaatggcacaggaggtactgacccatctgaaagagcatcccgacgcttag

SEQ ID NO: 327418 - DNA, 3216 bp, Artificial Sequence
  derived and/or modified sequence
atgcccgccatcatgaccatgctggccgaccacgccgccagacagctgctggacttcagccagaagctggacatcaacctgctggacaacgtggtgaactgcctgtaccacggcgagggcgcccagcagagaatggcccaggaggtgctgacccacctgaaggagcaccccgacgcctggaccagagtggacaccatcctggagttcagccagaacatgaacaccaagtactacggcctgcagatcctggagaacgtgatcaagaccagatggaagatcctgcccagaaaccagtgcgagggcatcaagaagtacgtggtgggcctgatcatcaagaccagcagcgaccccacctgcgtggagaaggagaaggtgtacatcggcaagctgaacatgatcctggtgcagatcctgaagcaggagtggcccaagcactggcccaccttcatcagcgacatcgtgggcgccagcagaaccagcgagagcctgtgccagaacaacatggtgatcctgaagctgctgagcgaggaggtgttcgacttcagcagcggccagatcacccaggtgaagagcaagcacctgaaggacagcatgtgcaacgagttcagccagatcttccagctgtgccagttcgtgatggagaacagccagaacgcccccctggtgcacgccaccctggagaccctgctgagattcctgaactggatccccctgggctacatcttcgagaccaagctgatcagcaccctgatctacaagttcctgaacgtgcccatgttcagaaacgtgagcctgaagtgcctgaccgagatcgccggcgtgagcgtgagccagtacgaggagcagttcgtgaccctgttcaccctgaccatgatgcagctgaagcagatgctgcccctgaacaccaacatcagactggcctacagcaacggcaaggacgacgagcagaacttcatccagaacctgagcctgttcctgtgcaccttcctgaaggagcacgaccagctgatcgagaagagactgaacctgagagagaccctgatggaggccctgcactacatgctgctggtgagcgaggtggaggagaccgagatcttcaagatctgcctggagtactggaaccacctggccgccgagctgtacagagagagccccttcagcaccagcgccagccccctgctgagcggcagccagcacttcgacgtgccccccagaagacagctgtacctgcccatgctgttcaaggtgagactgctgatggtgagcagaatggccaagcccgaggaggtgctggtggtggagaacgaccagggcgaggtggtgagagagttcatgaaggacaccgacagcatcaacctgtacaagaacatgagagagaccctggtgtacctgacccacctggactacgtggacaccgagagaatcatgaccgagaagctgcacaaccaggtgaacggcaccgagtggagctggaagaacctgaacaccctgtgctgggccatcggcagcatcagcggcgccatgcacgaggaggacgagaagagattcctggtgaccgtgatcaaggacctgctgggcctgtgcgagcagaagagaggcaaggacaacaaggccatcatcgccagcaacatcatgtacatcgtgggccagtaccccagattcctgagagcccactggaagttcctgaagaccgtggtgaacaagctgttcgagttcatgcacgagacccacgacggcgtgcaggacatggcctgcgacaccttcatcaagatcgcccagaagtgcagaagacacttcgtgcaggtgcaggtgggcgaggtgatgcccttcatcgacgagatcctgaacaacatcaacaccatcatctgcgacctgcagccccagcaggtgcacaccttctacgaggccgtgggctacatgatcggcgcccagaccgaccagaccgtgcaggagcacctgatcgagaagtacatgctgctgcccaaccaggtgtgggacagcatcatccagcaggccaccaagaacgtggacatcctgaaggaccccgagaccgtgaagcagctgggcagcatcctgaagaccaacgtgagagcctgcaaggccgtgggccaccccttcgtgatccagctgggcagaatctacctggacatgctgaacgtgtacaagtgcctgagcgagaacatcagcgccgccatccaggccaacggcgagatggtgaccaagcagcccctgatcagaagcatgagaaccgtgaagagagagaccctgaagctgatcagcggctgggtgagcagaagcaacgacccccagatggtggccgagaacttcgtgccccccctgctggacgccgtgctgatcgactaccagagaaacgtgcccgccgccagagagcccgaggtgctgagcaccatggccatcatcgtgaacaagctgggcggccacatcaccgccgagatcccccagatcttcgacgccgtgttcgagtgcaccctgaacatgatcaacaaggacttcgaggagtaccccgagcacagaaccaacttcttcctgctgctgcaggccgtgaacagccactgcttccccgccttcctggccatcccccccacccagttcaagctggtgctggacagcatcatctgggccttcaagcacaccatgagaaacgtggccgacaccggcctgcagatcctgttcaccctgctgcagaacgtggcccaggaggaggccgccgcccagagcttctaccagacctacttctgcgacatcctgcagcacatcttcagcgtggtgaccgacaccagccacaccgccggcctgaccatgcacgccagcatcctggcctacatgttcaacctggtggaggagggcaagatcagcaccagcctgaaccccggcaaccccgtgaacaaccagatcttcctgcaggagtacgtggccaacctgctgaagagcgccttcccccacctgcaggacgcccaggtgaagctgttcgtgaccggcctgttcagcctgaaccaggacatccccgccttcaaggagcacctgagagacttcctggtgcagatcaaggagttcgccggcgaggacaccagcgacctgttcctggaggagagagagatcgccctgagacaggccgacgaggagaagcacaagagacagatgagcgtgcccggcatcttcaacccccacgagatccccgaggagatgtgcgactag

SEQ ID NO: 327419 - DNA, 180 bp, Artificial Sequence
  derived and/or modified sequence
atgcccgccatcatgaccatgctggccgaccacgccgccagacagctgctggacttcagccagaagctggacatcaacctgctggacaacgtggtgaactgcctgtaccacggcgagggcgcccagcagagaatggcccaggaggtgctgacccacctgaaggagcaccccgacgcctag

SEQ ID NO: 327420 - protein, 100 aa, Artificial Sequence
  derived and/or modified sequence
MPAIMTMLADHAARQLLDFSQKLDINLLDNVVNCLYHGEGAQQRMAQEVLTHLKEHPDAWTRVDTILEFSQNMNTKYYGLQILENVIKTRWKILPRNQCE

SEQ ID NO: 327421 - protein, 132 aa, Artificial Sequence
  derived and/or modified sequence
MPAIMTMLADHAARQLLDFSQKLDINLLDNVVNCLYHGEGAQQRMAQEVLTHLKEHPDAWTRVDTILEFSQNMNTKYYGLQILENVIKTRWKILPRNQCEGIKKYVVGLIIKTSSDPTCVEKEKVYIGKLNM

SEQ ID NO: 327422 - protein, 62 aa, Artificial Sequence
  derived and/or modified sequence
MPAIMTMLADHAARQLLDFSQKLDINLLDNVVNCLYHGEGAQQRMAQEVLTHLKEHPDAWTR

SEQ ID NO: 327423 - DNA, 682 bp, Artificial Sequence
  derived and/or modified sequence
acttgcttaaaaagttttgacatcaagatactgaactgtatcacgttttaggaccataaaatcctaatagtggatgcgtttaaataataggttagcatactttataaatgttagtagaataggaaagtcttcctggtgtataaactaaacactagaaaagttgaatggaccataataatttatgtaattatcaaatagctaagtaatttcagcttttgttacttgcttttactatctcagttttctgtaattaaagtctctaaagtattcattaaaatatttgtaataacatggttgaagtaaaataacttgtaggaagtttttgataataccaaaacttgataggcagcttcaattttttttctttattttcagtaatctatgccagcaattatgacaatgttagcagaccatgcagctcgtcagctgcttgatttcagccaaaaactggatatcaacttattagataatgtggtgaattgcttataccatggagaaggagcccagcaaagaatggctcaagaagtactgacacatttaaaggagcatcctgatgcttggacaagagtcgacacaattttggaattttctcagaatatgaatacgaaatactatggactacaaattttggaaaatgtgataaaaacaaggtggaagattcttccaaggaaccagtgcgaag

SEQ ID NO: 327424 - DNA, 382 bp, Artificial Sequence
  derived and/or modified sequence
cggggttttgccatgttggccaggctggtctggaactcctgacctcaagtgattcgcccacctcggcctcccaaagtgctgggattacagtaatctatgccagcaattatgacaatgttagcagaccatgcagctcgtcagctgcttgatttcagccaaaaactggatatcaacttattagataatgtggtgaattgcttataccatggagaaggagcccagcaaagaatggctcaagaagtactgacacatttaaaggagcatcctgatgcttggacaagagtcgacacaattttggaattttctcagaatatgaatacgaaatactatggactacaaattttggaaaatgtgataaaaacaaggtggaagattcttccaa

SEQ ID NO: 327425 - DNA, 318 bp, Artificial Sequence
  derived and/or modified sequence
ggctttccttcgctctcttttctactcatccctgctcttcgtcccacctcctcctcctccacccctctcctcttgcctttcgaccctccccacttcccctcccccactctgcgggcaaatcgctgctgaaaagagtaatctatgccagcaattatgacaatgttagcagaccatgcagctcgtcagctgcttgatttcagccaaaaactggatatcaacttattagataatgtggtgaattgcttataccatggagaaggagcccagcaaagaatggctcaagaagtactgacacatttaaaggagcatcctgatgct

SEQ ID NO: 327426 - DNA, 565 bp, Artificial Sequence
  derived and/or modified sequence
ggctttccttcgctctcttttctactcatccctgctcttcgtcccacctcctcctcctccacccctctcctcttgcctttcgaccctccccacttcccctcccccactctgcgggcaaatcgctgctgaaaagaggaaggagcagttggttcaatctctggtaatctatgccagcaattatgacaatgttagcagaccatgcagctcgtcagctgcttgatttcagccaaaaactggatatcaacttattagataatgtggtgaattgcttataccatggagaaggagcccagcaaagaatggctcaagaagtactgacacatttaaaggagcatcctgatgcttggacaagagtcgacacaattttggaattttctcagaatatgaatacgaaatactatggactacaaattttggaaaatgtgataaaaacaaggtggaagattcttccaaggaaccagtgcgaaggaataaaaaaatacgttgttggcctcattatcaagacgtcatctgacccaacttgtgtagagaaagaaaaggtgtatatcggaaaattaaatatgat

SEQ ID NO: 327427 - DNA, 579 bp, Artificial Sequence
  derived and/or modified sequence
acaacctaaggagcagtctttcgccttgtagcgacttgtttttcacctagtgtgaagttattaagcaacggttatgattttctgggttttgtttaggaattggcattgggtgtcacttgtagagtcacattatccattaagctggataatccctagtgtatgttatccagtgagtggattttaggattgaagagcccaatgggaatgagcgttcgtggttacacctctcgcactatggcttgtttgctgtctgattgtatatcttaagtgtgggacactgctgttagtggaaagaatgttttggaagcggtttgatttgggggactaaatgtgcttggcattgaccacaaagccgccatttctgtactatgtacagttcaggaatagtaatctatgccagcaattatgacaatgttagcagaccatgcagctcgtcagctgcttgatttcagccaaaaactggatatcaacttattagataatgtggtgaattgcttataccatggagaaggagcccagcaaagaatggctcaagaagtactgacacatttaaaggagcatcctgatgcttggacaaga

SEQ ID NO: 327428 - DNA, 643 bp, Artificial Sequence
  derived and/or modified sequence
ggtggagagcttgggatgggggagggaggggctgccgactccctgttcctccagcaaggaaactcgaaagctctccggttttgcagagtggcatgtgaataatctatgccagcaattatgacaatgttagcagaccatgcagctcgtcagctgcttgatttcagccaaaaactggatatcaacttattagataatgtggtgaattgcttataccatggagaaggagcccagcaaagaatggctcaagaagtactgacacatttaaaggagcatcctgatgcttggacaagagtcgacacaattttggaattttctcagaatatgaatacgaaatactatggactacaaattttggaaaatgtgataaaaacaaggtggaagattcttccaaggaaccagtgcgaaggaataaaaaaatacgttgttggcctcattatcaagacgtcatctgacccaacttgtgtagagaaagaaaaggtgtatatcggaaaattaaatatgatccttgttcagatactgaaacaagaatggcccaaacattggccaacttttatcagtgatattgttggagcaagtaggaccagcgaaagtctctgtcaaaataatatggtgattcttaaactcttgagtgaagaagtatttg

SEQ ID NO: 327429 - DNA, 488 bp, Artificial Sequence
  derived and/or modified sequence
gtcccctctcccccctccccaccttccctcgccctaatcccccaacgaggaaggaaggagcagttggttcaatctctggatggagtctcattctcttgcccaggctagagtgtggtggtgcatctcggcttactgcaaactccgtctcctgggttcaagcagttctcctgcctcagcttcccaagtagctgggattacagtaatctatgccagcaattatgacaatgttagcagaccatgcagctcgtcagctgcttgatttcagccaaaaactggatatcaacttattagataatgtggtgaattgcttataccatggagaaggagcccagcaaagaatggctcaagaagtactgacacatttaaaggagcatcctgatgcttggacaagagtcgacacaattttggaattttctcagaatatgaatacgaaatactatggactacaaattttggaaaatgtgataaaaacaaggtggaagattctt

SEQ ID NO: 327430 - DNA, 303 bp, Artificial Sequence
  derived and/or modified sequence
atgccagcgattatgaccatgttggccgatcacgcagcccgtcagctattagatttctcgcagaagctcgatattaacctgcttgataacgtcgtcaattgcctctatcacggcgaaggcgcccagcagcgcatggcccaagaagtactgacacatctgaaagaacaccctgatgcatggaccagagtcgacaccatcctggagtttagccagaacatgaacaccaagtactacggcctccagatcttggaaaacgtgataaagactcgatggaagatcctgcctcgtaaccagtgcgagtag

SEQ ID NO: 327431 - DNA, 288 bp, Artificial Sequence
  derived and/or modified sequence
atgcccgccatcatgactatgctggctgatcacgcggccagacagctactggatttttcgcagaagctggacataaacctgttagacaatgttgtaaactgcttgtatcatggggaaggggctcagcagcggatggcccaggaggttctcacccatttaaaagagcaccccgacgcatggacgcgcgtggacaccatcttggaattcagccagaatatgaatactaaatattatggattgcaaatactggagaatgtaattaagaccagatggaaaatcctgccatag

SEQ ID NO: 327432 - DNA, 399 bp, Artificial Sequence
  derived and/or modified sequence
atgccagctatcatgactatgcttgctgatcacgctgcccggcaattgttagatttcagtcagaaactcgacattaacctcctagataacgtggtcaactgcctgtaccatggtgagggggctcagcagagaatggcccaggaggtcttaacacacttaaaggagcacccagatgcctggactcgagtggataccatcctggaattctcccagaacatgaacacgaagtactacggcctgcagatcctggagaacgtgatcaaaacccgctggaaaattcttcccaggaaccaatgcgagggtattaaaaaatatgtcgtgggactcatcataaagacatcatctgaccctacttgcgtggaaaaagaaaaagtctacatcggaaagcttaacatgtag

SEQ ID NO: 327433 - DNA, 189 bp, Artificial Sequence
  derived and/or modified sequence
atgcctgccataatgaccatgttggccgatcacgcagctcgccagctgttggacttctctcagaagctcgatatcaatctgttagataacgttgttaattgcctgtatcacggagaaggggctcaacaacgaatggctcaggaggtcctaactcatttgaaagaacacccggacgcctggacccgatag

SEQ ID NO: 327434 - DNA, 540 bp, Artificial Sequence
  derived and/or modified sequence
atgccagcaatcatgactatgctggctgaccatgcggccagacagcttctggacttcagccaaaaacttgacataaatttactcgacaatgtggttaactgcctataccacggagaaggagcccagcagcggatggctcaggaagtgttgacacacctgaaggaacaccctgatgcatggaccagggtggacactatcctcgagtttagccagaacatgaatacaaagtattacggcctgcagatcttagagaacgtaattaagactagatggaagattcttcctcgtaatcagtgcgagggaatcaagaaatatgttgtgggattaattataaaaacctctagcgacccaacgtgtgtcgagaaagagaaagtgtacatcggcaagctaaatatgatcctcgttcaaattttaaagcaggagtggccaaagcattggcctacctttatcagcgatatcgtgggcgctagtcggacgagtgaatcattgtgtcagaataacatggtgattcttaagttactaagtgaggaggtgttctag

SEQ ID NO: 327435 - DNA, 285 bp, Artificial Sequence
  derived and/or modified sequence
atgcccgcaatcatgacaatgttggcagaccatgccgctcggcaacttttagatttcagtcagaaattagacattaacctgctggacaacgtagtgaactgtctttatcatggggaaggtgcccagcaaaggatggcccaggaggtgctgacccatttgaaggaacaccctgatgcttggactcgtgtggatacaatcctggagttcagccagaacatgaatacaaagtactatggactgcagatcctggagaatgtgattaaaaccaggtggaagattctgtag

SEQ ID NO: 327436 - DNA, 303 bp, Artificial Sequence
  derived and/or modified sequence
atgcctgccatcatgaccatgctggccgaccacgccgcccggcagctgctggacttcagccagaagctggacatcaacctgctggacaacgtggtgaactgcctgtaccatggagagggcgcccagcagaggatggcccaggaggtgctgacccacctgaaggagcacccagatgcctggaccagggtggacaccatcctggagttcagccagaacatgaacaccaagtactacggcctgcagatcctggagaatgtcatcaagacccgctggaagatcctgcccaggaaccagtgtgagtag

SEQ ID NO: 327437 - DNA, 288 bp, Artificial Sequence
  derived and/or modified sequence
atgcctgccatcatgaccatgctggccgaccacgccgcccggcagctgctggacttcagccagaagctggacatcaacctgctggacaacgtggtgaactgcctgtaccatggagagggcgcccagcagaggatggcccaggaggtgctgacccacctgaaggagcacccagatgcctggaccagggtggacaccatcctggagttcagccagaacatgaacaccaagtactacggcctgcagatcctggagaatgtcatcaagacccgctggaagatcctgccctag

SEQ ID NO: 327438 - DNA, 399 bp, Artificial Sequence
  derived and/or modified sequence
atgcctgccatcatgaccatgctggccgaccacgccgcccggcagctgctggacttcagccagaagctggacatcaacctgctggacaacgtggtgaactgcctgtaccatggagagggcgcccagcagaggatggcccaggaggtgctgacccacctgaaggagcacccagatgcctggaccagggtggacaccatcctggagttcagccagaacatgaacaccaagtactacggcctgcagatcctggagaatgtcatcaagacccgctggaagatcctgcccaggaaccagtgtgagggcatcaagaagtatgtggtgggcctcatcatcaagaccagcagtgaccccacctgtgtggagaaggagaaggtgtacatcggcaagctgaacatgtag

SEQ ID NO: 327439 - DNA, 189 bp, Artificial Sequence
  derived and/or modified sequence
atgcctgccatcatgaccatgctggccgaccacgccgcccggcagctgctggacttcagccagaagctggacatcaacctgctggacaacgtggtgaactgcctgtaccatggagagggcgcccagcagaggatggcccaggaggtgctgacccacctgaaggagcacccagatgcctggaccaggtag

SEQ ID NO: 327440 - DNA, 540 bp, Artificial Sequence
  derived and/or modified sequence
atgcctgccatcatgaccatgctggccgaccacgccgcccggcagctgctggacttcagccagaagctggacatcaacctgctggacaacgtggtgaactgcctgtaccatggagagggcgcccagcagaggatggcccaggaggtgctgacccacctgaaggagcacccagatgcctggaccagggtggacaccatcctggagttcagccagaacatgaacaccaagtactacggcctgcagatcctggagaatgtcatcaagacccgctggaagatcctgcccaggaaccagtgtgagggcatcaagaagtatgtggtgggcctcatcatcaagaccagcagtgaccccacctgtgtggagaaggagaaggtgtacatcggcaagctgaacatgatcctggtgcagatcctgaagcaggagtggcccaagcactggcccaccttcatcagtgacatcgtgggcgccagcaggaccagcgagagcctgtgccagaacaacatggtgatcctgaagctgctgtctgaggaggtgttctag

SEQ ID NO: 327441 - DNA, 285 bp, Artificial Sequence
  derived and/or modified sequence
atgcctgccatcatgaccatgctggccgaccacgccgcccggcagctgctggacttcagccagaagctggacatcaacctgctggacaacgtggtgaactgcctgtaccatggagagggcgcccagcagaggatggcccaggaggtgctgacccacctgaaggagcacccagatgcctggaccagggtggacaccatcctggagttcagccagaacatgaacaccaagtactacggcctgcagatcctggagaatgtcatcaagacccgctggaagatcctgtag

SEQ ID NO: 327442 - DNA, 303 bp, Artificial Sequence
  derived and/or modified sequence
atgcccgccatcatgaccatgctggccgaccacgccgcccggcagctgctggacttttcacaaaagcttgatattaacctgctggacaacgtggttaattgtctgtaccacggagaaggtgcacagcagcggatggcacaggaagtgctcacccacctgaaagagcacccagatgcatggacaagagtggatactatcctggaattttctcaaaatatgaacactaagtactacggcctgcagatcctagagaatgtcattaagacgcggtggaagatcctgccaaggaatcaatgcgaatag

SEQ ID NO: 327443 - DNA, 288 bp, Artificial Sequence
  derived and/or modified sequence
atgcccgccatcatgaccatgctggccgaccacgccgcccggcagctcctggacttttcccagaaactggacataaacctcttagacaacgtggttaattgtttataccacggggaaggagcccagcagcgtatggcacaagaggtgctaacccacctgaaggagcatcctgacgcttggacgcgcgtggatacgatcctggaattcagtcagaacatgaacactaagtattatgggcttcagattctcgagaatgtgatcaagactaggtggaagatcttaccctag

SEQ ID NO: 327444 - DNA, 399 bp, Artificial Sequence
  derived and/or modified sequence
atgcccgccatcatgaccatgctggccgaccacgccgcccggcagcttcttgacttcagccaaaagcttgatattaatctgcttgacaatgtcgtaaattgcctgtatcatggggaaggggcgcagcagcggatggcgcaggaagtgctcacccaccttaaagagcatcctgacgcatggacccgcgtagataccattttggaattcagccaaaacatgaacacaaagtactatggtctgcagattttagaaaacgtgatcaagactcgctggaagattcttcctcgcaatcagtgcgaaggaatcaagaagtatgttgtgggccttatcatcaaaacctccagcgacccaacctgcgtcgagaaggagaaagtctacattgggaagctgaacatgtag

SEQ ID NO: 327445 - DNA, 189 bp, Artificial Sequence
  derived and/or modified sequence
atgcccgccatcatgaccatgctggccgaccacgccgcccggcagcttctcgacttctcccagaaactagatatcaatctactggacaacgtcgttaattgtctgtaccatggtgaaggtgcacagcaaagaatggcgcaggaagtcctgacccacttgaaagagcatccagatgcctggactcgctag

SEQ ID NO: 327446 - DNA, 540 bp, Artificial Sequence
  derived and/or modified sequence
atgcccgccatcatgaccatgctggccgaccacgccgcccggcagcttctggatttttctcagaagctggatatcaatttgctcgataatgtggtcaactgtctgtatcatggggaaggcgcccagcagcggatggctcaggaagtgttgacgcacctgaaggaacaccctgatgcgtggaccagggtggacaccatcctggagttcagccaaaacatgaatactaagtactacggcctgcagattctggaaaatgtgataaagacgaggtggaaaatactacccaggaaccagtgcgaggggataaaaaagtacgtcgtgggtcttatcatcaagacatcgtcggatccaacctgtgtggaaaaggagaaggtatacataggcaaactgaacatgatcctcgtgcagatcttaaagcaagaatggccaaaacactggcccacgttcatctcagacatcgtgggcgccagtcggacaagtgagtcgctctgccagaataacatggtcatattaaaactgctttcggaggaagtgttttag

SEQ ID NO: 327447 - DNA, 285 bp, Artificial Sequence
  derived and/or modified sequence
atgcccgccatcatgaccatgctggccgaccacgccgcccggcagcttctcgacttttctcagaaattggacattaatttactcgataatgtggtaaactgtctgtaccacggagagggcgcacagcagcgcatggcccaggaggtcctgacacatctcaaagaacaccctgatgcttggacgagagtcgatactatcctcgaatttagtcaaaacatgaacaccaagtactacggactccagatcctcgagaacgtgattaaaacgaggtggaagatcctgtag

SEQ ID NO: 327448 - DNA, 303 bp, Artificial Sequence
  derived and/or modified sequence
atgcccgctattatgaccatgttagctgaccacgccgctagacagctgctggacttctcacagaaacttgacatcaatctgctggacaacgtcgtaaattgtttataccacggcgagggcgctcagcagcggatggcgcaagaagtgctgacccacctgaaggaacatccagacgcatggacgcgagtcgacacgattctggagtttagccagaatatgaacacaaagtattacggcctgcagattctggaaaatgtcattaagacccggtggaaaatcttgccacgaaaccagtgcgaatag

SEQ ID NO: 327449 - DNA, 288 bp, Artificial Sequence
  derived and/or modified sequence
atgcccgcaattatgactatgcttgccgatcatgctgccagacaactcctggatttctcacagaagttggatataaacctcctggataacgtagttaactgcctgtatcatggggaaggagcacagcagcgaatggcgcaggaggtcttgactcacctgaaggaacaccctgacgcatggactcgcgtagatactatcctggagttctcccagaacatgaatactaaatattatgggctccagatactagagaatgtgatcaagacaaggtggaagatcctcccctag

SEQ ID NO: 327450 - DNA, 399 bp, Artificial Sequence
  derived and/or modified sequence
atgccagctatcatgactatgttggctgaccatgctgccagacagcttctggattttagtcaaaaactggacatcaacctgttggacaacgtggttaactgcctctatcacggtgagggggcacagcagcgtatggcacaagaggtccttactcacttaaaagaacaccccgacgcctggactagagtggatacgattctagagttcagtcagaacatgaataccaagtactacgggttgcagatcttggagaatgtcataaagaccagatggaagatcttgcctaggaaccagtgcgaaggtattaaaaaatacgtagtcggacttatcatcaagacgagcagcgatcccacttgtgtcgagaaagaaaaagtgtatatagggaaactaaacatgtag

SEQ ID NO: 327451 - DNA, 189 bp, Artificial Sequence
  derived and/or modified sequence
atgcctgccatcatgaccatgctcgccgatcacgcagcacgccagcttctcgattttagccagaaactggacataaacctgttggacaatgtggttaattgcctatatcatggcgagggcgcacaacagagaatggcgcaggaggtcctcacccacctgaaggagcacccagatgcctggactcgctag

SEQ ID NO: 327452 - DNA, 540 bp, Artificial Sequence
  derived and/or modified sequence
atgcccgcaatcatgacaatgttagccgatcatgctgcaagacaactcctcgacttctctcagaagttggatatcaaccttctcgataacgtggtgaactgcctgtaccacggcgaaggtgcacagcagcggatggcccaagaggtcctcacacacttgaaggagcacccggatgcctggactcgggtagataccattctggagttcagccagaatatgaacacaaagtactatgggcttcagatactggaaaatgtaataaagaccaggtggaaaatcttgcctcgcaatcagtgtgaaggaattaaaaagtatgtcgtgggtcttatcatcaagacttcttcagatccaacctgtgtggagaaagagaaggtctacataggcaaactaaatatgattctggtgcagattctgaaacaagagtggcccaagcactggcctacgttcatctccgacatcgtgggagcctcaaggacatctgagtccctgtgtcagaacaatatggttattctgaagttgctatcagaagaggtgttctag

SEQ ID NO: 327453 - DNA, 285 bp, Artificial Sequence
  derived and/or modified sequence
atgccagctatcatgactatgctcgccgatcatgccgctcgccagttactggattttagtcaaaagctggatataaacctgttggacaacgtggtgaactgcctgtaccacggggagggtgcccaacagcgcatggctcaagaagtcctcacacacctgaaagagcaccccgacgcatggactcgggtggacacgattttggagtttagtcagaatatgaacaccaagtactatggactccaaatccttgaaaacgtgataaaaaccagatggaaaatcctgtag

SEQ ID NO: 327454 - DNA, 303 bp, Artificial Sequence
  derived and/or modified sequence
atgcccgccatcatgaccatgctggccgaccacgccgccagacagctgctggacttcagccagaagctggacatcaacctgctggacaacgtggtgaactgcctgtaccacggcgagggcgcccagcagagaatggcccaggaggtgctgacccacctgaaggagcaccccgacgcctggaccagagtggacaccatcctggagttcagccagaacatgaacaccaagtactacggcctgcagatcctggagaacgtgatcaagaccagatggaagatcctgcccagaaaccagtgcgagtag

SEQ ID NO: 327455 - DNA, 288 bp, Artificial Sequence
  derived and/or modified sequence
atgcccgccatcatgaccatgctggccgaccacgccgccagacagctgctggacttcagccagaagctggacatcaacctgctggacaacgtggtgaactgcctgtaccacggcgagggcgcccagcagagaatggcccaggaggtgctgacccacctgaaggagcaccccgacgcctggaccagagtggacaccatcctggagttcagccagaacatgaacaccaagtactacggcctgcagatcctggagaacgtgatcaagaccagatggaagatcctgccctag

SEQ ID NO: 327456 - DNA, 399 bp, Artificial Sequence
  derived and/or modified sequence
atgcccgccatcatgaccatgctggccgaccacgccgccagacagctgctggacttcagccagaagctggacatcaacctgctggacaacgtggtgaactgcctgtaccacggcgagggcgcccagcagagaatggcccaggaggtgctgacccacctgaaggagcaccccgacgcctggaccagagtggacaccatcctggagttcagccagaacatgaacaccaagtactacggcctgcagatcctggagaacgtgatcaagaccagatggaagatcctgcccagaaaccagtgcgagggcatcaagaagtacgtggtgggcctgatcatcaagaccagcagcgaccccacctgcgtggagaaggagaaggtgtacatcggcaagctgaacatgtag

SEQ ID NO: 327457 - DNA, 189 bp, Artificial Sequence
  derived and/or modified sequence
atgcccgccatcatgaccatgctggccgaccacgccgccagacagctgctggacttcagccagaagctggacatcaacctgctggacaacgtggtgaactgcctgtaccacggcgagggcgcccagcagagaatggcccaggaggtgctgacccacctgaaggagcaccccgacgcctggaccagatag

SEQ ID NO: 327458 - DNA, 540 bp, Artificial Sequence
  derived and/or modified sequence
atgcccgccatcatgaccatgctggccgaccacgccgccagacagctgctggacttcagccagaagctggacatcaacctgctggacaacgtggtgaactgcctgtaccacggcgagggcgcccagcagagaatggcccaggaggtgctgacccacctgaaggagcaccccgacgcctggaccagagtggacaccatcctggagttcagccagaacatgaacaccaagtactacggcctgcagatcctggagaacgtgatcaagaccagatggaagatcctgcccagaaaccagtgcgagggcatcaagaagtacgtggtgggcctgatcatcaagaccagcagcgaccccacctgcgtggagaaggagaaggtgtacatcggcaagctgaacatgatcctggtgcagatcctgaagcaggagtggcccaagcactggcccaccttcatcagcgacatcgtgggcgccagcagaaccagcgagagcctgtgccagaacaacatggtgatcctgaagctgctgagcgaggaggtgttctag

SEQ ID NO: 327459 - DNA, 285 bp, Artificial Sequence
  derived and/or modified sequence
atgcccgccatcatgaccatgctggccgaccacgccgccagacagctgctggacttcagccagaagctggacatcaacctgctggacaacgtggtgaactgcctgtaccacggcgagggcgcccagcagagaatggcccaggaggtgctgacccacctgaaggagcaccccgacgcctggaccagagtggacaccatcctggagttcagccagaacatgaacaccaagtactacggcctgcagatcctggagaacgtgatcaagaccagatggaagatcctgtag

SEQ ID NO: 327460 - protein, 99 aa, Artificial Sequence
  derived and/or modified sequence
MPFHHCHRDPLPPPGLTPERLHARRQLYAACAVCFVFMAGEVVGGYLAHSLAIMTDAAHLLADVGSMMGSLFSLWLSTRPATRTMTFGWHRSETLGALA

SEQ ID NO: 327461 - protein, 240 aa, Artificial Sequence
  derived and/or modified sequence
MPFHHCHRDPLPPPGLTPERLHARRQLYAACAVCFVFMAGEVVGGYLAHSLAIMTDAAHLLADVGSMMGSLFSLWLSTRPATRTMTFGWHRSETLGALASVVSLWMVTGILLYLAFVRLLHSDYHIEGGAMLLTASIAVCANLLMAFVLHQAGPPHSHGSRGAEYAPLEEGPEEPLPLGNTSVRAAFVHVLGDLLQSFGVLAASILIYFKPQYKAADPISTFLFSICALGSTAPTLRDVL

SEQ ID NO: 327462 - protein, 111 aa, Artificial Sequence
  derived and/or modified sequence
MPFHHCHRDPLPPPGLTPERLHARRQLYAACAVCFVFMAGEVVGGYLAHSLAIMTDAAHLLADVGSMMGSLFSLWLSTRPATRTMTFGWHRSETLGALASVVSLWMVTGIL

SEQ ID NO: 327463 - DNA, 300 bp, Artificial Sequence
  derived and/or modified sequence
atgccatttcatcactgccacagagatcctttacccccgccagggttaacacctgagcgcctgcacgccaggagacagctatacgctgcatgcgcagtctgtttcgtctttatggccggcgaagtggtcggcggatatctggcccattcattagcgatcatgacagatgccgcccatcttctcgctgacgtgggcagcatgatggggtccctgttctctttgtggctctccactcgccccgccacgcgaaccatgacctttggctggcacagatctgaaacgctcggtgctctggcttag

SEQ ID NO: 327464 - DNA, 723 bp, Artificial Sequence
  derived and/or modified sequence
atgccttttcaccattgtcatcgcgatcccctgcctcctcccgggctgacccctgagaggcttcacgcccgacgccaattgtacgccgcctgcgcagtatgcttcgtattcatggccggggaggtggtcggtgggtacctggcacactcgctggctattatgaccgatgctgcccaccttctggcagatgtaggttcaatgatggggtcactgttctccctttggctgagcacccgccctgcaaccaggaccatgacatttggctggcaccgctccgaaaccctcggagccttagcctctgtggtgagtctatggatggtgacaggcattcttctctacttagctttcgtgagactgctccattctgattatcacatcgagggcggagcaatgctgctgactgcgtcaatagccgtctgcgccaacctcttgatggccttcgtgctccatcaagccgggccaccccattctcatggcagtcgaggtgctgaatacgctccacttgaggaaggtccggaagagcccctccctcttggaaatacgagcgtgagggcggccttcgttcacgtgctcggggaccttctccagagtttcggagtcctcgccgcctcaattcttatttacttcaagccacaatataaagctgcggacccgatttcaacattcctgttttcaatctgtgctctcggttcaacagcgcccacccttagagatgtgctgtag

SEQ ID NO: 327465 - DNA, 336 bp, Artificial Sequence
  derived and/or modified sequence
atgcctttccaccattgtcacagggatcccctgccccctcccggcctcacgcccgaacggctgcacgcaaggagacagctttatgcagcatgtgcggtttgcttcgtcttcatggccggggaggttgtcggtgggtatttggcccattcactagccattatgacagacgcagcacacttactcgcagatgtaggctccatgatgggaagccttttttccctgtggctttctacacgcccggctacccggaccatgacctttggctggcatcggtccgagactctgggagcactcgcctccgtcgttagtctgtggatggttaccggcattttatag

SEQ ID NO: 327466 - DNA, 300 bp, Artificial Sequence
  derived and/or modified sequence
atgcccttccaccactgccaccgggaccccctgcccccacctggcctgaccccagagcggctgcacgcccggcggcagctgtatgctgcctgtgctgtgtgctttgtgttcatggccggggaggtggtgggcggctacctggcccacagcctggccatcatgacagatgctgcccacctgctggctgatgtgggctccatgatgggcagcctcttcagcctgtggctgagcaccaggcctgccaccaggaccatgaccttcggctggcacaggtctgagaccctgggcgccctggcctag

SEQ ID NO: 327467 - DNA, 723 bp, Artificial Sequence
  derived and/or modified sequence
atgcccttccaccactgccaccgggaccccctgcccccacctggcctgaccccagagcggctgcacgcccggcggcagctgtatgctgcctgtgctgtgtgctttgtgttcatggccggggaggtggtgggcggctacctggcccacagcctggccatcatgacagatgctgcccacctgctggctgatgtgggctccatgatgggcagcctcttcagcctgtggctgagcaccaggcctgccaccaggaccatgaccttcggctggcacaggtctgagaccctgggcgccctggcctctgtggtgtccctgtggatggtgacaggcatcctgctgtacctggcctttgtgcggctgctgcacagcgactaccacatcgagggcggggccatgctgctgacagccagcattgctgtgtgtgccaacctgctgatggcctttgtgctgcaccaggccggccccccccacagccacggcagcagaggagcagaatatgcccccctggaggagggccctgaggagcccctgcccctgggcaacacctctgtgcgggccgcctttgtgcacgtgctgggggacctgctgcagagctttggagtgctggccgccagcatcctgatctacttcaagccccagtacaaggctgctgaccccatcagcaccttcctgttcagcatctgtgccctgggcagcacagcccccaccctgagagatgtgctgtag

SEQ ID NO: 327468 - DNA, 336 bp, Artificial Sequence
  derived and/or modified sequence
atgcccttccaccactgccaccgggaccccctgcccccacctggcctgaccccagagcggctgcacgcccggcggcagctgtatgctgcctgtgctgtgtgctttgtgttcatggccggggaggtggtgggcggctacctggcccacagcctggccatcatgacagatgctgcccacctgctggctgatgtgggctccatgatgggcagcctcttcagcctgtggctgagcaccaggcctgccaccaggaccatgaccttcggctggcacaggtctgagaccctgggcgccctggcctctgtggtgtccctgtggatggtgacaggcatcctgtag

SEQ ID NO: 327469 - DNA, 300 bp, Artificial Sequence
  derived and/or modified sequence
atgcccttccaccactgccaccgggaccccctgcccccccccggcttgacccccgagcggctacatgctagaagacagctgtatgcggcctgtgccgtatgtttcgtgtttatggccggagaggtcgtgggagggtatttggcccactctctggcgatcatgactgacgcagcacacttgctcgccgacgtggggagcatgatgggatccctattctctctttggctctctacacgtcccgctactagaaccatgacttttggctggcacagatccgagacactcggggctctagcgtag

SEQ ID NO: 327470 - DNA, 723 bp, Artificial Sequence
  derived and/or modified sequence
atgcccttccaccactgccaccgggaccccctgcccccccccggcctaacaccggagcgactccacgccagaagacagctgtatgccgcatgtgccgtgtgctttgtattcatggcaggcgaggtggtcggtgggtacctcgctcacagcctagcaattatgactgatgcagcacacctcttggcagacgtaggtagcatgatgggatctctgtttagtctgtggctgtctacacgcccagccacacggacaatgacgttcggttggcacaggagtgaaaccttgggagcgctggccagcgtcgttagcctttggatggtcaccggcattctcttgtacctggcctttgtgagactgctgcacagcgactaccacattgagggaggggcaatgctgctcaccgcctcgatcgccgtgtgtgctaatctgctcatggcattcgtgctgcatcaagcaggaccgccgcattcccacgggagtaggggggccgagtatgccccccttgaggagggacccgaagagccattgcctctgggtaacacgagcgtgagggccgcttttgtacacgtgttgggcgacctcctgcagtctttcggggtactcgccgccagtattctcatttatttcaagccccagtacaaggctgcggacccaatcagcaccttccttttttcgatttgcgccctgggctcgacggcgcccacacttagagacgtactctag

SEQ ID NO: 327471 - DNA, 336 bp, Artificial Sequence
  derived and/or modified sequence
atgcccttccaccactgccaccgggaccccctgcccccccccggcctgacaccagagcgtttgcacgctaggagacaattgtacgccgcctgtgcagtttgttttgtttttatggctggtgaggtggtaggcggttatctcgcacattctctcgccatcatgaccgatgccgcccacttgttggcagacgtgggtagcatgatgggctctttgttttctctgtggctgtccactcgcccagctacgcggaccatgacttttggatggcaccggagtgaaacactcggagccctggcctctgtggtgagtctgtggatggtcactggcatcctgtag

SEQ ID NO: 327472 - DNA, 300 bp, Artificial Sequence
  derived and/or modified sequence
atgccttttcaccattgtcaccgggacccactgccacctcctggactcaccccagagcgcttgcacgcacgaaggcagctgtatgccgcatgcgctgtttgctttgtgtttatggctggcgaagtggtggggggttatctcgcccattccctagctattatgacagatgccgctcatcttctcgccgatgttgggagcatgatgggatccctgttctcattgtggttgagcactagaccggctacacgcacaatgactttcggctggcacaggagcgaaacactcggcgctttggcctag

SEQ ID NO: 327473 - DNA, 723 bp, Artificial Sequence
  derived and/or modified sequence
atgcccttccaccactgtcacagggatccactgccccctccgggtctgacccctgaacgcctccacgccagacggcagctttatgctgcctgcgctgtctgttttgtctttatggcaggggaagttgttggtgggtatttagcccactcgcttgctatcatgaccgatgccgctcaccttcttgccgatgtgggcagtatgatgggctccctgttttctctttggctgtccacccgcccagcgacccgcacgatgacatttggctggcatcggagtgaaacactcggcgctctggcgagcgtggtatccctgtggatggtcacagggattctcctttacctggcctttgtgagactcctacatagcgattaccatatagaaggcggtgcaatgctgctgacggcaagcatcgccgtttgcgcgaacctgctgatggcatttgtcctgcatcaggcaggcccaccccattcacatggcagtagaggcgcagagtatgcgcctctggaggaaggtcctgaggagcccctgcctctggggaatacaagcgtgcgtgcagccttcgtgcatgtactcggcgatctgctccagtcctttggcgtgcttgcagcctcaattttgatctatttcaagccacaatacaaggctgcggaccctatttcaacatttctgttcagcatatgtgcactgggctccaccgcccctactctacgcgacgtcctgtag

SEQ ID NO: 327474 - DNA, 336 bp, Artificial Sequence
  derived and/or modified sequence
atgcccttccaccactgtcatagggatccgttgccccctcctggcctgacacccgagcgacttcacgccagaagacaactctatgccgcttgcgccgtttgctttgtctttatggcaggagaagttgtgggcggatatcttgcccattctctagccatcatgaccgacgccgcacatctcctggctgacgttggtagcatgatgggctcgctgtttagcctgtggttgagcactcggccagccacaagaacgatgacttttggctggcatagatcagaaacgctaggggctctcgctagtgttgtctccctctggatggtaacagggatcctttag

SEQ ID NO: 327475 - DNA, 540 bp, Artificial Sequence
  derived and/or modified sequence
acagcgggccgggggtggcaggagaaccgccaacgcgccccgccggcccccgcgcctgccgccaccgtccacctgcccctctgagcggccgtccgacctccctgcccacccccgtgggccatcttgtctgtcggctgaccgtccgtttgtctccggaatttggcaggagccctcagagcccctccctgaggagtccaaacctgtggagatgcccttccaccactgccacagggacccccttccgccgccgggccttacccctgagaggctgcatgcacggaggcagctatatgctgcctgtgccgtttgctttgtcttcatggctggggaggtggtcggcgggtatctggcacacagcctggccatcatgaccgatgcagcccacttgctggcggatgtgggcagcatgatgggcagcctcttctccctctggctctccacccgtccagccacccgcaccatgacctttggctggcaccgttcagagactctgggggctttggcctctgtggtctccctctggatggtcactggcatcct

SEQ ID NO: 327476 - DNA, 300 bp, Artificial Sequence
  derived and/or modified sequence
atgcccttccaccactgccacagagaccccctgcccccccccggcctgacccccgagagactgcacgccagaagacagctgtacgccgcctgcgccgtgtgcttcgtgttcatggccggcgaggtggtgggcggctacctggcccacagcctggccatcatgaccgacgccgcccacctgctggccgacgtgggcagcatgatgggcagcctgttcagcctgtggctgagcaccagacccgccaccagaaccatgaccttcggctggcacagaagcgagaccctgggcgccctggcctag

SEQ ID NO: 327477 - DNA, 723 bp, Artificial Sequence
  derived and/or modified sequence
atgcccttccaccactgccacagagaccccctgcccccccccggcctgacccccgagagactgcacgccagaagacagctgtacgccgcctgcgccgtgtgcttcgtgttcatggccggcgaggtggtgggcggctacctggcccacagcctggccatcatgaccgacgccgcccacctgctggccgacgtgggcagcatgatgggcagcctgttcagcctgtggctgagcaccagacccgccaccagaaccatgaccttcggctggcacagaagcgagaccctgggcgccctggccagcgtggtgagcctgtggatggtgaccggcatcctgctgtacctggccttcgtgagactgctgcacagcgactaccacatcgagggcggcgccatgctgctgaccgccagcatcgccgtgtgcgccaacctgctgatggccttcgtgctgcaccaggccggccccccccacagccacggcagcagaggcgccgagtacgcccccctggaggagggccccgaggagcccctgcccctgggcaacaccagcgtgagagccgccttcgtgcacgtgctgggcgacctgctgcagagcttcggcgtgctggccgccagcatcctgatctacttcaagccccagtacaaggccgccgaccccatcagcaccttcctgttcagcatctgcgccctgggcagcaccgcccccaccctgagagacgtgctgtag

SEQ ID NO: 327478 - DNA, 336 bp, Artificial Sequence
  derived and/or modified sequence
atgcccttccaccactgccacagagaccccctgcccccccccggcctgacccccgagagactgcacgccagaagacagctgtacgccgcctgcgccgtgtgcttcgtgttcatggccggcgaggtggtgggcggctacctggcccacagcctggccatcatgaccgacgccgcccacctgctggccgacgtgggcagcatgatgggcagcctgttcagcctgtggctgagcaccagacccgccaccagaaccatgaccttcggctggcacagaagcgagaccctgggcgccctggccagcgtggtgagcctgtggatggtgaccggcatcctgtag

SEQ ID NO: 327479 - protein, 517 aa, Artificial Sequence
  derived and/or modified sequence
MAQDESCPPSDADWDDLWDQFDERRYLNAKKWRVGDDPYKLYAFNQRESERISSNRAIPDTRHLRCTLLVYCTDLPPTSIIITFHNEARSTLLRTIRSVLNRTPTHLIREIILVDDFSNDPDDCKQLIKLPKVKCLRNNERQGLVRSRIRGADIAQGTTLTFLDSHCEVNRDWLQPLLHRVKEDYTRVVCPVIDIINLDTFTYIESASELRGGFDWSLHFQWEQLSPEQKARRLDPTEPIRTPIIAGGLFVIDKAWFDYLGKYDMDMDIWGGENFEISFRVWMCGGSLEIVPCSRVGHVFRKKHPYVFPDGNANTYIKNTKRTAEVWMDEYKQYYYAARPFALERPFGNVESRLDLRKNLRCQSFKWYLENIYPELSIPKESSIQKGNIRQRQKCLESQRQNNQETPNLKLSPCAKVKGEDAKSQVWAFTYTQQILQEELCLSVITLFPGAPVVLVLCKNGDDRQQWTKTGSHIEHIASHLCLDTDMFGDGTENGKEIVVNPCESSLMSQHWDMVSS

SEQ ID NO: 327480 - DNA, 1554 bp, Artificial Sequence
  derived and/or modified sequence
atggcccaggacgagagctgcccccccagcgacgccgactgggacgacctgtgggaccagttcgacgagagaagatacctgaacgccaagaagtggagagtgggcgacgacccctacaagctgtacgccttcaaccagagagagagcgagagaatcagcagcaacagagccatccccgacaccagacacctgagatgcaccctgctggtgtactgcaccgacctgccccccaccagcatcatcatcaccttccacaacgaggccagaagcaccctgctgagaaccatcagaagcgtgctgaacagaacccccacccacctgatcagagagatcatcctggtggacgacttcagcaacgaccccgacgactgcaagcagctgatcaagctgcccaaggtgaagtgcctgagaaacaacgagagacagggcctggtgagaagcagaatcagaggcgccgacatcgcccagggcaccaccctgaccttcctggacagccactgcgaggtgaacagagactggctgcagcccctgctgcacagagtgaaggaggactacaccagagtggtgtgccccgtgatcgacatcatcaacctggacaccttcacctacatcgagagcgccagcgagctgagaggcggcttcgactggagcctgcacttccagtgggagcagctgagccccgagcagaaggccagaagactggaccccaccgagcccatcagaacccccatcatcgccggcggcctgttcgtgatcgacaaggcctggttcgactacctgggcaagtacgacatggacatggacatctggggcggcgagaacttcgagatcagcttcagagtgtggatgtgcggcggcagcctggagatcgtgccctgcagcagagtgggccacgtgttcagaaagaagcacccctacgtgttccccgacggcaacgccaacacctacatcaagaacaccaagagaaccgccgaggtgtggatggacgagtacaagcagtactactacgccgccagacccttcgccctggagagacccttcggcaacgtggagagcagactggacctgagaaagaacctgagatgccagagcttcaagtggtacctggagaacatctaccccgagctgagcatccccaaggagagcagcatccagaagggcaacatcagacagagacagaagtgcctggagagccagagacagaacaaccaggagacccccaacctgaagctgagcccctgcgccaaggtgaagggcgaggacgccaagagccaggtgtgggccttcacctacacccagcagatcctgcaggaggagctgtgcctgagcgtgatcaccctgttccccggcgcccccgtggtgctggtgctgtgcaagaacggcgacgacagacagcagtggaccaagaccggcagccacatcgagcacatcgccagccacctgtgcctggacaccgacatgttcggcgacggcaccgagaacggcaaggagatcgtggtgaacccctgcgagagcagcctgatgagccagcactgggacatggtgagcagctag

SEQ ID NO: 327481 - DNA, 1554 bp, Artificial Sequence
  derived and/or modified sequence
atggcacaggacgagtcatgccctccaagcgacgccgactgggacgacctgtgggatcaattcgacgagagaaggtatctgaacgccaaaaagtggcgtgtgggtgatgatccgtacaaactgtatgcgttcaatcagagggagtctgagcgtattagttcaaatagagcaatacctgacaccaggcatctgcgttgtactctcctagtttattgtaccgatctgcccccaacttccataatcattacattccacaacgaggccagaagtacactgcttcgcactatcaggtctgtgcttaatcgcacccctacccatttaattcgggagatcatactagttgatgacttcagtaacgatcctgatgattgcaagcagttgattaagttgccaaaggtgaagtgtcttcggaataacgaaagacagggccttgtaaggagccggattagaggagccgatattgcacagggtactactctgaccttcctggacagccactgcgaagtgaaccgggattggctccagcctttgttgcaccgcgtaaaggaagattacacacgtgtggtctgtcctgtcatcgatattatcaacctggatacctttacatatattgaatcagcatccgaactgcgaggcgggttcgactggagccttcactttcaatgggagcagctgtcccccgagcagaaagcgcggcgccttgacccaaccgaacctatcaggactcccatcatagctggagggctgttcgttattgacaaagcatggtttgactacctgggaaagtatgacatggacatggacatttggggcggggaaaacttcgaaattagtttcagggtgtggatgtgcggaggatcactcgaaatagtgccatgctcaagagtcggccacgtgtttagaaaaaaacacccatatgtgtttccagacgggaatgctaacacatatatcaagaacacaaagaggacagccgaagtctggatggacgaatataagcagtattactacgcagccaggccctttgcccttgaaaggccctttggtaacgtagaatctcgcctggacctgaggaagaacctccgatgccaatcttttaaatggtacctcgagaatatttatcccgaactgtccatcccaaaagaaagctctatccaaaagggcaacatccgccagagacaaaagtgtctggaaagtcagcggcaaaacaaccaggagacaccaaacttgaagctgtccccctgtgccaaagtcaagggcgaggacgcaaaaagtcaagtctgggcgttcacgtacactcaacagattctccaagaagagctgtgcctgagtgttattactttgtttcctggtgcccctgttgtcctggtgctctgtaagaatggggatgatcgacagcagtggaccaagaccgggtctcatattgaacatatcgctagccacctgtgcctggacacagatatgttcggcgacggaacagagaacggcaaagagattgtcgtgaacccctgcgagagcagcctgatgtcacaacactgggacatggtctctagttag

SEQ ID NO: 327482 - DNA, 1554 bp, Artificial Sequence
  derived and/or modified sequence
atggcccaggatgagagctgccccccatctgatgctgactgggatgacctgtgggaccagtttgatgagcggcgctacctgaatgccaagaagtggagggtgggagatgacccctacaagctgtatgccttcaaccagcgggagagcgagcgcatcagcagcaacagagccatcccagacaccaggcacctgcgctgcaccctgctggtgtactgcacagacctgccccccaccagcatcatcatcaccttccacaatgaggcccggagcaccctgctgcggaccatccgctctgtgctgaacagaacacccacccacctgatccgggagatcatcctggtggatgacttcagcaatgaccctgatgactgcaagcagctgatcaagctgcccaaggtgaagtgcctgagaaataatgaaaggcagggcctggtgcgcagccgcatcagaggagctgacatcgcccagggcaccaccctgaccttcctggacagccactgtgaggtgaacagagactggctgcagcccctgctgcaccgggtgaaggaggactacaccagggtggtgtgccctgtgattgacatcatcaacctggacaccttcacctacatcgagagcgccagcgagctgcggggcggctttgactggagcctgcacttccagtgggagcagctgagccctgagcagaaggcccggcggctggaccccacagagcccatccgcacccccatcatcgccggcggcctcttcgtcatcgacaaggcctggtttgactacctgggcaagtatgacatggacatggacatctggggcggagaaaattttgagatctccttccgggtgtggatgtgtggcggcagcctggagatcgtgccctgcagccgggtgggccacgtgttcaggaagaagcacccctacgtgtttcctgatggaaatgccaacacctacatcaagaacaccaagaggacagctgaggtgtggatggatgagtacaagcagtactactatgctgcccggccctttgccctggagcggccctttggaaatgtggagagccggctggacctgaggaagaacctgcgctgccagagcttcaagtggtacctggagaacatctacccagagctgagcatccccaaggagagcagcatccagaagggcaacatccggcagaggcagaagtgcctggagagccagaggcagaacaaccaggagacccccaacctgaagctgagcccctgtgccaaggtgaagggggaggatgccaagagccaggtgtgggccttcacctacacccagcagatcctgcaggaggagctgtgcctgagcgtcatcaccctcttccctggggcccctgtggtgctggtgctgtgcaagaatggagatgaccggcagcagtggaccaagacaggcagccacatcgagcacatcgccagccacctgtgcctggacacagacatgtttggagatggaacagaaaatggcaaggagatcgtggtgaacccctgtgagagcagcctgatgagccagcactgggacatggtgagcagctag

SEQ ID NO: 327483 - DNA, 1554 bp, Artificial Sequence
  derived and/or modified sequence
atggcccaggacgagagctgcccccccagcgacgccgactgggacgacctttgggaccagtttgatgagcgacggtatctgaatgccaaaaagtggcgcgtgggagatgacccatacaagctatatgccttcaaccagagggagagcgaacggattagctcaaaccgggccatcccagatactcggcatctgaggtgtacattgctggtgtactgcaccgacttacctcccacctccataatcatcacctttcataatgaagcccggagtacactgctaaggaccatccgctccgtgctgaatcgtactcctacccatctaatcagggaaatcattcttgttgatgatttcagcaatgatccagatgactgcaaacaattaatcaaactgcccaaggtgaagtgtttgagaaataatgaaagacagggactggtccgaagtagaatcaggggagcagatattgcccagggcacaaccctgacatttctggattcccattgtgaagttaatcgggactggctacagccccttctgcaccgtgtgaaggaagactacactagggtcgtgtgtccagtcatcgatataatcaacctagatactttcacttacattgaaagtgcctctgagcttagaggaggtttcgactggtcactccactttcagtgggaacagctcagccccgaacagaaggcccgccggctcgacccaacggaacctatcagaacccccatcatcgcagggggacttttcgtgatcgacaaggcttggtttgactacctagggaaatacgacatggacatggatatctggggcggggaaaatttcgagatttcctttagggtttggatgtgcggcggatctttagaaattgtgccttgttctagggtggggcacgtgttcaggaaaaaacacccttatgtgttcccggacggtaacgccaatacctatattaaaaacactaagcgaacggccgaagtttggatggatgagtacaagcagtactactatgcagcccggccattcgccttggaaagaccatttgggaacgtggaatccagactggacctgcggaagaatctgagatgtcagagcttcaagtggtacctggaaaacatctaccctgaactgagcatccctaaagaatcaagcatccagaagggcaacatccggcaacgacagaaatgcctcgaaagccagcgccaaaataaccaggaaaccccaaacctgaaacttagcccctgcgctaaggtaaagggcgaagacgctaagtcacaggtctgggccttcacgtacactcagcagatccttcaggaggaactctgcttgtcagttattaccttgttccctggggcccctgtggttttggttctgtgtaaaaacggggatgatcgacagcaatggaccaagaccggcagccacattgaacacatcgccagtcatttgtgcctcgacactgacatgtttggtgacggtaccgagaacggcaaagagatcgttgttaatccttgtgagagttcattgatgtctcagcattgggacatggtctccagctag

SEQ ID NO: 327484 - DNA, 1554 bp, Artificial Sequence
  derived and/or modified sequence
atggcccaggatgaaagttgcccgcctagtgatgctgactgggacgatctgtgggatcaattcgacgagcgcagatacctcaatgccaagaaatggcgagtcggtgacgacccctacaagctttatgcttttaatcagcgcgagtccgagcgtatctcatcaaatcgcgcaataccagacacccgacatctgaggtgcactctcctggtgtactgtactgatctcccgccaacaagtatcattattaccttccataacgaggcaaggtccactttgctgaggacaattcgctctgttctgaatcgaacccctactcatcttattcgtgagatcatcctggtggatgacttcagcaacgaccccgatgactgtaaacagctcatcaagctccctaaggtcaagtgtcttcgcaataatgaacgacagggactggtcagatcccgtatccggggagcagatattgcgcagggcacgacccttacatttttagacagtcactgtgaagtgaaccgcgactggttacagcccctactgcatagagtgaaagaagactacactagggttgtgtgtccggtgatagacataattaatctggacacattcacatacatagagagtgcctccgagctcagaggtggtttcgactggagtttacacttccagtgggagcagctctcccctgagcaaaaagctcgaaggctggatcccacagaaccaatccgcacacccattatcgccggagggctgttcgtgattgacaaggcctggtttgattatctaggcaagtacgatatggacatggacatctgggggggagaaaacttcgaaatatctttccgagtttggatgtgtgggggatccctcgagatcgtgccttgttcaagggtgggacacgtttttcgcaaaaaacacccatatgtgtttccggatggaaatgcaaatacatacatcaaaaacaccaaacgtactgccgaagtttggatggatgaatacaagcaatattattacgctgctagaccattcgccctggaacggcctttcgggaacgtggagtcgaggctagacctgcggaaaaacttacgctgtcagtctttcaagtggtatctggagaacatatatccagagctttccattcctaaggaaagtagcattcaaaagggtaacattcgtcagaggcagaaatgtctggaaagccaaagacagaataaccaggaaacacccaatcttaagctatccccttgtgccaaggtgaaaggggaagatgcaaaaagccaggtgtgggcattcacctacactcagcagatcctgcaggaggagctgtgtctatctgtcattacactctttcccggtgcccctgttgtcctggttttatgtaagaacggagacgacaggcagcagtggacaaaaacagggagccacatcgagcatatcgcctctcatctatgtctcgatacggatatgtttggagatggcactgagaacgggaaagaaatcgtcgtcaacccctgtgagagcagccttatgtcccaacactgggatatggtttcatcttag

SEQ ID NO: 327485 - DNA, 1831 bp, Artificial Sequence
  derived and/or modified sequence
gttcttctgggtaaccaagaggaagttggaggtgccgacgggacctgaagtgcagacccctaagaattgaaaacagtttgcagctgacacctgagcctacccatttcgttctgaatgcaatttcagcagcccactgtagctcccctgctctccctcccaggcatggaacagccatggcccaagatgagtcgtgtccaccttcggacgctgactgggacgacctgtgggaccagtttgatgagcggcggtatctgaatgccaaaaagtggcgcgttggtgacgacccctataagctgtatgctttcaaccagcgggagagtgagcggatctccagcaatcgggccatcccggacactcgccatctgagatgcacactgctggtgtattgcacggaccttccacccactagcatcatcatcaccttccacaacgaggcccgctccacgctgctcaggaccatccgcagtgtattaaaccgcacccctacgcatctgatccgggaaatcatattagtggatgacttcagcaatgaccctgatgactgtaaacagctcatcaagttgcccaaggtgaaatgcttgcgcaataatgaacggcaaggtctggtccggtcccggattcggggcgctgacatcgcccagggcaccactctgactttcctcgacagccactgtgaggtgaacagggactggctccagcctctgttgcacagggtcaaagaggactacacgcgggtggtgtgccctgtgatcgatatcattaacctggacaccttcacctacatcgagtctgcctcggagctcagaggggggtttgactggagcctccacttccagtgggagcagctctccccagagcagaaggctcggcgcctggaccccacggagcccatcaggactcctatcatagctggagggctcttcgtgatcgacaaagcttggtttgattacctggggaaatatgatatggacatggacatctggggtggggagaactttgaaatctccttccgagtgtggatgtgcgggggcagcctagagatcgtcccctgcagccgagtggggcacgtcttccggaagaagcacccctacgttttccctgatggaaatgccaacacgtatataaagaacaccaagcggacagctgaagtgtggatggatgaatacaagcaatactattacgctgcccggccattcgccctggagaggcccttcgggaatgttgagagcagattggacctgaggaagaatctgcgctgccagagcttcaagtggtacctggagaatatctaccctgaactcagcatccccaaggagtcctccatccagaagggcaatatccgacagagacagaagtgcctggaatctcaaaggcagaacaaccaagaaaccccaaacctaaagttgagcccctgtgccaaggtcaaaggcgaagatgcaaagtcccaggtatgggccttcacatacacccagcagatcctccaggaggagctgtgcctgtcagtcatcaccttgttccctggcgccccagtggttcttgtcctttgcaagaatggagatgaccgacagcaatggaccaaaactggttcccacatcgagcacatagcatcccacctctgcctcgatacagatatgttcggtgatggcaccgagaacggcaaggaaatcgtcgtcaacccatgtgagtcctcactcatgagccagcactgggacatggtgagctcttgaggacccctgccagaagcagcaagggccatggggtggtgcttccctggaccagaacagactggaaactgggcagcaagcagcctgcaaccacctcagacatcctg

SEQ ID NO: 327486 - protein, 532 aa, Artificial Sequence
  derived and/or modified sequence
MSFPMSLARSSVPFADSGLSSSQPSDADWDDLWDQFDERRYLNAKKWRVGDDPYKLYAFNQRESERISSNRAIPDTRHLRCTLLVYCTDLPPTSIIITFHNEARSTLLRTIRSVLNRTPTHLIREIILVDDFSNDPDDCKQLIKLPKVKCLRNNERQGLVRSRIRGADIAQGTTLTFLDSHCEVNRDWLQPLLHRVKEDYTRVVCPVIDIINLDTFTYIESASELRGGFDWSLHFQWEQLSPEQKARRLDPTEPIRTPIIAGGLFVIDKAWFDYLGKYDMDMDIWGGENFEISFRVWMCGGSLEIVPCSRVGHVFRKKHPYVFPDGNANTYIKNTKRTAEVWMDEYKQYYYAARPFALERPFGNVESRLDLRKNLRCQSFKWYLENIYPELSIPKESSIQKGNIRQRQKCLESQRQNNQETPNLKLSPCAKVKGEDAKSQVWAFTYTQQILQEELCLSVITLFPGAPVVLVLCKNGDDRQQWTKTGSHIEHIASHLCLDTDMFGDGTENGKEIVVNPCESSLMSQHWDMVSS

SEQ ID NO: 327487 - DNA, 1599 bp, Artificial Sequence
  derived and/or modified sequence
atgagcttccccatgagcctggccagaagcagcgtgcccttcgccgacagcggcctgagcagcagccagcccagcgacgccgactgggacgacctgtgggaccagttcgacgagagaagatacctgaacgccaagaagtggagagtgggcgacgacccctacaagctgtacgccttcaaccagagagagagcgagagaatcagcagcaacagagccatccccgacaccagacacctgagatgcaccctgctggtgtactgcaccgacctgccccccaccagcatcatcatcaccttccacaacgaggccagaagcaccctgctgagaaccatcagaagcgtgctgaacagaacccccacccacctgatcagagagatcatcctggtggacgacttcagcaacgaccccgacgactgcaagcagctgatcaagctgcccaaggtgaagtgcctgagaaacaacgagagacagggcctggtgagaagcagaatcagaggcgccgacatcgcccagggcaccaccctgaccttcctggacagccactgcgaggtgaacagagactggctgcagcccctgctgcacagagtgaaggaggactacaccagagtggtgtgccccgtgatcgacatcatcaacctggacaccttcacctacatcgagagcgccagcgagctgagaggcggcttcgactggagcctgcacttccagtgggagcagctgagccccgagcagaaggccagaagactggaccccaccgagcccatcagaacccccatcatcgccggcggcctgttcgtgatcgacaaggcctggttcgactacctgggcaagtacgacatggacatggacatctggggcggcgagaacttcgagatcagcttcagagtgtggatgtgcggcggcagcctggagatcgtgccctgcagcagagtgggccacgtgttcagaaagaagcacccctacgtgttccccgacggcaacgccaacacctacatcaagaacaccaagagaaccgccgaggtgtggatggacgagtacaagcagtactactacgccgccagacccttcgccctggagagacccttcggcaacgtggagagcagactggacctgagaaagaacctgagatgccagagcttcaagtggtacctggagaacatctaccccgagctgagcatccccaaggagagcagcatccagaagggcaacatcagacagagacagaagtgcctggagagccagagacagaacaaccaggagacccccaacctgaagctgagcccctgcgccaaggtgaagggcgaggacgccaagagccaggtgtgggccttcacctacacccagcagatcctgcaggaggagctgtgcctgagcgtgatcaccctgttccccggcgcccccgtggtgctggtgctgtgcaagaacggcgacgacagacagcagtggaccaagaccggcagccacatcgagcacatcgccagccacctgtgcctggacaccgacatgttcggcgacggcaccgagaacggcaaggagatcgtggtgaacccctgcgagagcagcctgatgagccagcactgggacatggtgagcagctag

SEQ ID NO: 327488 - DNA, 1599 bp, Artificial Sequence
  derived and/or modified sequence
atgtcctttcctatgtccctagcgcgatctagcgtccctttcgcagactcgggtctttcctccagccagcctagcgacgcagactgggacgacctgtgggatcagtttgacgagcgccgctacctcaacgccaagaagtggagggtgggagatgacccctataaactttatgcttttaaccagcgcgaatccgaacggatttccagcaatcgagctatccccgataccaggcacctccggtgcaccttgctcgtttattgcaccgatctcccaccgacttctatcatcataacattccacaacgaagctagatcaaccctgctgaggaccattcgcagtgtcctaaatagaaccccgactcatctgatccgggagataatcttggtggatgattttagcaacgacccggatgattgtaaacagcttattaaattgccaaaagtgaagtgccttagaaataacgaaaggcagggacttgtcagatcacgcattcgaggggccgacatcgctcaggggacgacgctaacgttcctggatagtcactgtgaagtgaatagggattggctgcagcctctgttgcatcgcgttaaggaggattacactagggttgtgtgccctgtgattgatatcatcaacctcgacacttttacctacattgaatctgccagtgagcttcgcggaggtttcgattggtcactgcattttcaatgggagcaacttagccctgaacaaaaggcccgtcgcttggatcccacagaacctatccggaccccaattattgcgggcggcctcttcgtaattgacaaagcgtggttcgattatctcggcaagtatgacatggacatggatatctggggcggggagaacttcgagatttccttcagggtatggatgtgcgggggttcgcttgaaattgtgccctgctcccgagtcgggcatgtctttagaaagaaacacccctatgttttccccgacggaaatgctaatacttatatcaaaaataccaaacggaccgccgaggtgtggatggatgaatacaaacaatactactacgctgccagacctttcgccctcgagaggcccttcgggaacgtcgaaagtcgcttggacctgcgtaagaacctgcggtgccagtccttcaagtggtacttagaaaatatctaccctgagctctctattcccaaagagtcctccatacagaagggcaacattcgccagcgacagaagtgtctagaaagccaaaggcagaataaccaagaaactcctaacttgaaacttagcccatgcgcgaaggttaagggcgaagatgcaaaaagccaggtttgggcattcacttacacgcagcaaattctgcaagaggaactgtgtctcagtgtgataaccctctttccaggagcccctgttgtccttgtattgtgcaaaaacggcgatgatagacagcaatggacgaaaacaggctcccatatcgagcatatcgctagtcatctctgcctggacacggacatgttcggcgacgggaccgaaaatggtaaggagatcgtggtgaatccttgcgagtctagtctgatgtcacagcactgggatatggtctcatcctag

SEQ ID NO: 327489 - DNA, 1599 bp, Artificial Sequence
  derived and/or modified sequence
atgtccttccccatgagcctggcccggagctctgtgccctttgctgacagcggcctgagcagcagccagcccagtgatgctgactgggatgacctgtgggaccagtttgatgaaagacgctacctgaatgccaagaagtggagggtgggagatgacccctacaagctgtatgccttcaaccagcgggagagcgagcgcatcagcagcaacagagccatcccagacaccaggcacctgcgctgcaccctgctggtgtactgcacagacctgccccccaccagcatcatcatcaccttccacaatgaggcccggagcaccctgctgcggaccatccgctctgtgctgaacagaacacccacccacctgatccgggagatcatcctggtggatgacttcagcaatgaccctgatgactgcaagcagctgatcaagctgcccaaggtgaagtgcctgaggaacaatgaaaggcagggcctggtgcgcagccgcatcagaggagctgacatcgcccagggcaccaccctgaccttcctggacagccactgtgaggtgaacagagactggctgcagcccctgctgcaccgggtgaaggaggactacaccagggtggtgtgccctgtgattgacatcatcaacctggacaccttcacctacattgaaagtgccagcgagctgcggggcggctttgactggagcctgcacttccagtgggagcagctgagccctgagcagaaggcccggcggctggaccccacagagcccatccgcacccccatcatcgccggcggcctgtttgtgattgacaaggcctggtttgactacctgggcaagtatgacatggacatggacatctggggcggggagaactttgagatctccttccgggtgtggatgtgtggcggcagcctggagatcgtgccctgcagccgggtgggccacgtgttcaggaagaagcacccctacgtgtttcctgatggaaatgccaacacctacatcaagaacaccaagaggacagctgaggtgtggatggatgagtacaagcagtactactatgctgcccggccctttgccctggagcggccctttggaaatgtggagagccggctggacctgaggaagaacctgcgctgccagagcttcaagtggtacctggagaacatctacccagagctgagcatccccaaggagagcagcatccagaagggcaacatccggcagaggcagaagtgcctggagagccagaggcagaacaaccaggagacccccaacctgaagctgagcccctgtgccaaggtgaagggagaagatgccaagagccaggtgtgggccttcacctacacccagcagatcctgcaggaggagctgtgcctgagcgtcatcaccctcttccctggggcccctgtggtgctggtgctgtgcaagaatggagatgaccggcagcagtggaccaagacaggcagccacatcgagcacatcgccagccacctgtgcctggacacagacatgtttggagatggaacagaaaatggcaaggagatcgtggtgaacccctgtgagagcagcctgatgagccagcactgggacatggtgagcagctag

SEQ ID NO: 327490 - DNA, 1599 bp, Artificial Sequence
  derived and/or modified sequence
atgagcttccccatgagcctggcccggagcagcgtgcccttcgccgatagtggactgagcagtagccagcccagcgatgcggattgggatgacctgtgggaccaattcgatgaacgcagatatctgaacgccaaaaaatggagggtaggggacgacccttacaaactgtacgcattcaatcagagagagtcagaacgcatcagttccaaccgagcgatccctgataccaggcaccttcggtgtaccctgctcgtttactgtaccgaccttccgcctacaagcatcatcatcactttccataacgaggcacgaagcaccttgctgcgtacgatccggagtgtgctgaaccgaacaccaacacacttaattcgcgagattatcttggtggatgatttctcaaacgacccagacgactgtaaacaactgattaaactccccaaagtaaaatgcctacgaaataacgaacgccagggattagttcgaagccggatccggggcgccgatattgcccagggtacaacgctcacctttctggacagtcactgtgaggtgaatcgcgactggctgcaaccgctcctacatagggtgaaagaggattatactcgcgttgtctgccctgtcattgatatcatcaacctggatacatttacttacatcgagtccgcttccgagctgcggggagggttcgattggtcactgcatttccagtgggagcagctgtctcccgaacaaaaggcaagaaggctggatcctaccgaacccattcgaactcctataatagctggcgggttatttgtcattgacaaagcgtggttcgactacctcggcaaatacgatatggacatggacatctgggggggtgaaaattttgaaatttcgttcagggtgtggatgtgcggcggcagtcttgagattgtgccatgctctcgcgtaggccatgtcttccggaagaaacacccttacgtattccccgatggaaacgccaatacctacataaaaaatactaagcgaaccgcagaagtgtggatggatgagtataaacagtactattacgccgcccgtcctttcgctttggaaagacccttcggtaatgttgaaagtaggttggacttgaggaaaaaccttaggtgtcagagctttaagtggtacctggaaaacatttatcctgaactttccatccccaaggagtcttcaattcaaaaggggaacattagacaacggcagaaatgtctggaaagccagaggcaaaacaaccaggaaacacctaacctgaaactttctccctgtgccaaagtcaagggtgaggatgctaaaagtcaagtatgggcttttacgtacacacagcagatccttcaggaggaactctgcctgtctgttatcacccttttccccggcgcacctgtggtgctggttctgtgcaagaacggagacgacaggcagcaatggacgaaaacaggcagccacatagagcacattgcttcacacctgtgcctggacaccgacatgttcggcgacggtacagagaatggtaaagagatcgttgtgaatccttgcgaaagctccttaatgtcccagcattgggatatggtatcatcttag

SEQ ID NO: 327491 - DNA, 1599 bp, Artificial Sequence
  derived and/or modified sequence
atgagcttcccaatgagtctggcgagatcgagtgtcccgttcgccgactcaggcctgtcctctagccagccctccgacgcggactgggacgacctgtgggaccaattcgacgaaaggaggtatctgaacgctaaaaagtggagggttggtgacgacccctataagctatatgccttcaaccagagggagtcagaacgaattagttcgaatcgggctattcccgatactagacacctgcgctgtaccctgctcgtgtactgtactgacctaccacccaccagtatcattatcacattccacaacgaggctaggtctactctcctgcggaccatcagatccgtgctgaatcgtaccccgacgcacctgatcagagaaattatcctcgtagacgactttagtaatgatccggatgattgcaagcagcttatcaagcttcccaaggtgaaatgtctgaggaataacgagagacagggacttgttcggagcagaattcgaggggcagatattgcacagggcaccacactgaccttcctcgactcacattgtgaggtgaatcgcgactggctgcagccgctgctccatcgcgtgaaggaagactacaccagggtagtgtgtccggttattgatatcatcaacctggacacgttcacgtatatcgaaagtgcctccgagctgaggggtggctttgactggagcctgcacttccagtgggagcagctgagtcccgaacagaaagctagaagattagaccctacggagcccatcaggactcctattattgctggaggtctctttgtgatcgacaaggcatggtttgactacttgggcaagtacgatatggacatggatatttggggaggggagaatttcgaaatcagcttcagggtttggatgtgcgggggatctctggaaatagtgccctgctctcgcgttggccacgtttttagaaaaaagcatccgtacgtgtttccagacggcaatgcgaacacctatattaaaaatacaaaacgtactgccgaagtctggatggatgagtataagcagtattattatgccgctcgccctttcgccctcgaaagaccttttggtaatgtggaaagtcgcctcgatctgaggaagaatttgagatgccagagcttcaaatggtacctagagaatatctatccggaactcagcatacccaaggagagttctatccagaaaggtaacatccggcagaggcagaagtgcctggagagccaacgccagaacaaccaagaaacccccaatctgaaactatcaccttgtgcaaaagtgaaaggtgaggacgccaagtcacaagtttgggccttcacatacacgcagcagatccttcaggaagagttgtgcctgtctgtgattacactgttccccggagccccagtcgtgttggtgctctgtaagaatggggatgatcggcagcagtggaccaaaaccgggtcccatatagagcatatagccagtcacctgtgcctcgatacagacatgtttggggacggcaccgagaatggcaaggagattgtggtcaatccctgtgaatcctccctgatgtcccagcactgggatatggtgtccagctag

SEQ ID NO: 327492 - DNA, 2496 bp, Artificial Sequence
  derived and/or modified sequence
actgaaaaattagctggtgcctgtatttcaggcttattgtttcctaggatctcagggagatcaggccacgtggtctgtggattaattaaggcacccagataattggctattaatagatggccaattgatggctgccagctgggtgctgaattgactaatgtccttatggtgggcaggtggtctttatcagaagaggagctagctgaaagactttactaattaaagggtgaatcaggaaaagaagataagaggtagcttttttccccaccacttggtgtgatgttttacagtttacaaagcatttatatccacagttgcctcatttgatccttactgcgactttgtgaggtttggtccttgtttttcaaggtggctgggatgagcccttgggcgcctcaggtgcctgtatcacccactcctccctaccaaagagggcatcttcctacaggaggacaccttgctgtatgtcatttcccatgtctcttgcaagaagctcagttccatttgcagactcaggtctttcttcaagtcagccttcggacgctgactgggacgacctgtgggaccagtttgatgagcggcggtatctgaatgccaaaaagtggcgcgttggtgacgacccctataagctgtatgctttcaaccagcgggagagtgagcggatctccagcaatcgggccatcccggacactcgccatctgagatgcacactgctggtgtattgcacggaccttccacccactagcatcatcatcaccttccacaacgaggcccgctccacgctgctcaggaccatccgcagtgtattaaaccgcacccctacgcatctgatccgggaaatcatattagtggatgacttcagcaatgaccctgatgactgtaaacagctcatcaagttgcccaaggtgaaatgcttgcgcaataatgaacggcaaggtctggtccggtcccggattcggggcgctgacatcgcccagggcaccactctgactttcctcgacagccactgtgaggtgaacagggactggctccagcctctgttgcacagggtcaaagaggactacacgcgggtggtgtgccctgtgatcgatatcattaacctggacaccttcacctacatcgagtctgcctcggagctcagaggggggtttgactggagcctccacttccagtgggagcagctctccccagagcagaaggctcggcgcctggaccccacggagcccatcaggactcctatcatagctggagggctcttcgtgatcgacaaagcttggtttgattacctggggaaatatgatatggacatggacatctggggtggggagaactttgaaatctccttccgagtgtggatgtgcgggggcagcctagagatcgtcccctgcagccgagtggggcacgtcttccggaagaagcacccctacgttttccctgatggaaatgccaacacgtatataaagaacaccaagcggacagctgaagtgtggatggatgaatacaagcaatactattacgctgcccggccattcgccctggagaggcccttcgggaatgttgagagcagattggacctgaggaagaatctgcgctgccagagcttcaagtggtacctggagaatatctaccctgaactcagcatccccaaggagtcctccatccagaagggcaatatccgacagagacagaagtgcctggaatctcaaaggcagaacaaccaagaaaccccaaacctaaagttgagcccctgtgccaaggtcaaaggcgaagatgcaaagtcccaggtatgggccttcacatacacccagcagatcctccaggaggagctgtgcctgtcagtcatcaccttgttccctggcgccccagtggttcttgtcctttgcaagaatggagatgaccgacagcaatggaccaaaactggttcccacatcgagcacatagcatcccacctctgcctcgatacagatatgttcggtgatggcaccgagaacggcaaggaaatcgtcgtcaacccatgtgagtcctcactcatgagccagcactgggacatggtgagctcttgaggacccctgccagaagcagcaagggccatggggtggtgcttccctggaccagaacagactggaaactgggcagcaagcagcctgcaaccacctcagacatcctggactgggaggtggaggcagagccccccaggacaggagcaactgtctcagggaggacagaggaaaacatcacaagccaatggggctcaaagacaaatcccacatgttctcaaggccgttaagttccagtcctggccagtcattccctgattggtatctggagacagaaacctaatgggaagtgtttattgttccttttcctacaaaggaagcagtctctggaggccagaaagaaaagccttctttttcactaggccaggactacattgagagatgaagaatggaggttgtttccaaaagaaataaagagaaacttagaagttgtctctgg

SEQ ID NO: 327493 - protein, 57 aa, Artificial Sequence
  derived and/or modified sequence
MAKRKEENFSSPKNAKRPRQEELEDFDKDGDEDECKGTTLTAAEVGIIESIHLKNFM

SEQ ID NO: 327494 - DNA, 174 bp, Artificial Sequence
  derived and/or modified sequence
atggccaagagaaaggaggagaacttcagcagccccaagaacgccaagagacccagacaggaggagctggaggacttcgacaaggacggcgacgaggacgagtgcaagggcaccaccctgaccgccgccgaggtgggcatcatcgagagcatccacctgaagaacttcatgtag

SEQ ID NO: 327495 - DNA, 174 bp, Artificial Sequence
  derived and/or modified sequence
atggctaaacgtaaggaggagaatttctcttcccctaaaaacgccaaacgtcctcggcaggaagagctggaagattttgataaggacggcgatgaagacgagtgcaagggtaccactctgacggctgcagaggttggtataattgaaagcatccatttgaaaaattttatgtag

SEQ ID NO: 327496 - DNA, 174 bp, Artificial Sequence
  derived and/or modified sequence
atggccaagaggaaggaggagaacttcagcagccccaagaatgccaagaggccccggcaggaggagctggaggactttgacaaggatggagatgaagatgagtgcaagggcaccaccctgacagctgctgaggtgggcatcatcgagagcatccacctgaagaacttcatgtag

SEQ ID NO: 327497 - DNA, 174 bp, Artificial Sequence
  derived and/or modified sequence
atggccaagcggaaggaggagaacttcagcagccccaagaacgccaaaaggccacgtcaagaggagctggaagattttgataaggacggggatgaagacgaatgtaaaggcaccacactcactgccgccgaggttggaattatcgaatccatccatttaaaaaactttatgtag

SEQ ID NO: 327498 - DNA, 174 bp, Artificial Sequence
  derived and/or modified sequence
atggctaaacggaaggaagagaatttctcaagcccgaagaacgccaaaaggccgcgtcaggaggagttggaggatttcgataaagatggcgacgaggatgaatgcaaggggaccactctcactgctgctgaggttgggattatcgaatcaatccatctaaagaattttatgtag

SEQ ID NO: 327499 - DNA, 544 bp, Artificial Sequence
  derived and/or modified sequence
gataatgactgtgcctgtatgtatggacacgatgttctttcttctcatagctcaaaatgttctaaagataaaatctaatgatttcttataggaaggctaggcttggtgggtacaagtaagaaagccaagcagagagaagcttcctggtccttctccacctttccctttcctccagtctggactttgccttctccacctccttggaagacaggctgctcatcccattgtggtgtctcggctggtgtatgttttctgcctaggatggagtttcgctcttcttgcccaggctagagtgcaatggcacggtctcagctcactgcaacctccgcctcccgggttcaagtgattctcttgtctcagcctcccaaacctgatggccaaaagaaaggaagaaaatttttcctctcctaaaaatgccaaaaggccaagacaagaagaattggaggattttgataaagatggtgacgaagacgaatgtaaaggtactactttgactgcagcagaagttggaataattgagagtattcacctaaaaaacttcatg

SEQ ID NO: 327500 - protein, 132 aa, Artificial Sequence
  derived and/or modified sequence
MESRVADAGTGETARAAGGSPAVGCTTRGPVVSAPLGAARWKLLRQVLKQKHLDDCLRHVSVRRFESFNLFSVTEGKERETEEEVGAWVQYTSIFCPEYSISLRHNSGSLNVEDVLTSFDNTGNVWSFSRGK

SEQ ID NO: 327501 - DNA, 399 bp, Artificial Sequence
  derived and/or modified sequence
atggagagcagagtggccgacgccggcaccggcgagaccgccagagccgccggcggcagccccgccgtgggctgcaccaccagaggccccgtggtgagcgcccccctgggcgccgccagatggaagctgctgagacaggtgctgaagcagaagcacctggacgactgcctgagacacgtgagcgtgagaagattcgagagcttcaacctgttcagcgtgaccgagggcaaggagagagagaccgaggaggaggtgggcgcctgggtgcagtacaccagcatcttctgccccgagtacagcatcagcctgagacacaacagcggcagcctgaacgtggaggacgtgctgaccagcttcgacaacaccggcaacgtgtggagcttcagcagaggcaagtag

SEQ ID NO: 327502 - DNA, 399 bp, Artificial Sequence
  derived and/or modified sequence
atggagtctcgggttgctgatgccggaacaggcgagactgcacgcgctgctggcggatccccagccgtagggtgcaccactcggggccctgtggtatcagctcctctgggtgccgcccgctggaaactactgcggcaggtgctgaagcagaagcacctggacgattgtctgagacacgtgtccgtgcgccgctttgaaagttttaatcttttcagcgtgacggaaggcaaagaacgcgagacggaagaggaagtgggagcatgggtacagtacacctcgatcttctgtccagaatattctatatccctccggcacaacagcgggtctttgaatgtggaagatgtgcttacatccttcgacaatacgggaaatgtctggtctttttcgcgaggcaagtag

SEQ ID NO: 327503 - DNA, 399 bp, Artificial Sequence
  derived and/or modified sequence
atggagagccgggtggctgatgctggcaccggggagacagcccgggctgctgggggcagccctgctgtgggctgcaccacccggggccctgtggtgtctgcccccctgggcgccgcccgctggaagctgctgcggcaggtgctgaagcagaagcacctggatgactgcctgcggcacgtgtctgtgagaagatttgagagcttcaacctcttctctgtgacagagggcaaggagcgggagacagaggaggaggtgggcgcctgggtgcagtacaccagcatcttctgcccagagtacagcatcagcctgcggcacaacagcggcagcctgaatgtggaggatgtgctgaccagctttgacaacacaggaaatgtgtggagcttcagccggggcaagtag

SEQ ID NO: 327504 - DNA, 399 bp, Artificial Sequence
  derived and/or modified sequence
atggagagccgggtggccgacgccggcaccggcgagaccgcccgggctgccggtggaagccctgccgtcggatgtaccacccggggaccggtagtgtctgctcccttaggggccgctaggtggaagctcctgagacaggtgttaaagcagaaacacctagatgattgcttgcgacacgtgagtgtccgtagatttgagtcattcaatctattttcagtaaccgagggaaaagagagagaaaccgaagaggaagtcggggcctgggtgcagtacacctctattttttgtccggagtattcgatttccttgcgccataactcaggctccctcaacgtcgaggacgtgctcacctcattcgataataccggtaatgtttggtctttctctcgggggaagtag

SEQ ID NO: 327505 - DNA, 399 bp, Artificial Sequence
  derived and/or modified sequence
atggaatccagggtggccgatgccggaacaggagagactgccagagccgctggcggaagcccagccgtggggtgcaccacaagaggcccagtagtgtccgccccattgggagctgcccgatggaaacttctacggcaagtgctgaagcagaaacatttagacgattgcctgagacacgttagtgtgagaagatttgaaagcttcaatctcttttcagtgacagaaggtaaagagcgcgagaccgaagaagaggtaggtgcctgggtccaatacaccagcatcttctgcccagagtactctatcagcctccgccacaattctggttcactgaatgttgaggacgtgcttacctcgttcgacaacaccggaaacgtatggtcgttttcccgcggaaaatag

SEQ ID NO: 327506 - DNA, 452 bp, Artificial Sequence
  derived and/or modified sequence
ctggcaggggacgagctgcggcggtggcacctccgggtgtggaaggctccagtgagatggagtcgcgagtcgcggacgctgggaccggcgagaccgcgcgagcagcgggcgggagtccggcagttggctgcaccactcgggggcccgtagtctcggcgcccctgggagccgcccggtggaagctcctgcggcaggttctgaagcaaaaacacctggatgattgcctgcgacatgtatctgtaagaagatttgaatcatttaatctgttttcagtaacagaaggcaaagaaagggaaactgaagaggaggttggtgcatgggtccaatatacaagcatcttctgtcctgaatacagtatctccttaaggcataatagtggatccttgaatgttgaagatgtccttaccagctttgacaatacaggaaatgtgtggagtttttctagaggaaaa

SEQ ID NO: 327507 - DNA, 76 bp, Artificial Sequence
  derived and/or modified sequence
taaaatggaatcgaatggaatcaacatcaaatggaatcaaatggaatcattgaacggaattgaatggaatcgtcat

SEQ ID NO: 327508 - DNA, 87 bp, Artificial Sequence
  derived and/or modified sequence
tggaatcatcataaaatggaatcgaatggaatcaacatcaaatggaatcaaatggaatcattgaacggaattgaatggaatcgtcat

SEQ ID NO: 327509 - DNA, 89 bp, Artificial Sequence
  derived and/or modified sequence
gaatcatcataaaatggaatcgaatggaatcaacatcaaatggaatcaaatggtctcgaatggaatcatcttcaaatggaatggaatgg

SEQ ID NO: 327510 - DNA, 95 bp, Artificial Sequence
  derived and/or modified sequence
aaattgattgaaatcatcataaaatggaatcgaagggaatcaacatcaaatggaatcaaatggaatcattgaacggaattgaatggaatcgtcat

SEQ ID NO: 327511 - DNA, 85 bp, Artificial Sequence
  derived and/or modified sequence
gaatcatcataaaatggaatcgaatggaatcaacatcaaatggaatcaaatggaatcattgaacggaattgaatggaatcgtcat

SEQ ID NO: 327512 - DNA, 86 bp, Artificial Sequence
  derived and/or modified sequence
ggaatcatcataaaatggaatcgaatggaatcatcatcaaatggaatcaaatggaatcattgaacggaattgaatggaatcgtcat

SEQ ID NO: 327513 - protein, 591 aa, Artificial Sequence
  derived and/or modified sequence
MPGFHLITQLKGMSVVLVLLPTLLLVMLTGAQRACPKNCRCDGKIVYCESHAFADIPENISGGSQGLSLRFNSIQKLKSNQFAGLNQLIWLYLDHNYISSVDEDAFQGIRRLKELILSSNKITYLHNKTFHPVPNLRNLDLSYNKLQTLQSEQFKGLRKLIILHLRSNSLKTVPIRVFQDCRNLDFLDLGYNRLRSLSRNAFAGLLKLKELHLEHNQFSKINFAHFPRLFNLRSIYLQWNRIRSISQGLTWTWSSLHNLDLSGNDIQGIEPGTFKCLPNLQKLNLDSNKLTNISQETVNAWISLISITLSGNMWECSRSICPLFYWLKNFKGNKESTMICAGPKHIQGEKVSDAVETYNICSEVQVVNTERSHLVPQTPQKPLIIPRPTIFKPDVTQSTFETPSPSPGFQIPGAEQEYEHVSFHKIIAGSVALFLSVAMILLVIYVSWKRYPASMKQLQQHSLMKRRRKKARESERQMNSPLQEYYVDYKPTNSETMDISVNGSGPCTYTISGSRECEMPHHMKPLPYYSYDQPVIGYCQAHQPLHVTKGYETVSPEQDESPGLELGRDHSFIATIARSAAPAIYLERIAN

SEQ ID NO: 327514 - DNA, 1776 bp, Artificial Sequence
  derived and/or modified sequence
atgcccgggtttcatcttattacccaactgaaaggtatgtcagtcgttctcgtgctgctgcccactctgctgttggtcatgctgacgggggcgcagcgggcctgtccaaagaattgcagatgtgacggtaagatcgtttactgcgaaagtcacgctttcgccgacatcccagaaaacatttccggcggctcacaaggtttatctttgcggttcaattccatccaaaagctgaagtctaaccaattcgccggactcaaccaattgatctggttatacctcgatcataattacatctcctcggtggacgaagatgcattccaaggcatcaggaggctgaaggagctgatcctgtcatccaacaagataacatatctgcacaacaagacctttcaccccgtgcccaacctcaggaaccttgacctgtcctataacaaattacagaccttgcaatcggagcaatttaagggtcttcgaaagcttatcatcctgcacctgcgatccaattcattaaaaactgtgcctattagggtgttccaggattgccggaatttagacttcctcgatctgggctataatcggttgagatccttgtccagaaacgccttcgctggtctcttgaaattgaaggagctgcatctggagcacaaccagtttagcaaaattaatttcgctcattttcctcgattgtttaacctccgcagtatctacttgcagtggaaccgtatccgcagcatcagtcaggggctgacatggacttggagctctttgcataatctggatttaagcggtaatgatatccagggtatagagcctgggacgttcaagtgtctgcccaacctgcagaaattaaatctcgactcgaacaagttgacaaacatcagccaggagaccgtcaatgcttggatcagcctgatatctattacactgtccggcaatatgtgggaatgtagtcgttccatctgccccctgttttactggctgaaaaacttcaagggaaataaagaatctacaatgatctgcgccggcccaaagcacatccagggagaaaaggtatctgatgctgtggagacctataatatttgtagcgaagtgcaggttgtgaacacagagcgcagtcatttagtacctcagaccccacaaaagccgctcattattccccgcccaaccatattcaaaccggacgtaacccagagcacattcgaaaccccctcgccctcgcccggtttccaaatcccgggggctgaacaggagtacgaacacgtttctttccacaagataatcgccgggagtgtggccctttttctttctgtcgctatgattctgctggtcatatatgtgtcttggaagcggtaccccgcttccatgaaacagcttcagcagcattccttaatgaaacgccggagaaagaaggcgagggagagtgaaagacagatgaatagcccactgcaagagtattatgtcgactacaagccaactaactcggagactatggacatttcggtcaacggatcaggcccttgtacgtacaccatttcaggctccagggaatgtgagatgccacatcacatgaagccactgccctactatagctacgatcagccagtgattggctattgccaagcccatcagcctcttcatgtgaccaaaggttatgaaacagtgtcacccgagcaggatgaaagtcccggactcgagctgggtcgggatcattccttcatcgcaaccatcgcccgttccgcggcccctgctatctacttagaacgaatcgccaattag

SEQ ID NO: 327515 - DNA, 1776 bp, Artificial Sequence
  derived and/or modified sequence
atgcctggcttccacctgatcacccagctgaagggcatgtctgtggtgctggtgctgctgcccaccctgctgctggtgatgctgactggagcccagagggcctgccccaagaactgccgctgtgatggcaagatcgtgtactgtgagagccacgcctttgctgacatccctgagaacatcagcggcggcagccagggcctgagcctgcgcttcaacagcatccagaagctgaagagcaaccagtttgctggcctgaaccagctgatctggctgtacctggaccacaactacatcagctctgtggatgaagatgccttccagggcatccggcggctgaaggagctgatcctgagcagcaacaagatcacctacctgcacaacaagaccttccaccctgtgcccaacctgaggaacctggacctgagctacaacaagctgcagaccctgcagagcgagcagttcaagggcctgaggaagctgatcatcctgcacctgcggagcaacagcctgaagacagtgcccatccgggtcttccaggactgcaggaacctggacttcctggacctgggctacaaccggctgcggagcctgagcagaaatgcctttgctggcctgctgaagctgaaggagctgcacctggagcacaaccagttcagcaagatcaactttgcccacttccccaggctcttcaacctgcggagcatctacctgcagtggaaccgcatccgcagcatcagccagggcctgacctggacctggagcagcctgcacaacctggacctgtctggaaatgacatccagggcatcgagcccggcaccttcaagtgcctgcccaacctgcagaagctgaacctggacagcaacaagctgaccaacatcagccaggagaccgtgaatgcctggatcagcctcatcagcatcaccctgagcggcaacatgtgggagtgcagccgcagcatctgccccctcttctactggctgaagaacttcaagggcaacaaggagagcaccatgatctgtgccggccccaagcacatccagggcgagaaggtgtctgatgctgtggagacctacaacatctgcagcgaggtgcaggtggtgaacacagagaggagccacctggtgccccagaccccccagaagcccctcatcatcccccggcccaccatcttcaagccagatgtgacccagagcacctttgagacccccagccccagccctggcttccagatccctggagctgagcaggagtatgagcacgtgtccttccacaagatcatcgccggctctgtggccctcttcctgtctgtggccatgatcctgctggtgatctacgtgtcctggaagcgctacccagcctccatgaagcagctgcagcagcacagcctgatgaagagaagaaggaagaaggcccgggagagcgagcggcagatgaacagccccctgcaggagtactacgtggactacaagcccaccaacagcgagaccatggacatctctgtgaatggcagcggcccctgcacctacaccatcagcggcagccgggagtgtgagatgccccaccacatgaagcccctgccctactacagctatgaccagcccgtcatcggctactgccaggcccaccagcccctgcacgtgaccaagggctatgaaacagtgtccccagagcaggatgagagccctggcctggagctgggccgggaccacagcttcatcgccaccatcgcccggtctgctgccccagccatctacctggagagaattgccaactag

SEQ ID NO: 327516 - DNA, 2976 bp, Artificial Sequence
  derived and/or modified sequence
ctgagcatcatcagtctctggaaagccttctgaattagacaagggctgcctcccagcacagctacaaaacactttaaacctgaccagctaaatggataaacctagcctgcatagcttttaaactggggtctcatacagcacaggaggcctacttgcttcaagaactgaaaatccagaggatgaattgctttatctgggaatggcaaaagccagcacaataaggaatgccaggtttccatttaattacgcagctgaaaggcatgagtgtggtgctggtgctacttcctacactgctgcttgttatgctcacgggtgctcagagagcttgcccaaagaactgcagatgtgatggcaaaattgtgtactgtgagtctcatgctttcgcagatatccctgagaacatttctggagggtcacaaggcttatcattaaggttcaacagcattcagaagctcaaatccaatcagtttgccggccttaaccagcttatatggctttatcttgaccataattacattagctcagtggatgaagatgcatttcaagggatccgtagactgaaagaattaattctaagctccaacaaaattacttatctgcacaataaaacatttcacccagttcccaatctccgcaatctggacctctcctacaataagcttcagacattgcaatctgaacaatttaaaggccttcggaaactcatcattttgcacttgagatctaactcactaaagactgtgcccataagagtttttcaagactgtcggaatcttgattttttggatttgggttacaatcgtcttcgaagcttgtcccgaaatgcatttgctggcctcttgaagttaaaggagctccacctggagcacaaccagttttccaagatcaactttgctcattttccacgtctcttcaacctccgctcaatttacttacaatggaacaggattcgctccattagccaaggtttgacatggacttggagttccttacacaacttggatttatcagggaatgacatccaaggaattgagccgggcacatttaaatgcctccccaatttacaaaaattgaatttggattccaacaagctcaccaatatctcacaggaaactgtcaatgcgtggatatcattaatatccatcacattgtctggaaatatgtgggaatgcagtcggagcatttgtcctttattttattggcttaagaatttcaaaggaaataaggaaagcaccatgatatgtgcgggacctaagcacatccagggtgaaaaggttagtgatgcagtggaaacatataatatctgttctgaagtccaggtggtcaacacagaaagatcacacctggtgccccaaactccccagaaacctctgattatccctagacctaccatcttcaaacctgacgtcacccaatccacctttgaaacaccaagcccttccccagggtttcagattcctggcgcagagcaagagtatgagcatgtttcatttcacaaaattattgccgggagtgtggctctctttctctcagtggccatgatcctcttggtgatctatgtgtcttggaaacgctacccagccagcatgaaacaactccagcaacactctcttatgaagaggcggcggaaaaaggccagagagtctgaaagacaaatgaattcccctttacaggagtattatgtggactacaagcctacaaactctgagaccatggatatatcggttaatggatctgggccctgcacatataccatctctggctccagggaatgtgagatgccacaccacatgaagcccttgccatattacagctatgaccagcctgtgatcgggtactgccaggcccaccagccactccatgtcaccaagggctatgagacagtgtctccagagcaggacgaaagccccggcctggagctgggccgagaccacagcttcatcgccaccatcgccaggtcggcagcaccggccatctacctagagagaattgcaaactaacgctgaagccaactcctcactggggagctccatgggggggagggagggccttcatcttaaaggagaatgggtgtccacaatcgcgcaatcgagcaagctcatcgttcctgttaaaacatttatggcatagagaaaagaaaaagagaaaaaaaaactgcttgaagagggcagcgaatgcacctgcagcattaccgggaggactgcagaactttctttgctttaaaacataaaacaaacaaaaatgctcccggatgtaaatagtaagagtgtcaagttcttataaaaatagatttcaccctagctacatataggtttgtttgtatatttgatttttctacactgcatggttcctgggctggagaaccacaggggagcaaataaacaggggtgggtgggaagctagggaaacaaccgttttcctctttaggtgtgtgtaattctcacagattttatttaaattgctttcatttattttttctttaaaaatgctgtttgttcttgttttgtttgttttaatttttttctttcctggtcaagtttctaatacaaaacatgagcattaaagcttatgttgtaccaaaagaaaatgtgctttaccacggaccacggagaaagttgaccacaaagtttgacaaaactactggaaaacccaataagtctgggtgaatgacccttcatgacaaatgccatatatggtacatgatagaaggaattttgttttgtcccattggcagccctcactgtgtaggatgcctgagagagccatgaagatctccgaatgagaagaccagcagaatcattctcatgtggactaaggctataagagagatatgaccatgggctcaatgaatgaaactgccaagctgacaaatttctaaacacaagataatgtgtaacattgctttttaaattaattatcaattagcttttgtgtagtttttatcaataaaagaaaaaatattgaaaaataaatata

SEQ ID NO: 327517 - DNA, 1776 bp, Artificial Sequence
  derived and/or modified sequence
atgcccggcttccacctgatcacccagctgaagggcatgagcgtggttctggttctgttgcctactctgttgcttgtcatgctgaccggcgctcagcgcgcctgcccaaagaactgtcgttgtgacggaaaaatcgtgtactgcgagagccacgcctttgccgatataccagagaatataagcggagggagccagggcctgtcgttgagattcaatagtatccagaagctgaagagtaatcagttcgctggactgaaccagctgatttggctgtacttggaccacaactacattagttccgtcgatgaagacgccttccagggaataaggcgcttgaaagagttgatactatccagtaataaaattacttacctgcacaacaaaacatttcacccagtacctaatctccgaaatctggacctgagctacaataagctccagacattgcagtcagaacagttcaaaggattgcgaaagctgatcatactgcacctgcgcagcaacagcttgaaaacagtgccgattcgcgtctttcaagactgccgaaacctcgattttctggaccttggttataatagattaagatcgttgtcaagaaacgcttttgccggtcttctcaaactgaaggaactgcacctggagcacaatcagttcagcaagattaattttgcacatttccctcggctgttcaaccttagatcaatctatctacagtggaatagaataagatcaatctcccagggcttgacttggacatggagtagtctgcacaacctggacctgagcggcaatgatatccagggcatcgagcccgggaccttcaagtgccttccgaatctgcagaaattaaatctggatagcaacaaactgactaacatctcgcaggagactgtgaacgcctggatctctttgatctccattaccctttccggcaacatgtgggaatgttcgaggtcaatatgtccccttttttactggcttaagaactttaaaggaaacaaggaaagcaccatgatatgcgccggccctaaacacattcaaggtgagaaggtcagcgacgccgtggaaacttacaacatctgcagtgaggtgcaggtcgttaataccgaacggagccatctggttccacagaccccccagaagccactgatcatccctaggccaaccatttttaagccagacgtgacacagtctacattcgagacaccctcaccttcgcctgggttccagattcccggggccgagcaggagtacgaacatgtctctttccataagataatcgccggttcggtggccctgtttctgagcgttgcgatgattttgctggtgatttacgtgagttggaaacggtaccctgcatctatgaagcagcttcaacagcattcactcatgaagcgaagaaggaaaaaagcccgggaatcagaacgccagatgaacagtcccttgcaagagtattatgtagattacaaaccaactaatagcgaaacaatggacatcagtgtgaacgggagcggcccctgtacctacacaataagcgggagtagagaatgcgaaatgccccaccacatgaaacccctgccatactattcctatgatcagcccgtgatcggttattgccaggcacaccagccgttgcatgtcactaaagggtatgagacagttagtccagagcaggacgagtctccaggacttgaactgggcagggaccacagcttcatcgctacgatcgctaggagtgccgcccctgcaatctatctcgaacggatagctaactag

SEQ ID NO: 327518 - DNA, 1776 bp, Artificial Sequence
  derived and/or modified sequence
atgcctgggtttcacctgataactcagttgaagggtatgtccgtcgtcctcgtcttactgccaacattactgctggtgatgctgactggagcccagcgggcatgccccaagaactgtcgatgcgatggcaagatcgtttactgcgaatcacacgcctttgcagatattccggaaaatataagcggaggatcacagggtttgtcgctgcgatttaattccatacagaaactgaaaagcaaccaatttgctggactgaatcagctcatctggctatatttagaccacaattatattagcagcgtggacgaggacgccttccagggcattcggcgtctcaaagagctgatactcagtagcaacaagatcacctacctgcataacaagacttttcatccggtgcctaatctaagaaacctggacctgagctacaataagttacagacactgcagtccgagcagtttaaaggccttaggaaactcattatcctgcatctccggtctaactccttaaaaaccgttccaataagagtgtttcaggactgcaggaatctggatttcctggatttgggctataataggctccgctcactgtcacgcaacgctttcgcagggctgctgaaactcaaggagttacacttggagcacaaccagttttcaaagatcaacttcgcacactttcctcgcctatttaatttacggagcatttatttgcagtggaatagaatcagatccataagtcagggcttgacatggacctggagtagcctgcacaacctggatttaagcgggaatgacatccagggaatcgaaccgggaacattcaaatgtctgcctaaccttcagaagctcaacctcgactccaataagctcacgaatatcagccaggagacggtgaacgcatggatctccttgatcagcataacactgtccgggaatatgtgggagtgtagtagatccatctgcccgctgttttattggctgaagaattttaagggcaataaagaaagtactatgatctgcgcaggtcctaaacatatccagggggaaaaggtgtccgatgccgtggaaacttacaatatttgcagtgaggtgcaggtggtgaatacggaaaggtcccacctcgtgccacaaacaccacagaagcctttgatcatcccccgaccaacaatctttaaaccggacgtgacacagagcaccttcgaaacccccagccctagcccaggctttcagattcctggagctgaacaggaatatgaacacgtgtcattccataaaatcatcgcaggttctgtggccctgttcctctctgtggcgatgattcttctggtcatctacgtctcttggaagagatatcccgcatcgatgaagcagctgcagcagcactccttgatgaagagacgccgaaaaaaagcccgtgagagcgagcgacagatgaacagcccactgcaggagtattatgtagactataagcctacaaacagtgagacaatggatatctcagtgaacgggtctggcccatgcacttatactatctccggcagccgggagtgcgagatgccgcatcacatgaaacccctcccctattatagctatgatcaacctgtcattggctactgccaggctcaccagccgctgcatgttaccaagggctatgagacggttagccccgaacaagatgaatctccaggactggaactggggagagatcacagcttcattgccaccatcgctcgcagcgcagctcccgcaatatacttggagcggatagcaaactag

SEQ ID NO: 327519 - DNA, 1776 bp, Artificial Sequence
  derived and/or modified sequence
atgcccggcttccacctgatcacccagctgaagggcatgagcgtggtgctggtgctgctgcccaccctgctgctggtgatgctgaccggcgcccagagagcctgccccaagaactgcagatgcgacggcaagatcgtgtactgcgagagccacgccttcgccgacatccccgagaacatcagcggcggcagccagggcctgagcctgagattcaacagcatccagaagctgaagagcaaccagttcgccggcctgaaccagctgatctggctgtacctggaccacaactacatcagcagcgtggacgaggacgccttccagggcatcagaagactgaaggagctgatcctgagcagcaacaagatcacctacctgcacaacaagaccttccaccccgtgcccaacctgagaaacctggacctgagctacaacaagctgcagaccctgcagagcgagcagttcaagggcctgagaaagctgatcatcctgcacctgagaagcaacagcctgaagaccgtgcccatcagagtgttccaggactgcagaaacctggacttcctggacctgggctacaacagactgagaagcctgagcagaaacgccttcgccggcctgctgaagctgaaggagctgcacctggagcacaaccagttcagcaagatcaacttcgcccacttccccagactgttcaacctgagaagcatctacctgcagtggaacagaatcagaagcatcagccagggcctgacctggacctggagcagcctgcacaacctggacctgagcggcaacgacatccagggcatcgagcccggcaccttcaagtgcctgcccaacctgcagaagctgaacctggacagcaacaagctgaccaacatcagccaggagaccgtgaacgcctggatcagcctgatcagcatcaccctgagcggcaacatgtgggagtgcagcagaagcatctgccccctgttctactggctgaagaacttcaagggcaacaaggagagcaccatgatctgcgccggccccaagcacatccagggcgagaaggtgagcgacgccgtggagacctacaacatctgcagcgaggtgcaggtggtgaacaccgagagaagccacctggtgccccagaccccccagaagcccctgatcatccccagacccaccatcttcaagcccgacgtgacccagagcaccttcgagacccccagccccagccccggcttccagatccccggcgccgagcaggagtacgagcacgtgagcttccacaagatcatcgccggcagcgtggccctgttcctgagcgtggccatgatcctgctggtgatctacgtgagctggaagagataccccgccagcatgaagcagctgcagcagcacagcctgatgaagagaagaagaaagaaggccagagagagcgagagacagatgaacagccccctgcaggagtactacgtggactacaagcccaccaacagcgagaccatggacatcagcgtgaacggcagcggcccctgcacctacaccatcagcggcagcagagagtgcgagatgccccaccacatgaagcccctgccctactacagctacgaccagcccgtgatcggctactgccaggcccaccagcccctgcacgtgaccaagggctacgagaccgtgagccccgagcaggacgagagccccggcctggagctgggcagagaccacagcttcatcgccaccatcgccagaagcgccgcccccgccatctacctggagagaatcgccaactag

SEQ ID NO: 327520 - protein, 348 aa, Artificial Sequence
  derived and/or modified sequence
MYTAIPQSGSPFPGSVQDPGLHVWRVEKLKPVPVAQENQGVFFSGDSYLVLHNGPEEVSHLHLWIGQQSSRDEQGACAVLAVHLNTLLGERPVQHREVQGNESDLFMSYFPRGLKYQEGGVESAFHKTSTGAPAAIKKLYQVKGKKNIRATERALNWDSFNTGDCFILDLGQNIFAWCGGKSNILERNKARDLALAIRDSERQGKAQVEIVTDGEEPAEMIQVLGPKPALKEGNPEEDLTADKANAQAAALYKVSDATGQMNLTKVADSSPFALELLISDDCFVLDNGLCGKIYIWKGRKANEKERQAALQVAEGFISRMQYAPNTQVEILPQGHESPIFKQFFKDWK

SEQ ID NO: 327521 - protein, 218 aa, Artificial Sequence
  derived and/or modified sequence
MYTAIPQSGSPFPGSVQDPGLHVWRVEKLKPVPVAQENQGVFFSGDSYLVLHNGPEEVSHLHLWIGQQSSRDEQGACAVLAVHLNTLLGERPVQHREVQGNESDLFMSYFPRGLKYQEGGVESAFHKTSTGAPAAIKKLYQVKGKKNIRATERALNWDSFNTGDCFILDLGQNIFAWCGGKSNILERNKARDLALAIRDSERQGKAQVEIVTDGEEPA

SEQ ID NO: 327522 - protein, 253 aa, Artificial Sequence
  derived and/or modified sequence
MYTAIPQSGSPFPGSVQDPGLHVWRVEKLKPVPVAQENQGVFFSGDSYLVLHNGPEEVSHLHLWIGQQSSRDEQGACAVLAVHLNTLLGERPVQHREVQGNESDLFMSYFPRGLKYQEGGVESAFHKTSTGAPAAIKKLYQVKGKKNIRATERALNWDSFNTGDCFILDLGQNIFAWCGGKSNILERNKARDLALAIRDSERQGKAQVEIVTDGEEPAEMIQVLGPKPALKEGNPEEDLTADKANAQAAALYK

SEQ ID NO: 327523 - protein, 327 aa, Artificial Sequence
  derived and/or modified sequence
MYTAIPQSGSPFPGSVQDPGLHVWRVEKLKPVPVAQENQGVFFSGDSYLVLHNGPEEVSHLHLNTLLGERPVQHREVQGNESDLFMSYFPRGLKYQEGGVESAFHKTSTGAPAAIKKLYQVKGKKNIRATERALNWDSFNTGDCFILDLGQNIFAWCGGKSNILERNKARDLALAIRDSERQGKAQVEIVTDGEEPAEMIQVLGPKPALKEGNPEEDLTADKANAQAAALYKVSDATGQMNLTKVADSSPFALELLISDDCFVLDNGLCGKIYIWKGRKANEKERQAALQVAEGFISRMQYAPNTQVEILPQGHESPIFKQFFKDWK

SEQ ID NO: 327524 - DNA, 1047 bp, Artificial Sequence
  derived and/or modified sequence
atgtacacagctattccgcagagtggatcaccgtttcccgggtccgtgcaggaccccgggcttcatgtttggcgggtcgagaaactgaaacccgtgcctgttgcacaagaaaatcaaggagtgttttttagcggagattcctacctcgtcctccataatgggcccgaagaggtaagtcatcttcatctgtggatcggccagcaaagctctagagacgaacagggcgcctgtgctgtgttggcagtgcacctgaatacactgttgggggagcggcctgtacagcatagggaggttcaggggaacgagtcagatctgttcatgagctactttccaagagggctgaagtatcaggagggaggggttgagtccgcttttcacaaaacttcaacaggagccccagctgccattaaaaagttatatcaggttaagggaaaaaaaaatatccgagctacagagagggccctaaactgggattctttcaatactggggattgcttcattctggacttgggccagaacatctttgcatggtgtggaggcaaaagtaacatcctggaacgcaataaggccagagatctcgccttggccatcagggacagcgagagacagggcaaggcacaagttgagatcgtgactgacggcgaagaacctgccgaaatgatccaggttctcggccccaagccagccctgaaggaaggcaacccggaggaggatctcacagcggacaaagccaacgctcaggcggccgcactctataaggtgtccgatgcaaccggccagatgaacctcacaaaagtggccgattcttcccctttcgccctggagcttctgattagtgacgactgttttgtgttggacaatggactctgcgggaaaatctacatctggaaggggcggaaggctaatgaaaaagaacgccaggccgccctccaggttgctgagggattcatttctcggatgcagtatgcacctaacactcaggtcgagatcctgcctcagggacacgaatcccccatatttaagcagttctttaaagattggaaatag

SEQ ID NO: 327525 - DNA, 657 bp, Artificial Sequence
  derived and/or modified sequence
atgtacacagcgattccccagtccggctcgccctttccaggatccgtgcaggatccaggcctccacgtgtggagagtggagaagttaaagccagtacccgtggcccaggagaaccagggagtgttttttagtggagactcttatctggtgttacataatggccccgaggaggtgtcacatctgcacctgtggatagggcaacaatcatccagggacgagcagggcgcttgcgccgtgctcgctgtgcatctgaatactcttctcggcgagcggcctgtgcaacaccgggaagtgcaggggaatgaatccgacctgtttatgtcctactttccaagagggctcaaatatcaggaaggtggagttgaatccgccttccacaagaccagcactggagctccagctgcaatcaagaagctgtatcaggttaaaggaaaaaaaaatatccgcgccactgaacgggccctgaactgggactcttttaataccggcgactgcttcatactcgacctcgggcagaatatcttcgcctggtgtggaggcaagagcaacatcttggaacgcaacaaagcaagggatttagcacttgctatacgcgattcggaaagacagggtaaggctcaagtagaaatagtaactgacggcgaagagcctgcttag

SEQ ID NO: 327526 - DNA, 1047 bp, Artificial Sequence
  derived and/or modified sequence
atgtacaccgccattccccaaagcggctcaccctttcccggctcagtgcaggatccaggcctccatgtgtggagagtggaaaagctgaagccagtgcctgtggcccaggaaaaccagggggtgtttttttcaggagactcttacctggtactccacaacggaccagaagaagtctcacacttgcacctctggattggacaacagagttctagggacgaacagggggcctgcgccgtgctggctgttcacctgaacacattactcggcgaacgtcctgtgcaacaccgcgaggtgcagggcaatgagagcgatctcttcatgagctacttcccgcggggcttgaagtaccaggagggcggagtggaaagtgcgttccataaaacgtccaccggcgctcctgccgctataaaaaagttatatcaggtaaaagggaagaaaaatatcagggccaccgagcgcgcactgaactgggactcgtttaatactggagattgcttcatcctggaccttggtcaaaatatctttgcttggtgtggaggaaaatcaaatattctggagcgaaacaaggcccgggatttggctctcgccatacgcgatagcgaacgtcaaggcaaggcccaagtagagatcgtgactgacggtgaggagcctgcagagatgatacaggtcctcggtccaaagccggcgcttaaggaagggaacccggaagaggacctaactgccgacaaagctaatgcccaagccgccgctctgtataaagtttcggatgctactggccagatgaaccttaccaaagtggccgacagctcacctttcgccctggaactgctcattagtgatgactgcttcgtcctcgataatggcctctgtgggaagatatacatctggaagggtcgcaaagcgaacgaaaaagagcggcaggctgctctgcaggttgctgagggattcatttcgcgcatgcagtatgctccaaatacacaagtggaaatcctccctcaggggcatgagtctcctatcttcaaacaattcttcaaagattggaagtag

SEQ ID NO: 327527 - DNA, 1047 bp, Artificial Sequence
  derived and/or modified sequence
atgtatacagccatcccgcagtcgggatctccatttcccgggagtgtgcaagaccctggcctccatgtgtggcgggtcgagaagctcaagcctgtacccgtggcacaggagaatcagggcgtgttcttttctggggactcttacctggtcctccacaacggccctgaagaagtcagtcatctgcatctgtggattggacagcagtcttcacgggacgaacaaggagcatgcgcagttctggctgtgcacttaaatacactgttaggggagaggcccgtgcaacatcgggaggttcagggcaacgagtccgatctcttcatgtcttatttccctagggggctgaagtaccaagaaggtggcgtggaatccgcattccacaaaactagcacaggcgcacctgccgcaatcaaaaagttgtatcaggtgaaaggcaaaaagaacattcgggccacagaacgggccctcaactgggactcttttaatactggggactgctttatcctggatctgggacagaatatctttgcttggtgtggcggaaagagtaatatcctcgagcgaaacaaggccagggacctcgccctggctattcgggactcagaaagacagggtaaggcccaggtggagatcgtgactgacggagaagaacctgcagaaatgattcaggtgctggggccgaaacctgcccttaaagagggaaatcctgaagaggatctgacagcagacaaagccaatgcccaggccgcagccctctataaagtgagtgacgctacagggcagatgaacctgacaaaagttgccgattcatcaccctttgcactggaactcctaatcagcgacgattgtttcgtgctagacaacggcctgtgtggcaaaatttacatttggaagggaaggaaagctaacgaaaaggagcggcaggccgctttgcaagtagccgagggctttattagccgaatgcagtatgcgcccaacacgcaggtggagatcctgccccagggacacgaaagccccatttttaaacagttctttaaggactggaagtag

SEQ ID NO: 327528 - DNA, 762 bp, Artificial Sequence
  derived and/or modified sequence
atgtatactgcaatcccacagtccggttctccttttcccgggtccgtgcaggatccaggtcttcacgtgtggcgggtggagaagctgaaacccgttcccgtggctcaggaaaatcagggggtctttttctcgggcgatagttaccttgtattacacaacggtccagaggaggttagccatctgcatctttggatagggcagcagagttcgagagatgagcaaggtgcctgcgccgttctcgccgtgcacctcaatacacttttgggagagaggccagttcagcaccgcgaagtgcaaggtaacgagagcgacctgttcatgagttattttccccggggcttaaaataccaggaggggggcgttgaaagtgcttttcacaaaaccagcaccggcgctcctgcagcgataaaaaagctctatcaggtgaaaggaaagaagaacattagagctacagaaagggcactcaattgggactcctttaacaccggtgactgcttcatcttagaccttggccaaaatatttttgcgtggtgtggcggaaagtcaaacattctggaaagaaacaaggccagagacctggcactggccatcagagatagcgaaagacagggaaaagctcaggtggaaatcgtaacagatggtgaagaaccagctgaaatgatccaagtccttggacccaaacccgctctcaaagagggaaacccagaagaggatcttactgcggacaaggcaaacgcccaagccgccgcgctgtataagtag

SEQ ID NO: 327529 - DNA, 762 bp, Artificial Sequence
  derived and/or modified sequence
atgtacaccgccattcctcagagtgggtctcccttccctggatctgtgcaggaccctgggcttcatgtgtggcgtgtagagaagctgaagcctgtgccggttgctcaggagaaccagggagtgtttttcagcggagatagctacctcgtgctgcacaacggtccagaagaggtttctcacctgcacctatggatagggcagcagtcctcacgggacgaacagggggcctgcgcggtcctcgccgtccatcttaataccctgttgggtgaacggccagtccaacaccgggaagtgcagggcaatgaatcagacctgtttatgagctatttccccaggggcctaaagtaccaagagggcggtgtagaatctgcattccataagacctctaccggagctcctgcggcaattaaaaaactgtatcaagtgaagggtaagaagaacataagggcaaccgagcgcgctctgaactgggactccttcaacacgggtgattgctttatcttagatttaggacagaacatatttgcctggtgtggtggaaagagcaatatcttggaacggaataaggcacgggatctggcccttgccattcgtgacagtgagcgtcagggtaaagcgcaagtggaaatcgtcacagatggcgaagagcccgctgagatgatccaggtgctgggcccgaagcctgcacttaaggagggtaatccagaagaggatttaaccgctgacaaggccaatgcgcaagcagccgcactgtacaaatag

SEQ ID NO: 327530 - DNA, 762 bp, Artificial Sequence
  derived and/or modified sequence
atgtacactgccatcccccaatccgggtccccttttccaggcagcgtccaggatcctggcctgcacgtgtggcgtgtggaaaaactcaaacccgtgcctgtggcacaggaaaatcagggggtgttttttagtggcgacagctacctcgtgctccacaacggtccagaagaggtgagccacctccacctatggatagggcagcaaagtagtagagacgagcagggcgcctgtgcagtcttagctgtccacctgaataccctcctaggggagcgtcccgtgcagcatcgggaggtccagggcaacgaaagtgacctgtttatgtcctatttcccccggggtctgaagtaccaggaggggggagtcgaatccgcatttcacaagacatcaaccggcgccccagcggctattaaaaagctgtaccaggtaaaaggcaagaagaacatcagagctactgagcgcgctttgaactgggattccttcaataccggtgattgtttcatcttagatcttggccagaatattttcgcctggtgcggtggaaagtctaatattctggagcgcaacaaagctagagatctcgctctcgccattcgggactcggagagacagggaaaagcccaggttgagatcgttactgatggagaagagcccgcagaaatgattcaggtgctcggcccaaagcctgcattgaaagaaggaaaccccgaagaagatctgactgcagacaaggctaatgcacaggctgcagcactgtacaaatag

SEQ ID NO: 327531 - DNA, 984 bp, Artificial Sequence
  derived and/or modified sequence
atgtacaccgcaatcccccagtctggttccccgtttcctggaagcgtgcaagatccagggctccatgtttggagggtggagaagctgaagccagtgcccgtcgctcaagaaaaccagggcgtttttttctcgggggactcatacctcgtgctacacaatgggcccgaagaggtgtcccatcttcacctgaacacactgctgggagagagacccgtccagcacagagaggttcaaggcaacgagtctgacttgttcatgtcctacttccccagagggctcaaataccaggagggaggcgttgaatcagcgttccacaagactagtacgggagcaccagccgctattaaaaagttataccaggtcaaaggtaaaaaaaacattagagctacagaaagggctctaaattgggacagtttcaacactggcgattgctttattttagacttagggcagaatatcttcgcatggtgtggcggcaaatccaacattctggagcgcaataaggcaagagacctcgcacttgctatccgggatagcgaaaggcaggggaaggcccaggtcgaaatagtgaccgatggtgaagaaccagccgagatgatccaggttctgggaccaaagcccgcgctgaaagagggaaaccctgaagaagacttgacagcggacaaggctaatgcccaggccgcagccctttacaaggtgagtgacgcaacagggcaaatgaatctgaccaaggtggcagactcttcccccttcgctctggagttattgatttccgatgactgctttgtgctcgacaatgggctgtgcggaaaaatctacatctggaagggacggaaggcgaatgaaaaggaacggcaagcagccctccaggtcgccgaagggtttatctccagaatgcagtatgcacctaacacccaagtggagatactcccccagggacatgagagcccaatcttcaagcaattcttcaaagattggaagtag

SEQ ID NO: 327532 - DNA, 1047 bp, Artificial Sequence
  derived and/or modified sequence
atgtacacagccatcccccagagcggcagccccttccctggctctgtgcaggaccccggcctgcacgtgtggagggtggagaagctgaagcctgtgcctgtggcccaggagaaccagggcgtcttcttcagcggggacagctacctggtgctgcacaatggacctgaggaggtgagccacctgcacctgtggattggccagcagagcagcagagatgagcagggcgcctgtgctgtgctggccgtgcacctgaacaccctgctgggggagaggcctgtgcagcaccgggaggtgcagggcaatgaaagtgacctcttcatgagctacttcccccggggcctgaagtaccaggagggcggcgtggagagcgccttccacaagaccagcactggagccccagctgccatcaagaagctgtaccaggtgaagggcaagaagaacatccgggccacagagcgggccctgaactgggacagcttcaacacaggagactgcttcatcctggacctgggccagaacatctttgcctggtgtggcggcaagagcaacatcctggagaggaacaaggcccgggacctggccctggccatccgggacagcgagcggcagggcaaggcccaggtggagatcgtgacagatggagaggagcctgctgagatgatccaggtgctgggccccaagccagccctgaaggagggcaaccctgaggaggacctgacagctgacaaggccaatgcccaggccgccgccctgtacaaggtgtctgatgccaccggccagatgaacctgaccaaggtggccgacagcagcccctttgccctggagctgctgatcagtgatgactgctttgtgctggacaatggcctgtgtgggaagatctacatctggaagggcaggaaggccaatgagaaggagcggcaggccgccctgcaggtggccgagggcttcatcagcaggatgcagtatgcccccaacacccaggtggagatcctgccccagggccacgagagccccatcttcaagcagttcttcaaggactggaagtag

SEQ ID NO: 327533 - DNA, 657 bp, Artificial Sequence
  derived and/or modified sequence
atgtacacagccatcccccagagcggcagccccttccctggctctgtgcaggaccccggcctgcacgtgtggagggtggagaagctgaagcctgtgcctgtggcccaggagaaccagggcgtcttcttcagcggggacagctacctggtgctgcacaatggacctgaggaggtgagccacctgcacctgtggattggccagcagagcagcagagatgagcagggcgcctgtgctgtgctggccgtgcacctgaacaccctgctgggggagaggcctgtgcagcaccgggaggtgcagggcaatgaaagtgacctcttcatgagctacttcccccggggcctgaagtaccaggagggcggcgtggagagcgccttccacaagaccagcactggagccccagctgccatcaagaagctgtaccaggtgaagggcaagaagaacatccgggccacagagcgggccctgaactgggacagcttcaacacaggagactgcttcatcctggacctgggccagaacatctttgcctggtgtggcggcaagagcaacatcctggagaggaacaaggcccgggacctggccctggccatccgggacagcgagcggcagggcaaggcccaggtggagatcgtgacagatggagaggagcccgcctag

SEQ ID NO: 327534 - DNA, 762 bp, Artificial Sequence
  derived and/or modified sequence
atgtacacagccatcccccagagcggcagccccttccctggctctgtgcaggaccccggcctgcacgtgtggagggtggagaagctgaagcctgtgcctgtggcccaggagaaccagggcgtcttcttcagcggggacagctacctggtgctgcacaatggacctgaggaggtgagccacctgcacctgtggattggccagcagagcagcagagatgagcagggcgcctgtgctgtgctggccgtgcacctgaacaccctgctgggggagaggcctgtgcagcaccgggaggtgcagggcaatgaaagtgacctcttcatgagctacttcccccggggcctgaagtaccaggagggcggcgtggagagcgccttccacaagaccagcactggagccccagctgccatcaagaagctgtaccaggtgaagggcaagaagaacatccgggccacagagcgggccctgaactgggacagcttcaacacaggagactgcttcatcctggacctgggccagaacatctttgcctggtgtggcggcaagagcaacatcctggagaggaacaaggcccgggacctggccctggccatccgggacagcgagcggcagggcaaggcccaggtggagatcgtgacagatggagaggagcctgctgagatgatccaggtgctgggccccaagccagccctgaaggagggcaaccctgaggaggacctgacagctgacaaggccaatgcccaggccgccgccctgtacaagtag

SEQ ID NO: 327535 - DNA, 984 bp, Artificial Sequence
  derived and/or modified sequence
atgtacacagccatcccccagagcggcagccccttccctggctctgtgcaggaccccggcctgcacgtgtggagggtggagaagctgaagcctgtgcctgtggcccaggagaaccagggcgtcttcttcagcggggacagctacctggtgctgcacaatggacctgaggaggtgagccacctgcacctgaacaccctgctgggggagaggcctgtgcagcaccgggaggtgcagggcaatgaaagtgacctcttcatgagctacttcccccggggcctgaagtaccaggagggcggcgtggagagcgccttccacaagaccagcactggagccccagctgccatcaagaagctgtaccaggtgaagggcaagaagaacatccgggccacagagcgggccctgaactgggacagcttcaacacaggagactgcttcatcctggacctgggccagaacatctttgcctggtgtggcggcaagagcaacatcctggagaggaacaaggcccgggacctggccctggccatccgggacagcgagcggcagggcaaggcccaggtggagatcgtgacagatggagaggagcctgctgagatgatccaggtgctgggccccaagccagccctgaaggagggcaaccctgaggaggacctgacagctgacaaggccaatgcccaggccgccgccctgtacaaggtgtctgatgccaccggccagatgaacctgaccaaggtggccgacagcagcccctttgccctggagctgctgatcagtgatgactgctttgtgctggacaatggcctgtgtgggaagatctacatctggaagggcaggaaggccaatgagaaggagcggcaggccgccctgcaggtggccgagggcttcatcagcaggatgcagtatgcccccaacacccaggtggagatcctgccccagggccacgagagccccatcttcaagcagttcttcaaggactggaagtag

SEQ ID NO: 327536 - DNA, 1047 bp, Artificial Sequence
  derived and/or modified sequence
atgtacaccgccatcccccagagcggcagccccttccccggcagcgtgcaggacccaggcctgcatgtgtggcgggtggagaaactgaaaccggtgccggtagcccaggaaaaccagggtgttttcttttcaggcgactcgtatctcgtgctacataacggtcctgaagaggtgtcccacctccacctctggataggccaacagagcagccgggatgaacagggggcttgcgctgtgcttgccgtccacctgaacactctgcttggcgaacgtcctgtgcaacaccgggaggtgcaggggaacgaatctgacctcttcatgtcttattttccccgcggcctgaagtatcaggaggggggcgttgaatccgccttccacaagacttcaaccggggctcccgcagcgatcaaaaaactatatcaggttaagggcaagaagaatatccgtgctactgaacgagctctaaactgggacagcttcaacacaggcgattgttttatcctcgacctgggccagaacattttcgcgtggtgtggtggcaagtccaacatattggaaagaaacaaggctcgcgaccttgcattggcaattagagattcggaaagacaagggaaggcccaggtagaaatcgtgactgacggcgaggagccagccgagatgatccaggtgctaggccccaagcccgctctaaaggaaggaaaccctgaagaagacctgactgccgataaagcaaacgctcaagccgcagccttatataaagtctccgatgccacaggccagatgaacctcacaaaagttgctgattcttctcccttcgccctggagctgctgattagcgacgactgttttgttcttgacaacggattatgcggtaagatatatatctggaaaggacggaaggcaaatgaaaaggaaagacaagccgcactgcaggtagccgagggttttatctccagaatgcagtacgctcctaatactcaggtggaaatcctgccccagggacacgagtcacctattttcaaacagtttttcaaagactggaagtag

SEQ ID NO: 327537 - DNA, 657 bp, Artificial Sequence
  derived and/or modified sequence
atgtacaccgccatcccccagagcggcagccccttccccggcagcgtgcaggaccccgggctgcacgtctggagagtggagaagttaaagcctgtgcctgtggctcaagagaaccagggcgtgttctttagcggggattcctacctcgtcctgcacaatggccctgaagaagtctcccacctccacctctggattgggcagcagagttcgcgagacgaacagggagcctgcgccgtgttggcagtacacctgaacaccctcctgggagaaagaccggtgcaacacagggaagttcagggcaatgagtcagatctattcatgtcatactttcccagaggactcaagtatcaggagggcggggtggaatcggcattccacaagacctcaacaggcgcaccagcggctatcaagaagctgtaccaagttaaaggaaaaaagaacatacgggcgactgaacgggctctgaactgggactcctttaacactggagactgtttcatcctggacttggggcagaatatcttcgcctggtgcggaggcaagtctaatatcctggaaagaaacaaggcgcgagacctggcgctcgcgatccgggatagcgaaagacaggggaaggcccaggtggagattgtgaccgacggggaggagcccgcctag

SEQ ID NO: 327538 - DNA, 1047 bp, Artificial Sequence
  derived and/or modified sequence
atgtacaccgccatcccccagagcggcagccccttccccggcagcgtgcaagacccaggcctccacgtgtggagggtggagaaattgaaacccgtgcccgtggcgcaagagaaccagggtgtatttttttcaggggacagctacctggttcttcataatggcccagaagaggtgtcacacttgcacttatggattggccaacagtcaagtcgtgacgagcaaggagcctgtgctgtcctggctgtgcacctgaatacacttcttggcgaaagacccgtgcagcaccgtgaggtgcagggcaatgagagtgatctgtttatgagctatttcccccgaggtctaaagtatcaagagggaggcgtcgagtctgcatttcacaagacaagcacgggcgcaccagcagctattaagaaactgtaccaagtcaagggcaagaagaatataagagcaaccgaaagagctctcaactgggactcgtttaataccggtgattgctttatcctggacctgggccaaaacatattcgcatggtgcgggggtaaatcaaatatattggagagaaataaggcccgagatttggctctcgccattcgagacagcgagaggcaagggaaggcacaggtagaaattgtcacggacggagaggagcccgcagagatgatccaggtactgggccctaaacctgccctgaaggaaggaaatccggaagaggacctgaccgctgataaggcaaatgcccaggctgccgcactttacaaagtcagcgacgcaacaggacagatgaacctaaccaaggtagccgactcatctccctttgccttggaacttctgatcagcgacgactgtttcgtgctcgacaatggactttgtggtaaaatctatatctggaaaggacgcaaggccaatgagaaggagcgccaggccgccctgcaggtggccgagggattcataagcaggatgcagtatgccccgaacacacaagtggaaattttgccacaggggcacgaatcccctattttcaaacagttcttcaaagactggaagtag

SEQ ID NO: 327539 - DNA, 1047 bp, Artificial Sequence
  derived and/or modified sequence
atgtacaccgccatcccccagagcggcagccccttccccggcagcgtgcaggacccaggattgcacgtatggagagtggagaaactgaaaccggtcccagttgcccaagaaaaccagggagtgttctttagtggagattcatatttggtgttgcacaatggcccggaggaggtgtctcatctccacctgtggatcggccagcagagcagtagagatgagcagggagcttgtgctgtgcttgctgttcatcttaatacgcttctgggtgaaaggcctgtccaacatcgagaagtgcagggcaatgaatccgatcttttcatgtcctacttcccgagaggcctcaaatatcaagaaggcggggtagaatctgcattccacaagacatcgacaggtgcgcctgcggcaatcaagaaactttaccaggtcaaaggtaaaaaaaacattagagctacggagagggcactaaattgggacagcttcaatacgggcgattgttttattttagatctggggcaaaacatttttgcctggtgtggggggaagagtaacatattggagagaaacaaagcgcgggatcttgcactcgccataagggattccgaaagacaaggcaaggcccaagtagagatcgttacggacggtgaggagcctgcagagatgatccaggtgctgggacctaagccggcgctgaaagagggcaatcccgaagaagacttgaccgccgacaaggcgaatgctcaggccgccgctctatataaggtaagcgacgccaccggccaaatgaatctgacaaaagttgcagactctagtccgtttgcattagaactgctgataagcgacgattgttttgtattggataacggcctatgtggaaaaatctacatctggaaaggacggaaggccaacgaaaaggagcggcaagccgccctacaagtagccgaaggatttatctcacgtatgcagtacgcccctaatacccaggtagagattcttccccaggggcatgagagccccatttttaaacagtttttcaaagactggaagtag

SEQ ID NO: 327540 - DNA, 762 bp, Artificial Sequence
  derived and/or modified sequence
atgtacaccgccatcccccagagcggcagccccttccccggcagcgtccaggaccccggattacacgtgtggcgcgttgaaaagctcaaacctgtaccagtggcccaggagaaccagggggtgttcttttccggggactcataccttgtgcttcacaatggaccggaagaagtgagccatttacatctgtggataggtcagcaatccagccgcgatgagcaaggggcatgtgcggttttggctgtgcacctcaacacgctcctcggggaacgccccgtgcagcaccgagaggttcagggtaacgaaagtgatctattcatgtcctatttcccacgcggacttaagtatcaagaggggggagttgagtccgcattccacaaaacttctacaggagctcctgccgcaattaagaagctctaccaggttaagggcaagaaaaacattagggcaaccgagcgggctctgaactgggactccttcaatacaggagactgctttattctggatcttgggcaaaacatatttgcgtggtgcggcggcaaaagtaacatattggaacggaacaaggcccgggaccttgccctggctattagggactccgagagacagggtaaggcacaagtggagatcgttaccgatggtgaagagcctgccgagatgattcaggtgcttggacccaagcccgctctgaaagagggtaatccggaagaagacttaactgcagacaaggcgaacgcacaggctgcggcactttacaaatag

SEQ ID NO: 327541 - DNA, 762 bp, Artificial Sequence
  derived and/or modified sequence
atgtacaccgccatcccccagagcggcagccccttccccggcagcgtgcaggatcccggattacacgtctggcgcgtggaaaagttaaagccagtcccagttgcacaggagaaccagggcgtgtttttctccggggatagctatttggtgctccataacggccctgaggaagtgagtcatctgcatttgtggatagggcaacagtcgtcacgggacgaacagggcgcttgtgctgtgctggccgtccacctcaatactctgctgggagaaagacccgtacagcacagagaagtgcaaggaaatgaaagcgatttgttcatgtcctatttccctcggggactcaaataccaagagggaggagtggagagcgctttccacaagacatcaactggagctccggctgcgataaagaagttatatcaggtgaagggaaagaaaaacatcagggccaccgagcgggcgttgaattgggactctttcaacacaggagactgcttcattctcgatctgggacagaacattttcgcttggtgcgggggaaagagcaacattctcgaacggaataaagcacgagatcttgccctggctataagagattcagagaggcaggggaaagcccaggtggaaatagtgaccgatggcgaagagcctgccgagatgatccaggtcttggggccaaaacccgcacttaaggaggggaaccctgaggaggatctcaccgcggacaaagcaaacgctcaagccgcagccctgtataagtag

SEQ ID NO: 327542 - DNA, 762 bp, Artificial Sequence
  derived and/or modified sequence
atgtacaccgccatcccccagagcggcagccccttccccggcagcgtgcaggacccaggtctacacgtctggcgtgttgagaagctcaagcctgtgccagtggcccaggagaaccagggcgtctttttttccggggactcctacctcgtcctgcacaatggaccagaggaggtaagccatttgcacttgtggatcggacagcaaagctctagggatgagcaaggagcatgcgccgttctcgcagtccacttaaacacactgttaggcgaaagacctgtccaacacagggaggtccagggcaatgagtcagacctctttatgagttacttcccccgcggactcaagtaccaagaaggcggcgtagaatcagcgttccacaagacatccacgggcgcaccagcggcaatcaaaaagctttaccaagtcaagggaaaaaaaaatattagagcaactgaaagggctctgaactgggattcatttaacacgggcgattgcttcatcttggacctcggtcagaatatttttgcttggtgtggtggcaaatctaacattcttgagcggaacaaagcccgggacctggcactcgccatacgcgactccgaacgtcaggggaaggcacaggtggagatcgtcacggacggagaggaacccgctgaaatgattcaggtgctgggccccaaacctgcgttgaaagagggcaaccctgaggaagacctgacggctgacaaagccaacgcacaggccgccgccctgtacaagtag

SEQ ID NO: 327543 - DNA, 984 bp, Artificial Sequence
  derived and/or modified sequence
atgtacaccgccatcccccagagcggcagccccttccccggcagcgtgcaggacccaggcctgcacgtgtggcgggtggaaaaactcaagccggtgcctgtagcccaggaaaaccaaggtgtgttcttttctggcgattcctatctggtgctgcataacgggcctgaagaggtgtcccacctgcacctcaatacactgctgggcgagagacctgtccaacatcgcgaggttcagggcaatgagtcagaccttttcatgtcttattttcccagaggactaaaatatcaggagggcggcgttgagagtgcatttcataagaccagcacgggggcccccgcagccattaagaaactgtatcaggttaagggaaaaaaaaacattagagccacagaacgggctctgaactgggatagcttcaataccggggactgtttcatcctagacctaggccagaatattttcgcttggtgcggcggaaagtctaatatactggaacgcaataaggcgagggatttagccctcgccatccgtgacagtgagaggcaggggaaggcgcaggtcgaaatcgtgacagacggagaggagccggcggaaatgattcaagtgcttgggcctaagcctgctctgaaagagggaaatcccgaggaagatttgaccgctgataaggcaaacgcccaggcagccgctctgtacaaagtgtcagacgctacaggccaaatgaacttaaccaaggtggccgatagttctccgtttgcgctggaacttctgatttccgatgactgtttcgtgctagacaatggcctgtgcggtaaaatctatatttggaagggaaggaaggcgaacgagaaagaaaggcaggccgccctacaggtggctgagggcttcatatcacgtatgcagtacgctccaaacacccaggtggaaattcttcctcaggggcacgagtcacccatctttaagcagttcttcaaggactggaaatag

SEQ ID NO: 327544 - DNA, 1047 bp, Artificial Sequence
  derived and/or modified sequence
atgtacactgccatcccacagagtggttcacccttccctgggagcgtgcaggacccaggcctgcacgtatggcgcgtggaaaaactgaaacccgttcctgtggcgcaggaaaaccaaggagtgtttttctcgggagatagctatctggtgttgcataacggacccgaagaggtctcgcacctacacctgtggatcgggcagcagtcaagcagagatgagcagggcgcttgcgctgttctggccgttcacctgaatacattgcttggggaaagaccagtgcagcaccgcgaagtacaagggaacgagtcggacctgttcatgtcatactttcctcgaggcctgaagtatcaagaagggggagttgagagcgcctttcacaagacctcgacaggagcacctgccgcaatcaagaaactataccaggtgaaaggcaagaaaaatatacgggcaacagaacgggcactgaattgggactctttcaacacaggagactgtttcatattagatcttggccaaaatatcttcgcatggtgcgggggtaaatcaaacatcttggagcggaataaagcccgagatctcgctttggctatccgtgatagcgagagacaggggaaggctcaggttgaaattgtgacagatggggaagaacctgctgaaatgatccaggtcctgggccctaaaccggcattgaaggaagggaatcctgaagaggacctgacggctgataaagcgaatgcccaggcagccgctttgtacaaggtttccgacgcgacaggccaaatgaatctgacaaaggtggcagattcctcaccattcgctttggagctcctcatctcagatgattgtttcgtcttggataacggtttgtgtggcaaaatctacatctggaagggccgtaaggcaaacgagaaggagcggcaggccgctctccaagttgccgagggctttatctctcgaatgcaatacgctcccaacacccaggtggaaatcctaccccaggggcatgaaagccccatcttcaaacagttcttcaaggactggaagtag

SEQ ID NO: 327545 - DNA, 657 bp, Artificial Sequence
  derived and/or modified sequence
atgtatacagccataccacagagcggctcccctttcccgggatcggtgcaggaccctggcctccatgtatggcgggtggaaaagctgaagcccgtgcccgtggcccaagaaaaccaaggtgtgttcttttctggtgatagttatctggtgttgcataacggcccagaagaggtttcccacctccacctctggataggacagcagagtagccgtgacgagcagggcgcatgtgcagtgctggcagtccacctgaacaccctgctgggagagcggccagtgcaacacagagaagtgcagggcaacgaatcagacctgttcatgtcttatttcccaaggggactgaagtaccaagagggcggtgtggagagtgcctttcataagacgtccacgggagctccagcggcaataaaaaaactgtaccaagtcaaggggaagaagaatattagagccacagaacgtgccctgaattgggattccttcaataccggggattgtttcattttagatctcggtcagaacatcttcgcttggtgtggaggaaaatcaaatattctcgagcggaacaaagcaagagatctcgccctggccatcagagatagcgaacgacagggcaaggcccaggtcgaaatcgttacagacggcgaagagccagcttag

SEQ ID NO: 327546 - DNA, 1047 bp, Artificial Sequence
  derived and/or modified sequence
atgtatacggccatcccccaatcaggaagcccattccctggttctgtgcaggatcccggacttcacgtctggcgggtggagaaactgaaacccgtgcctgtggcacaggagaaccaaggtgtgttttttagtggtgacagttaccttgtgctgcataatggacctgaggaggtgtctcatctacacttatggattggccagcagtcatcgcgggacgagcaaggggcatgcgctgtcttagcagtccatctcaataccctgctgggcgagagaccagtccagcacagggaagtgcagggtaacgaatctgatctatttatgtcttatttcccaagaggtcttaagtaccaagaagggggtgtcgaatctgcattccataagactagtacaggcgcacccgcagccatcaaaaaattgtaccaggtgaaaggaaagaagaatatccgcgcaaccgagcgtgcattgaattgggattcattcaatacaggggattgtttcattctggacctcggacagaacatttttgcttggtgcgggggaaagagcaacatcctcgaaaggaacaaagccagggacttggccctcgctatccgcgattccgagaggcagggcaaagcccaggtcgaaatcgtgactgatggagaggagccggctgagatgattcaagtcctggggcctaagcctgctctgaaagaggggaatccagaggaggatctgacagctgacaaggcaaatgctcaggcagcagccctgtacaaggtgtctgatgcaaccgggcagatgaacttgacaaaggtggccgactcatcaccattcgccctagagctgctaatctctgatgactgttttgtgctggataatggtctgtgcggcaagatctacatatggaagggtagaaaggccaacgagaaagagcgtcaggccgcactgcaggtcgctgaggggttcatcagtaggatgcagtacgcgcctaacacccaggtcgaaattttacctcagggccatgagagtccgatattcaaacagttttttaaagactggaaatag

SEQ ID NO: 327547 - DNA, 1047 bp, Artificial Sequence
  derived and/or modified sequence
atgtacaccgcgatcccacagtctggatcgccgttcccaggttccgtacaggatcccggactccacgtgtggagagtggagaaactgaagcctgtgccagttgcgcaggaaaatcagggcgtgttcttttctggtgattcttacctggtgctgcataatgggccagaggaggtttcccacctacacttgtggattggtcagcaaagttctagagacgagcagggagcttgtgctgtgctggccgtccacctgaacaccctgctcggcgagagacctgttcagcaccgtgaagtgcaaggcaatgagtccgatctgttcatgtcatacttccctcgtggtctgaaatatcaggaagggggtgtcgagtccgccttccacaagaccagcaccggcgctcccgcagcaatcaagaaactgtaccaagttaagggaaagaaaaacattcgagctaccgaacgtgcattaaattgggactctttcaatacaggagactgctttatcctggacctgggacagaatatattcgcgtggtgcggcggaaagtccaacattctggagcggaataaagcgagagaccttgctttagctatacgggacagcgaacgtcaaggcaaagcgcaggtcgagatcgttaccgacggggaagaaccggcagaaatgattcaagtcctgggacctaaacctgcgctgaaagagggaaaccccgaggaggacctgactgcagacaaggccaacgcccaagcggcagcactgtataaggtgagcgacgctacgggacagatgaatctcacaaaagtggccgactccagccctttcgctcttgaactattgatatcagacgactgtttcgtcctggataatgggctatgtgggaagatctatatatggaaagggagaaaggctaacgagaaagagcggcaggccgcactccaagtggcggaggggttcatttcgaggatgcagtacgcacctaacacacaggtggaaatactgccgcaggggcatgaatcccccattttcaaacagtttttcaaggactggaagtag

SEQ ID NO: 327548 - DNA, 762 bp, Artificial Sequence
  derived and/or modified sequence
atgtatacggcaatcccccaatccggaagcccattccccggtagcgttcaggatcctggcctgcatgtgtggagagttgagaagctgaagccagtgcctgtcgcgcaagagaatcagggtgtgttttttagcggggacagctacctggttctgcataatggtcccgaggaggtctcccacctgcacttatggattgggcagcagagtagccgtgacgagcaaggcgcttgtgcggtcctggcggtccatctgaacacgttgctgggagagagaccagttcagcaccgggaagttcaaggtaatgaatccgacctgttcatgtcctacttcccacgcggactcaaataccaggagggtggcgtggaatcggcttttcataagacctctacaggtgcgccagcagcgatcaagaaactctaccaggtgaaaggaaaaaagaatatacgcgctactgagcgcgctcttaattgggactcctttaataccggtgattgctttattctggacctgggccaaaacatatttgcctggtgcgggggaaagagtaatatcctcgaacgaaataaggctagggatctcgctctggctattagggactccgaaagacaggggaaggcccaagtggaaattgtgacagacggggaagagccagccgagatgatccaggtgctgggtcccaaacctgcattgaaagaggggaacccagaggaggacctcactgctgataaggccaatgcgcaggcggcagcgctgtataaatag

SEQ ID NO: 327549 - DNA, 762 bp, Artificial Sequence
  derived and/or modified sequence
atgtataccgcaatcccgcagagcgggagcccctttccgggttcagtgcaagaccctgggcttcatgtttggcgcgtcgaaaaactcaagcctgtgcctgtagctcaggagaaccagggcgtgttctttagtggtgattcttatctggtgctgcacaatgggcctgaagaggtctctcatctgcacctctggattggccagcagagttctcgggacgagcagggcgcttgcgctgttctcgcagttcatttgaatacgctcctcggcgaaaggccagtccaacatcgcgaagttcagggcaacgagtccgacctgttcatgagttactttcctcggggtctcaagtatcaggagggcggagtggaaagtgcctttcacaagacctccactggcgctccagccgctatcaagaagctgtatcaggtaaagggcaagaaaaacattagggctaccgaacgtgccctcaattgggattcgttcaacaccggcgactgctttattctggacctaggtcaaaatatctttgcgtggtgtggaggaaagtcgaacattctggaaaggaacaaggccagggacctggcccttgctatccgagacagcgagcgccagggcaaggcccaggtggagattgttaccgatggagaggagcctgccgagatgatccaggtcctcggacctaagccggcattgaaagagggcaaccctgaggaagatttgaccgccgacaaggccaatgcacaagccgctgccctgtataagtag

SEQ ID NO: 327550 - DNA, 762 bp, Artificial Sequence
  derived and/or modified sequence
atgtacacggccatcccacaaagcggttcccccttccccggttcagtgcaggacccaggcctgcatgtttggcgcgtagagaagctgaaaccagtcccagtggctcaggaaaatcagggcgtgtttttttctggagactcgtatctggtgctgcacaatgggcctgaagaagtcagccacctgcacctgtggatcggccagcagagttcaagagacgaacaaggcgcttgcgctgttctggccgtgcatcttaacaccttgctgggggagcggccagttcaacatcgggaagtgcaggggaacgaaagcgatctcttcatgtcctattttcccaggggcctcaaataccaggagggtggggtagaatccgctttccacaaaacgagcactggagcgccagccgcaatcaaaaagttgtaccaggtcaaaggtaaaaagaatatacgcgctaccgagcgggcactgaactgggatagttttaatactggggactgttttatacttgatttagggcagaatatatttgcatggtgtgggggtaagtctaacattctcgagcggaataaagcacgagacctcgcactggctatcagggactcggagcgccagggcaaggcgcaggtcgaaatcgtgaccgacggagaggaacccgctgaaatgatccaggtcctgggccctaagccggctctgaaagaggggaatcccgaggaggaccttaccgcagacaaagcaaatgcccaggctgccgcactgtacaaatag

SEQ ID NO: 327551 - DNA, 984 bp, Artificial Sequence
  derived and/or modified sequence
atgtatacagcaatcccccagtcagggtctccttttccaggctccgtgcaggaccctgggctccatgtgtggagagtggaaaagctcaagcccgttcccgttgcccaggaaaaccagggggtgtttttctctggagactcttatctggtgttgcataatggccctgaggaagtcagccacttacatcttaatacactcctcggagagagaccagtgcagcacagagaggtccaaggaaacgagtcagatctgtttatgagttattttcctcggggtctcaagtaccaagagggaggtgtggaatctgccttccataagacctccactggcgctcctgctgcaattaagaagttgtaccaagtaaagggcaagaagaacatcagagcgactgagagggctcttaattgggactcttttaatactggcgattgtttcattttagatttaggccagaacatctttgcctggtgcggaggcaagagtaatatattagagagaaataaagcacgcgaccttgccctcgcaatcagagattccgagagacagggcaaagcccaggtagaaatcgtgactgacggtgaggagccagctgagatgatccaggttctgggtccaaagccggcattaaaggaaggcaatccggaggaagatctgactgcagataaagccaacgcacaggccgcagccctatataaggtttccgacgcaacaggccaaatgaacctgacgaaggtggcggactcctccccattcgctctggaacttttgatctctgacgattgttttgtgttagataacggactttgcgggaagatctatatatggaaaggcagaaaggcgaacgagaaggagcgtcaggccgctttgcaggttgctgagggcttcatttctcgaatgcagtatgcgccaaatacacaggtggagatcctgccgcaggggcatgaaagccccattttcaaacagttttttaaagactggaagtag

SEQ ID NO: 327552 - DNA, 1442 bp, Artificial Sequence
  derived and/or modified sequence
gacggcctggcatacccactgcccaccccagtgactgctcttctgcttcaggcctgctggcctcccagcactgcctgcccctccctgtcgggggacatcgcctccacaccggctggggaaggagcccaggggtggggctggtgggtggggctggtggttggggcagccagagaagtaagagggaagtgagaagccgggtggggcaggctggaaggaagacgaacctacgaagcagagatctgaagacagcatgtacacagccattccccagagtggctctccattcccaggctcagtgcaggatccaggcctgcatgtgtggcgggtggagaagctgaagccggtgcctgtggcgcaagagaaccagggcgtcttcttctcgggggactcctacctagtgctgcacaatggcccagaagaggtttcccatctgcacctgtggataggccagcagtcatcccgggatgagcagggggcctgtgccgtgctggctgtgcacctcaacacgctgctgggagagcggcctgtgcagcaccgcgaggtgcagggcaatgagtctgacctcttcatgagctacttcccacggggcctcaagtaccaggaaggtggtgtggagtcagcatttcacaagacctccacaggagccccagctgccatcaagaaactctaccaggtgaaggggaagaagaacatccgtgccaccgagcgggcactgaactgggacagcttcaacactggggactgcttcatcctggacctgggccagaacatcttcgcctggtgtggtggaaagtccaacatcctggaacgcaacaaggcgagggacctggccctggccatccgggacagtgagcgacagggcaaggcccaggtggagattgtcactgatggggaggagcctgctgagatgatccaggtcctgggccccaagcctgctctgaaggagggcaaccctgaggaagacctcacagctgacaaggcaaatgcccaggccgcagctctgtataaggtctctgatgccactggacagatgaacctgaccaaggtggctgactccagcccatttgcccttgaactgctgatatctgatgactgctttgtgctggacaacgggctctgtggcaagatctatatctggaaggggcgaaaagcgaatgagaaggagcggcaggcagccctgcaggtggccgagggcttcatctcgcgcatgcagtacgccccgaacactcaggtggagattctgcctcagggccatgagagtcccatcttcaagcaatttttcaaggactggaaatgagggtgggcgtcttcctgccccatgctcccctgccccccaccacctgcctgcttgcttctctggctgcctggtcagtgcagaggtgccccctgcagatgttcaataaaggagacaagtgctttcccagctcttttcctgcaccacc

SEQ ID NO: 327553 - DNA, 835 bp, Artificial Sequence
  derived and/or modified sequence
cttacacgcgtcctggcgtgtggctctcctgcgtcctcgtttttctcgtgagccctggatctggacagtgggcccggcgcgaggccctcaactccggctgggctcccggtggcactttctgccgaccctgagatgtacccgccacgcctgcgggactgacctctagatctgaagacagcatgtacacagccattccccagagtggctctccattcccaggctcagtgcaggatccaggcctgcatgtgtggcgggtggagaagctgaagccggtgcctgtggcgcaagagaaccagggcgtcttcttctcgggggactcctacctagtgctgcacaatggcccagaagaggtttcccatctgcacctgtggataggccagcagtcatcccgggatgagcagggggcctgtgccgtgctggctgtgcacctcaacacgctgctgggagagcggcctgtgcagcaccgcgaggtgcagggcaatgagtctgacctcttcatgagctacttcccacggggcctcaagtaccaggaaggtggtgtggagtcagcatttcacaagacctccacaggagccccagctgccatcaagaaactctaccaggtgaaggggaagaagaacatccgtgccaccgagcgggcactgaactgggacagcttcaacactggggactgcttcatcctggacctgggccagaacatcttcgcctggtgtggtggaaagtccaacatcctggaacgcaacaaggcgagggacctggccctggccatccgggacagtgagcgacagggcaaggcccaggtggagattgtcactgatggggaggagcctgctga

SEQ ID NO: 327554 - DNA, 1183 bp, Artificial Sequence
  derived and/or modified sequence
tccagggggcggggggcggctgagacagcgcccagggcctcggagcaaggcgttggcaggcaagtaacagcatgtacacagccattccccagagtggctctccattcccaggctcagtgcaggatccaggcctgcatgtgtggcgggtggagaagctgaagccggtgcctgtggcgcaagagaaccagggcgtcttcttctcgggggactcctacctagtgctgcacaatggcccagaagaggtttcccatctgcacctgtggataggccagcagtcatcccgggatgagcagggggcctgtgccgtgctggctgtgcacctcaacacgctgctgggagagcggcctgtgcagcaccgcgaggtgcagggcaatgagtctgacctcttcatgagctacttcccacggggcctcaagtaccaggaaggtggtgtggagtcagcatttcacaagacctccacaggagccccagctgccatcaagaaactctaccaggtgaaggggaagaagaacatccgtgccaccgagcgggcactgaactgggacagcttcaacactggggactgcttcatcctggacctgggccagaacatcttcgcctggtgtggtggaaagtccaacatcctggaacgcaacaaggcgagggacctggccctggccatccgggacagtgagcgacagggcaaggcccaggtggagattgtcactgatggggaggagcctgctgagatgatccaggtcctgggccccaagcctgctctgaaggagggcaaccctgaggaagacctcacagctgacaaggcaaatgcccaggccgcagctctgtataaggtctctgatgccactggacagatgaacctgaccaaggtggctgactccagcccatttgcccttgaactgctgatatctgatgactgctttgtgctggacaacgggctctgtggcaagatctatatctggaaggggcgaaaagcgaatgagaaggagcggcaggcagccctgcaggtggccgagggcttcatctcgcgcatgcagtacgccccgaacactcaggtggagattctgcctcagggccatgagagtcccatcttcaagcaatttttcaaggactggaaatgagggtgggcgtcttcctgccccatgctcccctgccccccaccacctgcctgcttgcttctctggct

SEQ ID NO: 327555 - DNA, 1151 bp, Artificial Sequence
  derived and/or modified sequence
gactcaccgggggcggctcctggccgcgcacctccagggggcggggggcggctgagacagcgcccagggcctcggagcaaggcgttggcagatctgaagacagcatgtacacagccattccccagagtggctctccattcccaggctcagtgcaggatccaggcctgcatgtgtggcgggtggagaagctgaagccggtgcctgtggcgcaagagaaccagggcgtcttcttctcgggggactcctacctagtgctgcacaatggcccagaagaggtttcccatctgcacctgtggataggccagcagtcatcccgggatgagcagggggcctgtgccgtgctggctgtgcacctcaacacgctgctgggagagcggcctgtgcagcaccgcgaggtgcagggcaatgagtctgacctcttcatgagctacttcccacggggcctcaagtaccaggaaggtggtgtggagtcagcatttcacaagacctccacaggagccccagctgccatcaagaaactctaccaggtgaaggggaagaagaacatccgtgccaccgagcgggcactgaactgggacagcttcaacactggggactgcttcatcctggacctgggccagaacatcttcgcctggtgtggtggaaagtccaacatcctggaacgcaacaaggcgagggacctggccctggccatccgggacagtgagcgacagggcaaggcccaggtggagattgtcactgatggggaggagcctgctgagatgatccaggtcctgggccccaagcctgctctgaaggagggcaaccctgaggaagacctcacagctgacaaggcaaatgcccaggccgcagctctgtataaggtctctgatgccactggacagatgaacctgaccaaggtggctgactccagcccatttgcccttgaactgctgatatctgatgactgctttgtgctggacaacgggctctgtggcaagatctatatctggaaggggcgaaaagcgaatgagaaggagcggcaggcagccctgcaggtggccgagggcttcatctcgcgcatgcagtacgccccgaacactcaggtggagattctgcctcagggccatgagagtcccatcttcaagcaatttttcaaggactggaaatga

SEQ ID NO: 327556 - DNA, 865 bp, Artificial Sequence
  derived and/or modified sequence
gctcccctcttcaactttagcactttctaatgctgacatctgtgattctgtgacattccccacttagaggaagttcgtctgcggtttcactggatctgaagacagcatgtacacagccattccccagagtggctctccattcccaggctcagtgcaggatccaggcctgcatgtgtggcgggtggagaagctgaagccggtgcctgtggcgcaagagaaccagggcgtcttcttctcgggggactcctacctagtgctgcacaatggcccagaagaggtttcccatctgcacctgtggataggccagcagtcatcccgggatgagcagggggcctgtgccgtgctggctgtgcacctcaacacgctgctgggagagcggcctgtgcagcaccgcgaggtgcagggcaatgagtctgacctcttcatgagctacttcccacggggcctcaagtaccaggaaggtggtgtggagtcagcatttcacaagacctccacaggagccccagctgccatcaagaaactctaccaggtgaaggggaagaagaacatccgtgccaccgagcgggcactgaactgggacagcttcaacactggggactgcttcatcctggacctgggccagaacatcttcgcctggtgtggtggaaagtccaacatcctggaacgcaacaaggcgagggacctggccctggccatccgggacagtgagcgacagggcaaggcccaggtggagattgtcactgatggggaggagcctgctgagatgatccaggtcctgggccccaagcctgctctgaaggagggcaaccctgaggaagacctcacagctgacaaggcaaatgcccaggccgcagctctgtataag

SEQ ID NO: 327557 - DNA, 930 bp, Artificial Sequence
  derived and/or modified sequence
agggggcggggggcggctgagacagcgcccagggcctcggagcaaggcgttggcaggagaggctttagcctagacagctgagtgtgaggaacagtgattcccattgatccttgttccctccgtgggtcacagagtccagaacttaagagccacccaagatctgaagacagcatgtacacagccattccccagagtggctctccattcccaggctcagtgcaggatccaggcctgcatgtgtggcgggtggagaagctgaagccggtgcctgtggcgcaagagaaccagggcgtcttcttctcgggggactcctacctagtgctgcacaatggcccagaagaggtttcccatctgcacctgtggataggccagcagtcatcccgggatgagcagggggcctgtgccgtgctggctgtgcacctcaacacgctgctgggagagcggcctgtgcagcaccgcgaggtgcagggcaatgagtctgacctcttcatgagctacttcccacggggcctcaagtaccaggaaggtggtgtggagtcagcatttcacaagacctccacaggagccccagctgccatcaagaaactctaccaggtgaaggggaagaagaacatccgtgccaccgagcgggcactgaactgggacagcttcaacactggggactgcttcatcctggacctgggccagaacatcttcgcctggtgtggtggaaagtccaacatcctggaacgcaacaaggcgagggacctggccctggccatccgggacagtgagcgacagggcaaggcccaggtggagattgtcactgatggggaggagcctgctgagatgatccaggtcctgggccccaagcctgctctgaaggagggcaaccctgaggaagacctcacagctgacaaggcaaatgcccaggccgcagctctgtataag

SEQ ID NO: 327558 - DNA, 839 bp, Artificial Sequence
  derived and/or modified sequence
gtggcacatttgattattttgcaaactctggaagaccttggctgagggtctaggtggactgtctgagatctgaagacagcatgtacacagccattccccagagtggctctccattcccaggctcagtgcaggatccaggcctgcatgtgtggcgggtggagaagctgaagccggtgcctgtggcgcaagagaaccagggcgtcttcttctcgggggactcctacctagtgctgcacaatggcccagaagaggtttcccatctgcacctgtggataggccagcagtcatcccgggatgagcagggggcctgtgccgtgctggctgtgcacctcaacacgctgctgggagagcggcctgtgcagcaccgcgaggtgcagggcaatgagtctgacctcttcatgagctacttcccacggggcctcaagtaccaggaaggtggtgtggagtcagcatttcacaagacctccacaggagccccagctgccatcaagaaactctaccaggtgaaggggaagaagaacatccgtgccaccgagcgggcactgaactgggacagcttcaacactggggactgcttcatcctggacctgggccagaacatcttcgcctggtgtggtggaaagtccaacatcctggaacgcaacaaggcgagggacctggccctggccatccgggacagtgagcgacagggcaaggcccaggtggagattgtcactgatggggaggagcctgctgagatgatccaggtcctgggccccaagcctgctctgaaggagggcaaccctgaggaagacctcacagctgacaaggcaaatgcccaggccgcagctctgtataag

SEQ ID NO: 327559 - DNA, 1703 bp, Artificial Sequence
  derived and/or modified sequence
gacagcgcccagggcctcggagcaaggcgttggcagatctgaagacagcatgtacacagccattccccagagtggctctccattcccaggctcagtgcaggatccaggcctgcatgtgtggcgggtggagaagctgaagccggtgcctgtggcgcaagagaaccagggcgtcttcttctcgggggactcctacctagtgctgcacaatggcccagaagaggtttcccatctgcacctcaacacgctgctgggagagcggcctgtgcagcaccgcgaggtgcagggcaatgagtctgacctcttcatgagctacttcccacggggcctcaagtaccaggaaggtggtgtggagtcagcatttcacaagacctccacaggagccccagctgccatcaagaaactctaccaggtgaaggggaagaagaacatccgtgccaccgagcgggcactgaactgggacagcttcaacactggggactgcttcatcctggacctgggccagaacatcttcgcctggtgtggtggaaagtccaacatcctggaacgcaacaaggcgagggacctggccctggccatccgggacagtgagcgacagggcaaggcccaggtggagattgtcactgatggggaggagcctgctgagatgatccaggtcctgggccccaagcctgctctgaaggagggcaaccctgaggaagacctcacagctgacaaggcaaatgcccaggccgcagctctgtataaggtctctgatgccactggacagatgaacctgaccaaggtggctgactccagcccatttgcccttgaactgctgatatctgatgactgctttgtgctggacaacgggctctgtggcaagatctatatctggaaggggcgaaaagcgaatgagaaggagcggcaggcagccctgcaggtggccgagggcttcatctcgcgcatgcagtacgccccgaacactcaggtggagattctgcctcagggccatgagagtcccatcttcaagcaatttttcaaggactggaaatgagggtgggcgtcttcctgccccatgctcccctgccccccaccacctgcctgcttgcttctctggctgcctggtcagtgcagaggtgccccctgcagatgttcaataaaggagacaagtgctttcccagctcttttcctgcaccacctgccctgggctgattctcactgtcacccacctattcacctgggttcatccccatgctgggggtggagtagcacacagatgacaattggacagccttggaggggccagagctgctttgcatgacagaggagtcccagccaggcttgcagggactgccatgaacccaatagggaggtggcacagtgccaggcctcaggatcagttgcatccgggtgttcagttcagtctcacattcccaacagggagaaggttgtggcaatgggcttgggatgcagttccatttaaggcagtatttcttcggatgccctaataaagcactgccaggcagcttcaagtgacatatgcccactgagcaagagaggacagcctttcacaattgtaccaagcctggcttattacttcgtaggcacattgcccagcatgtttggctggtgagcccagggccactgcagggctgtgcgaaaagcaccaggctagcatggacagtcttcagtctggttcttaccctgcctctgtgatcctaggc

SEQ ID NO: 327560 - DNA, 1047 bp, Artificial Sequence
  derived and/or modified sequence
atgtacaccgccatcccccagagcggcagccccttccccggcagcgtgcaggaccccggcctgcacgtgtggagagtggagaagctgaagcccgtgcccgtggcccaggagaaccagggcgtgttcttcagcggcgacagctacctggtgctgcacaacggccccgaggaggtgagccacctgcacctgtggatcggccagcagagcagcagagacgagcagggcgcctgcgccgtgctggccgtgcacctgaacaccctgctgggcgagagacccgtgcagcacagagaggtgcagggcaacgagagcgacctgttcatgagctacttccccagaggcctgaagtaccaggagggcggcgtggagagcgccttccacaagaccagcaccggcgcccccgccgccatcaagaagctgtaccaggtgaagggcaagaagaacatcagagccaccgagagagccctgaactgggacagcttcaacaccggcgactgcttcatcctggacctgggccagaacatcttcgcctggtgcggcggcaagagcaacatcctggagagaaacaaggccagagacctggccctggccatcagagacagcgagagacagggcaaggcccaggtggagatcgtgaccgacggcgaggagcccgccgagatgatccaggtgctgggccccaagcccgccctgaaggagggcaaccccgaggaggacctgaccgccgacaaggccaacgcccaggccgccgccctgtacaaggtgagcgacgccaccggccagatgaacctgaccaaggtggccgacagcagccccttcgccctggagctgctgatcagcgacgactgcttcgtgctggacaacggcctgtgcggcaagatctacatctggaagggcagaaaggccaacgagaaggagagacaggccgccctgcaggtggccgagggcttcatcagcagaatgcagtacgcccccaacacccaggtggagatcctgccccagggccacgagagccccatcttcaagcagttcttcaaggactggaagtag

SEQ ID NO: 327561 - DNA, 657 bp, Artificial Sequence
  derived and/or modified sequence
atgtacaccgccatcccccagagcggcagccccttccccggcagcgtgcaggaccccggcctgcacgtgtggagagtggagaagctgaagcccgtgcccgtggcccaggagaaccagggcgtgttcttcagcggcgacagctacctggtgctgcacaacggccccgaggaggtgagccacctgcacctgtggatcggccagcagagcagcagagacgagcagggcgcctgcgccgtgctggccgtgcacctgaacaccctgctgggcgagagacccgtgcagcacagagaggtgcagggcaacgagagcgacctgttcatgagctacttccccagaggcctgaagtaccaggagggcggcgtggagagcgccttccacaagaccagcaccggcgcccccgccgccatcaagaagctgtaccaggtgaagggcaagaagaacatcagagccaccgagagagccctgaactgggacagcttcaacaccggcgactgcttcatcctggacctgggccagaacatcttcgcctggtgcggcggcaagagcaacatcctggagagaaacaaggccagagacctggccctggccatcagagacagcgagagacagggcaaggcccaggtggagatcgtgaccgacggcgaggagcccgcctag

SEQ ID NO: 327562 - DNA, 762 bp, Artificial Sequence
  derived and/or modified sequence
atgtacaccgccatcccccagagcggcagccccttccccggcagcgtgcaggaccccggcctgcacgtgtggagagtggagaagctgaagcccgtgcccgtggcccaggagaaccagggcgtgttcttcagcggcgacagctacctggtgctgcacaacggccccgaggaggtgagccacctgcacctgtggatcggccagcagagcagcagagacgagcagggcgcctgcgccgtgctggccgtgcacctgaacaccctgctgggcgagagacccgtgcagcacagagaggtgcagggcaacgagagcgacctgttcatgagctacttccccagaggcctgaagtaccaggagggcggcgtggagagcgccttccacaagaccagcaccggcgcccccgccgccatcaagaagctgtaccaggtgaagggcaagaagaacatcagagccaccgagagagccctgaactgggacagcttcaacaccggcgactgcttcatcctggacctgggccagaacatcttcgcctggtgcggcggcaagagcaacatcctggagagaaacaaggccagagacctggccctggccatcagagacagcgagagacagggcaaggcccaggtggagatcgtgaccgacggcgaggagcccgccgagatgatccaggtgctgggccccaagcccgccctgaaggagggcaaccccgaggaggacctgaccgccgacaaggccaacgcccaggccgccgccctgtacaagtag

SEQ ID NO: 327563 - DNA, 984 bp, Artificial Sequence
  derived and/or modified sequence
atgtacaccgccatcccccagagcggcagccccttccccggcagcgtgcaggaccccggcctgcacgtgtggagagtggagaagctgaagcccgtgcccgtggcccaggagaaccagggcgtgttcttcagcggcgacagctacctggtgctgcacaacggccccgaggaggtgagccacctgcacctgaacaccctgctgggcgagagacccgtgcagcacagagaggtgcagggcaacgagagcgacctgttcatgagctacttccccagaggcctgaagtaccaggagggcggcgtggagagcgccttccacaagaccagcaccggcgcccccgccgccatcaagaagctgtaccaggtgaagggcaagaagaacatcagagccaccgagagagccctgaactgggacagcttcaacaccggcgactgcttcatcctggacctgggccagaacatcttcgcctggtgcggcggcaagagcaacatcctggagagaaacaaggccagagacctggccctggccatcagagacagcgagagacagggcaaggcccaggtggagatcgtgaccgacggcgaggagcccgccgagatgatccaggtgctgggccccaagcccgccctgaaggagggcaaccccgaggaggacctgaccgccgacaaggccaacgcccaggccgccgccctgtacaaggtgagcgacgccaccggccagatgaacctgaccaaggtggccgacagcagccccttcgccctggagctgctgatcagcgacgactgcttcgtgctggacaacggcctgtgcggcaagatctacatctggaagggcagaaaggccaacgagaaggagagacaggccgccctgcaggtggccgagggcttcatcagcagaatgcagtacgcccccaacacccaggtggagatcctgccccagggccacgagagccccatcttcaagcagttcttcaaggactggaagtag

SEQ ID NO: 327564 - protein, 718 aa, Artificial Sequence
  derived and/or modified sequence
MSRGYSENNNFLNNNNQMVLDMILYPLIGIPQTINWETIARLVPGLTPKECAKRFDELKSSGSSPVDNQYNSLMAAGESPVETLATYIKSSLLDIHGEFQETPVGHDAVSKTGRHSIASTRNCSSESENCTTHNGGEMTEESEGPNMVIHVCDEAKNLKEDFTCPRDLLISEMKYFAEYLSMDAQRWEEVDISVHCDVHIFNWLIKYIKRNTKENKDCEMPTLEPGNVISILISSEFLKMDSLVEQCIQYCHKNMNAIVATPCNMNCINANLLTRIADLFSHNEVDDLKDKKDKFKSKLFCKKIERLFDPEYLNPDSRSNAATLYRCCLCKKLLTKETERRIPCIPGKINVDRRGNIVYIHIRDKTWDVHEYLNSLFEELKSWRDVYWRLWGTINWLTCSRCYQAFLCIEFSHCQYHSETVVYPTAASSLNTVGTGIYPCCNQKVLRFDPTQLTKGCKVRDHMVTLRDQGEGGDLPSCPTARMLDDLHKYRDVIVVPFSKDTVSDVGVGLCDEKGIECDVLLEPNTPWGPKTGELNAFLSLKNWTLQLKQQSLFSEEEEYTTGSEVTEDEVGDEEEVSKKQRKKEKPKKFTRQPKKQVSSPCAQRKEKALEKSASRDVSPFVMSMQKNKWDATRSLRFNQDAQREDDQRRMTEITGHLIKMRLGDLDRVKSKEAKEFAGGIYSRLEAQIKASVPVSARQSSSEKNTRSKSRFGQGRPA

SEQ ID NO: 327565 - DNA, 2157 bp, Artificial Sequence
  derived and/or modified sequence
atgagcagaggctacagcgagaacaacaacttcctgaacaacaacaaccagatggtgctggacatgatcctgtaccccctgatcggcatcccccagaccatcaactgggagaccatcgccagactggtgcccggcctgacccccaaggagtgcgccaagagattcgacgagctgaagagcagcggcagcagccccgtggacaaccagtacaacagcctgatggccgccggcgagagccccgtggagaccctggccacctacatcaagagcagcctgctggacatccacggcgagttccaggagacccccgtgggccacgacgccgtgagcaagaccggcagacacagcatcgccagcaccagaaactgcagcagcgagagcgagaactgcaccacccacaacggcggcgagatgaccgaggagagcgagggccccaacatggtgatccacgtgtgcgacgaggccaagaacctgaaggaggacttcacctgccccagagacctgctgatcagcgagatgaagtacttcgccgagtacctgagcatggacgcccagagatgggaggaggtggacatcagcgtgcactgcgacgtgcacatcttcaactggctgatcaagtacatcaagagaaacaccaaggagaacaaggactgcgagatgcccaccctggagcccggcaacgtgatcagcatcctgatcagcagcgagttcctgaagatggacagcctggtggagcagtgcatccagtactgccacaagaacatgaacgccatcgtggccaccccctgcaacatgaactgcatcaacgccaacctgctgaccagaatcgccgacctgttcagccacaacgaggtggacgacctgaaggacaagaaggacaagttcaagagcaagctgttctgcaagaagatcgagagactgttcgaccccgagtacctgaaccccgacagcagaagcaacgccgccaccctgtacagatgctgcctgtgcaagaagctgctgaccaaggagaccgagagaagaatcccctgcatccccggcaagatcaacgtggacagaagaggcaacatcgtgtacatccacatcagagacaagacctgggacgtgcacgagtacctgaacagcctgttcgaggagctgaagagctggagagacgtgtactggagactgtggggcaccatcaactggctgacctgcagcagatgctaccaggccttcctgtgcatcgagttcagccactgccagtaccacagcgagaccgtggtgtaccccaccgccgccagcagcctgaacaccgtgggcaccggcatctacccctgctgcaaccagaaggtgctgagattcgaccccacccagctgaccaagggctgcaaggtgagagaccacatggtgaccctgagagaccagggcgagggcggcgacctgcccagctgccccaccgccagaatgctggacgacctgcacaagtacagagacgtgatcgtggtgcccttcagcaaggacaccgtgagcgacgtgggcgtgggcctgtgcgacgagaagggcatcgagtgcgacgtgctgctggagcccaacaccccctggggccccaagaccggcgagctgaacgccttcctgagcctgaagaactggaccctgcagctgaagcagcagagcctgttcagcgaggaggaggagtacaccaccggcagcgaggtgaccgaggacgaggtgggcgacgaggaggaggtgagcaagaagcagagaaagaaggagaagcccaagaagttcaccagacagcccaagaagcaggtgagcagcccctgcgcccagagaaaggagaaggccctggagaagagcgccagcagagacgtgagccccttcgtgatgagcatgcagaagaacaagtgggacgccaccagaagcctgagattcaaccaggacgcccagagagaggacgaccagagaagaatgaccgagatcaccggccacctgatcaagatgagactgggcgacctggacagagtgaagagcaaggaggccaaggagttcgccggcggcatctacagcagactggaggcccagatcaaggccagcgtgcccgtgagcgccagacagagcagcagcgagaagaacaccagaagcaagagcagattcggccagggcagacccgcctag

SEQ ID NO: 327566 - DNA, 2157 bp, Artificial Sequence
  derived and/or modified sequence
atgtcaagagggtattccgaaaataacaactttttaaataacaacaatcaaatggtgctcgacatgatactctatccacttattggcatccctcaaactatcaattgggagactattgcccgacttgtgcctgggctgactccaaaagaatgcgccaaacgattcgatgagctgaaatcttccggcagctctcctgtcgacaaccagtacaattcacttatggctgcgggcgaatctcctgtggaaactcttgcaacttatatcaaatcaagcctgcttgatattcatggcgagtttcaagagacacctgtcggacatgatgccgtatctaaaactggtcgccacagtatcgccagtacaaggaattgttcaagtgagagcgagaactgtaccacacataatggtggggagatgactgaggagtcagaagggccaaacatggttattcacgtttgtgacgaggccaagaatctgaaggaggacttcacctgcccaagagatctgcttatttcggagatgaaatactttgcagagtacctctctatggacgctcagcgatgggaggaagtggatataagcgtccattgcgacgtccacatctttaactggttgatcaagtacatcaagcggaacactaaagagaataaagattgtgaaatgccaacactggagcccggaaatgttatttccattttaatctcttccgagtttctgaagatggactccctggttgaacagtgtatccaatactgccacaagaatatgaacgcgatcgtcgccacgccatgcaatatgaattgtattaatgctaatctcctgaccagaattgcggacctcttctcccacaacgaagtggatgatcttaaagacaagaaagataaattcaagagtaaactgttttgcaagaaaatagagagactgttcgatccagaatacttaaatccagatagccgctcaaacgccgctacactgtaccgatgctgcctgtgcaaaaaattgctgacgaaagaaaccgaacgtagaattccttgcattccaggaaagatcaatgttgatcggagaggtaacatcgtgtatattcatatcagggataagacttgggacgttcacgagtatctcaactctctttttgaggaactcaaatcctggagagatgtgtattggaggctgtggggcacaatcaattggcttacatgttcccgttgctatcaggctttcctctgtatcgagttctctcactgtcagtatcactccgaaacagtggtgtatcctacagccgccagttcccttaacactgtcggcacagggatctacccctgctgtaatcagaaagtactgcgtttcgaccccacccagctgactaaaggttgcaaagtccgcgaccatatggtaacccttagagaccagggcgagggcggtgatctgccatcatgtccgactgcccgaatgcttgatgatctccacaaatatcgggatgtaatcgttgttccgttcagcaaggacaccgtgtcagacgtgggcgtgggcctttgtgatgaaaagggcatagaatgcgacgtgctcctggaacctaacacgccatggggacctaaaactggagagcttaatgcgtttctcagcctgaaaaactggacactgcaactgaagcaacagagtctgttcagcgaagaagaggagtacacgaccggatccgaagttactgaagatgaggtaggcgacgaggaggaagtttctaagaaacaacgcaaaaaagagaaacccaaaaaattcactagacagcccaaaaaacaggtcagctctccttgtgcccagcggaaagagaaagccctcgaaaagtcagcttctagagatgtgtcaccctttgtaatgtctatgcagaagaacaaatgggatgccactcgatctttaagattcaatcaggacgcccagagagaagacgaccagcgccggatgacagagataacagggcacctcatcaagatgcgcctaggagatctggaccgtgtgaaatccaaagaggcaaaggagtttgccgggggtatttattcccgcctggaggctcaaattaaggcttcagtgccagtaagcgctcgccagtctagtagtgagaagaatacaagatctaaatcccggttcggacagggccggccggcctag

SEQ ID NO: 327567 - DNA, 2157 bp, Artificial Sequence
  derived and/or modified sequence
atgtcacggggatattcggagaataataatttcctaaacaataacaaccagatggtcttagacatgattctgtaccccctcattggcataccccagaccatcaactgggaaacaatcgctaggctggtacccggtctgacgccgaaggagtgcgccaagcgattcgacgagctcaaatcttccggcagttcccccgtcgacaaccagtataactccctaatggctgccggggaatccccggttgaaacactggcaacatatatcaaatcctccctgctggatattcatggagagttccaggagacacccgtgggtcatgatgccgtgtccaagactggtagacacagcatcgcaagtacaagaaactgctcatccgagagcgaaaattgtacaactcataacggcggggagatgaccgaagagagtgaggggccaaatatggttattcatgtgtgtgacgaggccaaaaacctaaaggaggactttacttgcccaagggacctgctaatttccgaaatgaagtacttcgccgaatacttgtcaatggatgctcagcggtgggaagaggttgatatttctgtacactgtgatgtgcacatttttaattggctaattaagtacattaagaggaacacaaaggagaacaaggactgcgagatgcccactctcgagcccggcaacgtgatctcaattctgatcagctcagaattcctgaagatggactccttggtagaacaatgtattcagtattgccacaaaaacatgaacgctatcgtggccacgccttgcaacatgaattgtataaatgctaacttactaacccgaatcgcagacctgttttctcacaatgaggtcgacgatctgaaggataaaaaggacaaattcaagtcaaaactgttctgtaagaagattgagcggcttttcgacccagaatatctgaatcccgattccagaagtaatgccgccactttatatcggtgttgtctctgtaaaaaactcctcactaaagagaccgaacgacgtataccctgtattccagggaagatcaatgtggacagaaggggcaatatcgtgtacattcacataagagacaagacctgggatgtccacgaatacctgaatagcctgttcgaggagctgaagtcgtggcgcgacgtgtactggaggttgtggggcacaatcaactggctcacctgtagtagatgctaccaggctttcctgtgtatcgaattctcccactgtcagtaccattctgaaacggtggtatatccaaccgctgccagctccttgaacaccgttggaaccgggatctacccatgttgtaatcagaaggttctgaggttcgatcccacccagctgacaaaaggctgcaaggtcagggatcacatggtgaccctcagagaccagggagagggtggagacctcccatcctgtccgactgccaggatgctggacgacctccataaatacagggatgtaatcgttgtcccctttagtaaggatacagtctccgacgttggcgttggtctgtgcgatgaaaaagggattgaatgcgacgtcctattggaacctaacaccccctgggggccaaagacgggcgagctgaatgccttcctgtcccttaaaaactggacactgcaactgaagcaacagtctctcttctcagaggaagaagaatacacaacgggaagtgaggttacggaagacgaggtaggagacgaagaggaggtatcgaaaaagcagcgcaagaaggagaaacctaaaaaattcaccaggcagcccaagaagcaggtgtccagtccctgcgctcagcgaaaggagaaggctctggagaagagtgcctcccgggacgtttccccatttgttatgagcatgcaaaaaaacaagtgggacgccacgagaagcctgagatttaaccaggatgcccagcgggaagacgaccagcggcgcatgaccgagataactggccacttgatcaaaatgaggcttggagacctggaccgcgtgaaaagcaaagaggcaaaggaatttgccggaggaatttatagccggctcgaggctcagatcaaggcctctgttcctgtgagcgcccgacaatcttctagcgagaagaacacccggtctaagagtcggtttgggcagggacgtcctgcctag

SEQ ID NO: 327568 - DNA, 2157 bp, Artificial Sequence
  derived and/or modified sequence
atgtctcgaggctacagtgagaacaataattttctgaataataataaccaaatggtgctggacatgatcctctatccacttattgggattcctcaaactataaattgggagacaatcgctaggcttgttcccggcctgactccaaaagagtgcgcgaagcggtttgacgagctgaaaagctctgggtccagccccgtcgataatcagtataactcccttatggcagctggtgagtcacctgtggagactcttgctacctacatcaaatcctcgctgctggatattcacggcgagtttcaggagacgccggttggccatgatgcagttagtaagactgggcgccactcaatagcttccaccagaaactgctcctccgagtcagaaaactgtaccacacacaatggtggggagatgactgaggaatcagaggggcctaatatggttatccacgtgtgtgacgaggcaaagaatctgaaagaggattttacttgtccacgggatctgttaatctccgagatgaagtactttgctgaatacctgagtatggacgcccagcgctgggaggaagtggacatatcagtgcactgtgacgttcatatattcaattggctcatcaaatacatcaagcggaacacaaaagagaataaagactgcgaaatgccaactttggaaccggggaacgttatcagcatcctgatttcaagtgagtttctgaagatggacagtttggtcgaacaatgtattcagtattgtcataaaaacatgaacgccatcgtggccacaccctgtaacatgaattgtatcaacgctaacttactgactcgcatcgcagatctgtttagtcataatgaagtcgacgacctcaaagataaaaaggataagttcaaaagcaaactcttctgcaagaagattgagcgtttgttcgatccggagtacctgaacccggattcacgatctaatgccgctaccttatacagatgttgtctgtgtaaaaagctactgactaaggagaccgagcgtagaataccttgcataccgggaaaaattaacgtcgataggcgtggcaatattgtttacatccacatccgggacaaaacttgggacgtgcatgagtacctgaatagtctgtttgaagagctgaagagttggagagatgtctattggagactgtgggggacaataaactggctgacctgttccagatgctaccaagcattcctgtgcatcgagtttagccactgccagtaccacagtgaaactgtggtctatcccactgccgcttcatcactcaataccgtcggtacaggtatttatccatgctgcaatcaaaaggttcttcgattcgatcctacacagcttaccaagggctgtaaggtcagagaccatatggtaactttgcgggatcagggggagggcggagatttgcctagctgtccaacggccaggatgctggacgacctccacaagtacagggacgtgattgttgtccccttctctaaggacacagtgtctgatgtcggggtgggactctgtgacgaaaagggcattgagtgcgacgtgcttttggaacctaacaccccctggggccccaaaactggcgagttaaatgcttttctctctctgaagaactggaccctgcaactgaaacagcagtcactgtttagcgaagaggaggaatatactaccggttctgaggtgaccgaagacgaagttggggacgaagaggaggtgtccaaaaaacagaggaaaaaggagaaacccaagaagttcacccgacagccaaaaaaacaggtgtccagcccatgtgcccaacgcaaggagaaggctcttgaaaagtccgcctcacgggacgtgagtccctttgtgatgtctatgcaaaagaataagtgggatgcgactcgttccctgcgcttcaaccaggacgctcaacgggaagacgaccagcgcaggatgaccgagatcaccgggcacttgatcaaaatgcgactcggcgacctcgatcgcgtgaagagcaaagaggctaaggaattcgccggtggaatctacagtcgactggaagcacaaataaaagccagtgtgcctgtatcggccaggcagtcctcctccgagaagaacacccgaagcaaatctcgctttggccaggggcggcctgcttag

SEQ ID NO: 327569 - DNA, 2157 bp, Artificial Sequence
  derived and/or modified sequence
atgagccggggctacagcgagaacaacaacttcctgaacaacaacaaccagatggtgctggacatgatcctgtaccccctcatcggcatcccccagaccatcaactgggagaccatcgcccggctggtgcccggcctgacccccaaggaatgtgccaagagatttgatgagctgaagagcagcggcagcagccctgtggacaaccagtacaacagcctgatggccgccggggagagccctgtggagaccctggccacctacatcaagagcagcctgctggacatccacggggagttccaggagacccctgtgggccatgatgctgtgtccaagacaggccgccacagcatcgccagcaccaggaactgcagcagcgagagcgagaactgcaccacccacaacggcggggagatgacagaggagagcgagggccccaacatggtgatccacgtgtgtgatgaggccaagaacctgaaggaggacttcacctgcccccgggacctgctgatcagcgagatgaagtactttgctgagtacctgtccatggatgcccagcgctgggaggaggtggacatctctgtgcactgtgatgtgcacatcttcaactggctgatcaagtacatcaagaggaacaccaaggagaacaaggactgtgagatgcccaccctggagcctggaaatgtcatcagcatcctgatcagcagcgagttcctgaagatggacagcctggtggagcagtgcatccagtactgccacaagaacatgaatgccatcgtggccaccccctgcaacatgaactgcatcaatgccaacctgctgaccagaattgctgacctcttcagccacaatgaggtggatgacctgaaggacaagaaggacaagttcaagagcaagctgttctgcaagaagattgaaagactctttgatcctgagtacctgaacccagacagccgcagcaatgctgccaccctgtaccgctgctgcctgtgcaagaagctgctgaccaaggagacagagcggcgcatcccctgcatccctgggaagatcaacgtggacagaagaggcaacatcgtgtacatccacatccgggacaagacctgggatgtgcatgagtacctgaacagcctgtttgaggagctgaagtcctggagagatgtgtactggaggctgtggggcaccatcaactggctgacctgcagccgctgctaccaggccttcctgtgcatcgagttcagccactgccagtaccacagcgagaccgtggtgtaccccacagctgccagcagcctgaacacagtgggcaccggcatctacccctgctgcaaccagaaggtgctgcgctttgaccccacccagctgaccaagggctgcaaggtgcgggaccacatggtgaccctgcgggaccagggcgagggcggggacctgcccagctgccccacagccaggatgctggatgacctgcacaagtacagagatgtgattgtggtgcccttcagcaaggacacagtgtctgatgtgggcgtgggcctgtgtgatgagaagggcattgaatgtgatgtgctgctggagcccaacaccccctggggccccaagacaggagagctgaatgccttcctgagcctgaagaactggaccctgcagctgaagcagcagagcctcttcagcgaggaggaggagtacaccaccggcagcgaggtgacagaagatgaggtgggagatgaggaggaggtgtccaagaagcagaggaagaaggagaagcccaagaagttcacccggcagcccaagaagcaggtgagcagcccctgtgcccagaggaaggagaaggccctggagaagagcgccagcagagatgtgagcccctttgtgatgtccatgcagaagaacaagtgggatgccaccaggagcctgcgcttcaaccaggatgcccagagagaagatgaccagaggaggatgacagagatcaccggccacctgatcaagatgaggctgggggacctggacagagtgaagagcaaggaggccaaggagtttgctgggggcatctacagccggctggaggcccagatcaaggcctctgtgcctgtgtctgcccggcagagcagcagcgagaagaacaccaggagcaagagccgcttcggccagggccgcccagcctag

SEQ ID NO: 327570 - DNA, 2157 bp, Artificial Sequence
  derived and/or modified sequence
atgagccggggctacagcgagaacaacaacttcctgaacaacaacaaccagatggtgcttgacatgatcctatatccccttatcggaattccccagacgatcaattgggagacaatcgccagactcgtccctggacttacccccaaagaatgcgcaaagagatttgatgaattgaagtcgtccgggtccagccctgtagataatcagtacaacagcttgatggctgctggagagtcccctgtagagaccctggccacttatattaagagcagtctactcgacatccatggtgagtttcaagaaacacccgtgggtcatgacgctgtgtctaaaaccgggcgtcacagtatagcctcaacccgcaactgctcttcggagagtgaaaattgcaccacacacaacggaggcgaaatgacagaagagagcgaaggccctaatatggtaatacacgtatgcgatgaagctaaaaatcttaaggaagactttacctgcccgcgtgatttgctgatcagcgaaatgaaatacttcgccgagtatctgagtatggatgcccagaggtgggaagaagtggacataagtgtgcattgcgacgtccacattttcaattggctcattaaatatatcaaacgaaacaccaaagagaataaggattgtgagatgccaactttggaacccggcaacgttattagcattttgatctccagcgagttcctcaaaatggacagtcttgttgagcagtgtatccagtattgccataagaacatgaacgcaattgttgccactccctgtaacatgaattgtattaacgccaatttgttgacaaggatcgcggacctgtttagtcataacgaagtggacgatctgaaggataaaaaggacaagttcaaatcaaagctgttctgcaagaagatcgagcggctgtttgatccagaatacttgaatcccgacagccggtcaaatgccgcaactctgtacagatgctgtttgtgcaaaaagctgctgaccaaggaaaccgaacgcaggatcccttgcatccctggcaagatcaatgtggaccgccgcggaaatatcgtctatatccatatccgagataagacttgggacgtgcatgagtacctgaactcattatttgaggaattgaagagctggcgggatgtgtattggcggctgtggggtacaatcaattggctcacatgttcccgctgctatcaggcctttttgtgcattgagtttagtcactgccaatatcactccgagactgtggtgtatccgaccgcagcgtcatccctaaacacagtcggtaccggcatctatccctgctgtaaccagaaggtcctgaggttcgatcccacccagctgaccaaagggtgcaaagtcagagatcacatggtgactctgcgagaccaaggcgaggggggagatttgcctagctgtccaaccgctcgtatgttggacgatctgcacaagtatagggacgtgattgtcgtgccattctcaaaagatacagtgtccgacgtcggagtgggattgtgtgacgaaaagggaattgagtgtgatgtactgcttgaacctaataccccttggggtcccaagacaggtgaactgaatgcctttctttcgctcaagaactggaccctccagttgaagcagcagagcctcttctccgaggaggaggaatataccacaggatccgaggtgactgaggatgaggtgggggatgaagaagaggtgagcaagaagcaacgcaagaaggagaaacctaagaagtttacccgtcagcctaagaagcaggtcagttctccatgtgcacagagaaaggagaaggcgcttgagaaaagcgctagcagggacgtgagcccgttcgtcatgtccatgcagaagaataagtgggatgccactcgcagtcttcggttcaaccaagacgcacaaagggaagacgaccagcgacggatgacagagataacgggacacctcatcaagatgcggctgggcgacctggatagggtgaagagcaaggaggcaaaagagttcgctggcggaatttatagccgtctggaagcccagataaaggcatcagtgccggtgtccgcccgccagagcagttccgagaaaaacacacggtctaaaagtagattcggacagggtcggccggcttag

SEQ ID NO: 327571 - DNA, 2157 bp, Artificial Sequence
  derived and/or modified sequence
atgagccggggctacagcgagaacaacaacttcctgaacaacaacaatcagatggttcttgatatgatcctgtatccactcataggcatcccacaaacaatcaactgggagacaattgctaggctcgtccccggccttacaccaaaggaatgcgccaaaaggttcgacgagctgaaaagtagcggttctagcccagtagataaccagtacaattccctgatggctgctggtgaatcccccgtcgagacacttgctacctacatcaagtcgagcttactggatatccatggcgagttccaggagacccctgttggtcacgatgctgtctctaagacaggacgacactccattgcttccacccgcaactgctcctccgagtctgaaaattgtaccacccataatggcggcgagatgaccgaggaatcggaaggcccaaacatggtgatccatgtctgcgacgaggccaagaatcttaaggaggactttacgtgcccacgggacttgctgataagcgaaatgaaatatttcgcagaatatctatccatggacgcgcagcggtgggaggaggtcgatatatccgtccactgtgacgtgcatatttttaattggctgataaaatacatcaaaaggaacacaaaggagaataaggactgtgaaatgcccacattggagcccggtaacgtgattagcatcttgatcagctccgagttcttaaaaatggatagcctcgtcgaacagtgtattcaatattgccataagaacatgaacgccatcgtagccacaccttgcaacatgaattgtatcaatgcaaaccttctgacgagaatcgcagatctgttttcccacaatgaagttgatgatctgaaagacaaaaaggataagtttaaatcaaagctgttttgtaagaaaatcgagcgcctcttcgatcctgagtacctaaacccagattctagatccaacgctgccaccctgtatcggtgctgtctttgcaaaaagcttctgaccaaagagaccgagagaagaatcccttgcattcccggcaaaataaacgtggatagacggggcaacatcgtctatatacacatccgggacaagacatgggacgttcacgagtatctcaatagcctcttcgaggaactgaagtcttggagggacgtgtactggcgcttgtggggaaccatcaactggctgacctgcagccgttgctaccaggccttcctgtgcatagaattcagtcactgccagtaccactccgaaactgtcgtataccctactgctgcgtcttctctcaatacagtcggcacgggcatctacccatgttgtaatcagaaagttctgagattcgatccaacacagctgaccaaggggtgtaaagtgcgcgatcatatggtgaccctaagggaccaaggggaaggtggagacttaccaagttgtcctaccgcccggatgctggatgacctccacaagtatagagacgttatcgttgtgccgttctccaaggataccgtgtccgatgttggggtgggactgtgtgacgaaaagggcatagaatgtgatgtgctcctcgagccaaacactccatgggggcccaagactggcgagctgaacgcgtttctgagtcttaagaactggaccctgcagttaaagcaacagtccttattctctgaggaggaagaatatacaacaggcagcgaggtcacggaggatgaggtaggggatgaagaggaggtgtccaaaaagcaaaggaagaaggagaagccaaagaagtttactcgccagccaaagaagcaggtgagttctccttgtgctcagcggaaagaaaaagctctagagaagtctgcgtcccgggacgtttccccctttgttatgtctatgcagaagaacaaatgggatgccacccgctccctccgctttaatcaagacgcccagcgcgaagatgatcagcggagaatgaccgaaatcacaggccacctcatcaagatgcggctcggggatttagacagagtgaaatcaaaggaagcaaaggaatttgctggaggcatctactccagactggaggcgcagatcaaagcatcagtgccagtgagcgcccggcagtcaagtagcgagaaaaacacaaggagtaaatccagatttggtcaaggccgccccgcctag

SEQ ID NO: 327572 - DNA, 2157 bp, Artificial Sequence
  derived and/or modified sequence
atgagccggggctacagcgagaacaacaacttcctgaacaacaacaaccagatggtgctcgacatgatcctgtaccctttaattggcatccctcagactattaattgggagacaattgctcgacttgttccaggtctgacaccaaaggagtgtgccaaaaggtttgatgaattaaaaagtagcggctcctctcccgtcgataaccagtacaattccctgatggcagccggggagtctcccgtcgaaactcttgcaacctacataaaatcctccctgctggatatacacggagaatttcaggagacccctgtagggcatgacgcagtatctaaaaccggcaggcattccattgcttccaccaggaactgtagcagcgagtccgagaattgcacaacacacaatgggggcgaaatgaccgaggaatctgagggccctaatatggtcattcacgtttgtgacgaggcaaagaatctgaaggaagactttacatgtccccgagatctgctaatctccgaaatgaaatactttgccgaatatctctctatggacgcccaacggtgggaggaggtggatatcagcgtacattgcgatgtccatatcttcaactggctcatcaagtatatcaagaggaacacaaaggagaacaaagactgcgaaatgccaacactagaacctggcaatgtcatctcaattctgatttctagcgaatttctgaagatggattccctggtggagcaatgcatccagtactgccacaaaaatatgaatgccatcgtggctactccctgcaatatgaactgtataaacgccaacctactgactagaattgccgatctctttagccacaacgaagtggatgacttaaaagataagaaggacaagtttaagtcaaaattattttgcaaaaagatcgagcgactctttgacccagaatacctgaatcctgattcaagaagcaatgccgccacattgtacagatgctgtctctgcaagaagttactgaccaaggaaaccgaacggcggatcccctgtatcccagggaagattaacgttgatcggcgcggaaacatagtgtatatacatattagggacaagacttgggacgtgcatgaatatctcaattctctcttcgaggagctcaagagctggcgggacgtgtactggaggctgtggggaaccatcaattggctaacctgctcaaggtgctaccaagccttcctgtgcattgagttctcccattgtcagtaccactcagagacagttgtttatcctactgctgcatcatctcttaacaccgttggcactggcatttatccatgctgtaaccagaaagtccttcgattcgaccccacgcaattgacaaaggggtgcaaggtacgagaccatatggtgacactgcgagaccagggagaggggggcgacttgccatcttgcccgaccgcgcgcatgctggacgacctacataaatacagggacgtcattgtggttccattcagcaaggataccgtaagcgacgttggagtgggactttgcgacgaaaaaggaattgagtgtgacgttctgcttgagcccaacactccttggggcccaaagactggagagctgaacgcgtttctttccttgaagaattggacacttcagctgaaacagcagtccttgttttctgaagaagaagagtatacaaccggatccgaggtgacggaagatgaggtaggggacgaggaggaggtttccaaaaagcagcgcaagaaggaaaaacccaaaaaattcactagacaacctaaaaaacaggtcagcagcccttgcgcgcagcgaaaggagaaggccctcgaaaagagcgcgagcagggatgtcagtcccttcgttatgtccatgcagaaaaataaatgggacgccacgaggagtctgagatttaatcaggacgcgcaacgggaggatgaccagaggagaatgaccgagataacaggtcatctcattaagatgagactgggcgatctggaccgggttaagtccaaggaagcaaaggaatttgcaggtgggatttattctaggctggaggcacagatcaaggcctccgtgccagtcagtgcgcgacagtcctcctcagagaaaaacactcgatccaaatcacgctttggtcagggccgtcccgcctag

SEQ ID NO: 327573 - DNA, 2157 bp, Artificial Sequence
  derived and/or modified sequence
atgtcaagaggctactctgagaacaacaactttctcaataataacaaccagatggtgcttgacatgattctctatcctcttatcgggattccccagaccataaattgggaaacgattgcccgacttgtgcctggcctgacaccaaaagagtgcgcgaaaagatttgacgagctaaaatcgagcggcagttctcccgtcgacaaccagtacaacagccttatggctgctggcgaaagcccagttgagacactcgcgacctatatcaagagttctctgttagatatacatggggaatttcaggagacaccggtgggccatgatgcagtgtccaagaccggccgtcactctatagccagtacgcggaattgcagtagcgaatccgaaaactgtaccactcataacggtggcgaaatgaccgaagaatccgaggggccaaatatggtgatacatgtgtgcgatgaagcgaagaacctcaaggaggatttcacgtgtcctagggatcttctgatctccgagatgaagtacttcgcagagtacctgtccatggacgctcagcgatgggaggaggtggacatctctgtgcactgtgacgtccacatcttcaattggctcatcaagtacataaaacgcaatacaaaagagaacaaagactgcgagatgcccacactggaacctgggaacgtaatctctatcttgatttcatctgagttcctgaaaatggatagcctggtagagcagtgcatacaatactgccacaagaacatgaatgccatcgtggccactccatgcaacatgaactgcatcaacgccaacctcctgaccaggattgcggatctcttttcccacaacgaagtcgatgatttgaaagataagaaggataagttcaagtctaaactgttttgtaagaagatagaaagattattcgacccagagtacctgaatcccgactcccgctccaatgccgcaactctataccgttgctgtctctgtaaaaagcttttaacaaaggaaacagaacgtcgtatcccttgtataccagggaagatcaacgttgacaggcgagggaacattgtatacatccacatcagggacaaaacctgggatgtacacgagtatcttaatagcctctttgaagaactcaagtcctggcgggacgtatattggcgcctatgggggaccatcaactggctgacctgctccagatgttatcaggcgttcctttgcatcgaatttagtcactgccagtatcatagcgagacggtagtctaccctacagccgctagcagtcttaacacagtcgggaccgggatctatccttgttgcaaccagaaagtgctgcgctttgaccccacacagttaacaaaaggttgtaaagtgcgggatcatatggtgaccctgcgagaccagggtgaagggggtgacctgccaagttgcccaactgctcgaatgcttgacgatctccataagtatcgggatgtgattgttgtgcccttctccaaggacaccgtctccgacgtcggagtggggctgtgcgatgaaaaaggcattgaatgcgacgtcctactcgaaccaaacaccccttggggacctaaaacgggagagcttaacgccttcctgtccttaaaaaactggacactgcagctgaagcagcagagcctgttcagcgaagaagaggagtatactaccggttcagaggttaccgaagacgaggtaggcgacgaagaggaagtcagtaaaaagcaaaggaagaaagaaaagccaaaaaagtttaccaggcagccaaagaaacaggtcagtagcccatgcgcccagcgtaaagagaaggctctagagaagtccgcgagccgtgatgtgtctccctttgtgatgtcaatgcagaaaaataaatgggacgctacaaggagtctaagattcaatcaggacgctcaacgagaggatgatcagagaaggatgaccgagatcaccggacacctcataaagatgcggttgggagatctggatcgagtaaagtcaaaagaggcgaaagagtttgccggtgggatttattcccgcttggaggcccagattaaagccagcgtgcctgtgagcgccagacaatcctcaagtgaaaagaatacccggtccaagagcagattcgggcagggccgtcccgcatag

SEQ ID NO: 327574 - DNA, 2157 bp, Artificial Sequence
  derived and/or modified sequence
atgtccagaggctacagcgagaataataatttccttaacaacaacaaccagatggtacttgacatgatcctctatcccctgatcggtattccccagaccatcaattgggaaaccatcgcgagacttgttcccggactcacccccaaggaatgtgcgaaacggtttgatgaactgaaaagctcaggaagcagccccgtggataaccagtacaactctctgatggctgccggagagtcaccagtggagaccctagcgacatatatcaagtcctccttgttggacattcatggggagttccaggaaactccagtcggccatgacgcggtatcaaagactggacgacattctattgcctccacccgcaactgctcttctgaatcagagaactgcactacgcataacgggggagagatgaccgaggaatcagaaggcccaaacatggttattcatgtgtgtgacgaggccaaaaacctgaaagaggattttacatgccccagggatctgctgatctccgagatgaagtactttgctgagtacttatcgatggatgcacagaggtgggaggaagtagacatcagcgtgcactgcgatgttcatatattcaactggctgattaaatatataaaacgcaacactaaggagaacaaggattgcgagatgcccactttggaaccgggaaatgttattagtattctgattagtagtgagtttctgaagatggacagcctggtggagcagtgcatacagtattgccataaaaacatgaacgcaatcgttgccaccccttgcaacatgaactgtattaatgcaaatctgctgacacgaattgccgatctttttagccacaacgaggtggatgacttgaaagataagaaggataagttcaagagcaagctgttctgtaaaaaaattgagagacttttcgatccagagtacctgaatcccgacagtcggtccaatgccgctacgctttatcgatgctgtctgtgtaaaaagcttttgactaaggaaactgagagaagaatcccctgcatacctggtaaaattaatgttgataggcgaggcaatatcgtttatatccatataagggataagacctgggatgtccatgaatacctaaatagtctgttcgaggagttaaaaagttggagggacgtctattggcggctgtggggcaccatcaactggttgacatgctcacgttgctatcaagccttcctatgtatcgaattctctcactgccagtatcattctgagaccgtggtgtatcctaccgctgcatcctccctgaatactgtgggtaccggcatctacccttgctgcaaccagaaggtactgcgcttcgaccccactcagcttaccaaaggctgcaaagtgcgggatcatatggtaacactgcgggaccaaggcgaggggggagacctccccagctgtccaaccgcacgcatgctagatgacctgcacaagtacagagacgtgatagttgtgccattcagcaaagacactgtatcagatgtaggcgtgggactgtgcgacgaaaagggcattgagtgcgacgtgctcctggagccgaataccccctggggtcccaagacgggggagctcaacgcatttctgtctcttaaaaactggaccctgcaactgaagcagcagtctttattttctgaagaggaggaatataccacaggctcagaggtgaccgaggacgaggtgggcgacgaggaggaagtgagcaagaaacaacggaagaaagagaaaccaaagaagttcacccgccagcccaagaagcaagtaagcagtccctgcgcacagcgcaaagaaaaagccctggagaagagcgcttccagagatgttagcccattcgtgatgagcatgcagaagaataagtgggatgccactcggagcctgcgtttcaaccaagacgcccaacgggaggacgatcagcgaagaatgaccgagatcaccggacacctgatcaaaatgaggctaggagacctcgaccgagtgaaatccaaagaggctaaggaatttgccggaggcatttactcaaggctggaagcacaaatcaaagcatctgttcccgtctctgcacgccagtcttcctctgaaaagaacacaagatcaaaaagtagattcggccagggcagacctgcctag

SEQ ID NO: 327575 - DNA, 2157 bp, Artificial Sequence
  derived and/or modified sequence
atgtcgcggggttactctgagaataataacttcctgaacaacaataatcagatggtcctcgatatgatattgtaccctctgattggcataccccagacaattaattgggaaaccattgcccgacttgtgcctggattaactccaaaagagtgtgctaagaggtttgatgagctaaagtcatctggcagctcccctgtggacaaccaatacaatagcctaatggccgctggcgaatctccagttgagactcttgccacatatatcaagtcatcattgctcgacattcacggtgagttccaggagactccagtgggacatgatgccgtgtccaagaccggcagacacagcatcgcgagcacgcgcaactgctcctctgagagcgaaaattgtacaacccataatgggggagaaatgaccgaagaatcagaaggcccaaatatggttatccacgtatgtgacgaggccaagaacctgaaagaggatttcacctgtcctagagatctgctcatttcggaaatgaaatactttgctgaatatcttagcatggatgcacagcgttgggaggaggtggatatctcagttcattgtgacgtgcacattttcaactggctgatcaaatatattaagcgaaacaccaaagagaacaaggactgcgaaatgccaactctggagccagggaacgtcatcagcatcctgatttcttccgagtttctgaaaatggactcattggttgaacagtgcatccagtactgtcacaaaaacatgaatgccatcgtggctaccccgtgtaacatgaattgtattaatgccaatcttcttacccggattgccgatctgttctcacataacgaagtcgacgacctaaaggataagaaagacaagtttaagtctaaattgttttgtaagaagattgagcggctgttcgatccagaatacctaaatcctgatagccgctcaaatgctgcaacattgtacagatgctgcctatgtaaaaagctcctcacaaaggaaacggagagacgtattccatgcattccgggaaaaatcaatgtggaccggcgtgggaacattgtgtacatccatattcgtgataagacctgggacgtccatgagtacctgaactcgttgttcgaagaactgaaaagttggcgggatgtctattggagactgtgggggaccattaactggctcacatgtagcagatgttatcaagcttttctgtgtattgaattttcgcactgccagtaccactctgagacagtggtatatcctacagctgccagttcactaaacacggtgggaaccgggatctacccttgctgtaatcagaaagtgttgagattcgaccccacccagctcacaaagggctgtaaggtcagggaccacatggtaaccctaagagatcaaggtgagggtggggacctgccaagctgccccaccgctagaatgctcgacgacctgcacaaatatagagatgtgatcgttgtgcccttttcaaaggacaccgtgtctgatgtcggagttggtttgtgcgacgaaaaaggcattgaatgcgacgttcttctagaaccgaacaccccttgggggccaaaaactggggaactgaatgccttcttgtctctcaaaaactggacacttcagctcaaacagcagtcccttttctctgaggaagaggaatacaccactggctctgaggtgactgaagacgaggttggtgatgaggaagaagtaagtaagaagcaacgaaagaaagaaaagcctaaaaaattcacccgccagcctaagaagcaggtctcctccccttgtgctcagcggaaagaaaaggcgctcgagaaatccgctagtcgcgacgtaagtcccttcgtaatgagtatgcagaagaacaagtgggacgctaccagatccttgagattcaatcaagacgcacagagggaagatgaccagcgaagaatgacagaaattacgggccacttaatcaagatgcggctgggtgatctggatagggtgaaatctaaagaagccaaggaatttgcaggcggaatttactccaggttagaagctcagattaaagcttccgttcccgtgtccgccagacagtcttcttctgaaaaaaacacccggagtaagtcgaggttcgggcagggcaggcccgcatag

SEQ ID NO: 327576 - DNA, 2534 bp, Artificial Sequence
  derived and/or modified sequence
acccgcccggtccatgtccctgcagaccgtcccgcccgcgcacagcggcgggaaccccagcttctgcgcgcccggccgcgccccgggcctctgccccgcctcgctcccgctgcccggcgcctttgtccgctctgcgcccctggagtttctgtgcctccacgggcgggagcggggcgcgaaggtctgggggtgccccgaggacgcgccgcgtagtgagcctccgggcccaagatgaggaaattgaggcacagagattaactaatctgaaccagataatgccataagtagtagaactgcgatgcaaacttggacagtctgactccagagtctgcacacttaaccactccactattctggccttctacaagttccaaaagatgagtcgtggatattcagaaaacaacaatttcctgaacaataataaccaaatggtattggacatgatcctttatccattaattggaatccctcagactatcaactgggaaactatagcaaggctcgtgcctggattaacaccaaaagagtgtgcaaaaaggtttgatgaattaaagagcagtggaagctcgcctgttgacaaccagtataattccctaatggctgctggagagagtcctgttgaaactttagccacatatatcaaatcctcacttcttgacatacatggagaatttcaggagactccagttggacatgatgcagtttccaaaactggaagacatagtatagcttccacaaggaattgttcttcagaaagtgaaaattgtactactcataatggtggagaaatgactgaagaatctgaagggccaaacatggtgatccatgtgtgtgatgaagcaaaaaacttgaaagaagattttacttgcccgcgagatcttttgatatcagaaatgaagtactttgctgaatatttatctatggatgcccagcgctgggaagaggtggacatttcagttcattgcgacgttcacattttcaactggttgataaaatacattaaaaggaacactaaggagaataaagattgtgagatgcccactttagagccaggaaatgtcatttcaattcttatttcttcggagtttttaaaaatggattcactagttgaacagtgtattcagtattgccacaaaaatatgaatgccatagtagctaccccatgcaacatgaactgtattaatgcaaatcttctcacacgtatagctgatctgttctcacacaatgaagttgatgatttaaaggacaaaaaagataaatttaaaagcaaacttttttgtaagaagattgaaagactgtttgatcctgagtacttgaatccagattctcggagtaatgcagcaacattgtatagatgctgtttgtgtaagaaacttttaacaaaagaaacagaaagaagaattccttgcattcctggaaaaatcaatgtggatcgacgtggaaatattgtctatattcacataagagataagacatgggatgttcatgagtatttgaatagtcttttcgaagaattaaaatcttggagagatgtatactggcgattgtggggaacaatcaattggctgacttgttcaagatgttatcaggcctttctctgtattgaattttcacattgtcaataccactcagaaacagtggtttatcctactgcagcaagttcattgaatactgttggcactggaatttatccctgctgtaaccaaaaggttcttcggtttgatcctactcagcttacaaagggctgtaaagtgagggaccacatggttacacttcgtgatcaaggtgaaggcggagatttgccgtcctgtcccactgctagaatgttggacgatttgcacaagtacagagatgtcattgttgtgcctttttcaaaagatacagttagtgatgttggggttggcctctgtgatgaaaagggtatagaatgtgatgttttactggagccaaatacaccatggggtcccaaaactggggagctcaatgctttcttgtcattgaaaaactggactctacaactgaaacaacagtcactgttttcagaagaagaagaatataccactggatctgaggtcactgaagatgaagttggagatgaagaagaagtatccaagaaacaaaggaaaaaggagaagccaaagaagttcactagacaaccaaaaaagcaggtatcttcaccctgtgcccagaggaaagaaaaggcattggagaagtcagcttctagagatgtgtctcctttcgttatgagtatgcagaagaataagtgggatgccacaagatccttgagattcaaccaggatgcacaaagagaagacgatcaacggcgaatgactgaaattacagggcacctaataaaaatgagattgggggatctggaccgagtcaagtcaaaggaagcaaaagaatttgcaggaggtatttattccaggctggaagcacaaatcaaggcctcagtgccagttagtgcacgccaaagcagctcagagaaaaacacaaggtctaaaagtcgttttggtcaagggcgtcctgcataa

SEQ ID NO: 327577 - DNA, 4516 bp, Artificial Sequence
  derived and/or modified sequence
gggctcggtagcggcagcttcagggcgcgagcgcgggcggtgccgaccactgcaggtaacagaggcgctgcgagggcagccgcggccctgtggagatgaggaaattgaggcacagagattaactaatctgaaccagataatgccataagtagtagaactgcgatgcaaacttggacagtctgactccagagtctgcacacttaaccactccactattctggccttctacaagttccaaaagatgagtcgtggatattcagaaaacaacaatttcctgaacaataataaccaaatggtattggacatgatcctttatccattaattggaatccctcagactatcaactgggaaactatagcaaggctcgtgcctggattaacaccaaaagagtgtgcaaaaaggtttgatgaattaaagagcagtggaagctcgcctgttgacaaccagtataattccctaatggctgctggagagagtcctgttgaaactttagccacatatatcaaatcctcacttcttgacatacatggagaatttcaggagactccagttggacatgatgcagtttccaaaactggaagacatagtatagcttccacaaggaattgttcttcagaaagtgaaaattgtactactcataatggtggagaaatgactgaagaatctgaagggccaaacatggtgatccatgtgtgtgatgaagcaaaaaacttgaaagaagattttacttgcccgcgagatcttttgatatcagaaatgaagtactttgctgaatatttatctatggatgcccagcgctgggaagaggtggacatttcagttcattgcgacgttcacattttcaactggttgataaaatacattaaaaggaacactaaggagaataaagattgtgagatgcccactttagagccaggaaatgtcatttcaattcttatttcttcggagtttttaaaaatggattcactagttgaacagtgtattcagtattgccacaaaaatatgaatgccatagtagctaccccatgcaacatgaactgtattaatgcaaatcttctcacacgtatagctgatctgttctcacacaatgaagttgatgatttaaaggacaaaaaagataaatttaaaagcaaacttttttgtaagaagattgaaagactgtttgatcctgagtacttgaatccagattctcggagtaatgcagcaacattgtatagatgctgtttgtgtaagaaacttttaacaaaagaaacagaaagaagaattccttgcattcctggaaaaatcaatgtggatcgacgtggaaatattgtctatattcacataagagataagacatgggatgttcatgagtatttgaatagtcttttcgaagaattaaaatcttggagagatgtatactggcgattgtggggaacaatcaattggctgacttgttcaagatgttatcaggcctttctctgtattgaattttcacattgtcaataccactcagaaacagtggtttatcctactgcagcaagttcattgaatactgttggcactggaatttatccctgctgtaaccaaaaggttcttcggtttgatcctactcagcttacaaagggctgtaaagtgagggaccacatggttacacttcgtgatcaaggtgaaggcggagatttgccgtcctgtcccactgctagaatgttggacgatttgcacaagtacagagatgtcattgttgtgcctttttcaaaagatacagttagtgatgttggggttggcctctgtgatgaaaagggtatagaatgtgatgttttactggagccaaatacaccatggggtcccaaaactggggagctcaatgctttcttgtcattgaaaaactggactctacaactgaaacaacagtcactgttttcagaagaagaagaatataccactggatctgaggtcactgaagatgaagttggagatgaagaagaagtatccaagaaacaaaggaaaaaggagaagccaaagaagttcactagacaaccaaaaaagcaggtatcttcaccctgtgcccagaggaaagaaaaggcattggagaagtcagcttctagagatgtgtctcctttcgttatgagtatgcagaagaataagtgggatgccacaagatccttgagattcaaccaggatgcacaaagagaagacgatcaacggcgaatgactgaaattacagggcacctaataaaaatgagattgggggatctggaccgagtcaagtcaaaggaagcaaaagaatttgcaggaggtatttattccaggctggaagcacaaatcaaggcctcagtgccagttagtgcacgccaaagcagctcagagaaaaacacaaggtctaaaagtcgttttggtcaagggcgtcctgcataaagtaccttaaaatataagtaaaaagagagaaggcactcttctggacatctgaaattgctcacttcttgaagatcttcagaacaatgacttccaactgttttatgttattattattttaatccacataaatcataattctaaaagaaatgcatagttaggttttatgaaaatctaattgtaaatatgaaactttttaaatctgattttcttctaatatcattctaggctatgtagaaagcaattatttacaaatttgcatagttgagactcccagtgttttcctttatttatttgaaaaagaaaggcctaaactgtcaggtagccaagtttttttaagaccttaaaagttaggggaacacaactggtagtgttaccatgcatggcactgattgtagtatgtctttggagctgtaaatcttgagatagcattgagaactgcaggttgtgtgacgaaattcccaatgatgctaattttaagtctgcatgaatattaaggagtgacaggtctcaagactgcattaaatgaagtttcagggtaaggtatttcagtactgtgttgggcagaagggttaatttttttcagcattatatcgtggaaagtacaatgttaatccaacttttttttctttcagtttttaatgcttatctattgatcatctgagctggaattactgattattactctgtcctctgtgaaactagtggcattctgaatttggtaaaataaccattgatagttttaggatagtaaatcatttctgttatatgagacacccactgtacagttctcagggctctaaaacccaaccatatttctgtaaccattcaaataactccttaaaacagttatacttgctagttcggtctaaaattttccaaatacattagataggtgaaaatttgcatatattcaagaaaaatcaaaataaaattctattttataaatcatgtttaaatttttctagccaggcagaaagagtgctcagggaaaatttgttccaaactataaccatataataaattatgtgtttgtaaattatatgtaggtctctgaaaaactttaagatgcactgtttctatttttttaagtcttaatttgccttataactgacatttcttcaaattattcagagaacagactttaataatgtgtgacaaaagagcaatttccattgaaatattgaagtgttacactcagtttacacgtacagaaatcattctttttagtgagtcttttagttgataaatgaagctagatgttatttgataactggctttgccaaggtttttgaactgctgtttagaaattttgttcccatttatatttgtttcaattgtttgatactgtggaaatagacttttattttcgaaagaaaatgtcttgtagtacatattatatgtaagtactctgttaaataccagagttttttttgtagtttactgtgttttctgattaaaggatttggatttgtacatgtaaacagtgctgtaatggtcacgactagataaggaaaaaatatatatgctcttttgatttttaactgatggtaaaaaggcaaactgcttctcccctgggaggcctataccactgaattaatttttacaaaccagagtttatcagaatttgattctcttcagaatgcttttggccaggtgtagtggctcacgccagtaatcccagcactttgggaggccgaggcgggcagatcacctgaggtcaggagtttgagaccagcctggccaacgtggtgaaaccctatctctactaaaaatacaaaaagattagccaggcatggtggcatacacctgtagtcccagctactcgggaggctgaggcacaagaattgtttgaacccgggtggcagaggttgcagtgagctgagatcatgtttctgcgctcctagcctgggtgacagagcaagactccatctcaatttaaaacaaaaaaagaatgtgtttttaattttgttaatgtttgtctgttatacatagcactggtaccgcaaacattttacttaaactcttaatagcatttctttcgccagatactttaatatttcaccttacattaatcctggattcacatttctttaattgaaataaatgttaatgacaaaa

SEQ ID NO: 327578 - DNA, 4294 bp, Artificial Sequence
  derived and/or modified sequence
tcttccctatccctagttccaaaagatgagtcgtggatattcagaaaacaacaatttcctgaacaataataaccaaatggtattggacatgatcctttatccattaattggaatccctcagactatcaactgggaaactatagcaaggctcgtgcctggattaacaccaaaagagtgtgcaaaaaggtttgatgaattaaagagcagtggaagctcgcctgttgacaaccagtataattccctaatggctgctggagagagtcctgttgaaactttagccacatatatcaaatcctcacttcttgacatacatggagaatttcaggagactccagttggacatgatgcagtttccaaaactggaagacatagtatagcttccacaaggaattgttcttcagaaagtgaaaattgtactactcataatggtggagaaatgactgaagaatctgaagggccaaacatggtgatccatgtgtgtgatgaagcaaaaaacttgaaagaagattttacttgcccgcgagatcttttgatatcagaaatgaagtactttgctgaatatttatctatggatgcccagcgctgggaagaggtggacatttcagttcattgcgacgttcacattttcaactggttgataaaatacattaaaaggaacactaaggagaataaagattgtgagatgcccactttagagccaggaaatgtcatttcaattcttatttcttcggagtttttaaaaatggattcactagttgaacagtgtattcagtattgccacaaaaatatgaatgccatagtagctaccccatgcaacatgaactgtattaatgcaaatcttctcacacgtatagctgatctgttctcacacaatgaagttgatgatttaaaggacaaaaaagataaatttaaaagcaaacttttttgtaagaagattgaaagactgtttgatcctgagtacttgaatccagattctcggagtaatgcagcaacattgtatagatgctgtttgtgtaagaaacttttaacaaaagaaacagaaagaagaattccttgcattcctggaaaaatcaatgtggatcgacgtggaaatattgtctatattcacataagagataagacatgggatgttcatgagtatttgaatagtcttttcgaagaattaaaatcttggagagatgtatactggcgattgtggggaacaatcaattggctgacttgttcaagatgttatcaggcctttctctgtattgaattttcacattgtcaataccactcagaaacagtggtttatcctactgcagcaagttcattgaatactgttggcactggaatttatccctgctgtaaccaaaaggttcttcggtttgatcctactcagcttacaaagggctgtaaagtgagggaccacatggttacacttcgtgatcaaggtgaaggcggagatttgccgtcctgtcccactgctagaatgttggacgatttgcacaagtacagagatgtcattgttgtgcctttttcaaaagatacagttagtgatgttggggttggcctctgtgatgaaaagggtatagaatgtgatgttttactggagccaaatacaccatggggtcccaaaactggggagctcaatgctttcttgtcattgaaaaactggactctacaactgaaacaacagtcactgttttcagaagaagaagaatataccactggatctgaggtcactgaagatgaagttggagatgaagaagaagtatccaagaaacaaaggaaaaaggagaagccaaagaagttcactagacaaccaaaaaagcaggtatcttcaccctgtgcccagaggaaagaaaaggcattggagaagtcagcttctagagatgtgtctcctttcgttatgagtatgcagaagaataagtgggatgccacaagatccttgagattcaaccaggatgcacaaagagaagacgatcaacggcgaatgactgaaattacagggcacctaataaaaatgagattgggggatctggaccgagtcaagtcaaaggaagcaaaagaatttgcaggaggtatttattccaggctggaagcacaaatcaaggcctcagtgccagttagtgcacgccaaagcagctcagagaaaaacacaaggtctaaaagtcgttttggtcaagggcgtcctgcataaagtaccttaaaatataagtaaaaagagagaaggcactcttctggacatctgaaattgctcacttcttgaagatcttcagaacaatgacttccaactgttttatgttattattattttaatccacataaatcataattctaaaagaaatgcatagttaggttttatgaaaatctaattgtaaatatgaaactttttaaatctgattttcttctaatatcattctaggctatgtagaaagcaattatttacaaatttgcatagttgagactcccagtgttttcctttatttatttgaaaaagaaaggcctaaactgtcaggtagccaagtttttttaagaccttaaaagttaggggaacacaactggtagtgttaccatgcatggcactgattgtagtatgtctttggagctgtaaatcttgagatagcattgagaactgcaggttgtgtgacgaaattcccaatgatgctaattttaagtctgcatgaatattaaggagtgacaggtctcaagactgcattaaatgaagtttcagggtaaggtatttcagtactgtgttgggcagaagggttaatttttttcagcattatatcgtggaaagtacaatgttaatccaacttttttttctttcagtttttaatgcttatctattgatcatctgagctggaattactgattattactctgtcctctgtgaaactagtggcattctgaatttggtaaaataaccattgatagttttaggatagtaaatcatttctgttatatgagacacccactgtacagttctcagggctctaaaacccaaccatatttctgtaaccattcaaataactccttaaaacagttatacttgctagttcggtctaaaattttccaaatacattagataggtgaaaatttgcatatattcaagaaaaatcaaaataaaattctattttataaatcatgtttaaatttttctagccaggcagaaagagtgctcagggaaaatttgttccaaactataaccatataataaattatgtgtttgtaaattatatgtaggtctctgaaaaactttaagatgcactgtttctatttttttaagtcttaatttgccttataactgacatttcttcaaattattcagagaacagactttaataatgtgtgacaaaagagcaatttccattgaaatattgaagtgttacactcagtttacacgtacagaaatcattctttttagtgagtcttttagttgataaatgaagctagatgttatttgataactggctttgccaaggtttttgaactgctgtttagaaattttgttcccatttatatttgtttcaattgtttgatactgtggaaatagacttttattttcgaaagaaaatgtcttgtagtacatattatatgtaagtactctgttaaataccagagttttttttgtagtttactgtgttttctgattaaaggatttggatttgtacatgtaaacagtgctgtaatggtcacgactagataaggaaaaaatatatatgctcttttgatttttaactgatggtaaaaaggcaaactgcttctcccctgggaggcctataccactgaattaatttttacaaaccagagtttatcagaatttgattctcttcagaatgcttttggccaggtgtagtggctcacgccagtaatcccagcactttgggaggccgaggcgggcagatcacctgaggtcaggagtttgagaccagcctggccaacgtggtgaaaccctatctctactaaaaatacaaaaagattagccaggcatggtggcatacacctgtagtcccagctactcgggaggctgaggcacaagaattgtttgaacccgggtggcagaggttgcagtgagctgagatcatgtttctgcgctcctagcctgggtgacagagcaagactccatctcaatttaaaacaaaaaaagaatgtgtttttaattttgttaatgtttgtctgttatacatagcactggtaccgcaaacattttacttaaactcttaatagcatttctttcgccagatactttaatatttcaccttacattaatcctggattcacatttctttaattgaaataaatgttaatg

SEQ ID NO: 327579 - DNA, 372 bp, Artificial Sequence
  derived and/or modified sequence
atgtacgagatcgccgcccccaacgtggccttcatgaccctgagaagcatgtgcaacaccagcaagatggtgacctgcgccaagatcttcttctacttcctggtgttcttcagcctgagccagaacgtgcccaccatcggcgtgatcgccgtggtgctggccacccacctgtgcgacgaggtgagcctggccggcttcggctacgacctgaaccagcccagaacccccctgcactacttcgacagccagtgcatggccgccatgaacttccagaccatgcacaacgtgaccaccgagaccaagttcctgctgaagctggtgaaggagggcgtggtgaaggacctgagcggcggcatcgacagagagttctag

SEQ ID NO: 327580 - DNA, 372 bp, Artificial Sequence
  derived and/or modified sequence
atgtacgagattgcagccccaaacgtggcctttatgaccctgcgctcaatgtgtaacactagtaaaatggtgacgtgcgcgaaaatttttttctacttccttgtgtttttcagcctttctcaaaatgtgcccactatcggggttatcgctgtggtcctcgctacccacttgtgtgatgaagtgtccctggctggtttcggttatgatctcaatcagccaagaacccctctccactattttgattcccaatgtatggccgccatgaattttcagactatgcataatgtgacaaccgagaccaaatttctgctaaagctggtcaaggaaggtgttgtgaaagacctgagcggtggtattgatcgggagttctag

SEQ ID NO: 327581 - DNA, 372 bp, Artificial Sequence
  derived and/or modified sequence
atgtatgaaattgctgcccccaacgtggccttcatgaccctgcgctccatgtgcaacaccagcaagatggtgacctgtgccaagatcttcttctacttcctggtgttcttcagcctgagccagaatgtgcccaccatcggcgtgattgctgtggtgctggccacccacctgtgtgatgaggtgtccctggccggcttcggctatgacctgaaccagcccaggacccccctgcactactttgacagccagtgcatggccgccatgaacttccagaccatgcacaacgtgaccacagagaccaagttcctgctgaagctggtgaaggagggcgtggtgaaggacctgagcggcggcatcgaccgggagttctag

SEQ ID NO: 327582 - DNA, 372 bp, Artificial Sequence
  derived and/or modified sequence
atgtacgagatcgccgcccccaacgtggccttcatgaccctgcggagtatgtgcaacacgtccaaaatggtgacatgtgccaagattttcttctatttcttggtgttcttttcactaagccagaacgtgcccaccatcggcgtgatcgcggtggttctggccacacacctctgcgatgaggtttctttggcgggctttgggtacgatttgaaccagcctaggaccccactgcattatttcgatagtcagtgtatggccgccatgaacttccagaccatgcataatgttacgaccgagaccaaatttttgttgaaacttgtgaaggaaggggtggttaaggatctgtcaggcggcatcgacagggaattttag

SEQ ID NO: 327583 - DNA, 372 bp, Artificial Sequence
  derived and/or modified sequence
atgtatgaaattgctgccccaaacgtggctttcatgacgctgcggtccatgtgcaatactagcaagatggtcacatgtgcaaaaattttcttttactttttggttttcttttcactgagccagaatgtccccacaattggagtgattgccgtagtcctggcaacacatctgtgtgatgaggtttctctggcagggttcgggtatgacttgaaccagcctcggacccctctgcattattttgactcccaatgcatggcagcaatgaatttccagacaatgcacaacgtaacgaccgagacaaaatttctcctaaaattggtaaaggaaggggtagtcaaagacctcagcgggggaattgacagggagttctag

SEQ ID NO: 327584 - DNA, 2194 bp, Artificial Sequence
  derived and/or modified sequence
tttaccaataatcaaataaaagcaaattagagccacaatagtatttttgcccattttcttagcaaagacttaaaagtttgataatgtccttgtttggcaggaatgtaggtagaatgatcagctggcactttttctggaggatattttggcaatattaaaccattttaaatacgaatcatctctgacccaccaattttacactaaaaacattattacaaggaaattagagaaatttataaagatggatattctaggatgtacactatagcattaacagcagaggactaaaaacagcctaaatgttcattattatgggattgtttaaacaaattatgataaagtcaatgcagtattgtctgttaaggatgaagaatataggaaaacacctccatagtatattaagtgagaaaataaacatacaaaacactaggctgggcgcggttgcagacgcctgtaatcccagcactttgggaggctgaggcgggcagatcacctgaggtcaggagttcgagaccagcctgaccaacatggagaaaccctgtctctactaaaaataaaattagccaggcgtggtggcgcgtgcctgtaatttcagcctcctgagtagctgggactacaggcgtgtgccaccacacctggctaaattttgtatttttagtagagacagggtttcaccatattggccaggctggtctcaaactcttgacctcgtgatccgcccacctcggcctcccagagtgctgggattacaggcgtgagccaccgcacctggcctagaaggggaataccttttaacttggtgtaagaattgtcaggctgccccttgaaagtgtgtgaacatcacagaccatgttttagagcctagattcctgacttaaatggagagttggactctaaagttcatgatgtataaaattatgtgatgtatgaaattgcagcccccaatgtagctttcatgactctgcgtagcatgtgtaataccagcaaaatggtgacttgtgccaaaatttttttttactttttggtcttcttttccctttctcagaacgtccccacaatcggtgtcattgccgttgtcttagccacacatctgtgcgatgaagtcagtttggcgggttttggatatgacctcaatcaacccagaacacctttgcactacttcgacagtcaatgcatggctgctatgaactttcagaccatgcataatgtgacaacggaaaccaagttcctcttaaagctggtcaaagagggagtggtgaaagatctcagtggaggcattgatcgtgaattttgaacacagaaaacctcagttgaaaatgcaactctaactctgagagctgtttttgacagccttcttgatgtatttctccatcctgcagatactttgaagtgcagctcatgtttttaacttttaatttaaaaacacaaaaaaaattttagctcttcccactttttttttcctatttatttgaggtcagtgtttgtttttgcacaccattttgtaaatgaaacttaagaattgaattggaaagacttctcaaagagaattgtatgtaacgatgttgtattgatttttaagaaagtaatttaatttgtaaaacttctgctcgtttacactgcacattgaatacaggtaactaattggaaggagaggggaggtcactcttttgatggtggccctgaacctcattctggttccctgctgcgctgcttggtgtgacccacggaggatccactcccaggatgacgtgctccgtagctctgctgctgatactgggtctgcgatgcagcggcgtgaggcctgggctggttggagaaggtcacaacccttctctgttggtctgccttctgctgaaagactcgagaaccaaccagggaagctgtcctggaggtccctggtcggagagggacatagaatctgtgacctctgacaactgtgaagccaccctgggctacagaaaccacagtcttcccagcaattattacaattcttgaattccttggggattttttactgccctttcaaagcacttaagtgttagatctaacgtgttccagtgtctgtctgaggtgacttaaaaaatcagaacaaaacttctattatccagagtcatgggagagtacaccctttccaggaataatgttttgggaaacactgaaatgaaatcttcccagtattataaattgtgtattt

SEQ ID NO: 327585 - protein, 114 aa, Artificial Sequence
  derived and/or modified sequence
MYYKFSGFTQKLAGAWASEAYSPQGLKPVVSTEAPPIIFATPTKLTSDSTVYDYAGKNKVPELQKFFQKADGVPVYLKRGLPDQMLYRTTMALTVGGTIYCLIALYMASQPKNK

SEQ ID NO: 327586 - DNA, 345 bp, Artificial Sequence
  derived and/or modified sequence
atgtactacaagttcagcggcttcacccagaagctggccggcgcctgggccagcgaggcctacagcccccagggcctgaagcccgtggtgagcaccgaggccccccccatcatcttcgccacccccaccaagctgaccagcgacagcaccgtgtacgactacgccggcaagaacaaggtgcccgagctgcagaagttcttccagaaggccgacggcgtgcccgtgtacctgaagagaggcctgcccgaccagatgctgtacagaaccaccatggccctgaccgtgggcggcaccatctactgcctgatcgccctgtacatggccagccagcccaagaacaagtag

SEQ ID NO: 327587 - DNA, 345 bp, Artificial Sequence
  derived and/or modified sequence
atgtattacaaatttagtggttttactcaaaaactggcaggtgcctgggcttccgaggcctattcaccacagggcctcaagcccgtcgtgtcaactgaggccccccccatcatattcgcaacaccaactaagctgacctcagacagcactgtgtacgattatgccggtaagaataaggtgcctgaactgcaaaagttcttccagaaagccgacggagtgccagtttacttaaagcgcggactccccgatcagatgctctacagaacgacaatggctcttaccgtgggtggcactatttactgtttgatagcgctgtatatggcctcacagcccaaaaataaatag

SEQ ID NO: 327588 - DNA, 345 bp, Artificial Sequence
  derived and/or modified sequence
atgtactacaagttcagcggcttcacccagaagctggccggggcctgggccagcgaggcctacagcccccagggcctgaagcctgtggtgtccacagaggccccacccatcatctttgccacccccaccaagctgaccagtgacagcacagtgtatgactatgccggcaagaacaaggtgcctgagctgcagaagttcttccagaaggcagatggagtgcctgtgtacctgaagaggggcctgcctgaccagatgctgtaccgcaccaccatggccctgactgtgggcggcaccatctactgcctgattgccctgtacatggccagccagcccaagaacaagtag

SEQ ID NO: 327589 - DNA, 345 bp, Artificial Sequence
  derived and/or modified sequence
atgtactacaagttcagcggcttcacccagaagctggccggcgcctgggcttccgaggcctattcgccccaggggttaaaaccagtggtatcaactgaggctcctcccattatctttgctacccctacaaaactgacatcggacagcacagtgtacgattatgccggaaaaaataaggtgcccgagttgcagaagttttttcagaaggccgacggggtgcccgtatacttgaagaggggtcttcccgatcagatgctgtaccggacaactatggcgctaacagtgggcggaacaatttactgccttatcgccctctacatggcctcccaaccaaagaacaagtag

SEQ ID NO: 327590 - DNA, 345 bp, Artificial Sequence
  derived and/or modified sequence
atgtactataagttttcaggtttcacccaaaaacttgcgggtgcctgggcgtcagaagcctactccccgcagggcctgaaacctgttgtgtctaccgaggctcccccaatcatattcgcaaccccaacgaaattaacgtccgatagtacagtgtatgattacgctggcaagaataaagttcccgagcttcagaaattctttcaaaaggcagacggcgtcccagtatatctgaagaggggtctgccggaccaaatgctgtaccgaaccactatggctctcactgtgggcggtaccatttattgccttattgccctgtacatggcatcccagcccaagaataaatag

SEQ ID NO: 327591 - DNA, 345 bp, Artificial Sequence
  derived and/or modified sequence
atgtattataaattttctggatttacccaaaagctcgcaggcgcttgggcatctgaggcctactctccacagggcttgaaacctgtggtgagtacagaagccccaccaataatcttcgccacccccaccaagcttacgagtgatagtaccgtttacgattatgctggcaaaaacaaggtgcccgagctccaaaagtttttccagaaagccgacggcgtgcccgtgtatctcaaaagaggactccctgaccaaatgctctatcgcacgacaatggcattgacagtgggcggcaccatctattgtctcatcgccctgtacatggcctcgcagcctaagaacaaatag

SEQ ID NO: 327592 - DNA, 345 bp, Artificial Sequence
  derived and/or modified sequence
atgtactacaagttcagcggcttcacccagaagctggccggcgcctgggcctccgaggcctactccccccagggacttaagccagttgtatccacggaggcacccccaatcatctttgccactcctacaaagctcacgtccgattctacagtctacgactatgccggaaagaataaagtgccagagctgcagaaattctttcagaaagcagatggtgtgcctgtttacttgaaaagggggcttcctgaccagatgctttacaggactacgatggccttaacagtgggtggcaccatatactgcctaattgctctgtatatggcctcccaacctaaaaacaagtag

SEQ ID NO: 327593 - DNA, 345 bp, Artificial Sequence
  derived and/or modified sequence
atgtactacaaatttagtgggttcacgcaaaagctcgctggggcttgggcctctgaagcttattctccacagggcctgaaacctgttgtcagtactgaagcgcctcccatcatcttcgctactcctacgaaactcacatccgactcaactgtgtacgactacgcagggaaaaacaaagtgccagagctgcagaagttttttcagaaggccgacggggtgcctgtgtacttgaagagagggcttccagatcagatgctgtatcgcaccacaatggctttgacagtgggaggtacgatctattgcctcatcgccttatacatggcgtctcagccgaaaaacaagtag

SEQ ID NO: 327594 - DNA, 1112 bp, Artificial Sequence
  derived and/or modified sequence
cttctctggggcggtcgcgttggcagcggatgcgggaagccggactctgggcgtcatgtactacaagtttagtggcttcacgcagaagttggcaggagcatgggcttcggaggcctatagcccgcagggattaaagcctgtggtttccacagaagcaccacctatcatatttgccacaccaactaaactgacctccgattccacagtgtatgattatgctgggaaaaacaaagttccagagctacaaaagtttttccagaaagctgatggtgtgcccgtctacctgaaacgaggcctgcctgaccaaatgctttaccggaccaccatggcgctgactgtgggagggaccatctactgcctgatcgccctctacatggcttcgcagcccaaaaacaaatgagttaggctgcagaggactggtttgttttttggcataaaccctttgaagttcctttttcattgttaaattaaaatttttttttttacttggatggcttaacatttttgcaagaaaaataggaagatatgaagatgatgttttggtttgtttatgaaatgcatatggcttgtcagagctcattcgacagttaaagccattgtttaaagaaatggtgctttgctctgtgtttgtgctcctgatttccctggaggttctggatgaaggctgaacacaggcttgttaatgtcagtctgtgctgaggacctcagggacttgaggttgcatttttgagcatggggtgcaggagcctttctggatttggatgtggctatggaaagaacacagaagccaaggtcatgtgcatgaaatgaggagtttgagttagtcacctcggggattttttccattttgcagtaaaatgttaaattaatgtagcctgcctctatttgttgggcaggtaatttcaaagggttatttgcctcatctcctatctttagtgaaatcttatgtgtaattattccaccgtgggaacagagaatacctgtttagtgttgcactttagactggtgtctgttttgttaatgcagctgtgccacaaattctcctttatcttttaaaaatgttatagctttaaattttgatttattttgactgtggaataaatacatgaatg

SEQ ID NO: 327595 - DNA, 3056 bp, Artificial Sequence
  derived and/or modified sequence
agaatggtaaacacagcagcagagctaccacacacttcccttctgggagcggtggggaaagcagccagggaggtcgggagatggacggaaactgctggggatgtgagaagcctggggcactaactggagttgttattgacttggttgccaggggaagcttggccgacaagtctatactcctgggcagactgagcaacagcaggtggtggcttctggataagaggtgctctaggtcggaaggaaataaatgagactacgatcagttaaagttcggtaaagcaagagacgccttcaacccgacgaccagacggtggctccgcagcacagactctctcggatggtggaattcccaaccggcttcgatgtagccccgcccctacccagaccacgcccaccaatcaccgccctctcccccccaggccccgcctggagcccgcccctcctaaagcatgctccacctgactccgacactgccgggcttagtccgccgggcttagtccgtggagcgcttgcgcatttcttgagttgtcgtggcactgcccaaatctgaatgggggaaagagggaacttcatatttcctacagactccgccacagcgactttgcgtgctctcttagagctggttttgcctttcgtggtcctgagaaccctggcttttggttccccaatgcggcttaagtgtgcaggttttaagttaggcgatcttcgggcagccctagtcccagcaccgggtccttgcgctgagtctcgggaccacagccggggaggcggggtccttctctggggcggtcgcgttggcagcggatgcgggaagccggactctgggcgtcatgtactacaagtttagtggcttcacgcagaagttggcaggagcatgggcttcggaggcctatagcccgcagggattaaagcctgtggtttccacagaagcaccacctatcatatttgccacaccaactaaactgacctccgattccacagtgtatgattatgctgggaaaaacaaagttccagagctacaaaagtttttccagaaagctgatggtgtgcccgtctacctgaaacgaggcctgcctgaccaaatgctttaccggaccaccatggcgctgactgtgggagggaccatctactgcctgatcgccctctacatggcttcgcagcccaaaaacaaatgagttaggctgcagaggactggtttgttttttggcataaaccctttgaagttcctttttcattgttaaattaaaatttttttttttacttggatggcttaacatttttgcaagaaaaataggaagatatgaagatgatgttttggtttgtttatgaaatgcatatggcttgtcagagctcattcgacagttaaagccattgtttaaagaaatggtgctttgctctgtgtttgtgctcctgatttccctggaggttctggatgaaggctgaacacaggcttgttaatgtcagtctgtgctgaggacctcagggacttgaggttgcatttttgagcatggggtgcaggagcctttctggatttggatgtggctatggaaagaacacagaagccaaggtcatgtgcatgaaatgaggagtttgagttagtcacctcggggattttttccattttgcagtaaaatgttaaattaatgtagcctgcctctatttgttgggcaggtaatttcaaagggttatttgcctcatctcctatctttagtgaaatcttatgtgtaattattccaccgtgggaacagagaatacctgtttagtgttgcactttagactggtgtctgttttgttaatgcagctgtgccacaaattctcctttatcttttaaaaatgttatagctttaaattttgatttattttgactgtggaataaatacatgaatgaaaaattttaagtttgaagttctttgaatgacctttcagagtaatttcagaacaccagcagcatcttaaacctgagtctaatttctttcttgttaattaggcaccagataatctttataaaatggttcttaaaagtctagtaataggagtcttaatggcatattgatgattaccacatggttttttataaaaacctgcctgccccttagtgaaaggtacctgtaactcacagttcatttagacactaatttcctttgctgtcatgattggtagacttcacttaccctatattaattttgaaaaaaggtggaattttattatatatgaaggaatagtttgtatcttaccatagcacagaacagtgacctcttgctcaggataagatgtggtgatttgaaaatactcaatagtagccttgcagtgatatctctctctctctctctctgcaaatctaaattttattctctggtatttcctccaagtttttattttgaaaattttcagactacagaaggactaagcatagtacaatatacacctgtatatccttcacttagatcaccagttatcaatatattggcacctttgctttttcttgttctctcacacaggcacacacaatgcatatatgcacacacacatagatctgttttttgttgagtcatttaagattgttagggaattatgataaatcagccatagtactttagcaggtatcttctgagtaaggacatgtgttcctttataaccataatgcagttgtcagactcaataaagttaacatttataacaatactaccatctaatacatagtttactttcagatttccccaggtgttctaataatgagttcttcatagttgtgtttttaaaaaataacagctttattgggatataatttacatactgtacagttcacctcaagtgtacaattcattggtttttactgtatttggagttgtacagccaccatgagaatcaattttagaacacttatatcaccctaaaaagaaaccccatacccattagcaatcacttgccttccctcccaccatcccaactcccacctcctagcccaaagcaagcactcatctactttcagtctctatggatttgtctttcctggacatttcatataaatataatcatatgatgtgtgatgtacgtga

SEQ ID NO: 327596 - protein, 1507 aa, Artificial Sequence
  derived and/or modified sequence
MGTALLQRGGCFLLCLSLLLLGCWAELGSGLEFPGAEGQWTRFPKWNACCESEMSFQLKTRSARGLVLYFDDEGFCDFLELILTRGGRLQLSFSIFCAEPATLLADTPVNDGAWHSVRIRRQFRNTTLFIDQVEAKWVEVKSKRRDMTVFSGLFVGGLPPELRAAALKLTLASVREREPFKGWIRDVRVNSSQVLPVDSGEVKLDDEPPNSGGGSPCEAGEEGEGGVCLNGGVCSVVDDQAVCDCSRTGFRGKDCSQEDNNVEGLAHLMMGDQGKSKGKEEYIATFKGSEYFCYDLSQNPIQSSSDEITLSFKTLQRNGLMLHTGKSADYVNLALKNGAVSLVINLGSGAFEALVEPVNGKFNDNAWHDVKVTRNLRQHSGIGHAMVTISVDGILTTTGYTQEDYTMLGSDDFFYVGGSPSTADLPGSPVSNNFMGCLKEVVYKNNDVRLELSRLAKQGDPKMKIHGVVAFKCENVATLDPITFETPESFISLPKWNAKKTGSISFDFRTTEPNGLILFSHGKPRHQKDAKHPQMIKVDFFAIEMLDGHLYLLLDMGSGTIKIKALLKKVNDGEWYHVDFQRDGRSGTISVNTLRTPYTAPGESEILDLDDELYLGGLPENKAGLVFPTEVWTALLNYGYVGCIRDLFIDGQSKDIRQMAEVQSTAGVKPSCSKETAKPCLSNPCKNNGMCRDGWNRYVCDCSGTGYLGRSCEREATVLSYDGSMFMKIQLPVVMHTEAEDVSLRFRSQRAYGILMATTSRDSADTLRLELDAGRVKLTVNLDCIRINCNSSKGPETLFAGYNLNDNEWHTVRVVRRGKSLKLTVDDQQAMTGQMAGDHTRLEFHNIETGIITERRYLSSVPSNFIGHLQSLTFNGMAYIDLCKNGDIDYCELNARFGFRNIIADPVTFKTKSSYVALATLQAYTSMHLFFQFKTTSLDGLILYNSGDGNDFIVVELVKGYLHYVFDLGNGANLIKGSSNKPLNDNQWHNVMISRDTSNLHTVKIDTKITTQITAGARNLDLKSDLYIGGVAKETYKSLPKLVHAKEGFQGCLASVDLNGRLPDLISDALFCNGQIERGCEGPSTTCQEDSCSNQGVCLQQWDGFSCDCSMTSFSGPLCNDPGTTYIFSKGGGQITYKWPPNDRPSTRADRLAIGFSTVQKEAVLVRVDSSSGLGDYLELHIHQGKIGVKFNVGTDDIAIEESNAIINDGKYHVVRFTRSGGNATLQVDSWPVIERYPAGNNDNERLAIARQRIPYRLGRVVDEWLLDKGRQLTIFNSQATIIIGGKEQGQPFQGQLSGLYYNGLKVLNMAAENDANIAIVGNVRLVGEVPSSMTTESTATAMQSEMSTSIMETTTTLATSTARRGKPPTKEPISQTTDDILVASAECPSDDEDIDPCEPSSGGLANPTRAGGREPYPGSAEVIRESSSTTGMVVGIVAAAALCILILLYAMYKYRNRDEGSYHVDESRNYISNSAQSNGAVVKEKQPSSAKSSNKNKKNKDKEYYV

SEQ ID NO: 327597 - DNA, 4524 bp, Artificial Sequence
  derived and/or modified sequence
atgggcaccgccttactccaacgcggaggctgcttcctcctctgtctatcactacttctcctgggttgttgggctgagttgggatccggacttgagtttccaggggccgaaggccagtggacgcggtttcctaagtggaatgcctgttgtgaatccgaaatgagcttccagctcaaaactagatcagcccgtggacttgtactgtacttcgatgatgagggtttctgtgactttttagagcttatactcacgagaggcggcaggctccagctttcattctcaatcttttgtgctgagcccgctaccctccttgctgacacaccggtaaacgatggcgcatggcactccgtccggatccgtcggcagtttcggaacacgactctttttatcgatcaagtggaggctaaatgggtggaagtgaagtcaaagaggcgcgatatgacagtgttttccggattatttgtgggaggcctaccacctgaactgcgagcggcggcattgaaattaactctggcgagcgtacgcgagcgcgaaccgtttaagggatggataagagacgtgcgggtgaacagcagccaggtgctgcccgtggatagcggcgaggttaagctggatgatgagcctcccaacagtggaggtggatccccgtgcgaggcaggggaggaaggggaagggggggtatgcctcaatggaggcgtctgctccgtcgtcgatgaccaagcagtctgcgactgctcaagaactggatttcgcggcaaggactgcagccaggaagacaacaacgtggaagggcttgcccacctgatgatgggggatcagggtaagagcaaagggaaagaggagtatattgctacgttcaagggtagcgagtacttctgctacgaccttagccagaatcctatacaatcttcatctgacgagataactttgtctttcaagacccttcaaagaaacggtcttatgctgcacactgggaagagtgccgattatgtgaatttggctctgaagaacggagcagtgagcttggtgataaacctgggaagtggggctttcgaggctctagtcgaaccagtaaatggcaaatttaatgataacgcgtggcatgatgtaaaagtgacccggaatcttcgacagcatagtgggatcgggcacgcgatggtgaccatctctgttgatggcatcctgaccacaacaggttatacacaggaagactacacaatgcttgggagcgatgacttcttttatgttggcggaagtccctcgacagccgacctcccaggatctccagtctcaaataactttatgggctgcctcaaggaagtggtttataagaacaacgacgtgcggctggagctctctcgcctcgccaagcagggtgatccaaaaatgaagatacacggcgtcgtggctttcaaatgtgaaaacgtagccacattggatccaatcaccttcgaaacccccgagtcctttattagcctgcccaagtggaacgccaaaaagacaggatccattagcttcgacttccgaacaactgagcccaacggactgattttgttttctcacggcaaaccacggcaccaaaaggacgctaagcaccctcaaatgataaaggtggactttttcgcaatcgagatgctcgacggccacctatacttattgctagatatgggtagtggcactatcaagatcaaagccctcctgaaaaaagtgaacgacggtgagtggtaccatgtggactttcagcgcgacggtaggagcggaaccattagcgtaaataccttgcgaacgccttataccgcccctggagaaagcgagatcttagacctcgacgacgagctctaccttggcggactgccagagaataaggccggcttagtgttcccaacagaggtatggacagctctactgaattatgggtacgtgggatgcatcagggacttatttatcgacgggcagtctaaggacatcagacaaatggccgaggtgcagagcaccgccggcgtgaaaccctcttgtagtaaggaaacagccaaaccttgtctcagtaatccgtgtaaaaataacggcatgtgtagggatggctggaaccgttatgtatgtgactgtagtggaaccggctacctggggaggtcttgtgagagagaagccactgttctgtcatacgatggctcaatgtttatgaaaatccagctgccggtcgtcatgcacacagaagctgaagatgttagtctcagattccgcagccagcgggcctatggcattctgatggcaacgaccagccgcgacagcgccgatactctgcggctcgaacttgatgccggtcgggtgaaacttacagtgaatctggactgcatacgcattaattgtaatagctccaaagggcctgagactctgttcgccggctataatttgaatgataatgaatggcatactgtgagagtagtcagaaggggtaagagtctgaaactgaccgttgacgatcaacaggcaatgaccggccaaatggctggggatcatacacgcctggaattccacaatatcgaaacagggataattacagaaagaagatatctgagcagtgtcccaagcaattttatcggacacctccagtcgctgacgttcaatgggatggcctacattgatttgtgtaaaaatggggatatagattactgcgagttgaacgcaaggttcggattccgaaatatcatcgcagaccccgtgacattcaagaccaaatccagttatgtggccctggcaactcttcaggcctatacttccatgcatctgttcttccaattcaaaactacaagcctggacggtttgatcctgtacaactctggtgacggaaacgattttatcgttgtggaactcgtgaaggggtacttacactacgtcttcgatctcggcaatggggcgaacctaattaaggggtctagcaataagcctctgaacgataaccagtggcataacgtgatgataagccgggatacctctaacttacacacagtgaaaatcgatactaaaattacaactcaaattaccgccggcgcgcggaatttggacctgaaaagtgacttgtacattggaggggtcgcaaaagaaacctataagtctcttccgaagctggtacacgcaaaggagggtttccagggatgtttggcatcagtggacctaaacggacggctccctgatctcataagtgacgcattgttttgtaacgggcagatagaacgagggtgtgaggggcccagtacaacctgtcaggaagactcttgcagcaaccagggtgtatgtctgcagcaatgggatggattcagctgcgattgttccatgacttctttttctgggcccttgtgtaatgaccccggaactacctacatcttttctaaagggggagggcagattacttacaaatggcccccaaatgaccgcccctctacccgagcagacagattggccatcggcttttccaccgtgcagaaggaagctgtccttgtgcgcgtggatagcagctcgggactgggggattacctggaactgcatatacatcagggcaaaataggcgtgaagtttaatgtaggaaccgatgacatcgccattgaggaatctaatgccattataaacgacggaaagtatcacgttgtgaggttcacccgatctgggggaaatgccacactgcaagtcgactcctggccagtgattgagcgatatccagctggtaacaatgataatgaaagattggctattgctagacaaaggatcccctatcgacttggccgggtggtggacgagtggctcctcgataagggtaggcagctgacaatcttcaacagtcaggccaccatcatcatcggaggaaaggagcaaggacaacccttccaaggccagctgtccggcctatattataacggcttgaaggtacttaatatggctgcagaaaatgatgccaatattgcgatagtgggcaacgtgcgacttgtgggagaggtccccagctctatgacaaccgagagtaccgccaccgctatgcaaagcgaaatgtctacctctatcatggaaacaacgactaccctggcgacttccaccgcccgacggggcaaaccgccaactaaggagcctatttctcagaccacagatgacatcctggtggcatctgctgagtgcccctccgacgatgaggacatagatccgtgtgaaccaagctcaggcggactggccaacccaactcgggcggggggaagggaaccatatccgggctctgctgaggtcatcagagaaagtagctctaccactggtatggtggtggggatagtggccgcagctgctttgtgtatcctgattctgctgtatgctatgtacaagtacagaaaccgggatgaggggtcctaccacgttgatgagagtcggaattacatcagcaacagcgcacaatcaaacggagccgtcgtgaaggagaagcagcctagcagtgctaaaagctccaacaaaaataaaaagaataaagacaaagaatactacgtgtag
